United States Patent Application Publication US 2009/0104218 A1 - sequence listing, part 3

SEQ ID NO: 7532 - protein, 185 aa, Streptococcus agalactiae
MLREKLSQDILTTREPGGVTISEEIRHIILDVKHTQMDKKTELLLYMAARRQHLVEKVLPALEEGKIVLMDRFIDSSVAYQGSGRGLDKSHIKWLNDYATDSHKPDLTLYFDVPSEVGLERIQKSVQREVNRLDLEQLDMHQRVRQGYLELADSEPNRIVTIDASQQLDEVIAETFSIILDRINQ

SEQ ID NO: 7533 - DNA, 510 bp, Streptococcus agalactiae
atggcgaaaaaagccatgaaagctaaaataaatagaaaaatgaatggtagtaaggtcacattttctaaatctagtgactttgtattgtctattgatccaaatggcaagtctgaattatttgtccaagagcgctataatgccttaaaagcgaactatcttcgacagcttaacggtaaagatttttatgctttcccaccaaagaagaacagtagtaattttgagcagataaatatggtattgagaaatacaaagattgttgaagacatggaaaaagtaaaagcaacagagaggttcttaccaactcatcctactggtcttctcaaaacaggaacaactgataggcaccaaaaaacatttgattcacaaacagatatttcgtttggaaaggactttatagaggtcagaattccgtggcagttgttgaatttttctgatccatcatctcaaaaaattcacgatgattactttaaacattatggtgtgaaggagttagaaattgagagcattctt

SEQ ID NO: 7534 - protein, 170 aa, Streptococcus agalactiae
MAKKAMKAKINRKMNGSKVTFSKSSDFVLSIDPNGKSELFVQERYNALKANYLRQLNGKDFYAFPPKKNSSNFEQINMVLRNTKIVEDMEKVKATERFLPTHPTGLLKTGTTDRHQKTFDSQTDISFGKDFIEVRIPWQLLNFSDPSSQKIHDDYFKHYGVKELEIESIL

SEQ ID NO: 7535 - DNA, 147 bp, Streptococcus agalactiae
  misc_feature 142, 143, 144, 145, 146: n = A,T,C or G
atggcttttttcgccattatgaatcccatttctaatttgccagcttttatggctttagtagctgatgatgatcagaagatttcacgtcggattgcagcaaaaggagtattacttgcttttgtcattatggaatctttgtatnnnnnt

SEQ ID NO: 7536 - protein, 49 aa, Streptococcus agalactiae
  VARIANT 48, 49: Xaa = Any Amino Acid
MAFFAIMNPISNLPAFMALVADDDQKISRRIAAKGVLLAFVIMESLYXX

SEQ ID NO: 7537 - DNA, 495 bp, Streptococcus agalactiae
  misc_feature 490, 491, 492, 493, 494: n = A,T,C or G
atgaaaaaaggactaatgatttcttttgagggcccagatggtgcgggtaaaacaaccgttttagaagctgttttacccttgctcagagaaaaattatcacaagatattctcaccaccagagagcctggtggcgtaactatttcagaagaaattcgtcatattattttagatgttaaacacacgcaaatggataaaaaaacagagctattgctttacatggctgctcgacgccaacatctagtggaaaaggtactcccagctctagaagaagggaaaatagtcctaatggatcgttttattgatagttctgttgcctatcagggatcaggaagaggattagataagtcacatataaaatggcttaatgactatgcgactgatagtcataaacctgatttamctttatattttgatgttccttctgaagtaggtttagagcgtattcaaaaaagtggttcaaagggaggtaaatcgtctagatctcgagcannnnnt

SEQ ID NO: 7538 - protein, 165 aa, Streptococcus agalactiae
  VARIANT 134, 164, 165: Xaa = Any Amino Acid
MKKGLMISFEGPDGAGKTTVLEAVLPLLREKLSQDILTTREPGGVTISEEIRHIILDVKHTQMDKKTELLLYMAARRQHLVEKVLPALEEGKIVLMDRFIDSSVAYQGSGRGLDKSHIKWLNDYATDSHKPDLXLYFDVPSEVGLERIQKSGSKGGKSSRSRAXX

SEQ ID NO: 7539 - DNA, 657 bp, Streptococcus agalactiae
atgccagtgaaagattttatgacaaaaaaattagtttatgtctctccagacactacagttgcagaagctgctgatttattgagagaacaccacttaaggcgtttgccagttgttgaaaatgatcagctattggggttagtgacagaagggacaatggcagaagcacaaccttctaaagcaaccagtctttctatatatgagatgaactatcttcttaataagacaaaaattcgagatattatgattaaagatattgtgactgtttcacagtatgctagccttgaggacgctatttatttgatgatgtctcgaaagatcggtgttttaccagtagttgataatggacaactttatgggattatcacggatagggatgtttttaaagccttccttgaaattgcggggtatggtcaagaaggttatcgcttggttatattagctgatgaggggataggggtactatcaaaagtcctaaatcgtctttctagtgcaaatttaagtgttaaacgtttagtcattattgaacgaaaagcaggtaagaaagcggtcgagatacaactagaaggatacgctgacaaggatgttttaaaacaagaactagtatttgatgatgttattgtggaaactttagaaaagaccgtgaaaaaaccactttct

SEQ ID NO: 7540 - protein, 219 aa, Streptococcus agalactiae
MPVKDFMTKKLVYVSPDTTVAEAADLLREHHLRRLPVVENDQLLGLVTEGTMAEAQPSKATSLSIYEMNYLLNKTKIRDIMIKDIVTVSQYASLEDAIYLMMSRKIGVLPVVDNGQLYGIITDRDVFKAFLEIAGYGQEGYRLVILADEGIGVLSKVLNRLSSANLSVKRLVIIERKAGKKAVEIQLEGYADKDVLKQELVFDDVIVETLEKTVKKPLS

SEQ ID NO: 7541 - protein, 708 aa, Streptococcus agalactiae
ATGACCATGTTGAAAGTAGAAAATCTATCTATTCATTATGGTGTTATTCAAGCTGTGAATGATGTCTCGTTTGAAGTTAACCAAGGTGAGGTTGTAACCTTAATTGGAGCCAATGGTACAGGAAAGACATCAATTTTGAGGACAATTTCTGGTTTAGTAAGACCAAGTCAGGGTTCTATTTCTTTTATGGGGAAACCTATACATAAGTTAGCAGCTAGAAAAATTGTTGGCAATGGTTTAGCTCAGGTTCCAGAAGGGCGCCATGTTTTCTCAAGTTTGTCTGTTATGGAAAATTTAGAAATGGGAGCCTTTCTTCAAAAGGATCGTGAACAAAATCAAAAAATGTTAAAAAAAGTGTTTGATCGTTTTCCTCGCTTAGAAGAACGTAAAAACCAAGATGCAGCAACCTTATCAGGTGGTGAGCAGCAAATGCTCGCTATGGGGCGTGCATTGATGAGTCGTCCTAAATTATTACTTTTAGATGAACCGTCAATGGGCCTAGCTCCAATTTTTATTCAAGAAATTTTTAATATCATTGAAGACATCAAAAAACAAGGGACTACAGTTCTTTTAGTTGAACAAAATGCAAATAAAGCTCTGACGATTGCTGATAAAGCATATGTTCTAGAGACTGGGAAGGTTGTTTTATCAGGGACAGGTAAGGAATTACTAGTTTCAGATCAAGTTCGTAAAGCTTACTTAGGTGGA

SEQ ID NO: 7542 - protein, 236 aa, Streptococcus agalactiae
MTMLKVENLSIHYGVIQAVNDVSFEVNQGEVVTLIGANGTGKTSILRTISGLVRPSQGSISFMGKPIHKLAARKIVGNGLAQVPEGRHVFSSLSVMENLEMGAFLQKDREQNQKMLKKVFDRFPRLEERKNQDAATLSGGEQQMLAMGRALMSRPKLLLLDEPSMGLAPIFIQEIFNIIEDIKKQGTTVLLVEQNANKALTIADKAYVLETGKVVLSGTGKELLVSDQVRKAYLGG

SEQ ID NO: 7543 - protein, 762 aa, Streptococcus agalactiae
ATGGCACTTCTTGAAGTAAAAAATTTAAGTAAACATTTCGGTGGCCTAACTGCTGTAGGTGATGTTTCGATGAAATTACATAAAGGTGAATTAATTGGCTTAATCGGCCCCAACGGTGCGGGTAAGACAACGCTTTTTAATCTCTTAACAGGAGTATACCTTCCTAGTAAAGGGACAATATCACTTGATGGTAAGATATTAAATGGGAGGAAACCAGCTAAAATAGCTTCTTTAGGTTTAGGTAGAACTTTTCAAAATATCCGACTTTTTAAAAATATGACTGTTTTAGACAATGTACTAGTAGGACTCAGTAATCATCACTTATCACATCCTATTGCTAGTTTTTTACGATTACCCAAATACTATCATAGTGAAAAAGCCTTAAGGAAAAAGGCACTAGAGCTATTAGAGATTTTTGGTTTGAAAGCATATCAAGATGCTCTTGCTAAGAACCTCCCTTATGGAAAACAACGGCGTTTAGAAATTGTTCGTGCTTTAGCAACAGAACCAAAAATATTGTTTTTGGATGAGCCCGCGGCAGGAATGAATCCTCAAGAAACTGCAGAATTGACGCAGTTAATTAGTCAAATAAAGAGTGATTTTGATATTACTATTATGCTAATTGAACATGATATGAACTTGGTTATGCAAGTAACAGAGAGAATTTATGTATTGGAATATGGTCGTCTGATTGCTCACGGGACACCTGAAGAAATTAAAAATAATAAACGTGTTATAGAAGCATACTTGGGGGGTGAGTTA

SEQ ID NO: 7544 - protein, 254 aa, Streptococcus agalactiae
MALLEVKNLSKHFGGLTAVGDVSMKLHKGELIGLIGPNGAGKTTLFNLLTGVYLPSKGTISLDGKILNGRKPAKIASLGLGRTFQNIRLFKNMTVLDNVLVGLSNHHLSHPIASFLRLPKYYHSEKALRKKALELLEIFGLKAYQDALAKNLPYGKQRRLEIVRALATEPKILFLDEPAAGMNPQETAELTQLISQIKSDFDITIMLIEHDMNLVMQVTERIYVLEYGRLIAHGTPEEIKNNKRVIEAYLGGEL

SEQ ID NO: 7545 - protein, 951 aa, Streptococcus agalactiae
ATGAAAGAAAATATGAAATCAATTTTATCTTGGTTAGCTATAGTAGTGTTAGGGTATCTCTTGATTAGCGTGCTAATATCTATGGGTATATTTAACCTCTATCATATTCAAATTATTGAAACAATTGGGATTAATGTTATTTTAGCAGTTGGTTTGAACCTAATTGTAGGTTGTTCGGGACAGTTTTCACTAGGACATGCAGGTTTCATGGCTATTGGCGCTTATGCAGTTGCTATTATCGGCGTTAAAATGCCAACTTATGTAGGTTTTTTGATAGCTATACTTGTTGGAACTCTTGTTGCAGGAGGTATTGCCTTAGGTGTAGGAATTCCTACTTTGAGACTAAAAGGTGATTATTTAGCTATAGCTACTTTAGGTGTTGCTGAGATTATCCGTATTTTGTTGGTTAATGGAGGTGATATTACGAATGGTGCTGCGGGTATCATGGGGATTCCGCCTTTTACAACCTGGTCTTTAGTTTATGGGGTGGCAGTTGTGAGTCTTATCCTTGCAATGAATTTTTTGCGTAGTCCCTTAGGGCGTAATACAATTGCTATACGAGAAGATGAAATTGCAGCAGAGTCTATGGGTGTGGATACAACAAAAGTGAAAGTAATTGTTTTTGTTTTTGGAGCTATTTTAGCTTCTATCGCTGGTAGTTTACAGGCTGGCTACGTTGGAACTGTTATGCCAAAAGACTTTTCATTTATGATGTCTGTCAATGTTTTAATTATTGTTGTTTTAGGTGGTTTAGGTTCAATGACAGGGACAGTTTTAGCAGCAATTTTATTAGGATTATTGAATATGTTACTACAAGACTACGCTTCTGTTCGAATGATTATCTATGCTTTAGCTCTGATTTTAATTATGATTTTTAGACCTAGCGGTTTATTAGGAACGAAGGAGTTAACTCTATCTCATCTATTTCGTAAGACGAGTAAGGGAGGCAAT

SEQ ID NO: 7546 - protein, 317 aa, Streptococcus agalactiae
MKENMKSILSWLAIVVLGYLLISVLISMGIFNLYHIQIIETIGINVILAVGLNLIVGCSGQFSLGHAGFMAIGAYAVAIIGVKMPTYVGFLIAILVGTLVAGGIALGVGIPTLRLKGDYLAIATLGVAEIIRILLVNGGDITNGAAGIMGIPPFTTWSLVYGVAVVSLILAMNFLRSPLGRNTIAIREDEIAAESMGVDTTKVKVIVFVFGAILASIAGSLQAGYVGTVMPKDFSFMMSVNVLIIVVLGGLGSMTGTVLAAILLGLLNMLLQDYASVRMIIYALALILIMIFRPSGLLGTKELTLSHLFRKTSKGGN

SEQ ID NO: 7547 - protein, 798 aa, Streptococcus agalactiae
ATGGTATATGGCATTATTAAGCTGATTAATTTTGCTCATGGGGACATCTATATGATGGGCGCTTTCATGGGCTATTATTTGATTAATCATCTTCATCTTAATTTTTTCCTAGCTTTATTAATTGCAATGCTGGGGTCTGCTTTCCTAGGTGCTGTAATTGAATATTTAGCTTATCGTCCACTGAGAAAATCAACTAGAATTGCCGCGTTAATTACAGCTATTGGTGTTTCTTTTCTTTTGGAGTACGGGATGGTATACCTTGTTGGAGCGGATACTAGGGCATTTCCGCAAGCCATTCATACTGTTAAATATAATTTAGGACCGATAACTATAACCAATGTTCAGCTCATCATTTTAGGTATTGCGCTATTACTAATGCTTACTTTACAGTTCATCGTTCAAAAAACTAAAATGGGGAAAGCTATGAGAGCTTTATCAGTGGATAGCGATGCCGCACAATTGATGGGAATTAATGTTAACCGTACCATTAGTTTTACATTTGCGCTGGGGTCTGCTTTAGCTGGAGCAGGTGGAGTACTGATTGGGCTTTATTATAATTCTGTTCAACCTCTTATGGGGGTAACTCCAGGGTTGAAAGCATTTGTTGCAGCTGTCTTAGGTGGTATTGGTATCATTCCGGGAGCGGCTATCGGTGGTTTTGTTATTGGCATTTTAGAAACTTTAGCGACTGCACTTGGTGTGTCAGATTTTCGAGATGGTATCGTTTATGCTATTTTAATTCTCATTTTCTTGATCCGTCCAGCAGGAATTCTTGGAAAAAATATTAAGGAGAAGGTC

SEQ ID NO: 7548 - protein, 266 aa, Streptococcus agalactiae
MVYGIIKLINFAHGDIYMMGAFMGYYLINHLHLNFFLALLIAMLGSAFLGAVIEYLAYRPLRKSTRIAALITAIGVSFLLEYGMVYLVGADTRAFPQAIHTVKYNLGPITITNVQLIILGIALLLMLTLQFIVQKTKMGKAMRALSVDSDAAQLMGINVNRTISFTFALGSALAGAGGVLIGLYYNSVQPLMGVTPGLKAFVAAVLGGIGIIPGAAIGGFVIGILETLATALGVSDFRDGIVYAILILIFLIRPAGILGKNIKEKV

SEQ ID NO: 7549 - protein, 992 aa, Streptococcus agalactiae
ATGAAGAATGGAGCTGACTTAGCAGTAAAAGAAATTAATGCTGCTGGAGGGGTTGGCGGCAAGAAGTTAAAAGTCCTATCACAGGATAATAAATCAGAAAATGCAGAGGCAGCAACGGTTGCCACAAACTTGGTTACCAAAGGAGCTAATGTCATTATCGGACCAGCAACATCGGGTGCAGCTGCATCTTCAACTCCAAAAGTAAATGCAGCAGCAGTTCCAATGATTGCACCTGCTGCGACACAAGACAATTTAGTCTATGGTTCTGATGGAAAAACCTTAAATCAGTATTTCTTCCGAGCTACTTTTGTCGATAATTATCAAGGAAAGCTATTGTCTCAGTATGCTACAGACAACCTTAAAGCTAAAAAAGTTGTTCTATTTTATGATAATTCATCAGATTACTCAAAGGGGGTAGCAAAATCATTTAAGGAAAGTTATAGTGGAAAAATTGTTGATAGCATGACATTCTCCGCTGGTGATACTGATTTCCAAGCGTCATTGACTAAGTTGAAAGGGAAAGAATATGATGCTATTGTGATGCCAGGTTACTATACCGAGACAGGATTAATAGTTAAGCAAGCGCGTGATTTAGGTATCTCTAAACCGGTTCTTGGGCCTGATGGTTTTGATAGTCCGAAATTTGTGCAATCGGCAACACCTGTGGGAGCTTCAAACGTTTATTATTTGACAGGTTTCACTACACAAGGTCAACCAAAGCTAAAGCTTTCCATGATCATTACGTTAAGGCATATGGTGAAGAACCATCCATGTTCTCGGCTTTATCATACGATGCCGTGTATATGGCAGCTAAATCTGCTAAAGGAGCTAAAACTTCAATTGATCTTAAAAAAGCTTTAGCTAAGCTGAAAGATTTTAAAGGTGTGACAGGGAAAATGTCTATTGATAAAAATCATAATGTTGTTAAATCAGCTTACGTTGTCAAATTAGACGATGGAAAAACAAGTAGCGTTAACATTATTTCAGCAAAA

SEQ ID NO: 7550 - protein, 331 aa, Streptococcus agalactiae
MKNGADLAVKEINAAGGVGGKKLKVLSQDNKSENAEAATVATNLVTKGANVIIGPATSGAAASSTPKVNAAAVPMIAPAATQDNLVYGSDGKTLNQYFFRATFVDNYQGKLLSQYATDNLKAKKVVLFYDNSSDYSKGVAKSFKESYSGKIVDSMTFSAGDTDFQASLTKLKGKEYDAIVMPGYYTETGLIVKQARDLGISKPVLGPDGFDSPKFVQSATPVGASNVYYLTGFTTQGSTKAKAFHDHYVKAYGEEPSMFSALSYDAVYMAAKSAKGAKTSIDLKKALAKLKDFKGVTGKMSIDKNHNVVKSAYVVKLDDGKTSSVNIISAK

SEQ ID NO: 7551 - DNA, 303 bp, Streptococcus agalactiae
ttgttggaattatgttataatcttagtaattacagatatgacgcagaaaggaaaaaattattgaataaacaagagcgtttaggaatgagcgtttatctttactataatcgtgacgctcgtaaattatataaatacggagatgttcattatcattctcgtagattaagatatctagtcatttatgttaataaagaggatattgttagcgttagtaaagagataaaacatttaaaatttgttaaggatgttcggttatcagcaattgatgatattgatcaggattttgttggaaacttatatcgc

SEQ ID NO: 7552 - protein, 101 aa, Streptococcus agalactiae; identical to SEQ ID NO: 2918

SEQ ID NO: 7553 - DNA, 234 bp, Streptococcus agalactiae
atgatccaccaaccaatgggtggaacaggcggaggcacacagcaatctgatatggctatcgctgctgagcatcttttaaaaacgcgtcatactttagaaaaaatcttagctgataattctggtcaatctattgaaaaagtccatgatgatgcagagcgtgatcgttggatgagtgctcaagaaacacttgattatggctttattgatgctattatggaaaataataatctacaa

SEQ ID NO: 7554 - protein, 78 aa, Streptococcus agalactiae
MIHQPMGGTGGGTQQSDMAIAAEHLLKTRHTLEKILADNSGQSIEKVHDDAERDRWMSAQETLDYGFIDAIMENNNLQ

SEQ ID NO: 7555 - DNA, 318 bp, Streptococcus agalactiae
atgattccagtagttattgaacaaacaagtcgtggtgaacgctcttatgatatttactcacgtcttttaaaagatcgtattattatgttgacaggccaagttgaggataatatggccaatagtatcattgcacagttattgtttctcgatgcacaagataatacaaaggatatttacctttatgtcaatacaccaggtggttcagtatcggctggacttgctattgtggataccatgaactttattaaatcggacgtacagacgattgttatggggatggctgcttcgatgggaaccattattgcttcgagttggtgc

SEQ ID NO: 7556 - protein, 106 aa, Streptococcus agalactiae
MIPVVIEQTSRGERSYDIYSRLLKDRIIMLTGQVEDNMANSIIAQLLFLDAQDNTKDIYLYVNTPGGSVSAGLAIVDTMNFIKSDVQTIVMGMAASMGTIIASSWC

SEQ ID NO: 7557 - DNA, 627 bp, Streptococcus agalactiae
atgggaaaatttcaagtcatttcacatccacttattcaacataaactgtcaatcttacgtcgcactacaacatctactaaagattttcgtgagttagttgatgagattgcgatgttaatgggctatgaagtgtctcgtgatttgcctttagaagatgttgaaatccaaacaccagtagcgacaactgtacaaaaacaattagctgggaaaaagttagcaattgttccaattttacgtgcaggtattggtatggttgatggtttcttaagccttgtgccagctgctaaagttggtcatatcggtatgtatcgtgatgaagagactttccaaccagtcgaatatttagttaagttacctgaagatattgatcaacgtcagatttttgtagttgatccaatgcttgctacaggtgggtctgctattttagcagtagattctctaaaaaaacgtggcgcagctagtatcaaattcgtttgtttagtagcagctccagaaggagtggcagcacttcaagaagcacatccagatgtagatatttataccgctgctttggatgaaaaactcaacgaacatggctacattgttcctggactcggagatgctggggatcgcttatttggtacaaaa

SEQ ID NO: 7558 - protein, 209 aa, Streptococcus agalactiae
MGKFQVISHPLIQHKLSILRRTTTSTKDFRELVDEIAMLMGYEVSRDLPLEDVEIQTPVATTVQKQLAGKKLAIVPILRAGIGMVDGFLSLVPAAKVGHIGMYRDEETFQPVEYLVKLPEDIDQRQIFVVDPMLATGGSAILAVDSLKKRGAASIKFVCLVAAPEGVAALQEAHPDVDIYTAALDEKLNEHGYIVPGLGDAGDRLFGTK

SEQ ID NO: 7559 - DNA, 1167 bp, Streptococcus agalactiae
atgattacatatgatttcacaagtttaccagaacgtttttcaagtaatgccataaaatggaaggcggttcaaaaagatcaagaaatccttcccctctggattgcggatatggattttcctatctttccagaaatgtcggaggctattgaagatttttcacaccaaatggtttttggctatgatagtcctaaagacagtttataccaagctatctctaattgggaagtgcaagaacatggttatcaatttgataaaaaatcattattattaattgatggggttataccagcgatttcagttgccatacaagccttcacaaaggagggagatgctgttctaattaataccccagtctatccgccttttgctagaactataaaatacaataatcgtcatttagtttcaaatagtttacttaataataatcagtattttgagattgactttaaacaattagaaaaagatatcattgaaaataatgtaaagctttatattttttgtagtccacataatcctggtggacgtgtctggacaaaaggagaaattcaaaaaataggagatatctgtaaacggtataatgttatcctcgtttctgacgaaatacatcaagatttggtattatttgataatgtacaccatagcttcaatactgttgattctagttttaaagaatttagtgttattttatctagtgcaactaaaacgtttaatattgcagggactaaaaatagttttgcaataattgaaaatgaaaagttacgctctgattttaagaagaggcaaatagctaacaatcaacaagaaatttcctcattggggttattagctacagaagttgcctttacaaaagggaaaaaatggttaaaggccctaaaaatggagttagaaggatcaatagaatacctttatgagcaattaacgcaaaaaactcatatcaaagtgatgaaaccagagggaacttatcttgtttggttagatttttctgcttataatttaacgcatttagaaattcaagaaaaacttcgatatgatgccaaattaatattaaatgatggtttaacttttggaaaagaagggaaaaaacatgctagaatcaatgtcgcagctcctaggtctgttattgaggaggcagttttgcgattagtgacaaactttagaaaaaatgac

SEQ ID NO: 7560 - protein, 389 aa, Streptococcus agalactiae
MITYDFTSLPERFSSNAIKWKAVQKDQEILPLWIADMDFPIFPEMSEAIEDFSHQMVFGYDSPKDSLYQAISNWEVQEHGYQFDKKSLLLIDGVIPAISVAIQAFTKEGDAVLINTPVYPPFARTIKYNNRHLVSNSLLNNNQYFEIDFKQLEKDIIENNVKLYIFCSPHNPGGRVWTKGEIQKIGDICKRYNVILVSDEIHQDLVLFDNVHHSFNTVDSSFKEFSVILSSATKTFNIAGTKNSFAIIENEKLRSDFKKRQIANNQQEISSLGLLATEVAFTKGKKWLKALKMELEGSIEYLYEQLTQKTHIKVMKPEGTYLVWLDFSAYNLTHLEIQEKLRYDAKLILNDGLTFGKEGKKHARINVAAPRSVIEEAVLRLVTNFRKND

SEQ ID NO: 7561 - protein, 546 aa, Streptococcus agalactiae
ATGAATATTGAAACACTAACGCAGAAAAATCATCGTTCCGATAGCGGACGAAATCATATTGTTTTATTTGAACCACAGATTCCAGCAAATACTGGTAATATTGCTAGAACTTGTGCGGCAACAAATGCTCCTTTGCACATCATACGACCAATGGGATTTCCTATTGATGATAAAAAAATGAAACGAGCGGGACTGGATTACTGGGATAAGCTAGATGTTAGTTTCTATGATAGTTTGGAAGAATTTATGTTGTCATGTCGAGGGAAAGTTCACCTAATTAGCAAATTTGCTGACAAGGTTTACTCAGATGAAAATTATAATGATGATCAAGACCATTATTTTATGTTTGGTCGTGAAGATAAAGGATTGCCAGAAACTTTTATGCGCGAGCATGCCGAAAAGGCCTTACGAATTCCCATGAACGATGAGCATGTGCGTAGCTTGAATGTTTCAAACACTGTTTGTATGATTGTTTATGAAGCCCTTAGGCAGCAAAGCTTTCCTAATTTAGAATTAAGCCATACTTATGAAAATGATAAATTAAAA

SEQ ID NO: 7562 - protein, 182 aa, Streptococcus agalactiae
MNIETLTQKNHRSDSGRNHIVLFEPQIPANTGNIARTCAATNAPLHIIRPMGFPIDDKKMKRAGLDYWDKLDVSFYDSLEEFMLSCRGKVHLISKFADKVYSDENYNDDQDHYFMFGREDKGLPETFMREHAEKALRIPMNDEHVRSLNVSNTVCMIVYEALRQQSFPNLELSHTYENDKLK

SEQ ID NO: 7563 - protein, 867 aa, Streptococcus agalactiae
ATGATTCCTTTAGTCCTAATTGCTTTAATTGGTGCTTTTTGGTCTGATAAAGCTCCACAACTTCCACAACATTTAACAGCTATTCAGCCGTCAAATGTTGGATGGAGTTGGGTGTCAGGTCTGGTACCATTGTATTTTGCATATGATGGTTGGACAATTTTTGTTAGTATTGCACCAGAAGTCAAGAATCCCAAGAAGAATTTACCACTTGCCTTTGTCATTGGTCCAGCGCTTATCTTATTATCATATTTGGCATTTTTCTATGGTTTGACACAAATTTTAGGTGCTAGCTTTATTATGACAACCGGTAATGATGCTATTAATTATGCAGCTAACATTATTTTCGGTCCTAGTGTTGGGCGTTTATTATCTTTCATTGTTATTTTATCTGTATTAGGTGTTGCCAATGGACTTTTACTTGGGACGATGCGTCTACCTCAAGCTTTTGCGGAACGCGGATGGATCAAAAGTGAGAGGATGGCTAACATAAATTTGAAGTATCAAATGTCATTGCCAGCTAGTTTGACGGTGACGGCTGTAGCTATTTTTTGGCTTTTTGTTCACTTTATGGTTACAAAATTTAATTTATTGCCGGGTAGTGATATTAGTGAAATTGCTGTGGTGTTTAATAATACTAGTTTAATCATTCTTTATGTTTTAGTACTCAGCCTTTATCTCAAAAAAGATATTAAAAATAAATTTACCGGCTTAGTTTCACCGATTCTAGCAATTTTAGGCGGTTTGATCCTCTTTATCGGGAGTTTGTTAAGTAATTTCTTTACGGTTTTAATTTTCCAATGTTTTTGCTTATTATTCTGTTTGATTTGTCATTATATCTATCAAAAAAATAACCCAAAAACTCATGAA

SEQ ID NO: 7564 - protein, 289 aa, Streptococcus agalactiae
MIPLVLIALIGAFWSDKAPQLPQHLTAIQPSNVGWSWVSGLVPLYFAYDGWTIFVSIAPEVKNPKKNLPLAFVIGPALILLSYLAFFYGLTQILGASFIMTTGNDAINYAANIIFGPSVGRLLSFIVILSVLGVANGLLLGTMRLPQAFAERGWIKSERMANINLKYQMSLPASLTVTAVAIFWLFVHFMVTKFNLLPGSDISEIAVVFNNTSLIILYVLVLSLYLKKDIKNKFTGLVSPILAILGGLILFIGSLLSNFFTVLIFQCFCLLFCLICHYIYQKNNPKTHE

SEQ ID NO: 7565 - protein, 501 aa, Streptococcus agalactiae
ATGGAGAATCATAATTCTATTAAACAGACCTATGGATTAATGACTACAATTGCTATGATTGTAGGTGTAGTGATTGGTTCAGGCATTTATTTTAAAGTTGATGACATCCTTAAATTTACTGGTGGAGATGTCTTTTTAGGCATGGTAATTTTAGTACTAGGTTCTTTTTCGATTGTTTTTGGAAGTTTGTCAATTTCTGAGCTAGCTATTAGAACGAGTGAAAGTGGTGGTATTTTTTCTTACTACGAAAAATATGTTAGCCCAGCTTTAGCAGCAACTTTAGGCTTGTTTGCGTCTTTTTTGTATCTTCCAACTTTAACAGCAATCGTTTCATGGGTAGCTGCATTTTATACTTTAGGTGAATCATCAAGTTTGGAATCACAGATTATTTTAGCTGCTGTTTATATTTTAGCACTTAGTCTCATGAATATCTTTGCTAAGCGTATTGCAGGGGGATTCCAATCTTTAACGACCTTTGTAAAAATGATTCCNNNNNTTAAT

SEQ ID NO: 7566 - protein, 167 aa, Streptococcus agalactiae
  VARIANT 165, 166: Xaa = Any Amino Acid
MENHNSIKQTYGLMTTIAMIVGVVIGSGIYFKVDDILKFTGGDVFLGMVILVLGSFSIVFGSLSISELAIRTSESGGIFSYYEKYVSPALAATLGLFASFLYLPTLTAIVSWVAAFYTLGESSSLESQIILAAVYILALSLMNIFAKRIAGGFQSLTTFVKMIPXXN

SEQ ID NO: 7567 - protein, 1347 aa, Streptococcus agalactiae
ATGAGAATAATTGTTGTCGGCGGAGGTAAAGTCGGAACCGCACTTTGCCGCTCACTTGTTGCTGAAAAGCACGATGTTGTTTTAATTGAGAAAAAAGAAAACGTCCTTAAACGTGTCACTAAACAGCATGATATTATGGGAATTGTTGGGAATGGGGCAAACTATAAAATTTTAGAACAAGCCGAAGTCAAAAATTGTGATATTTTTATCGCTATCACTGATCGAGATGAAGTTAATATGATTTCAGCAGTTCTTGCCAAAAAAATGGGGGCAAAAGAGACTGTCGTTCGCATGCGTAATCCTGAGTATTCTAATCCTTACTTCAAAGATAAAAACTTTCTTGGCTTCTCTTCAGTTGTCAACCCTGAATTGTTAGCAGCACAATATATCGCTAATACCATAGAATTTCCAAATGCAACTTCAGTTGAACATTTCGCCAACGGGCGTGTGATGTTAATGGAATTTAAAATTTTAGAAGGAAATAAACTCTGTCATACTTCAATGAGTCAAATTCGTAAAAAATTTGGTAATATTGTTATTTGCGCAATTGAACGCGATGGCAAATTGATTATTCCTGATGGCGATGCAACTATCCAAGTCAAAGATAAAATCTTTGTAACTGGAAACCGTATTGAAATGATACTTTTCCATAATTACGTTAAAAATAAAGTTGTCAAAAACTTGATGGTTATCGGTGCAGGACGCATCGCCTACTACCTACTCAATATCCTTAAAAATACCAATACACACGTCAAACTAGTTGAACTCAACCAAGAACAAGCTGAATATTTTAGTCAAGAATTTCCCAATGTTCCTGTCGTTCATGGGGATGGTACTGCTAAAAATATTTTGTTAGAAGAAAGCGTTACAAGTTTTGACGCAGTTGCTACTTTAACTGGTGTTGATGAAGAAAATATCATTACCTCAATGTTCTTAGAAAGTATCGGTATTCCTAAAAACATTACCAAAGTTAATCGAACTAGCCTACTAGAAATCATTGACGATAAACAACTATCAAGCATTATCACACCCAAGCGTATTGCCGTAGACCATGTGATGCACTTTGTACGCGGGCGTGTAAATGCTCAGGATTCCAACCTAGAAGCTATGCATCATATTGCTAACGATCGCATTGAAACCTTACAATTTGAAATAAAAGAAACTAGCAAATTAGCAAATCGTAGCCTTGCATCTTTAAAATTAAAGCAAAATATTTTAATTGCAGCGATTATTCGCAATAATAAAACGATTTTCCCAACTGGTGAGGATGTTTTAACAGTGGGTGATCGTATCGTTGTTATCACCTTATTAAAAAATATTACTAGAACTAGTGATATGTTAGCGAGG

SEQ ID NO: 7568 - protein, 449 aa, Streptococcus agalactiae; identical to SEQ ID NO: 2932

SEQ ID NO: 7569 - protein, 1425 aa, Streptococcus agalactiae
ATGATTCGTTTCCTTCTCTCAAAACTTTTGCTGATTGAAGCTGCTCTTCTAGCGATTCCTCTAACTGTTGGACTTATTTACCGTGAACCGCAAAGTGTCATGATGAGTATAGTCATTACCATGATTATTCTAATCATCCTTGGATTACTGGGTTCTCTCTTTAAACCTAAAAATTATCATATCTACACTAAAGAAGGCATGTTAATTGTTGCACTCTGCTGGATACTTTGGTCCTTCTTTGGCGCCCTTCCATTTGTTATTTCAGGGCAAATCCCTAATATTATCGATGCTTTCTTTGAAGTATCTTCTGGTTTTACGACAACAGGAGCAACTATTCTTGATGACGTCAGTGTCTTATCCCCCGCGCTCTTATTTTGGCGTAGCTTTACCCATCTTATCGGTGGAATGGGGGTTTTAGTATTTGCCCTTGCCATCATGGAAAATTCTAAAAATAGCCATTTAGAGGTTATGAGAGCTGAAGTTCCTGGACCTGTATTTGGTAAAGTTGTCTCGAAACTTAAAAAAACTGCACAAATTTTGTATTTGTTATACCTTCTTATGTTTGCAGTATTTGCAGTAATATTATATTTTGCAGGTATGCCTTTCTTTGATAGTATTATCATAGCAATGGGAACTGCAGGTACAGGTGGTTTTGCAGTTTACAATGATAGCATTGCCCATTATAATAGTCCTCTGATAACTAACTTAGTTTCTATTGGTATGCTTATCTTCGGGGTTAACTTTAATCTTTACTATCTTCTTTTACTCCGAAAAATTAAAGCATTCTTTGGTGATGAGGAACTAAAAAACTATCTCCGCATCGTGGCAATAGCAACTTTCATGATTGCTCTAAACGTCATCGGTATGTATGATAATTTTCGACAAGGCCTCGAACATATTTTCTTTGAAGTATCAGCTATTATTACGACAACTGGTTTTGGCGTGACTGATATCACTCGTTGGCCTTTGTTTTCACAGGTTATTTTGCTATTCTTGATGTTTATCGGTGGTTCTGCTGGCTCTACAGCTGGGGGCTTTAAAGTCATGCGTAGCTTAAGCCTAGCAAAGATTGCACGTAACCAAGTATTGTCTACACTCTATCCTAATAGAGTCATGTCACTACACATTAATAAAAGCGTTCTAGATAAAAATACACAACATGGCGTTTTAAAATATCTAACTATCTATTTAGCTATCTTCATGGCACTCGTTCTTGTTTTAACGCTTGATACTAATGATTTTTTGGTTGTTGTCAGTGCTGCAGCCTCATGTTTTAACAACATAGGCCCACTCTTAGGTAGCAATGAAACTTTCTCATTCTTTAGTCCATTCTCAAAACTCCTTCTTTCATTTGCTATGATAGCAGGACGTTTAGAAATATACCCTGTTTTATTGATGTTTATTCCTAAAACATGGTCAAAACTA

SEQ ID NO: 7570 - protein, 475 aa, Streptococcus agalactiae
MIRFLLSKLLLIEAALLAIPLTVGLIYREPQSVMMSIVITMIILIILGLLGSLFKPKNYHIYTKEGMLIVALCWILWSFFGALPFVISGQIPNIIDAFFEVSSGFTTTGATILDDVSVLSPALLFWRSFTHLIGGMGVLVFALAIMENSKNSHLEVMRAEVPGPVFGKVVSKLKKTAQILYLLYLLMFAVFAVILYFAGMPFFDSIIIAMGTAGTGGFAVYNDSIAHYNSPLITNLVSIGMLIFGVNFNLYYLLLLRKIKAFFGDEELKNYLRIVAIATFMIALNVIGMYDNFRQGLEHIFFEVSAIITTTGFGVTDITRWPLFSQVILLFLMFIGGSAGSTAGGFKVMRSLSLAKIARNQVLSTLYPNRVMSLHINKSVLDKNTQHGVLKYLTIYLAIFMALVLVLTLDTNDFLVVVSAAASCFNNIGPLLGSNETFSFFSPFSKLLLSFAMIAGRLEIYPVLLMFIPKTWSKL

SEQ ID NO: 7571 - DNA, 249 bp, Streptococcus agalactiae
atgcttaaatcttttttgattttcttggttcgcttttaccaaaaaaatatttctccagctttcccagctagctgtcgttatcgtccaacttgctctacgtatatgatagaagctattcaaaaacatggtctaaaaggtgtgttgatggggattgcacgtattttgcgatgtcatcccttagcccacggaggaaatgatcctgtccctgatcattttagcttaagacgtaataaaacggatatatcagat

SEQ ID NO: 7572 - protein, 83 aa, Streptococcus agalactiae; identical to SEQ ID NO: 2936

SEQ ID NO: 7573 - DNA, 720 bp, Streptococcus agalactiae
atgagaattaataaatatattgcgcatgcagggattgcaagtcgtagaaaagctgaggaattaatcaagcaaggaatggtcacgattaatggtcaagtggttaatgaattggcgaccaaagtaaaggctggtgatctggttgaaattgaaggaagtccaatttacaacgaagagaaggtatattatctcttaaataaaccacgtggtgttatttcaagtgtctcagatgataaaggacgtaagacagttattgacttgttgccacaagtcaaagaacggatatatcctgttggtcgcttggattgggatacaactggacttttaattttgactaatgatggtgattttactgataaaatgattcatcctcgtaatgaaattgataaagtttatttagcacgtgtcaaaggaatagctactaaagaaaaccttcgaccattaacgcgtggcgttgttattgatggtaagaaaacaaaacctgctcgctataatatcataaaagtggatcatgaaaaaaatcgttcagtagttgagttaactattcatgaaggtcgtaatcatcaagttaagaaaatgtttgaacaagttgggttattagtggacaagctatctcgtacacaattcggtaccttagatttaacgggtctccgtcctggggaagcacgacgattaaataaaaaagaaattagccagttgcataatgcggctattaataaatct

SEQ ID NO: 7574 - protein, 240 aa, Streptococcus agalactiae
MRINKYIAHAGIASRRKAEELIKQGMVTINGQVVNELATKVKAGDLVEIEGSPIYNEEKVYYLLNKPRGVISSVSDDKGRKTVIDLLPQVKERIYPVGRLDWDTTGLLILTNDGDFTDKMIHPRNEIDKVYLARVKGIATKENLRPLTRGVVIDGKKTKPARYNIIKVDHEKNRSVVELTIHEGRNHQVKKMFEQVGLLVDKLSRTQFGTLDLTGLRPGEARRLNKKEISQLHNAAINKS

SEQ ID NO: 7575 - DNA, 582 bp, Streptococcus agalactiae
atgacttatttaggctcaatagaagctcttctttttgttgcaggtgaagatggactgagtttgcgtcaaatggcagaattattgtctttgacaccatcagcattaatacagcaactagaaaagttggctaaacgatatgaagaagatgacgattctagtctattattgcttgagacagcacaaacttataaattggtaacaaaggatagttatatgactttgttgagagattatgcgaaggctccgattaatcagagtctatctcgggcaagtttggaagttctatctattattgcttataaacaacctattactaggattgaaattgatgatattcgtggcgtgaattccagtggagctataacgagactgatagcttttggtttaattaaagaggctggaaagaaagaagtgttgggacgtcctaacctttatgagacaactaattatttcttagattatatgggaattaatcagttagatgacttaattgacgcctcttcaattgaattagttgacgaagaagtatcgttattttcaatggattcaattaatacagaagataaggaaaacaatgagaat

SEQ ID NO: 7576 - protein, 194 aa, Streptococcus agalactiae
MTYLGSIEALLFVAGEDGLSLRQMAELLSLTPSALIQQLEKLAKRYEEDDDSSLLLLETAQTYKLVTKDSYMTLLRDYAKAPINQSLSRASLEVLSIIAYKQPITRIEIDDIRGVNSSGAITRLIAFGLIKEAGKKEVLGRPNLYETTNYFLDYMGINQLDDLIDASSIELVDEEVSLFSMDSINTEDKENNEN

SEQ ID NO: 7577 - DNA, 705 bp, Streptococcus agalactiae
atggatattaagttaaaagatttcgaggggcccctagacttgctcttacacctcgtatctaaatatgaggttgatatatacgatgtaccgattgtggaagttattgagcagtaccttgcttatatagcaacattacaggcgatgcgtctagaagtagctggtgagtatatgcttatggcaagtcagttgatgttgataaaaagccgtaacttattacctaaagtagtggagtcaactcctattgaagatgatccagaaatggaattgttgagccaattagaggaatatagacgttttaaagtgctaagtgaagagttagctaatcagcatcaggaacgtgccaaatatttttcaaaaccaaaacaagaagttatctttgaagatgcaattcttctacacgataaatcggtgatggacctttttttgactttttctcaaatgatgtcccaaaaacaaaaagaattgtcaaatagtcaaacggtaattgagaaagaagactaccgtattgaagatatgatgatcgttattgaaagacattttaatcttaaaaagaaaacgacattacaagaagtgtttgcggattgccaaacaaaatctgaaatgataactttatttttggcaatgttagagttgataaaattacatcaaatcacagtagaacaagacagtaattttagtcaagttatcttaagaaaggaagagaaa

SEQ ID NO: 7578 - protein, 235 aa, Streptococcus agalactiae
MDIKLKDFEGPLDLLLHLVSKYEVDIYDVPIVEVIEQYLAYIATLQAMRLEVAGEYMLMASQLMLIKSRNLLPKVVESTPIEDDPEMELLSQLEEYRRFKVLSEELANQHQERAKYFSKPKQEVIFEDAILLHDKSVMDLFLTFSQMMSQKQKELSNSQTVIEKEDYRIEDMMIVIERHFNLKKKTTLQEVFADCQTKSEMITLFLAMLELIKLHQITVEQDSNFSQVILRKEEK

SEQ ID NO: 7579 - DNA, 777 bp, Streptococcus agalactiae
atgattttacagacgaatatactatcactcctaaaaacaatgataaatgatattaataattttattgagagtaagaaattatctctcaattcgcgtaagtcctatcactatgatttaaagcaattttataaaataattggtggacatgtaaattctgaaaaactggcattgtatcaacagtctctaagtgaatttaagttaacagctcgtaagcgaaagttatctgcagtcaatcaatttcttttctttttgtataatagaggaacgctgaaggaattttacagactacaagagactgaaaaaatcactttgactcagacaaagtctcaaataatggatttatcaaatttctatcaagatacagattatccgagtggtcgtttgattgctttgttgattttatctttaggtttaactccggctgaaattgctaatttgaagaaggctgattttgatacaacttttaatatcttaagtattgaaaaatcgcagatgaagcgtattttaaaacttccagaaaacttgcttccttttcttttggaatctttagaggaagatggtgacttagtctttgagcataacggtaagccttattctagacaatggttttttaatcaattaacagatttcttaaatgagaagaatgagcaacaactaactgcacaacttctgcgagaacaatttattctaaagcaaaaagaaaatggcaaaacaatgacggagctcagccgccttctaggcttaaaaactcctatcactttagagagatattataga

SEQ ID NO: 7580 - protein, 259 aa, Streptococcus agalactiae
MILQTNILSLLKTMINDINNFIESKKLSLNSRKSYHYDLKQFYKIIGGHVNSEKLALYQQSLSEFKLTARKRKLSAVNQFLFFLYNRGTLKEFYRLQETEKITLTQTKSQIMDLSNFYQDTDYPSGRLIALLILSLGLTPAEIANLKKADFDTTFNILSIEKSQMKRILKLPENLLPFLLESLEEDGDLVFEHNGKPYSRQWFFNQLTDFLNEKNEQQLTAQLLREQFILKQKENGKTMTELSRLLGLKTPITLERYYR

SEQ ID NO: 7581 - protein, 471 aa, Streptococcus agalactiae
ATGATTGCTAAAGAATTTGAGTCGTTTTTGCTAAGTCATTTGGACCACTATCTAATTCCAGCTGAAGACGTTGCTATTTTTGTGGATACGCACAATGCAGACCACGTTATGTTACTATTAGCAAGTAATGGTTTTTCACGTGTACCAGTTATCACTAAAGAAAAAAAATATGTAGGTACTATTAGTATCTCAGACATTATGGCTTACCAATCTAAAGGTCAATTAACAGATTGGGAGATGGCACAGACTGATATTGTTGAGATGGTTAATACAAAAATCGAGCCGATTAATGAGGCAGCTACTCTGACAGCAATTATGCATAAGATTGTAGATTATCCATTTTTACCTGTTATCAGTGATCAAAATGATTTTAGAGGCATTATAACCCGTAAATCGATTTTAAAAGCTATTAATAGCCTCCTACATGATTTTACAGACGAATATACTATCACTCCTAAAAACAATGATAAA

SEQ ID NO: 7582 - protein, 157 aa, Streptococcus agalactiae
MIAKEFESFLLSHLDHYLIPAEDVAIFVDTHNADHVMLLLASNGFSRVPVITKEKKYVGTISISDIMAYQSKGQLTDWEMAQTDIVEMVNTKIEPINEAATLTAIMHKIVDYPFLPVISDQNDFRGIITRKSILKAINSLLHDFTDEYTITPKNNDK

SEQ ID NO: 7583 - protein, 519 aa, Streptococcus agalactiae
ATGGCAATTAGAAAATTAGTTGTAATGAGTGATTCTCACGGAGATCGTGACATTGTAAAAGATATAAAGAATCATTATTTGGGAAAAGTGGATGCTATTTTTCACAATGGGGATTCCGAACTTCCTAGCTCAGATCCTATATGGGAAGGAATTCATGTGGTCACAGGAAACTGTGATTATGATTCAGGTTATCCGGAAGTTTTGGTTACAAAAATAGATAATACTGTTATTGTTCAAACCCATGGTCATCTCCATCAAATTAATTTTACTTGGGATAAATTGGATTTATTAGCTCAGCAAGAAGACGCGGATATTTGTTTATACGGTCATCTTCATCGTGCAGATGCTTGGAAAAATGGTAAAACTATTTTTATCAATCCAGGTAGTGTTTTGCAGCCAAGAGGACCAATAAATGAGAAGCTTTACGCTGTTGTAACTATAACAGATAGTAAGGTTTTGGTAGAGTATTATACTCGCCAACACCAACCCTATCCTAACTTGACAAAGGAATTTTCAAGA

SEQ ID NO: 7584 - protein, 173 aa, Streptococcus agalactiae
MAIRKLVVMSDSHGDRDIVKDIKNHYLGKVDAIFHNGDSELPSSDPIWEGIHVVTGNCDYDSGYPEVLVTKIDNTVIVQTHGHLHQINFTWDKLDLLAQQEDADICLYGHLHRADAWKNGKTIFINPGSVLQPRGPINEKLYAVVTITDSKVLVEYYTRQHQPYPNLTKEFSR

SEQ ID NO: 7585 - protein, 471 aa, Streptococcus agalactiae
ATGACCTTTGAAGAAAATGCTCGACTTAAAGCAGAGACTATTTCAAAATTAACTGGGAAAATGGTGATTTCAGATGATTCCGGATTAAAAGTAGATGCTTTAGGTGGTTTGCCAGGGGTATGGTCTGCTCGTTTTTCAGGTCCTGACGCGACAGATGCTCGTAATAATGCCAAATTATTGCATGAATTAGCCATGGTATTTGACAAAGAAAGACGTTCAGCACAGTTTCATACAACCTTAGTCGTGTCAGCTCCAAATAAAGAAAGTTTGGTAGTTGAAGCAGAGTGGCCAGGTTATATTGGTACGGAACCTAAGGGGGAAAATGGCTTTGGTTATGATCCGCTCTTTATTGTCGGAGAAGGTAGTAGGACAGCAGCTGAATTGAGCGCACAAGAAAAAAATAATCTATCACATCGTGGGCAAGCTGTCCGTAAATTGATGGAGGTATTTCCAAAATGGCAATTAGAAAAT

SEQ ID NO: 7586 - protein, 157 aa, Streptococcus agalactiae
MTFEENARLKAETISKLTGKMVISDDSGLKVDALGGLPGVWSARFSGPDATDARNNAKLLHELAMVFDKERRSAQFHTTLVVSAPNKESLVVEAEWPGYIGTEPKGENGFGYDPLFIVGEGSRTAAELSAQEKNNLSHRGQAVRKLMEVFPKWQLEN

SEQ ID NO: 7587 - protein, 347 aa, Streptococcus agalactiae
ATGACAAAAACAATTTTTGAAAGTAAAACTGAAGGCAATTGGTTTTTAGGTAGTTTCCAAGCTTTTAATTATTTTACTTGTTTTGGTAATGATGAATCTTACGAAGCTATCCAAGATGTTTTTCATCGTCTATTATCAACTTTGAAAGTTGAAGGTCTACAGCTTCACGTTGTGCAGATGACTTCGGATTTTCAATTATTAGCATTCCTCGTTGATATGATTAATCAAGAGTATTCAAGGCACATCAAAGTGACTCAACATAAAGGGGCCATCTTAGTTAGTGAAGATGATCAGTTGTTCTTAGTTCACTTACCTAAAGAGGGCACTTCTTTAGAAAATCTTTGATT

SEQ ID NO: 7588 - protein, 116 aa, Streptococcus agalactiae
  VARIANT 113: Xaa = Any Amino Acid
MTKTIFESKTEGNWFLGSFQAFNYFTCFGNDESYEAIQDVFHRLLSTLKVEGLQLHVVQMTSDFQLLAFLVDMINQEYSRHIKVTQHKGAILVSEDDQLFLVHLPKEGTSLEXSLI

SEQ ID NO: 7589 - protein, 792 aa, Streptococcus agalactiae
ATGGATAGTAGGCCTATTGGCTTTCTAGATTCTGGTGTAGGTGGTTTAACGGTTGTTAAGGAAATGTTCCGTCAACTTCCAGAAGAGGAAGTAATCTTCATTGGAGATCAGGCTAGAGCTCCGTATGGTCCTAGACCTGCTCAACAGATTAGAGAGTTTACCTGGCAGATGGTTAATTTCTTATTGACTAAAAATGTTAAGATGATTGTTATAGCTTGTAATACAGCAACTGCAGTTGCCTGGCAAGAAATTAAAGAAAAACTAGACATACCTGTTTTAGGCGTTATTTTACCAGGAGCTAGCGCAGCTATCAAATCAACTAATTCAGGGAAAGTTGGTATTATAGGTACTCCCATGACTGTTAAATCAGATGCTTATCGTCAAAAAATTCAAGCTTTGTCTCCAAATACTGCTGTGGTATCCCTTGCTTGTCCGAAATTTGTTCCAATTGTGGAATCAAATCAGATGTCTTCTAGTTTAGCCAAAAAGGTGGTTTATGAAACGCTGTCCCCATTAGTTGGTAAATTAGATACTTTAATTTTAGGTTGCACGCATTATCCCTTATTACGTCCCATCATTCAAAATGTTATGGGGGCTGAGGTTAAATTAATTGATAGTGGCGCAGAAACCGTTCGTGATATTTCTGTTTTATTGAACTATTTTGAGATAAACCATAATTGGCAAAATAAACACGGTGGTCATCACTTTTACACAACCGCCAGCCCAAAAGGTTTTAAAGAAATTGCAGAACAATGGCTTAGTCAAGAAATAAATGTGGAGCGTATAGTATTA

SEQ ID NO: 7590 - protein, 264 aa, Streptococcus agalactiae
MDSRPIGFLDSGVGGLTVVKEMFRQLPEEEVIFIGDQARAPYGPRPAQQIREFTWQMVNFLLTKNVKMIVIACNTATAVAWQEIKEKLDIPVLGVILPGASAAIKSTNSGKVGIIGTPMTVKSDAYRQKIQALSPNTAVVSLACPKFVPIVESNQMSSSLAKKVVYETLSPLVGKLDTLILGCTHYPLLRPIIQNVMGAEVKLIDSGAETVRDISVLLNYFEINHNWQNKHGGHHFYTTASPKGFKEIAEQWLSQEINVERIVL

SEQ ID NO: 7591 - DNA, 201 bp, Streptococcus agalactiae
  misc_feature 149: n = A,T,C or G
atgtcaacaactatttggattttattaattatcgtcgctttgtttggtggtctcgtgggaggcatttttattgctcgtaaacaaattgaaaaagagattggagagcaccctcgtttaacaccggatgctattcgtgaaatgatgagtcnaatgggacaaaaacctagtgaagctaaagttcacaaacataccgtaatattg

SEQ ID NO: 7592 - protein, 67 aa, Streptococcus agalactiae
  VARIANT 50: Xaa = Any Amino Acid
MSTTIWILLIIVALFGGLVGGIFIARKQIEKEIGEHPRLTPDAIREMMSXMGQKPSEAKVHKHTVIL

SEQ ID NO: 7593 - DNA, 540 bp, Streptococcus agalactiae
atgtcaaaaaaaacaacacaaatggtttcttatacttctattttagtagcttttgcaatcatgattcctataatcatgcctgctaaaataattattgggcctgcttctttcaccttagcaagccatgtacctttatttttaagtatttttatatctgttccagttgcaatattggtagctttagggacaggacttggatttctactagctggttttccgattgtaatcgttcttagagctttatcacatatcggatttgcattaattgcggctttcttgattaagtcaaagccctctttattgatgagtaaatggcaaacattgttatttgctgtagctattaacataattcatggtctgctcgaatttattactgtttatataatcacaatgacttctaacagtagttcaacttatttatggtcactattttctttgatagggctaggctctctgctacatggattggtagatttttatatagctctcttcatttggaaatggatgacacaaaagttggggaaaacacttaggataaga

SEQ ID NO: 7594 - protein, 180 aa, Streptococcus agalactiae; identical to SEQ ID NO: 2956

SEQ ID NO: 7595 - DNA, 519 bp, Streptococcus agalactiae
atgaaggcacaggagcgtcgagaaaatattttaacgactttaaaaggaacaaaagaagctatatcggcaagcacattagcaaagatttttagtgttagtaggcaggtgattgttggagatattgccttattgcgtgcacaacaatgtgatattatttctaccccaaaaggataccttatgtccagtgctctaagtactcatcaattcacagctagattggtttgtcagcatggcatagaacagacagaagaagaactgaaaattattttgcggtatcaaggaatcattatgaatgtggaggtagagcaccctatttatgggatgctgactgctcccttaaacattcaaagccaaaaagacattgataattttactgctaaattaaaagtttccaatgcagaattgctatcctctttgacagatggtttacatacacatatgatttcttgtcaagatcagtcagtttttgaccaaatatgtgaggctctaaaaaaagcaggaattttatacatagacaaa

SEQ ID NO: 7596 - protein, 173 aa, Streptococcus agalactiae
MKAQERRENILTTLKGTKEAISASTLAKIFSVSRQVIVGDIALLRAQQCDIISTPKGYLMSSALSTHQFTARLVCQHGIEQTEEELKIILRYQGIIMNVEVEHPIYGMLTAPLNIQSQKDIDNFTAKLKVSNAELLSSLTDGLHTHMISCQDQSVFDQICEALKKAGILYIDK

SEQ ID NO: 7597 - DNA, 564 bp, Streptococcus agalactiae
atgtttccacaaaatatgattgccatcatgcaaaaaatgccagggttgtattttggagcaatcatcttagaattggttttagtctttgttgctagtggagcggcgcgtcgaaacacaccagctgcattaccattatttttgatttattcagctttgaatgggtttactttaagtttcattatcgcaaggtacacgcaaacaacagttcttcaagcttttataacatctgcagctgttttctttgcaatggctttgattggagctaagactaaaaaagatttatcaggtatgcgtaaagcgttaatggctgctttaattgggattttaattgcaagtcttgttaatttatttatcggtagtgggggtatgagttatatcattagtatcgtatgtgtcatcatcttttctggattgattgcttatgataaccaaatgattaaatatgtctacaatagccaaggcggccaagtcgcagatggttgggcagtttcgatggcactaagcctttatcttgattttattaatctattcttaaatattcttcgtctttttgcacgaaatgat

SEQ ID NO: 7598 - protein, 188 aa, Streptococcus agalactiae; identical to SEQ ID NO: 2960

SEQ ID NO: 7599 - DNA, 501 bp, Streptococcus agalactiae
atgaaaaagtatcaagacgataaggacttcatggatttggtcggtcaccttattgaccatccacgtttccaaaaactcgaagctattgtccaacatcatcactcaactcgcttagagcattctataaatgttagttatacaagttataaaattgctaagaagtttggttgggatgcgagtagtactgctcgaggtggtttactacatgatttcttttattacgattggcgtgtaacgaaatttaacaagagccatgcttgggttcatccaaggatagcggttcgtaatgcgcgaaaattaactgatttaaacgctagagaagaagatattattttgaaacacatgtggggagcgactattgcaccaccacgttataaagaaagttatattgtgactatggttgataagtattgggcagtacgagaggcttctcgtccactcaaacgtatttttaagaaacctatccgttttagtcgcaaattcttaggtagtcacaatcat

SEQ ID NO: 7600 - protein, 167 aa, Streptococcus agalactiae; identical to SEQ ID NO: 2962

SEQ ID NO: 7601 - protein, 741 aa, Streptococcus agalactiae
ATGACTACTATTATAACTTCAAAATCAAATAATCTCATTAAAAAAACGAAAAAGTTGTTACAAAAAAAATATCGGAAATCTTCATATCTTATTGAAGGCTGGCATTTATTTGAGGAAGCTGAAAAATATGGTGCACAATTTTTAAATATTTTTGTGACAGAAACGGCAATAGATCGTTTGAGAAAACCCGAGGAAGCTATTGTTGTTACAGATGATGTTTTGAAAGAATTAACTGACTCACAGACTCCTCAAGGGATTGTAGCTGAGATTGCCTTTCAAGAGACAAGATGGACAGATATTAAAAAAGGGCGTTTTCTTGTATTGGAAGATGTGCAGGATCCAGGAAACCTAGGGACAATGGTTCGAACTGCAGATGCAGCGAATTTTGATGCTGTTTTTTTATCTCAGAAATCTGCTGATTTGTATAACCAAAAAACACTTCGTTCTATGCAAGGCAGTCACTTTCATTTACCAGTATTTAGGGTAGAAATAGAGCAGTTTGTTAACTTTTGTAAAGCAGAAGGGATAACTATGATTGCGACAACTTTATCTGAACAATCGGTAAATTATAAAAATCTCCCTAAATATGATCATTTTGCTTTAATCATGGGAAATGAGGGACAGGGAATTTCCAAAACTATGACAGAAGAAGCAGATGTTCTAGCACATATTGAAATGCCTGGACAAGCAGAAAGTCTTAATGTAGCAGTAGCTGCGGGAGTAGTCATTTTCAGCTTAATT

SEQ ID NO: 7602 - protein, 247 aa, Streptococcus agalactiae
MTTIITSKSNNLIKKTKKLLQKKYRKSSYLIEGWHLFEEAEKYGAQFLNIFVTETAIDRLRKPEEAIVVTDDVLKELTDSQTPQGIVAEIAFQETRWTDIKKGRFLVLEDVQDPGNLGTMVRTADAANFDAVFLSQKSADLYNQKTLRSMQGSHFHLPVFRVEIEQFVNFCKAEGITMIATTLSEQSVNYKNLPKYDHFALIMGNEGQGISKTMTEEADVLAHIEMPGQAESLNVAVAAGVVIFSLI

SEQ ID NO: 7603 - protein, 276 aa, Streptococcus agalactiae
ATGAAAAAAGTTCATTTAATTGTCTCAGGGCGCGTTCAAGGAGTCGGATTTCGCTATGCAACTTATTCCTTAGCTTTAGAAATAGGTGATATTTACGGTCGCGTTTGGAATAACGATGATGGAACTGTTGAAATTTTAGCACAATCCACAGATTCAAATAAAATGACACAATTTATTCAGAAAATTCGAAAAGGACCTTCAAAATGGTCTAAAGTAACTTATGTTGATATTAAACTAGATAACTTCGATGATTTTAACGACTTTAAAATGAGGAAT

SEQ ID NO: 7604 - protein, 92 aa, Streptococcus agalactiae
MKKVHLIVSGRVQGVGFRYATYSLALEIGDIYGRVWNNDDGTVEILAQSTDSNKMTQFIQKIRKGPSKWSKVTYVDIKLDNFDDFNDFKMRN

SEQ ID NO: 7605 - protein, 798 aa, Streptococcus agalactiae
ATGGCCAACCTCATTACTTATTTCGCTCAACACCAAGGGCTTGGTTTTGGTGTCGCTATCATTATTGTAACCATCATCGTACGTGTCATTATCTTACCACTTGGACTTTATCAGTCTTGGAAAGCTAGCTATCAAGCTGAAAAAATGGCGTACTTTAAGCCTTTATTCGAACCTATCAATGAACGACTACGCAATGCTAAAACACAAGAAGAAAAATTAGCAGCTCAGACAGAATTAATGACAGCTCAACGTGAGAATGGCCTTAGCATGTTTGGCGGTATTGGCTGCTTGCCATTACTCATTCAGATGCCATTTTTCTCAGCTATTTTCTTTGCTGCACGCTATACTCCTGGAGTCTCTAGTGCAACCTTCTTGGGACTTAACTTAGGTCAAAAGAGTCTGACACTTACTGTCATTATCGCCATTCTTTATTTTGTACAATCTTGGTTGTCAATGCAAGGTGTTCCAGATGAACAACGTCAGCAAATGAAAACAATGATGTATGTGATGCCAATAGCGATGGTATTCATGTCAATTAGTTTACCTGCTAGTGTTGCGCTTTATTGGTTTATTGGTGGTATTTTCAGTATTATCCAGCAGCTAGTTACCACTTATGTACTTAAGCCTAAACTACGCCGAAAAGTAGAAGAAGAATATACTAAAAATCCTCCTAAAGCCTACAAATCTAATAACGCACGAAAAGATGTTACAAGTTCAACTAAAACCACTGAATCTAATCAAGCAATTATTACATCTAAAAAAACAAATCGTAACGCCGGAAAACAAAAAAGACGGGGA

SEQ ID NO: 7606 - protein, 266 aa, Streptococcus agalactiae
MANLITYFAQHQGLGFGVAIIIVTIIVRVIILPLGLYQSWKASYQAEKMAYFKPLFEPINERLRNAKTQEEKLAAQTELMTAQRENGLSMFGGIGCLPLLIQMPFFSAIFFAARYTPGVSSATFLGLNLGQKSLTLTVIIAILYFVQSWLSMQGVPDEQRQQMKTMMYVMPIAMVFMSISLPASVALYWFIGGIFSIIQQLVTTYVLKPKLRRKVEEEYTKNPPKAYKSNNARKDVTSSTKTTESNQAIITSKKTNRNAGKQKRRG

SEQ ID NO: 7607 - protein, 522 aa, Streptococcus agalactiae
ATGAAGATGTCTCATCTCCGCTTACTGAGGTATCTAGCTAATATTCATATTTCCTTAATGCGTGGGATTCCTTTAATGGTTCTACTCTTTCTTATCTACTTTGGTTTGCCTTTTATAGGGATACAGTTAGATGCTGTGACTGCTTCTATCGTAGGTTTTACCATGATGTCTAGTGCATATATATCAGAAATTATCAGAGCAGCTCTTTTAGCTGTTGATCATGGTCAGTGGGAAGCTGCTAGAGCTTTAGGGTTAAAAACACCGACGATTTATAGAGGCATTATTATTCCGCAAGCAACAAGAATTGCACTCCCTTCTTTAAGTAATGTTTTGCTAGATATGGTCAAGGGTTCATCATTGACTGCGATGATTACGGTACCTGATATCTTTAATAATGCTAAAATAGTTGGGGGAACCTACTCCGACTATATGACCGCCTATATCTTAGTAGCCCTTATCTATTGGGTAATTTGTACGCTTTATGCAATTATTCAAGACTGGTGGGAAAAACGATTACTTTAT

SEQ ID NO: 7608 - protein, 174 aa, Streptococcus agalactiae
MKMSHLRLLRYLANIHISLMRGIPLMVLLFLIYFGLPFIGIQLDAVTASIVGFTMMSSAYISEIIRAALLAVDHGQWEAARALGLKTPTIYRGIIIPQATRIALPSLSNVLLDMVKGSSLTAMITVPDIFNNAKIVGGTYSDYMTAYILVALIYWVICTLYAIIQDWWEKRLLY

SEQ ID NO: 7609 - protein, 107 aa, Streptococcus agalactiae
GTGATAAACTGGGATGCCATTTTTAATTTGGAACTAGCTGTTAAGGCTTTTCCAAGTGTTATTCAGGGGTTACCATATACCATTTGGATATCCTTGGTTGGTTTATT

SEQ ID NO: 7610 - protein, 36 aa, Streptococcus agalactiae
MINWDAIFNLELAVKAFPSVIQGLPYTIWISLVGFI

SEQ ID NO: 7611 - protein, 852 aa, Streptococcus agalactiae
ATGAAAAAGACAATTTTACTTGGTTTAGTCGGTTTATCTGCAATGACATTAGCAGCTTGCTCAAATGGTCAATCTAGCAAAGAAACAACATGGGACAATATTAAAAAAGATGGTGTCCTTAAGGTTGCTACCCCTGCAACGCTTTATCCAACAAGTTATTATGATGACCATAAAAAATTGACTGGTTATGAGATTGATATGATGAAAGCGATCGCTAAAAAACTTAAGATAAAAGTTAAGTTTGTTGAAGTTGGAGTTGCTGAATCATTTACTTCTGTAGATAGTGGCAAGGTGGATGTTGCTGTCAATAACTTCGACACAACTCCCGAGCGTTTGAAAAAATACAATTTCTCTCAACCTTATAAATATTCTGTTGGAGGTATGATTGTACGTGCAGATGGCTCTTCAAAGATCACAGCAAAAGATTTATCTGACTGGAAAGGTAAAAAAGCTGGTGGTGGCGCTGGAACGCAATATATGAAAATTGCAAAACAGCAAGGCGCTGAACCTGTTATTTATGACAACGTAACTAATGACGTTTACCTTCGAGATGTATCAACTGGACGTACAGATTTTATTCCGAATGATTACTACACACAAGTCATTGCTGTAAAATATGTAACAAAACAATATCCAGATATCAAAGTAAAAATGGGTGATGTGAAATATAATCCGACTGAGCAAGGTATTGTGATGAGTAAAAAAGATAAGAGCCTCAAAACAAAAATTGATGCAGCTATCAAGGATATGAAGAAAGACGGTTCTTTGAAAAAAATCTCTGAAAAATATTATGCTGGTCAGATCTCACAAAAGAACCTGCTGGAACAGATAAATTCAGTAATTAAAGTTAAA

SEQ ID NO: 7612 - protein, 285 aa, Streptococcus agalactiae
  VARIANT 267: Xaa = Any Amino Acid
MKKTILLGLVGLSAMTLAACSNGQSSKETTWDNIKKDGVLKVATPATLYPTSYYDDHKKLTGYEIDMMKAIAKKLKIKVKFVEVGVAESFTSVDSGKVDVAVNNFDTTPERLKKYNFSQPYKYSVGGMIVRADGSSKITAKDLSDWKGKKAGGGAGTQYMKIAKQQGAEPVIYDNVTNDVYLRDVSTGRTDFIPNDYYTQVIAVKYVTKQYPDIKVKMGDVKYNPTEQGIVMSKKDKSLKTKIDAAIKDMKKDGSLKKISEKYYAGXDLTKEPAGTDKIPVIKVK

SEQ ID NO: 7613 - protein, 1457 aa, Streptococcus agalactiae
ATGGTTTTTAAAGATGCTACCGCTATGGCACAAGCGATAAAACAGCATAAGGTTTCGTCGCAAGAATTAGTAGAGCAAGCAATCTACAAGATCGAGGAACAGAATGTAAGCGTTAATGCTGTTGTCAGCAAGCAATATAATGAGGCGCGTCAAGCAGCCAAATACGCAAATGCATCAAATGCTCCTTTTGCAGGAGTTCCTATTCTTCTGAAAGATTTGGGACAGAATCAAAAAGGACAGCTCTCAACCTCAGGTTCACAATTATTTAAACACTATTATGCTAAACAAACAGACTATTTAGTGCAGTCCTTTGAAAAATTAGGGTTTATTATTTTAGGAAGAACAAATACCCCTGAATTTGGTTTTAAGAATATTAGTGATAGTCAACTTCACGGGAATGTTAATCTTCCATTTGACCATTCAAGAAATGCTGGAGGCTCTAGTGGTGGTGCAGCCGCAGCTGTTAGTTCAGGAATGGTTCCAATTGCAGGAGCTAGTGATGGAGGAGGGTCAATCAGAATTCCAGCAAGTTTTAATGGTTTGATTGGTTTAAAACCGAGTCGAGGACGTATACCTGTTGGACCTTCATCCTATAGAGGTTGGCAAGGGGCTTCTAGTCATTTTGCTTTAACAAAGTCAGTTAGAGATACAAAACGACTATTATATTATTTACAATCATATCAAGTAGAAAGTCCATTTCCCCTGAAAAAACTCAGCAAAGAGAGTCTTTTCGAGTTTAGCGTTAGTAAACCCCTAAAAATAGCAGTATTGATGGATTCTCCCTTAAAAACAAAGGTATCAAGTGAGGCTAAAGCAGCTATTAAAGAAGCCGCAGATTTTCTGTCTCAAAAAGGGAATCATTTAGAATTAGTAGAACAACCTTTAGATGGTATTCATTCTATGAAAACTTATTGTATGATGAATAGCGTTGAAACAGCAGCAATGTTTGATGGCATCGAAAAGAGTTTAGGGCGTTCAATGGAATTTAGCGATATGGAATTAATGACCTGGGCTATGTATCAGAGTGGACAAAGGGTATTGGCTAAAGATTACAGTAAACTCTTAGATTCATGGGATCAATTTGCAGCCACCATGGCGAGGTTTCATGAAAATTATGATTTAATTTTAACAGCAGCAACTAATCAACCAGCTCCTTTTCATGGACAATTTGATTTAGACGAGACACTCCAGAAACAATTGAGGCATATGAGAGAATTCTCAGTAAGTGAACAACAGGATTTAATTTGGAAAATGTTTGAAGACTCAATGGCCTGGACACCTTTTACACATCAGCCAAACTTGACTGGGCAACCTTCTTTAGCCATACCAACTCATCTAACTAAAGAGGGGCTACCTTTAGGTGTACAATTGACAGCGGCTAAAGGGAGAGAAGATTTATTGCTTGCTGTTGCAGAGTTGTTGAAAAAGAGAAGCAATTCAAAGGGCCTGTTTGCCAT

SEQ ID NO: 7614 - protein, 486 aa, Streptococcus agalactiae
MVFKDATAMAQAIKQHKVSSQELVEQAIYKIEEQNVSVNAVVSKQYNEARQAAKYANASNAPFAGVPILLKDLGQNQKGQLSTSGSQLFKHYYAKQTDYLVQSFEKLGFIILGRTNTPEFGFKNISDSQLHGNVNLPFDHSRNAGGSSGGAAAAVSSGMVPIAGASDGGGSIRIPASFNGLIGLKPSRGRIPVGPSSYRGWQGASSHFALTKSVRDTKRLLYYLQSYQVESPFPLKKLSKESLFEFSVSKPLKIAVLMDSPLKTKVSSEAKAAIKEAADFLSQKGNHLELVEQPLDGIHSMKTYCMMNSVETAAMFDGIEKSLGRSMEFSDMELMTWAMYQSGQRVLAKDYSKLLDSWDQFAATMARFHENYDLILTAATNQPAPFHGQFDLDETLQKQLRHMREFSVSEQQDLIWKMFEDSMAWTPFTHQPNLTGQPSLAIPTHLTKEGLPLGVQLTAAKGREDLLLAVAELFEKEKQFKGPVCH

SEQ ID NO: 7615 - protein, 480 aa, Streptococcus agalactiae
ATGGCAGAAAAAACTTACCCAATGACACAAGTGGAAAAAGATCAACTTGAAAAAGAACTTGAAGAGTTAAAATTAGTTCGTAGACCAGAAGTTGTAGAGCGTATCAAGATTGCTCGTTCTTATGGGGACTTATCAGAAAATAGCGAATATGATGCAGCAAAAGACGAACAAGCATTTGTTGAGGGCCAAATTCAAATTTTAGAAACAAAAATTCGTTATGCTGAAATTATTGATAGTGATGCAGTTGCTAAAGATGAGGTTGCAATTGGTAAAACTGTCCTTGTCCAAGAAGTTGGTACAAATGATAAAGATACTTACCATATCGTTGGTGCTGCTGGAGCTGACATTTTTTCAGGAAAAATTTCGAATGAAAGCCCAATTGCTCATGCTTTAATTGGTAAAAAAACAGGAGACTTAGCTACAATTGAATCACCTGCTGGTAGCTATCAAGTTGAAATCATTAGTGTTGAAAAAACAAAT

SEQ ID NO: 7616 - protein, 160 aa, Streptococcus agalactiae; identical to SEQ ID NO: 2976

SEQ ID NO: 7617 - protein, 1800 aa, Streptococcus agalactiae
TTGACCGAATTTAATGACGATCAGCATTCTAACCATGATCAGAAAAGTTTTAAAGAACAAATTCTGGCAGAGTTAGAAGAAGCTAACCGTTTGAGAAAGTTGCGTGAAGAAGAACTCTATCAAAAAGAGCAAGAAGCCAAAGAAGCTGCTCGCAGAACAGCACAATTGATGGCAGATTATGAAGCGCAACGTTTGAAAGACGAACAAGAAGCTAGAGCAAAGGCGCTAGAGACTAAGCAACGCTTAGAAGAGCAAGAGAAGGCTCGGATTGAGGCGAAACTTCTGGCAGAAGCTGCTCGAGAAGAAGAAAGACGTCAGGCGGAACAAGCATTAGCTTCCCAAGAAGAACAAGTTATCAATCAAGGGATGGAACCTTCAAGAGAGCTTGATAGCGGCTCCAAATCTAGTGAATTTAGGACAACTGAAAATGTACCTGACATAGATTTAAAAGCAGATAAGACTGATGTTGCAACTGCTGTGCCTAATCAAGAAACGGAAGAAATCTTTCTTGTGAGAGCAACAGATATTCCTACAGAAGGTGAAAATGTAAAACTTGGTGAGACATCAGAGTTAGAGCCCGTAGCAAAGGAACCTATCCGAGTAGAGGATTTGTCAAAAGAAGAAGAGGATATAGCTTTGTCAGCCAAGAACAAACATAACAAGCGTGAAAGACGTCAGAAAGCAGATAATGTGGCAAAACGAATTGCACGTATTCTGATATCAATTATCATACTTGTATTGCTCTTGACAGCATTTGTAGGTTATCGTTTTGTAGATAGTGCTATTAAACCTGTTGATTCCAATTCAAATAAATTTGTACAAGTTGAAATTCCGATAGGATCTGGGAATAAATTAATTGGTCAAATTTTAGAAAAAGCAGGAGTCATTAAGAGCGCCACAGTCTTTAATTACTATTCCAAGTTCAAAAACTATAGTAATTTTCAAAGTGGATACTACAATCTTAAAAAAAGTATGACTTTAGATCAGATTGCTGCTGAATTGGAAAAAGGCGGAACTGCAGAACCGACAAAACCAGCTTTAGGTAAGATATTAATTACCGAGGGTTACACTATTAAACAGATTGCTAAAGCTATTGAGTCTAATAAAATTGATACAAAGACTACAAGTACACCTTATAAAGCTGATGATTTCTTGAAACTTGTTCAAGATGAAACGTTTATTAAAAAAATGGTAGCTAAATATCCAAATTTACTAGGAAGTCTACCTGATAAATCAAAAGCTATTTATCAATTGGAAGGATATTTATTCCCAGCTACTTACAACTATTATAAAGATACAACCTTAGAAGGACTTGTTGAAGATATGATTTCAACAATGAATACTAAGATGGCACCTTACTATAACACTATTAAAGCGAAGAATATGTCTGTAAATGATGTTTTGACATTATCATCTCTTGTTGAAAAAGAGGGATCAACAGACGAAGATCGCCGTAAAATAGCAAGTGTCTTTTATAACCGATTATCAGCCGGTCAAGCTCTTCAAAGTAACATTGCAATTTTGTATGCTATGGGGAAATTAGGTGATAAAACAAGTTTAGCTGAAGATGCTCAAATTAATACTTCAATTAAATCACCATACAACATCTATACTAATACTGGTTTGATGCCTGGACCAGTTGATAGTCCAAGTATCTCAGCAATTGAAGCGACTATAAAACCTGCTTCAACAGATTATCTTTATTTTGTCGCTGATGTGAAGACCGGAAATGTATACTACGCTAAAGACTTTGAAACACACAAGGCTAACGTTGAAAAATATATCAATAGTCAAATTAAC

SEQ ID NO: 7618 - protein, 600 aa, Streptococcus agalactiae
MTEFNDDQHSNHDQKSFKEQILAELEEANRLRKLREEELYQKEQEAKEAARRTAQLMADYEAQRLKDEQEARAKALETKQRLEEQEKARIEAKLLAEAAREEERRQAEQALASQEEQVINQGMEPSRELDSGSKSSEFRTTENVPDIDLKADKTDVATAVPNQETEEIFLVRATDIPTEGENVKLGETSELEPVAKEPIRVEDLSKEEEDIALSAKNKHNKRERRQKADNVAKRIARILISIIILVLLLTAFVGYRFVDSAIKPVDSNSNKFVQVEIPIGSGNKLIGQILEKAGVIKSATVFNYYSKFKNYSNFQSGYYNLKKSMTLDQIAAELEKGGTAEPTKPALGKILITEGYTIKQIAKAIESNKIDTKTTSTPYKADDFLKLVQDETFIKKMVAKYPNLLGSLPDKSKAIYQLEGYLFPATYNYYKDTTLEGLVEDMISTMNTKMAPYYNTIKAKNMSVNDVLTLSSLVEKEGSTDEDRRKIASVFYNRLSAGQALQSNIAILYAMGKLGDKTSLAEDAQINTSIKSPYNIYTNTGLMPGPVDSPSISAIEATIKPASTDYLYFVADVKTGNVYYAKDFETHKANVEKYINSQIN

SEQ ID NO: 7619 - protein, 501 aa, Streptococcus agalactiae
ATGATTATTAGAAATGGTTGCCTAGAGGATTTACAGCAAGTCATTAGTATTGAACGAATAAATTTTTCAGAAGCAGAGGCTGCGAGTAAAAAAGCAATGCAAGAACGTTTAATGATAATGACTGATACTTTTTTAGTTGCAGAGATTAATGGTCGTTTAGCAGGTTACATTGAAGGACCGGTTATTAAAGGTCGGTACTTAACGGACGATTTATTCCATAAAGTTTCTGAAATCCCTGTAAGGGAAGGTGGTTTTATAGGAATTACTAGTCTATCAATACATCCTGATTTTAAAGGTCAGGGGATTGGTACAGCATTATTAGCAGCGATGAAAGACCTGGTTGTTTCTCAAGAACGAGATGGTATAAGTTTAACTTGCCATGATGATTTAATTTCCTTCTATGAAATGAATGGATTTAAAGATGAGGGAGAATCTGACTCCCAACATGGTGGTTCGCTTTGGTATAATATGATTTGGAATAATCCAACACGATCAATTTGT

SEQ ID NO: 7620 - protein, 167 aa, Streptococcus agalactiae
MIIRNGCLEDLQQVISIERINFSEAEAASKKAMQERLMIMTDTFLVAEINGRLAGYIEGPVIKGRYLTDDLFHKVSEIPVREGGFIGITSLSIHPDFKGQGIGTALLAAMKDLVVSQERDGISLTCHDDLISFYEMNGFKDEGESDSQHGGSLWYNMIWNNPTRSIC

SEQ ID NO: 7621 - protein, 1329 aa, Streptococcus agalactiae
ATGTCAAAAACTTATCATTTTATTGGTATTAAAGGATCCGGAATGAGTGCCCTAGCACTGATGCTTCATCAAATGGGACATAACGTCCAAGGAAGTGACGTTGACAAATATTATTTTACCCAACGTGGTTTAGAGCAAGCAGGTGTAACTATATTACCTTTCTCACCGAATAATATCAGTGAGGATTTAGAGATTATTGCAGGAAATGCTTTTCGTCCAGATAACAATGAAGAGTTGGCTTATGTTATTGAAAAGGGCTATCATTTTAAACGATATCATGAATTTCTCGGAGATTTTATGCGTCAGTTCACTAGTCTAGGTGTAGCTGGGGCACATGGAAAAACCTCAACGACAGGTTTATTAGCTCATGTTTTAAAAAATATTACAGACACTTCTTTCCTAATTGGAGATGGTACAGGACGTGGTTCTGCTAATGCTAATTACTTTGTGTTTGAAGCTGATGAATACGAACGTCATTTTATGCCGTACCATCCAGAATACTCAATTATTACCAATATTGATTTTGACCATCCTGATTATTTTACAGGCCTAGAGGACGTATTCAATGCTTTTAATGACTATGCTAAGCAAGTTCAAAAAGGTTTATTCATTTATGGAGAAGATTCAAAACTTCATGAAATCACTTCTAAGGCACCAATATATTATTATGGTTTTGAAGATTCAAATGATTTTATAGCAAAAGACATCACTCGAACTGTTAATGGTTCTGACTTTAAGGTTTTCTATAACCAAGAAGAAATTGGTCAGTTTCATGTACCAGCATACGGTAAACATAATATCTTAAATGCAACTGCTGTTATTGCTAACCTTTACATAATGGGAATTGATATGGCATTAGTAGCTGAGCATTTGAAGACATTTTCAGGGGTAAAACGTCGTTTTACTGAGAAGATTATTGACGATACTGTCATTATTGATGACTTTGCTCACCATCCTACTGAGATTATTGCGACATTAGATGCTGCTCGACAAAAATACCCGTCAAAAGAAATTGTAGCTATTTTCCAACCGCATACGTTCACTCGTACGATAGCTCTTTTAGACGATTTTGCCCATGCTTTGAGTCAAGCGGATAGCGTTTATCTTGCTCAAATATATGGTTCTGCTAGAGAAGTAGATAATGGTGAGGTGAAGGTAGAAGATTTAGCTGCTAAGATTGTCAAACACTCAGATTTAGTGACAGTCGAAAATGTCTCGCCTTTACTCAATCATGATAATGCTGTCTATGTCTTTATGGGTGCTGGAGACATTCAATTGTATGAGCGCTCTTTTGAAGAATTATTAGCTAACCTAACTAAAAATACACAA

SEQ ID NO: 7622 - protein, 443 aa, Streptococcus agalactiae
MSKTYHFIGIKGSGMSALALMLHQMGHNVQGSDVDKYYFTQRGLEQAGVTILPFSPNNISEDLEIIAGNAFRPDNNEELAYVIEKGYHFKRYHEFLGDFMRQFTSLGVAGAHGKTSTTGLLAHVLKNITDTSFLIGDGTGRGSANANYFVFEADEYERHFMPYHPEYSIITNIDFDHPDYFTGLEDVFNAFNDYAKQVQKGLFIYGEDSKLHEITSKAPIYYYGFEDSNDFIAKDITRTVNGSDFKVFYNQEEIGQFHVPAYGKHNILNATAVIANLYIMGIDMALVAEHLKTFSGVKRRFTEKIIDDTVIIDDFAHHPTEIIATLDAARQKYPSKEIVAIFQPHTFTRTIALLDDFAHALSQADSVYLAQIYGSAREVDNGEVKVEDLAAKIVKHSDLVTVENVSPLLNHDNAVYVFMGAGDIQLYERSFEELLANLTKNTQ

SEQ ID NO: 7623 - protein, 615 aa, Streptococcus agalactiae
GTGAATAGAGGCTCTAGACGATTTCCGTTGATAGCAGATGATGAACCAGTAATGTCTCCGCTTGTAAAGATGAATCTTTATGATAATGAAGATTTAATTAACAACATTCGAGGCTTTTATCAAGAAAAAACATATCAAAGCATGGTCAAAAGCAATTATGAACATGAAGAAATATCACATCCTAAGGTAATTGAAAATGATCCTGTACCACCGCAGAGTTTTGTAAAAAAAGCGACAGAGTTGAGCAAATCTCGACAAGAGGCAAAGAGGTCTGTTCGGGAGAAACGACAAGCTTACTATGCGAAACAGGAATTTAAGGCGCCATCAAAGGAAGCTTTTCAGCAACAATTGAAGGCAACAGTACCGAAAAAACAAACTCAGCGAAAGGTGACTGAACTAAGTCATCTTTCTGATCGTTTACAGCAGGAAAGCTATATATTAGCAGAAATTCCAATCATATTTCAAGAACCTGATAATACACCGAACCCAAAAACAAAGAAAAATAATTTTGATTTTTTGAAACGCAGTCAAGTTTACAATAAACAAGACAATCAGTTTCACAAAGAAAGAGCCAAGGCTCAAGAATTAAATCTGACACGTTTTAAAGACATTAAT

SEQ ID NO: 7624 - protein, 205 aa, Streptococcus agalactiae
MNRGSRRFPLIADDEPVMSPLVKMNLYDNEDLINNIRGFYQEKTYQSMVKSNYEHEEISHPKVIENDPVPPQSFVKKATELSKSRQEAKRSVREKRQAYYAKQEFKAPSKEAFQQQLKATVPKKQTQRKVTELSHLSDRLQQESYILAEIPIIFQEPDNTPNPKTKKNNFDFLKRSQVYNKQDNQFHKERAKAQELNLTRFKDIN

SEQ ID NO: 7625 - protein, 96 aa, Streptococcus agalactiae
ATGAATGAAAAATACCAATCTGATAAGCTTTACTTAGTTGAAAACTTTGAAAAAACAGAAAAATTAGTTTATAATAGGTCTGTTGTAGAAAGGAAG

SEQ ID NO: 7626 - protein, 32 aa, Streptococcus agalactiae; identical to SEQ ID NO: 2986

SEQ ID NO: 7627 - protein, 3096 aa, Streptococcus agalactiae
ATGAGTAGAATGATTCCAGGACGTATTCGAAATCAAGGTATAGAACTCTACGAACAAGGTTTGGTGTCCTTGATTTCTCAAGAAGGTAATCTATTAAAAGCTAAAGTTGGGGATTGTCAGATTGAATATTCATTAGTAACAGAAGAAACAAAATGTTCTTGTGATTTTTTTGCAAGAAAAGGCTATTGTCAACATTTAGCTGCTCTGGAGCATTTCTTGAAAAACGACCCAGAGGGTAAAGCAATCTTATCTAAAGTTCAAGTTCAACAAGAAAGTCAACAAGAAACTAAGAAGAAAACCTCTTTTGGTAGTGTTTTTTTAGATAGTCTAATTATTAATGAAGATGATACTATAAAATATCAACTATCGGCTCAAGGAGAACAAAATCCTTATGCTAATGATATCTGGTGGACTTTAAAAATTAGACGACTGCCTGATGATAGAAGTTATGTTATTCGTGACATCAAAGCTTTTTTAAATACTGTTCGAAAAGAAGCTTATTATCAGATTGGAAAACAATACTTTGAAACTTTGTCTTTGATACAGTTTGATGAGACCAGTCAAGAATTGATAGAATTTTTATGGAGGCTCATTCCAAGTCATTCAAGCAAAATTGATCTAGAGTTTATTTTACCAAATCAAGGTCGTCACCTTAGTCTCACTCGTGGTTTTTTTGAAGAGGGCGTTACTTTGATGAATGCTTTAGAAAATTTTTCATTTGAAAGTGATTTTCATCAATTTAATCACCTCTACTTTAAGGAATTAGAAGGTGAGGATCATCTTTATCAATTTAAGGTTATTGTCCATAGGCAATCAATTGAATTAGAAATCAAAGAGAAAGACTTAAAACCACTATTTGCGAATTCTTATTTGTTTTATCGCGATACTTTCTACCATCTTAATTTGAAGCAAGAAAAGATGGTAACGGCTATTCGTAGTCTTCCCATTGAGGGAGATTTAGCAAAACATATCCATTTTGATTTAGATGATCAAGATAAGTTAGCAGCTCATTTACTGGATTTTAAGGAGATTGGACTAGTAGATGCTCCACGGAGCTTCTCTATTCATGATTTTAAGGTAAATTTTGAGTTCGATATTAATAGTCAAAATGAAATTTTATTGCAAATGGTATTTGATTATGGTAATGATTTAACTGTTCATAATCGTCAAGAACTAGAACAGTTAACATTTGCTAGTCACTTCAAACATGAAGAAAAAATATTTAAACTCTTAGAAAGATATGGCTTTGCACCCCACTTTTCAACCAGCCATCCAGCATACAGTGCACAAGAATTATACGATTTTTATACCTATATGCTTCCACAATTTAAAAAAATGGGAACAGTGAGCTTATCCGCAAAATTGGAAAGTTATCGTCTCATAGAACGACCGCAAATTGATATTGAAGCTAAGGGAAGCCTGCTAGATATTTCTTTTGATTTCTCTGATTTACTGGAAAACGATGTTGATCAAGCTCTGGTAGCTTTGTTTGACAATAATCCTTATTTTGTGAATAAATCAGGGCAATTAGTTATTTTTGATGAAGAGACTAAGAAAGTAAGTGCAACTTTGCAAGGGTTGAGAGCTAGACGAGCAAAGAATGGGCATATTGAATTAGATAATATTGCAGCATTTCAATTATCAGAACTGTTTGCAAATCAAGATAATGTTAGCTTTTCACAACATTTTTACCAATTGATTGAAGATTTGAGACACCCAGAAAAGTTTAAAATACCTGGTCTATCTGTTTCAGCTTCCTTGCGCGATTATCAGCTTACAGGTGTCCGTTGGTTAAGTATGTTAGATCATTATGGCTTTGCAGGGATTTTAGCTGATGATATGGGGCTTGGAAAAACACTTCAAACGATTTCATTTTTAAGTACAAAACTAACTAGAGATTCTCGTGTGCTTATTTTATCACCATCAAGTTTAATTTATAATTGGCAAGATGAATTCCACAAATTTGCGCCAGACGTAGATGTAGCAGTTGCCTATGGTTCTAAGATTCGTAGAGATGAAATTATTGCTGAACGTCATCAAGTAATCATTACAAGTTATTCATCATTTAGGCAGGATTTTGAGACTTATTCTGAAGGAAATTATGATTATTTAATTTTGGATGAAGCACAGGTTATGAAAAATGCTCAAACTAAAATAGCCCATAGCTTGAGATCTTTTGAGGTCAAAAACTGTTTTGCATTATCGGGAACACCTATTGAGAATAAACTGTTAGAAATTTGGTCCATTTTCCAGATCATTTTACCTGGTTTATTACCTGGTAAGAAAGAGTTTTTGAAGTTGAACCCTAAACAAGTTGCTCGTTATATCAAACCATTTGTGATGAGACGTCGAAAAGAAGAAGTTCTCCCAGAATTACCGGATTTGATTGAAATGAACTATCCAAATGAAATGACAGACAGTCAAAAAGTTATCTATTTGGCGCAATTACGCCAAATTCAAGAAAGTATCCAACATTCTAGTGACGCTGACTTAAATCGTCGTAAAATTGAAATTTTATCTGGCATCACACGATTACGTCAAATTTGCGACACTCCACGTCTTTTTATGGATTATGATGGTGAAAGCGGTAAGTTAGAAAGCCTACATCAACTTTTAACACAAATTAAGGAAAATGGACATCGTGCTCTGATTTTTTCTCAGTTCAGGGGTATGTTAGATATCGCAGAACGTGAGATGGTAGCTATGGGGCTTACAACTTATAAAATTACTGGTTCTACACCAGCAAATGAACGTCATGAAATGACCAGAGCATTTAATGCAGGATCAAAAGATGCTTTCTTGATTTCTTTAAAAGCTGGTGGCGTTGGTCTCAACCTTACAGGAGCTGATACCGTTGTTCTGATTGACTTGTGGTGGAATCCAGCTGTTGAAATGCAGGCGATTAGTCGCGCACATAGGTTGGGGCAAAAAGAGAATGTCGAGGTTTATCGCTTGATTACTAGAGGCACAATCGAAGAAAAAATTCTAGAAATGCAAGAAACTAAAAAACATTTGGTTACAACAGTTCTGGATGGAAATGAAACCCATGCTAGCATGAGTGTAGATGATATTCGAGAGATACTTGGAGTTTCTAAA

SEQ ID NO: 7628 - protein, 1032 aa, Streptococcus agalactiae
MSRMIPGRIRNQGIELYEQGLVSLISQEGNLLKAKVGDCQIEYSLVTEETKCSCDFFARKGYCQHLAALEHFLKNDPEGKAILSKVQVQQESQQETKKKTSFGSVFLDSLIINEDDTIKYQLSAQGEQNPYANDIWWTLKIRRLPDDRSYVIRDIKAFLNTVRKEAYYQIGKQYFETLSLIQFDETSQELIEFLWRLIPSHSSKIDLEFILPNQGRHLSLTRGFFEEGVTLMNALENFSFESDFHQFNHLYFKELEGEDHLYQFKVIVHRQSIELEIKEKDLKPLFANSYLFYRDTFYHLNLKQEKMVTAIRSLPIEGDLAKHIHFDLDDQDKLAAHLLDFKEIGLVDAPRSFSIHDFKVNFEFDINSQNEILLQMVFDYGNDLTVHNRQELEQLTFASHFKHEEKIFKLLERYGFAPHFSTSHPAYSAQELYDFYTYMLPQFKKMGTVSLSAKLESYRLIERPQIDIEAKGSLLDISFDFSDLLENDVDQALVALFDNNPYFVNKSGQLVIFDEETKKVSATLQGLRARRAKNGHIELDNIAAFQLSELFANQDNVSFSQHFYQLIEDLRHPEKFKIPGLSVSASLRDYQLTGVRWLSMLDHYGFAGILADDMGLGKTLQTISFLSTKLTRDSRVLILSPSSLIYNWQDEFHKFAPDVDVAVAYGSKIRRDEIIAERHQVIITSYSSFRQDFETYSEGNYDYLILDEAQVMKNAQTKIAHSLRSFEVKNCFALSGTPIENKLLEIWSIFQIILPGLLPGKKEFLKLNPKQVARYIKPFVMRRRKEEVLPELPDLIEMNYPNEMTDSQKVIYLAQLRQIQESIQHSSDADLNRRKIEILSGITRLRQICDTPRLFMDYDGESGKLESLHQLLTQIKENGHRALIFSQFRGMLDIAEREMVAMGLTTYKITGSTPANERHEMTRAFNAGSKDAFLISLKAGGVGLNLTGADTVVLIDLWWNPAVEMQAISRAHRLGQKENVEVYRLITRGTIEEKILEMQETKKHLVTTVLDGNETHASMSVDDIREILGVSK

SEQ ID NO: 7629 - protein, 1308 aa, Streptococcus agalactiae
ATGGTATTACCTACAGTTGCTATTGTTGGTCGTCCGAATGTTGGAAAATCAACATTATTTAACAGAATTGCAGGAGAACGTATTTCCATTGTTGAGGACGTTGAAGGAGTCACTCGTGATCGTATCTATACAACGGGTGAGTGGCTAAATCGTAAGTTTTCATTAATTGATACTGGTGGGATTGATGATGTTGATGCACCGTTTATGGAGCAAATTAAGCACCAAGCAGACATTGCTATGACAGAGGCTGATGTTATTGTGTTTGTTGTGTCGGGTAAAGAAGGTGTGACTGATGCAGATGAGTATGTCTCACGTATTCTTTATAAGACCAATAAACCGGTTATTTTAGCTGTTAATAAGGTAGATAATCCTGAGATGCGTAATGATATTTACGATTTCTACTCTCTTGGTTTAGGGGATCCTTATCCCTTGTCATCAGTTCATGGTATTGGTACTGGTGATATATTGGATGCTATTGTGGAAAATCTTCCGGTAGAAGAGGAAAATGAAAATCCAGATATTATTCGTTTTAGTTTGATTGGACGTCCAAATGTTGGGAAATCTAGTTTAATTAATGCCATCCTTGGGGAAGACCGTGTTATTGCTAGCCCAGTTGCTGGTACTACGCGCGATGCTATTGATACTAATTTCGTTGATAGCCAGGGGCAAGAGTATACTATGATTGATACTGCTGGTATGCGTAAATCTGGTAAGGTATATGAAAACACAGAGAAATATTCTGTTATGCGTTCTATGCGCGCCATCGACCGCTCAGATGTTGTTCTTATGGTGATTAATGCAGAGGAAGGTATTCGTGAGTATGACAAGCGTATTGCAGGGTTTGCACATGAAGCTGGTAAAGGTATTATTATTGTAGTTAATAAATGGGATACTATCGAAAAAGACAATCATACTGTCAGTCAGTGGGAAGCTGATATACGAGATAACTTCCAATTCTTGTCTTATGCGCCAATTATCTTTGTTTCTGCAGAGACAAAACAACGTTTGCACAAGCTACCAGATATGATTAAACGTATTAGCGAAAGTCAAAACAAACGTATTCCGTCTGCTGTATTAAATGATGTGATTATGGATGCTATTGCTATTAATCCAACACCAACTGATAAAGGAAAACGTCTTAAGATTTTCTACGCAACTCAAGTTGCTGTTAAACCACCAACTTTCGTTGTTTTTGTTAACGAAGAAGAATTGATGCACTTTTCATATCTTCGTTTCTTAGAAAATCAAATCCGTGAAGCATTTGTTTTTGAAGGAACACCAATTAATCTAATAGCACGTAAACGTAAA

SEQ ID NO: 7630 - protein, 436 aa, Streptococcus agalactiae
MVLPTVAIVGRPNVGKSTLFNRIAGERISIVEDVEGVTRDRIYTTGEWLNRKFSLIDTGGIDDVDAPFMEQIKHQADIAMTEADVIVFVVSGKEGVTDADEYVSRILYKTNKPVILAVNKVDNPEMRNDIYDFYSLGLGDPYPLSSVHGIGTGDILDAIVENLPVEEENENPDIIRFSLIGRPNVGKSSLINAILGEDRVIASPVAGTTRDAIDTNFVDSQGQEYTMIDTAGMRKSGKVYENTEKYSVMRSMRAIDRSDVVLMVINAEEGIREYDKRIAGFAHEAGKGIIIVVNKWDTIEKDNHTVSQWEADIRDNFQFLSYAPIIFVSAETKQRLHKLPDMIKRISESQNKRIPSAVLNDVIMDAIAINPTPTDKGKRLKIFYATQVAVKPPTFVVFVNEEELMHFSYLRFLENQIREAFVFEGTPINLIARKRK

SEQ ID NO: 7631 - protein, 900 aa, Streptococcus agalactiae
ATGAAATCAGTGGGACAAGCATTAGAAAATCAAGGGAGAGTGCCTCGCAATACAAATGATGAGCTTATTCAAATGATTTTATCAGATGCTCAGGTAGCGGAGTTCATTAAAACCCACCAACTTTCTCAGCGTGAAATAAATATCAGCATGTCTAAATTTAATCAATTTTTGATTGAGCGTCAGAAATTTAAAAATAAGGATAGTCAATATATTGCTAAAGGCTATGAGCCTATTTTGGTTATGAATGAAGGTTATGCAGATGTTTCTTATTTAGAAACACGAGAGTTAATTGAAGCACAAAAAAAACAAGCTATCAGTGATCGTATTAATTTAGTTAATCTACCCAAGTCCTATCGGAATATCAGAATGACTGATTTTGATATTAATAACGAGAGTCGAATGAAAGCTATGTCACAACTGCTTGATTTTGTAGAGACTTATCCTTCATATAATCATAAGGGGCTTTATTTATATGGAGATATGGGGGTTGGGAAATCCTATTTAATGGCAGCAATGGCGAGGGAATTATCAGAGAGAAAGGGTGTGTCAACGACTCTTCTTCATTTCCCTAGTTTTGCTATTGATGTCAAAAATGCTATTTCAAGCGGAACTGTAAAAGATGAAATTGATGCTGTGAAAAGTGTTCCAATTTTGATTTTAGATGATATTGGGGCTGAACAGGCAACGTCTTGGGTTCGTGACGAGATTTTACAAGTTATATTACAACATCGTATGCTAGAAGAGTTGCCCACTTTCTTTACGTCAAATTATAGTTTTAACGATTTGGAAAGAAAATGGGCTAATATAAAAGGAAGCGACGAAACTTGGCAAGCGAAACGAGTTATGGAGCGCGTACGGTATTTAGCGATAGAATTCCACTTAGAAGGACCGAATCGCCGT

SEQ ID NO: 7632 - protein, 300 aa, Streptococcus agalactiae
MKSVGQALENQGRVPRNTNDELIQMILSDAQVAEFIKTHQLSQREINISMSKFNQFLIERQKFKNKDSQYIAKGYEPILVMNEGYADVSYLETRELIEAQKKQAISDRINLVNLPKSYRNIRMTDFDINNESRMKAMSQLLDFVETYPSYNHKGLYLYGDMGVGKSYLMAAMARELSERKGVSTTLLHFPSFAIDVKNAISSGTVKDEIDAVKSVPILILDDIGAEQATSWVRDEILQVILQHRMLEELPTFFTSNYSFNDLERKWANIKGSDETWQAKRVMERVRYLAIEFHLEGPNRR

SEQ ID NO: 7633 - protein, 1172 aa, Streptococcus agalactiae
ATGAGTCCAATAGATGAGTTTACATATATTAAGCAAAATAAGATTGTTTATGATAGTAATAGTTTAATACAATTGTATTTCCCAATTATGGGAAGTGATGCCATGGCACTCTATGATTATTTTGTTCATTTTTTTGATGACGGAATACGACGTCATAAATTTTCAGGGTTCTCAATCATCTGCAATACGGGATGCCAAGATTTCAAGATGCATTGGTAATGTTAACAGCTTTGGATTTGTTGACTGTTTACCAAGCCACAGGTACTTACCTTGTTAAGTTGAATCAAGCTATGTCAAATGAGTTATTTTTATCTAATCCCATCTATCGTCGTTTGTTAGAAAAACGTATAGGAGAGGTAGCAGTGGCAGAATTAGATATGAAAATACCTAAAAATGCTAGAGATATCTCTAAAAAATTTACAGATGTTTTCTCGGATTTAGGACAACCAAAACAAGAGGTAAACCGGAGTAAAAATGTTTTTGACTTGGAAAGTTTCAAACGTTTGATGATGCGAGATGGCTTACGCTTTAACAATGAAAAAGATGATGTCTTAGGTATTTATAGTGTATCAGAACTTTATCATTTAAATTGGTATGATACCTATCAATTAGCAAAACAAACAGCTATCAATGGAATGATTGCGCCTCAGCGAATGAAAGTTCAACAAAATGAGGGGCAGCATATTAAAGATAATCAGAGTTTTACAAATAATGAAAAGGTCATACTAAGGGAATCTAAAAATGATAGTGCTCTAGTGTTCCTTGAAAAAATCAAGAGAAGCCGTAAGGCAGTGACAACAAGTGGTGAGAAGACTTTACTTGAGGATTTGGCAAAAATGAATTTCCTAGACGAAGTCATTAATGTTATGGTTTTATATACCTTGAATAAGACAAAATCTGCTAACTTAAATAAGGCCTATATCATGAAAGTTGCTAATGATTTTGCCTTTCAGAATGTTATGACGGCCGAAGATGCTGTGCTTAAAATTCGTGATTTTTCAGATCAAAAAGTAAGGACTAAAACAGAAACGAAGAAGAAACAATCGAATGTTCCTGAATGGAGTAATCCTGATTATAAAGATGAGGTTAGCCCAGAAAAAGAAATTGAATTAGAACAGTTTAAAACGGATGCCCTCAAGCGTTTAGAACGATTAGGAAAGGATGGTGAATCA

SEQ ID NO: 7634 - protein, 391 aa, Streptococcus agalactiae; identical to SEQ ID NO: 2994

SEQ ID NO: 7635 - protein, 477 aa, Streptococcus agalactiae
ATGCGTTGTCCAAAATGTGGCTATAATAAATCTAGTGTGGTTGATAGCCGACAAGCTGAAGAAGGTACGACTATTAGACGCCGGAGAGAGTGCGAAAAATGTGGCAACCGCTTTACAACATTTGAACGTTTGGAAGAATTGCCTCTTTTAGTCATAAAGAAAGATGGTACTCGCGAGCAATTTTCTCGAGATAAAATTTTGAATGGTATTATTCAGAGTGCTCAAAAACGCCCTGTTTCGAGCGAAGATATTGAAAATTGTATCTTACGTATCGAACGTAAAATTAGGAGTGAGTATGAAGATGAGGTTTCTAGTATCACTATCGGAAATTTAGTGATGGATGAACTCGCCGAATTAGATGAGATTACTTATGTGCGCTTTGCTAGTGTTTATAAATCTTTTAAAGATGTAGACGAAATTGAAGAACTACTTCAACAAATTACAAAGCGCGTACGGAGTAAAAAGAGTGGTAGCGTG

SEQ ID NO: 7636 - protein, 159 aa, Streptococcus agalactiae
MRCPKCGYNKSSVVDSRQAEEGTTIRRRRECEKCGNRFTTFERLEELPLLVIKKDGTREQFSRDKILNGIIQSAQKRPVSSEDIENCILRIERKIRSEYEDEVSSITIGNLVMDELAELDEITYVRFASVYKSFKDVDEIEELLQQITKRVRSKKSGSV

SEQ ID NO: 7637 - protein, 1503 aa, Streptococcus agalactiae
GTGAAAAATAAAAAAGATCAGTTTATAGGGGTAAAACAACCTCTGTCAAAAAAATTATCGCAATTAGTTTTTATCTTATTTTTTAGCCTATTTACAGTATTTTCTGTTTTAGTTTATACTTCGGCAACAAGATACGTCCTTCACAGGGAAAAAATTAATGTCGGTAGGTCATTAGAAAAAACTAGAGTTCGTTTGTCGCAAGCGAACTCTAGTTTGACATCCGATGATATTTTAGAGATCCTGTACAACCAGGTTTTTGCGGATGACATCTATCCTCATAAGCGTCAAAATGGAATTGTTAGAACGGGCGAGTCAATCGATAGTATTCTTTATGTTAATCAAGAAATGACCCTATACGATGTCAACAGGAAACCAGTTTTTTCTACACTGAGAACGGGTATGCCAACTATTGGTAAATCCATGGGAAAAGTTATCATCTCTAAAGTTGCAGATATGGAAGGTTTTGTTGGTACAAAAGCAATCTACTCTCAAAAAACAGGACAGTTGCTTGGATACGTTCAAATTTTCTATAATTTAGGTCGTTATTATAGTATGAGGCAAAACATCATTGTTTTCTTGATTATGATGGAAGTTTTAGGGACTGTTTTAGCCTTGGTCGTTATTAATAGTGCTACTAAGCGTATTGTTCGTCCGGTTAAAAATTTACACGACTTAATGCATCAGATATCTGAAAATCCTAGTAACTTAGAAATTAGAAGTAAGGTCCGTTCAGAAGACGAAATTGGAGAATTGTCTAGGATTTTTGATGGGATGTTGGATCAGTTGGAAGACTATACTCGTCGACAATCACAATTCATTAGTGATGTTAGTCATGAATTAAGAACGCCTGTCGCTGTTGTAAAGGGTCATATTGGTTTATTACAACGTTGGGGGAAAGATGATCCAGAAATTCTTGAAGAAAGTTTAGCAGCGGCATACCATGAGGCAGATCGTATGTCCTTAATGATTAATGACATGTTAAATATGATCCGTGTCCAAGGAAGCTTGGAACTTCATCAAGATGAAGTGACAGATTTATCAAGCTCTATATCAGTTGTTATTGAAAATTTCCGTATTTTGAGAGAAGATTTTCAATTTATTTTTGAAAATAATATTTCAGATATCGTTTGGGGAAAGATATATAAGATACATTTTGAGCAAGCTCTCATGATCTTAATTGATAACGCTATCAAGTATTCTCCTAGTTATAAAGAAGTCAGTGTTGTTTTATCAGTAGACAATGATTTTGCGACAGTAGTTGTAAAAGATAAAGGAGAAGGTATCTCAGATGAAGATATTGAGTTTATCTTTGATCGTTTTTATCGAACTGATAAATCACGTAACAGAGAAAGTACACAAGCTGGTTTAGGTATCGGGCTCTCAGTGTTTAAACAAATTATGGATGCTTACCATTTAAAGGTGGATATTAAAAGTGAACTAAATCAAGGGACTGAATTCATTGTTCGCATTCCTATAAAAAAATTTGAAGAAACTAAAGAAATA

SEQ ID NO: 7638 - protein, 501 aa, Streptococcus agalactiae
MKNKKDQFIGVKQPLSKKLSQLVFILFFSLFTVFSVLVYTSATRYVLHREKINVGRSLEKTRVRLSQANSSLTSDDILEILYNQVFADDIYPHKRQNGIVRTGESIDSILYVNQEMTLYDVNRKPVFSTLRTGMPTIGKSMGKVIISKVADMEGFVGTKAIYSQKTGQLLGYVQIFYNLGRYYSMRQNIIVFLIMMEVLGTVLALVVINSATKRIVRPVKNLHDLMHQISENPSNLEIRSKVRSEDEIGELSRIFDGMLDQLEDYTRRQSQFISDVSHELRTPVAVVKGHIGLLQRWGKDDPEILEESLAAAYHEADRMSLMINDMLNMIRVQGSLELHQDEVTDLSSSISVVIENFRILREDFQFIFENNISDIVWGKIYKIHFEQALMILIDNAIKYSPSYKEVSVVLSVDNDFATVVVKDKGEGISDEDIEFIFDRFYRTDKSRNRESTQAGLGIGLSVFKQIMDAYHLKVDIKSELNQGTEFIVRIPIKKFEETKEI

SEQ ID NO: 7639 - protein, 687 aa, Streptococcus agalactiae
ATGGGTAAAAAGATCTTAATAATCGAAGATGAGAAAAATTTAGCTCGCTTCGTCTCGTTAGAACTACTACATGAAGGATATGATGTTGTTGTTGAAACAAACGGTCGTGAAGGATTGGACACAGCATTAGAAAAAGATTTTGATTTGATTCTACTGGATTTAATGCTTCCAGAGATGGATGGTTTCGAAATCACACGTCGCCTGCAGGCTGAAAAAACAACCTATATCATGATGATGACAGCACGTGATTCTGTTATGGATATTGTAGCTGGTCTTGATCGTGGAGCAGATGATTATATTGTTAAGCCGTTTGCAATCGAAGAATTATTAGCACGTGTTAGAGCGATTTTCCGACGCCAAGAAATTGAAACGAAGACAAAAGAAAAAGGTGATAGTGGTAGTTTCCGTGATTTGTCATTAAATACTCATAATCGTTCAGCGATGCGTGGTGATGAGGAAATTTCACTAACAAAACGTGAATTTGATTTGTTGAATGTCTTGATGACAAATATGAATCGTGTTATGACACGAGAAGAGTTGCTAGAACATGTTTGGAAATACGATGTGGCAGCAGAGACAAACGTTGTTGATGTTTATATCCGTTACCTAAGAGGTAAAATTGATATCCCAGGTCGTGAATCATATATTCAAACTGTTCGCGGAATGGGCTATGTGATTCGTGAAAAA

SEQ ID NO: 7640 - protein, 229 aa, Streptococcus agalactiae; identical to SEQ ID NO: 3000

SEQ ID NO: 7641 - protein, 456 aa, Streptococcus agalactiae
ATGGAGCGTCATTCAGAGATAATGGATATTTCTGATATTCAAGTTTCAGGTCATGTGGTGTATGAAGATGGTCTCTATCTACTTGACTATAATATGGCTTACGATATTACATTACCGTCTAGTCGTTCTATGAAACCAGTTGTTTTATCTGAAAAGCAAACTATTAATGAAGTTTTTATTGAAGCTGAAAATGTTAGCACAAAAAAAGAGCTCGTTGATCAGGATTTGGTCTTAATATTAGAGGAAGATGATATTAATTTAGAAGAAAGCGTTATCGATAATATCTTGTTAAATATACCTCTTCGTGTTCTGGCAGCTGATGAGGTTGGGGTAGAAGCGGATTTATCAGGTAAAAATTGGTCGTTAATGACTGAAAAGCAGTATGAAGAAAAACAAGCTAAAGAAAAAGAAAAATCTAATCCTTTCGCAGCCTTAGAAGGTATGTTTGATAGTGAT

SEQ ID NO: 7642 - protein, 152 aa, Streptococcus agalactiae
MERHSEIMDISDIQVSGHVVYEDGLYLLDYNMAYDITLPSSRSMKPVVLSEKQTINEVFIEAENVSTKKELVDQDLVLILEEDDINLEESVIDNILLNIPLRVLAADEVGVEADLSGKNWSLMTEKQYEEKQAKEKEKSNPFAALEGMFDSD

SEQ ID NO: 7643 - protein, 888 aa, Streptococcus agalactiae
TTGCTGTATCAACAAATTGCAAGTAATAAGAGAAAAACAGTTGTCTTGTTAATTGTCTTCTTCTGTCTTTTAGCAGCTATTGGAGCAGCTGTAGGTTATTTGGTATTAGGCAGCTACCAATTTGGGCTTGTTCTAGCTCTAATTATTGGGGTTATCTATGCAGTAAGTATGATTTTTCAATCAACTAATGTTGTTATGTCAATGAACAATGCGCGTGAAGTTACAGAAGATGAGGCGCCAAATTATTTTCATATTGTTGAAGATATGGCAATGGTAGCTCAGATACCTATGCCACGCGTTTTCATTGTTGAAGATGACTCCCTAAATGCCTTTGCCACAGGCTCTAAGCCAGAAAATGCTGCTGTTGCAGCAACAACGGGCCTATTAGCTGTTATGAACCGCGAAGAGCTAGAGGGTGTTATTGGACATGAGGTTAGTCATATTCGTAATTATGATATCCGTATTTCAACCATTGCAGTAGCTTTAGCGAGTGCTGTAACTCTAATATCAAGCATTGGTAGCCGTATGTTATTTTACGGCGGAGGTCGTAGGCGTGATGATGACAGAGAAGATGGAGGAAACATCTTGGTTTTGATTTTCTCTATTTTATCACTAATCCTTGCACCATTAGCCGCTAGTTTAGTTCAATTAGCTATTTCAAGACAGCGCGAATACTTAGCAGACGCTAGTTCTGTTGAGTTAACAAGAAATCCACAAGGGATGATCTCTGCTTTAGAAAAACTTGATCGTTCTGAACCTATGGGGCATCCAGTAGATGATGCTAGTGCGGCTCTCTATATCAATGACCCAACGAAAAAAGAAGGGTTAAAGTCTTTATTTTATACGCATCCACCAATTGCAGATCGTATTGAGCGTTTGCGTCATATG

SEQ ID NO: 7644 - protein, 296 aa, Streptococcus agalactiae
MLYQQIASNKRKTVVLLIVFFCLLAAIGAAVGYLVLGSYQFGLVLALIIGVIYAVSMIFQSTNVVMSMNNAREVTEDEAPNYFHIVEDMAMVAQIPMPRVFIVEDDSLNAFATGSKPENAAVAATTGLLAVMNREELEGVIGHEVSHIRNYDIRISTIAVALASAVTLISSIGSRMLFYGGGRRRDDDREDGGNILVLIFSILSLILAPLAASLVQLAISRQREYLADASSVELTRNPQGMISALEKLDRSEPMGHPVDDASAALYINDPTKKEGLKSLFYTHPPIADRIERLRHM

SEQ ID NO: 7645 - protein, 187 aa, Streptococcus agalactiae
TTGCTGTATCAACAAATTGCAAGTAATAAGAGAAAAACAGTGTCTTGTTAATTGTCTTCTTCTGTCTTTTAGCAGCTATTGGAGCAGCTGTAGGTTATTTGGTATTAGGCAGCTACCAATTTGGGCTTGTTCTAGCTCTAATTATTGGGGTTATCTATGCAGTAAGTATGATTTTCATCAACTAATT

SEQ ID NO: 7646 - protein, 63 aa, Streptococcus agalactiae
  VARIANT 14: Xaa = Any Amino Acid
MLYQQIASNKRKTXVLLIVFFCLLAAIGAAVGYLVLGSYQFGLVLALIIGVIYAVSMIFHQLI

SEQ ID NO: 7647 - protein, 552 aa, Streptococcus agalactiae
ATGGGAACTATGATTTTAATAGCAATTATTGCTTTGTTTGTTATTTGGTTGATTGTTGCTTATAACAGTTTAGTTAGAAGTCGCATGCATACTAAAGAATCATGGAGTCAAATAGACGTTCAATTGAAACGTCGTAACGATTTAATTCCAAACCTAATCGAAACTGTTAAAGGCTATGCTGCGTACGAAGGGAAAACACTTGAGAAGATTGCAGAACTGCGTGCTCAAGTTGCTAAAGCTAACACACCTGCTGAAGCAATGACAGCAAGTAATGAGCTAACAAGACAGCTTTCAAGTATTTTAGCGGTTGCTGAAAATTACCCAGATTTAAAAGCCAACAATAGCTTTGTTAAACTTCAAGAAGAACTAACTAATACGGAAAATAAAATTTCTTATTCACGTCAGTTATATAACACAACAACATCTAATTATAATGTAAAATTAGAAACTTTCCCAAGTAATATTGTTGGAAAACTATTTGGGTTCAAACCAAGCCAATTCTTAGAAACTCCTGAAGAAGAAAAAGAAGTGCCAAAAGTTTCCTTTGACTTT

SEQ ID NO: 7648 - protein, 184 aa, Streptococcus agalactiae; identical to SEQ ID NO: 3006

SEQ ID NO: 7649 - protein, 711 aa, Streptococcus agalactiae
ATGACACCCCAAGCATTTTATCAAGTTCTGATAGAGCATGGTATTACACTTACTGACAAACAGAAAAAACAATTTGAAACTTATTTTAGACTTCTTGTTGAATGGAATGAGAAAATTAACCTAACAGCTATTACAGATAAGGAAGAGGTTTACTTAAAGCACTTCTATGATTCTATTGCGCCGATTTTACAAGGTTATATTGACAATAGTCCTCTTAGCATTTTAGATATTGGTGCTGGTGCAGGTTTTCCTAGTATTCCTATGAAAATCCTTTATCCTGAAATTGATATTACTATTATTGATTCACTGAATAAACGCATTAATTTTCTAAACATATTAGCTAATGAACTTGAACTTTCAGGAGTTCACTTCTTCCATGGGCGCGCTGAGGACTTTGGTCAAGATAAAGTATTTCGAGCTAAATTTGATATCGTAACAGCTCGTGCAGTAGCTAGAATGCAGGTTCTAGCAGAATTGACAATACCTTTTCTTAAAGTTAATGGTCGCTTGATTGCACTGAAAGCTGCAGCTGCTGAAGAGGAATTAATTTCTGCAGAAAAAGCTTTGAAAACACTATTTTCACAAGTAACTGTAAATAAAAATTATAAGTTACCTAATGGTGATGACCGAAATATCACAATCGTTAGCAAGAAAAAAGAAACGCCTAATAAATACCCTCGTAAAGCTGGTACTCCAAACAAGAAGCCTTTG

SEQ ID NO: 7650 - protein, 237 aa, Streptococcus agalactiae
MTPQAFYQVLIEHGITLTDKQKKQFETYFRLLVEWNEKINLTAITDKEEVYLKHFYDSIAPILQGYIDNSPLSILDIGAGAGFPSIPMKILYPEIDITIIDSLNKRINFLNILANELELSGVHFFHGRAEDFGQDKVFRAKFDIVTARAVARMQVLAELTIPFLKVNGRLIALKAAAAEEELISAEKALKTLFSQVTVNKNYKLPNGDDRNITIVSKKKETPNKYPRKAGTPNKKPL

SEQ ID NO: 7651 - protein, 1377 aa, Streptococcus agalactiae
ATGAAACATTTCTTTGATTACAAGACAATGTCTGTCGCACGTAAACTCAGCATTAGTTTTATCGCTGTTATCCTATTGGGAAGTATTTTACTTTCACTTCCAATTTTTCAATATGCTAACGCCCCTAAAACACATTACATTGATCACCTTTTCACGACTGTTTCAATGGTATGTGTAACTGGTTTATCTGTTTTTCCTATCAGTAAGGTTTATAACGGTTGGGGGCAGATTGTAGCTATTTTACTCATGCAAACAGGGGGACTTGGTTTAGTAACACTAATGTCGTTGTCTTACTATACCCTAAGACGTAAAATGTCGTTAAATGATCAGACCCTTTTGCAGTCAGCGATAACTTATAACAGTTCGACAGATTTAAAAAAATATCTCTATATGATTTTTAAAGTAACTTTAACTTTAGAAGTTTTAGCAGCCAGCATTTTAGCCATAGATTTTATTCCTCGATTTGGTTTGGGTCATGGTATCTTTAATAGTATATTCTTAGCTGTCTCAGCCTTTTGTAATGCCGGTTTTGATAATCTAGGGGCAACGAGCTTAGCTCAATTTAAACTAAATCCTTTGGTTAACATTATCGTTTGTTTCTTGATTATTTCAGGAGGACTTGGATTTGCCGTATGGAAAGATTTAATTGAAGCTACTATACAAACATCTCACAAGGGACCAAAATTAATCAAGACATTTCCAAAACGCCTCAGCAACCATTCTAAACTGGTTTTAAAAACAACAACCATTATTTTACTAACAGGAACTTTGCTTTCTTGGTTGTTAGAGTTTGGAAATTTTAGAACAATTGCTAATTTATCTCTACCTAAACAACTAATGGTCAGCTTTTTCCAAACAGTTACGATGCGTACCGCTGGATTTTCAACTATTGATTATACCCAAACTGATTTCGCAACCAACCTTGTTTATATTATCCAAATGTTAATTGGAGGAGCTCCTGGTGGAACGGCAGGAGGATTTAAAGTCACTGTTATCGCCATTTTACTCTTACTATTTAAGGCCGAACTGAGTGGCCAAAGCCAAGTGACTTTTCATTATCGAACAATTCCTTCCAGTATTATTAAACAAACACTATCGATTTTAACTTTCTTTTTTATCATACTTATTAGCGGCTATCTCCTTCTTCTGGAACTCAATCCCCATATAGATCCTTTTTCTCTTTTCTTTGAGGCATCTAGTGCCTTAGCAACCGTGGGTGTGACAATGAACACTACCAATCAATTAAGTCTGGGCGGTCGAATTGTAATTATGTTCCTCATGTTTATTGGTCGAGTCGGTCCAATTACCGTACTGCTATCAATTCTTCAGAAAAAAGAGAAGGAAATTCACTATGCTGAAACAGAAATTATTCTAGGT

SEQ ID NO: 7652 - protein, 459 aa, Streptococcus agalactiae
MKHFFDYKTMSVARKLSISFIAVILLGSILLSLPIFQYANAPKTHYIDHLFTTVSMVCVTGLSVFPISKVYNGWGQIVAILLMQTGGLGLVTLMSLSYYTLRRKMSLNDQTLLQSAITYNSSTDLKKYLYMIFKVTLTLEVLAASILAIDFIPRFGLGHGIFNSIFLAVSAFCNAGFDNLGATSLAQFKLNPLVNIIVCFLIISGGLGFAVWKDLIEATIQTSHKGPKLIKTFPKRLSNHSKLVLKTTTIILLTGTLLSWLLEFGNFRTIANLSLPKQLMVSFFQTVTMRTAGFSTIDYTQTDFATNLVYIIQMLIGGAPGGTAGGFKVTVIAILLLLFKAELSGQSQVTFHYRTIPSSIIKQTLSILTFFFIILISGYLLLLELNPHIDPFSLFFEASSALATVGVTMNTTNQLSLGGRIVIMFLMFIGRVGPITVLLSILQKKEKEIHYAETEIILG

SEQ ID NO: 7653 - protein, 669 aa, Streptococcus agalactiae
ATGAAAACAAAAATTATTGGTGTACTTGGTCTAGGAATATTTGGACAAACACTCGCACAAGAACTAAGTAACTTTGAACAAGATGTTATTGCTATTGACAGCAATCCTGAAAATGTACAAGCTGTCGCTGAAGTTGTTACAAAAGCAGCTATCGGAGACATTACTGATTTAGCTTTCCTAAAACACATCGGGATCAGTGACTGTGATACTGTTATTATTGCTACAGGAAACAGTTTAGAGAGCTCAGTATTGGCCGTAATGCACTGTAAAAAGTTAGGCGTCCCTCAAGTTATTGCTAAAGCTCGAAACCTTGTATACGAAGAAGTACTTTATGAAATTGGTGCTGATTTGGTTATCTCTCCGGAGCGAGAATCTGGGCAAAATGTTGCTGCAAACCTCATGAGAAATAAAATTACAGATGTCTTCCAGATTGAATCTGATATTTCTGTCATTGAATTTAAAATTCCCAAATCATGGGTAGGGAAAACTGTCGAACAATTAAATATCCGTCACAAGTTTGATCTTAACCTCATAGGTATTAGAAAAGCAAAAAACAAACCTGTCGATACCGAAGTTCCAATCAATAGTCCACTTGAAGAAGGTATTATTCTAGTGGCTATCGCTAACTCAGATGCCTTCCAACGCTATGACTATTTAGGATACTTTAAC

SEQ ID NO: 7654 - protein, 223 aa, Streptococcus agalactiae
MKTKIIGVLGLGIFGQTLAQELSNFEQDVIAIDSNPENVQAVAEVVTKAAIGDITDLAFLKHIGISDCDTVIIATGNSLESSVLAVMHCKKLGVPQVIAKARNLVYEEVLYEIGADLVISPERESGQNVAANLMRNKITDVFQIESDISVIEFKIPKSWVGKTVEQLNIRHKFDLNLIGIRKAKNKPVDTEVPINSPLEEGIILVAIANSDAFQRYDYLGYFN

SEQ ID NO: 7655 - protein, 828 aa, Streptococcus agalactiae
ATGGCTAATCAATTAATTGGTTATCAAGAGGGTTATGGCTTTCTATACAGACTATCAGGTGCCAGTAAGTTACTATTTTTTATTTTAGTTTCTGTTGCTTGCATGACCACTTATGATACAAGATTTTTAATTCTTGTTTCATTGGGATCGCTAGTCTTATTTAGATTAGCAAAAATCAAATGGCAACAGGTGTCCTTTGTTATGACTTTAGTTGTTGTATTCGCTGTTTTAAATATTATAATGGTCTATCTTTTTGCTCCCCATTATGGTGATAAGATTTATGGTAGTTCTTCTTTATTGTTAAAAGGAATTGGCCCGTATGATGTGACTAGCCAAGAGTTGTTTTACCTCTTTAATCTGATTTTAAAATACTTTTGTACAGTGCCTTTAGCTCTTTTGTTTTTGATGACAACTAATCCTAGTCAGTTCGCATCAAGTTTAAATCAATTAGGTTTATCATATAAAATAGCTTATGCTGTTAGTTTGACCCTTAGATATATACCTGATGTTCAAGAAGAATTTTATACAATACGTCGAGCACAAGAGGCAAGAGGAATAGAATTATCAAAAAAATCGAACTTAGTAGCACGCATTAAGGGGAATTTACAGATTGTCACACCATTAATTTTTAGCTCTCTAGAACGTATTGATACAGTAGCAACTGCTATGGAACTTCGACGATTTGGTAAAAATAAAAGACGTACTTGGTACTCTAAGCAATCTTTGGAAAAAAGTGACATTGTCTTAATCATACTTGCTCTAGCTAGTCTGTTTGTAAGCCTTTATTTAATTCACCTTAATCATGGACGTTTCTATAACCCATGGCAA

SEQ ID NO: 7656 - protein, 276 aa, Streptococcus agalactiae
MANQLIGYQEGYGFLYRLSGASKLLFFILVSVACMTTYDTRFLILVSLGSLVLFRLAKIKWQQVSFVMTLVVVFAVLNIIMVYLFAPHYGDKIYGSSSLLLKGIGPYDVTSQELFYLFNLILKYFCTVPLALLFLMTTNPSQFASSLNQLGLSYKIAYAVSLTLRYIPDVQEEFYTIRRAQEARGIELSKKSNLVARIKGNLQIVTPLIFSSLERIDTVATAMELRRFGKNKRRTWYSKQSLEKSDIVLIILALASLFVSLYLIHLNHGRFYNPWQ

SEQ ID NO: 7657 - protein, 1674 aa, Streptococcus agalactiae
ATGAAAGATTTTATTGAATGGAAGGATTTTACCTTTCAATATGACGTTCAATCTGAACCAACTTTAAAAGGGATTAACTTAAGCATTCCTAAAGGTGAAAAGGTCTTGATATTAGGACCTTCAGGGTCGGGGAAGTCAACGCTTGGTCATTGTTTAAATGGTATTATCCCAAATACTCATAAAGGCCAATATAGTGGTATTTTTACGATTAACCATAAAAATGCTTTTGACTTGTCAATATATGACAAGTCTCATTTAGTTTCTACGGTTTTACAAGACCCAGATGGCCAATTTATAGGATTGACAGTAGCAGAAGATATTGCTTTTGCATTAGAAAATGACGTTGTAGCACAGGAAGAAATGGCCTCTATCGTTGAAATGTGGGCAAAACGTTTAGAAATAGCTCCTCTTTTGTCTAAACGTCCACAAGACTTGTCGGGAGGACAAAAACAACGGGTTAGTTTAGCTGGAGTTTTAGTAGACGATAGCCCAATTCTATTATTTGATGAGCCTTTGGCTAATCTAGATCCACAATCGGGACAAGATATCATGGCATTGGTTGACCGTATTCATCAAGAGCAAGATGCGACCACTATTATTATTGAACATCGATTGGAAGATGTTCTTTATGAGCGAGTAGATCGTGTAGTTCTTTTTAGTGATGGACAAATTATTTATAATGGGGAGCCGGATCAACTTTTAAAAACTAATTTTTTATCTGAATATGGTATTCGAGAACCACTGTATATTTCTGCCCTCAAAAATTTAGGATATGACTTTGAAAAACAAAATACAATGACGTCTATTGATGACTTTGATTTCAGTGAACTATTGATACCTAAAATGCGAGCATTAGATTTAGATAAACATACAGATAAATTATTATCAGTACAGCATTTGTCGGTGTCATATGATTTAGAGAATAATACTTTAGATGATGTTTCGTTTGATTTATATAAAGGTCAGCGGTTAGCTATCGTTGGGAAAAATGGTGCAGGTAAATCTACTTTAGCTAAAGCGTTATGTCAATTTATCCCTAATAATGCTACTCTAATTTATAATAATGAAGATGTCAGTCAAGACTCTATAAAAGAAAGAGCAGAACGAATTGGCTATGTTTTGCAAAATCCCAATCAGATGATAAGTCAAGCGATGGTTTTTGATGAAGTTGCTCTGGGTCTCCGTTTAAGAGGTTTTAGTGATAATGATATAGAAAGTCGTGTCTACGATATATTAAAGGTTTGTGGGCTCTACCAATTTAGGAATTGGCCTATATCGGCTCTATCATTCGGTCAGAAAAAACGTGTTACGATTGCTTCGATACTGATTTTAAATCCAGAAGTTATTATTTTGGATGAACCAACAGCTGGTCAAGATATGAAGCATTATACTGAAATGATGTCTTTCCTTGACAAACTAAGTTGTGATGGACATAGCATTGTTATGATTACACATGATATGCAGCTTATGTTAGAGTATACAGATCGTGCAATTGTAATCGACAATGGTCTTATTGCTGCAGATGATCATCCTATTAACATCCTTTCAAATACAGAGCTTTTGAAAAAGACTCATTTAAAGAAAACGAGTTTATTTGCTTTAGCAGACAGATTAGGGATATCTCCACAGAAACTAACACAATGGTACATTGATAATCAAGGAGGTAAGAATGGC

SEQ ID NO: 7658 - protein, 558 aa, Streptococcus agalactiae
MKDFIEWKDFTFQYDVQSEPTLKGINLSIPKGEKVLILGPSGSGKSTLGHCLNGIIPNTHKGQYSGIFTINHKNAFDLSIYDKSHLVSTVLQDPDGQFIGLTVAEDIAFALENDVVAQEEMASIVEMWAKRLEIAPLLSKRPQDLSGGQKQRVSLAGVLVDDSPILLFDEPLANLDPQSGQDIMALVDRIHQEQDATTIIIEHRLEDVLYERVDRVVLFSDGQIIYNGEPDQLLKTNFLSEYGIREPLYISALKNLGYDFEKQNTMTSIDDFDFSELLIPKMRALDLDKHTDKLLSVQHLSVSYDLENNTLDDVSFDLYKGQRLAIVGKNGAGKSTLAKALCQFIPNNATLIYNNEDVSQDSIKERAERIGYVLQNPNQMISQAMVFDEVALGLRLRGFSDNDIESRVYDILKVCGLYQFRNWPISALSFGQKKRVTIASILILNPEVIILDEPTAGQDMKHYTEMMSFLDKLSCDGHSIVMITHDMQLMLEYTDRAIVIDNGLIAADDHPINILSNTELLKKTHLKKTSLFALADRLGISPQKLTQWYIDNQGGKNG

SEQ ID NO: 7659 - protein, 636 aa, Streptococcus agalactiae
TTGTCAATAAGGTTTCAAATCAGCTTGAAATATGATAAAATAAAACAGATTGTAAGTGACTGTTTAAGCTTGTTTTTCAGAGAGGTTTTTATGAATACAAACACAATAAAAAAGGTTGTAGCGACTGGAATTGGAGCTGCACTTTTTATCATTATAGGTATGCTAGTTAATATACCAACACCAATTCCAAATACTAATATTCAATTGCAGTATGCGGTTTTAGCATTATTTGCAGTTATTTATGGACCAGGAGTTGGTTTTTTTACTGGTTTTATCGGACACGCATTGAAAGATTCGATTCAATATGGTTCTCCGTGGTGGACTTGGGTTTTAGTTAGTGGTCTTTTAGGTTTGATGATAGGCTTTTTTGCTAAAAAATTAGCTATTCAATTATCTGGCATGACTAAGAAGGATTTGCTTCTATTTAATGTAGTTCAAGTTATTGCTAACCTTATAGGTTGGTCTGTCGTTGCACCGTATGGTGATATTTTCTTTTATAGCGAACCTGCAAGCAAAGTTTTTGCACAAGGTTTCTTATCAAGTCTTGTGAATTCCATTACTATTGGAGTAGGTGGTACGCTTTTGTTGCTAGCATACGCTAAATCACGACCACAAAAAGGTAGTTTATCCAAAGAT

SEQ ID NO: 7660 - protein, 212 aa, Streptococcus agalactiae
MSIRFQISLKYDKIKQIVSDCLSLFFREVFMNTNTIKKVVATGIGAALFIIIGMLVNIPTPIPNTNIQLQYAVLALFAVIYGPGVGFFTGFIGHALKDSIQYGSPWWTWVLVSGLLGLMIGFFAKKLAIQLSGMTKKDLLLFNVVQVIANLIGWSVVAPYGDIFFYSEPASKVFAQGFLSSLVNSITIGVGGTLLLLAYAKSRPQKGSLSKD

SEQ ID NO: 7661 - protein, 774 aa, Streptococcus agalactiae
ATGAGTATTCTATTTTGGGCGGTTATTTTTGGTTTGGCGATGCGAAGCAGTAATCAGCGTACAAAAGATTTAATGCAAACTTTTGCTGATGCTACTTCACAAGTTGTCAAATGGATTATCAATTTGGCCCCAATTGGTATTATGGGGTTGGTTTTCACTAGCATTTCAGAAAACGGTATTGCTATACTAGGTGATTATGGTCTTTTAATATTAGTTTTGGTGGGTACGATGTTATTTGTAGCTCTTGTCGTTAACCCAATCATTGCTTTTGTTATGATGCGTAAAAATCCTTACCCTTTGGTATTACGATGCTTAAAGGATTCAGGTATTACAGCTTTCTTTACACGTAGTTCTGCGGCGAATATTCCTGTTAATATGAGACTATGTGAGGATTTAGGATTAGATAAAGACACTTACTCAGTATCTATCCCGCTTGGTGCAGCTATCAATATGGCTGGTGCAGCTATTACAATTAATATCCTGACTTTAGCAGCAGTAAATACTTTAGGAATTACTGTTGATTTTCCAACAGCATTCTTATTAAGTGTGGTTGCTGCTGTATCAGCATGTGGAGCTTCTGGTGTAACTGGTGGTTCACTTTTATTGATTCCGGTGGCATGTAGCTTATTTGGTATTTCAAATGACGTTGCAATGCAAGTCGTAGGAGTTGGTTTCATTGTAGGGGTGATACAGGATTCGTGTGAGACAGCCTTAAATTCATCGACAGATGTTCTGTTCACGGCTGTAGCTGAAAAATCAGTTTTTGGAAAAAAA

SEQ ID NO: 7662 - protein, 258 aa, Streptococcus agalactiae
MSILFWAVIFGLAMRSSNQRTKDLMQTFADATSQVVKWIINLAPIGIMGLVFTSISENGIAILGDYGLLILVLVGTMLFVALVVNPIIAFVMMRKNPYPLVLRCLKDSGITAFFTRSSAANIPVNMRLCEDLGLDKDTYSVSIPLGAAINMAGAAITINILTLAAVNTLGITVDFPTAFLLSVVAAVSACGASGVTGGSLLLIPVACSLFGISNDVAMQVVGVGFIVGVIQDSCETALNSSTDVLFTAVAEKSVFGKK

SEQ ID NO: 7663 - protein, 1365 aa, Streptococcus agalactiae
ATGAAACTAAAAAACACTTATATCATTATCGGCTTGATGCTTTTTGCGCTGTTCTTTGGAGCCGGTAATCTTATTTATCCAGCCTACTTAGGTATCTACTCTGGTTCTAATTGGGCGTGGGCTATCATTGGGTTCTGCTTAACAGGCGTAACTTTACCCCTACTTGGTGTTGCAGCTGTGGCGTACTCAGGAGCAACCGATGTTGAAAGCTTCACCAAACCTGTCTCTAAAACATATGCTATTTTCTTTGCAGTAGCACTATACCTATCTATTGGACCTTTCTTTGCCATTCCTCGAACAGGGGCAACCTCATTCTCAGTTGGTATTCAACCTATCTTAGGCGACAGCTCCTTAGTCAAAATTATCTATGGTTTAATTTTCTTTGGTATTTCTTATTTCTTAGCTATTAGACCTAGTCAGATTGTAGATCGTATTGGTAAATATCTAACTCCCTTTTTACTAACTGTTATTAGTATTTTAATTATTGCCTCACTCATCCATCCAGCTGCTATCGTTGGAACACCACATAACGCTTCAACGAATGTCAGCGATGCTTTCAAGGATTTACCATTCCTAGCAGGACTGATTCAGGGGTATGGTACAATGGATGCCCTTGCATCAATTGCTTTTGCTATTATCGTTATTCAAGCAAGTAAACAGTACGGAGCAATTACCAAAAAAGAAATTACTTCTATGGCACTTAAATCTGGTGCTATCGCTACATTTCTTTTAGCTTTTATTTATATTTTTGTAGGACGTATTGGTGCAACTTCACAAAGCTTGTTTAAATTTGCAAATGGTTCCTTCTTACTTCACAATACTCCAATAGACGGTGGGCATGTTCTTAGTCAATCAGCTAACTTCTATTTAGGAATTGTGGGACAAGCTATTTTAGGTACGGCTATTTTTCTTGCTTGCTTAACAACAGCTACTGGATTAATCACTGCTTGTGCGGAATACTTCCACAAATTACTTCCAAAGATTAGTCACATTACTTGGGCTACAATCTTTACTTTAATTGCTATTACGTTCTATTTTGGTGGTTTATCAGAGATTATCCGTTGGTCACTACCAGTTCTCTACCTTCTCTATCCATTAACTATAGTCTTAATTTTCTTAGTCTTTTTTGATCAAAAATTTGAAAGTAGCTGCATTGTCTACCAAACTTCTATTGCCGCCACTGCTGTCGCTGCTTTATACGATGCCTTATCAAAACTCGGCGAAATGACTGGTTTATTTACCATTCCATCCGCTTTGACCACATTCTTTACTAAAGTTGTTCCTTTAGGTGAATATTCTATGGGATGGATTAGTTTTGCAATTTGTGGTGTCTTAGTTGGTCTTATTCTAAAAAAAGTAAAAGCA

SEQ ID NO: 7664 - protein, 455 aa, Streptococcus agalactiae
MKLKNTYIIIGLMLFALFFGAGNLIYPAYLGIYSGSNWAWAIIGFCLTGVTLPLLGVAAVAYSGATDVESFTKPVSKTYAIFFAVALYLSIGPFFAIPRTGATSFSVGIQPILGDSSLVKIIYGLIFFGISYFLAIRPSQIVDRIGKYLTPFLLTVISILIIASLIHPAAIVGTPHNASTNVSDAFKDLPFLAGLIQGYGTMDALASIAFAIIVIQASKQYGAITKKEITSMALKSGAIATFLLAFIYIFVGRIGATSQSLFKFANGSFLLHNTPIDGGHVLSQSANFYLGIVGQAILGTAIFLACLTTATGLITACAEYFHKLLPKISHITWATIFTLIAITFYFGGLSEIIRWSLPVLYLLYPLTIVLIFLVFFDQKFESSCIVYQTSIAATAVAALYDALSKLGEMTGLFTIPSALTTFFTKVVPLGEYSMGWISFAICGVLVGLILKKVKA

SEQ ID NO: 7665 - protein, 1053 aa, Streptococcus agalactiae
ATGAGAGCTGCAACTTATCTTTCAGCTAATGAATTATCACTTACTGATAAGGCTAAACCTCAAGTAATAAAACCCACAGATGCGGTTGTAAGACTTGTCAAAACAACCATTTGTGGTACTGATCTACATATCCTTGGTGGCGATGTTCCTGCTTGTAAACCAGGAACAACTTTAGGTCATGAAGGCATTGGTATCGTCGAAGAAGTTGGTTCTGCTGTCAATCATTTTAAAGTCGGAGATAAAGTAATTATTTCTTGTGTCACTGCCTGTAATACTTGCTATTACTGTAAGCACCAGTTGCCTTCACATTGTGAAGATGGCGGGTGGATTTTAGGACATCTTATTGAAGGTACTCAAGCAGAATATGTTCATATTCCACATGCAGATGGTAGCCTTTATCATGCACCTGAAGGTGTTTGTGACGATGCATTGGTTATGTTATCTGATATTTTACCAACTTCATACGAAATCGGCGTCTTACCTTCTCACATTAAACCAGGTGATACTGTTTGTATTGTAGGCGCTGGACCAATTGGACTATCTGCCTTACTAACTGCACAATTCTATTCTCCTGCCAAAATTATTATGGTTGATTTATCTCAAAAACGACTTGAAGCCTCTAAAAAATTTGGTGCAACACACACCATTCTATCAACGTCTACTCAAGAAGTTAAAGAAGAAATTGATAAAATTACCAAAGGCCGTGGCGTTGATGTCGTATTAGAATGTGTTGGTTATCCTGCAACATTTGATATTTGTCAAAATGTAGTTTCTATTGGAGGACATATCGCAAATGTTGGTGTTCATGGTAAACCTGTTGAATTTAACCTCCAAGATTTATGGATAAAAAATATAACCCTTAATACTGGATTAGTTAATGCTAATACAACTGAAATGCTCCTTGAAGTTCTTGAGACAGGCAAAATCGATGCAACACAACTAGTAACACATCACTTCAAGCTATCTGAAATCGAAGAAGCTTATAAGGTATTTAAAGCTGCTGAAGAAAACAATACTCTCAAAGTTATCATCGAAAACGATATTACTCCAGCC

SEQ ID NO: 7666 - protein, 351 aa, Streptococcus agalactiae
MRAATYLSANELSLTDKAKPQVIKPTDAVVRLVKTTICGTDLHILGGDVPACKPGTTLGHEGIGIVEEVGSAVNHFKVGDKVIISCVTACNTCYYCKHQLPSHCEDGGWILGHLIEGTQAEYVHIPHADGSLYHAPEGVCDDALVMLSDILPTSYEIGVLPSHIKPGDTVCIVGAGPIGLSALLTAQFYSPAKIIMVDLSQKRLEASKKFGATHTILSTSTQEVKEEIDKITKGRGVDVVLECVGYPATFDICQNVVSIGGHIANVGVHGKPVEFNLQDLWIKNITLNTGLVNANTTEMLLEVLETGKIDATQLVTHHFKLSEIEEAYKVFKAAEENNTLKVIIENDITPA

SEQ ID NO: 7667 - protein, 690 aa, Streptococcus agalactiae
ATGATAGAGTGGATTCAAACACATTTACCAAATGTATATCAAATGGGTTGGGAAGGTGCTTACGGCTGGCAGACAGCTATTGTACAAACCCTTTATATGACTTTTTGGTCGTTCCTTATTGGAGGTTTAATGGGATTGTTAGGAGGTTTATTCCTTGTTTTAACTAGTCCTAGAGGAGTTATTGCTAATAAATTAGTATTTGGAGTTTTAGATAAAGTTGTTTCTGTTTTTAGAGCTCTGCCCTTCATTATTCTTCTTGCTTTGATTGCGCCAGTAACTCGCGTAATTGTAGGAACAACACTTGGTTCACCAGCAGCTTTGGTACCTCTTTCTTTGGCAGTTTTCCCATTTTTTGCTCGTCAAGTTCAAGTTGTTTTAGCTGAACTTGATGGTGGAGTTATTGAGGCTGCACAAGCCTCAGGTGGAACACTTTGGGATATTATTGTAGTTTATCTTCGTGAAGGTCTACCAGATTTAATTCGAGTATCAACGGTTACTTTGATTTCTTTAGTAGGTGAAACAGCTATGGCTGGCGCTATTGGTGCAGGAGGATTGGGTTCTGTTGCTATTACTAAAGGATATAACTATTCTCGTGATGATATTACTTTAGTAGCGACTATTCTGATTTTATTATTAATTTTCTTTATCCAATTTTTAGGTGATTTTTTAACACGTCGCTTGAGTCATAAA

SEQ ID NO: 7668 - protein, 230 aa, Streptococcus agalactiae; identical to SEQ ID NO: 3016

SEQ ID NO: 7669 - protein, 1068 aa, Streptococcus agalactiae
ATGAGTAAAGAACCAATTATTAAATTAGACAACATTGATGTTACTTTCCACCAAAAGAAACGTGAGATTAATGCTGTTAAAGATGTTACTATCCATATTAATCAAGGTGATATATATGGAATTGTCGGTTATTCAGGAGCCGGAAAATCTACCCTTGTTCGTGTTATTAATTTGCTACAAGAACCTTCAGCAGGTAAAATTACTATTGATGACCAAGTTATTTACGACAACAAGGTGACACTGACTAGCACACAATTACGCGAACAGCGCCGTGAAATTGGAATGATTTTTCAACATTTTAACCTAATGTCACAGTTGACAGCAGAGCAGAATGTAGCTTTTGCTCTTAAACATTCAGGTTTATCAAAAGAGGCGAAAGCAGCTAAGGTTGCTAAATTATTAGAACTTGTTGGATTATCCGATCGTGCTCAAAACTATCCTTCACAATTATCAGGAGGGCAAAAACAGCGTGTTGCCATTGCGCGTGCATTGGCTAACGATCCTAAAATCTTAATTTCAGATGAGTCTACCTCTGCACTTGACCCTAAAACAACAAAACAAATACTTGCCCTTCTCCAAGATCTGAATAAAAAATTGGGACTTACGATTGTTTTGATTACACATGAGATGCAAATTGTCAAAGACATTGCTAATCGCGTTGCTGTTATGCAAAATGGTAAATTGATTGAAGAAGGATCAGTTTTAGACATTTTTTCACATCCTAGAGAGAGTCTTACACAAGATTTTATAAAAATAGCTACTGGGATTGATGAGGCAATGCTTAAGATTGAGCAACAAGAAGTTGTCAAAAATCTACCAGTAGGTAGCAAATTAGTTCAACTGAAATACGCTGGGCATAGCACGGATGAGCCGCTTTTAAATCAAATTTATAAAGAATTTGAAGTAACTGCTAACATCCTCTATGGGAATATTGAAATTTTAGATGGTATTCCAGTTGGAGAAATGGTAGTTATCTTATCAGGTGACGAAGAAAAATTAAGACAAGCCTGCCAAGCAATTACAGATTCGCAAGTTCAATTAACGTTATTGAAAGAAGGTGGTAAAGCA

SEQ ID NO: 7670 - protein, 356 aa, Streptococcus agalactiae; identical to SEQ ID NO: 3018

SEQ ID NO: 7671 - protein, 1374 aa, Streptococcus agalactiae
ATGACTTTAACAAAGGAAGAAAATCAAATTCAAAAGTTTCTATCTGATACTATTGTTCAGGATGATATCAATATTTTAAGAGATTTAATTGCAATTAAGTCAATTTTTGCTCAGAAAGTTGGTTTAAATGACTTAGCAAGCTATCTTGGAGAAGTTTTTAGAAAAGCTGGCGCAGAAGTCATTATAGATGACAGCTATAGCGCTCCCTTTATTGTGGCAAATTTCAAATCATCAAAAGTAGATGCTAAGCGTATTATTTTTTACAATCATTATGATACTGTACCAGCAGATGAGGTAGAACAGTGGACTGAGGACCCTTTTACACTTTCACTTCGATATGGTAAGATGTATGGACGTGGTGTAGATGATGATAAAGGTCACATTACCGCACGTTTATCAGCAGTTAAAAAATATTTATCAAGACACAAAGGGGAACTTCCTCTAGATATCACTTTTATTGTGGAAGGAGCGGAGGAATCAGCTTCAGTAGGCCTTGATTATTATTTAGAAAAGTATCAAGAGCAGCTACAAGGAGCTGATTTGATCGTGTGGGAAGATGGCCCTAAAAATCCTAAAGGACAGTTGGAAATTGCTGGTGGAAATAAAGGCATTGTCACTTTTGATTTATCAGTAAGTTCAGCGGATGTTGATATTCATTCATCCTTTGGTGGGGTTGTTGATTCCTCGACATGGTATTTAATTCAAGCCCTCAATACGTTAAGGGATAACAAAGGTCATATATTGGTAGAAGGTATTTATGATAAAGTTATTCCCCCTACTAAGAGAGAGTTAGAATTAGTTGAAAAATATTCTTATAGATCTGCAAAGGCGCTAGAAGATGCTTACCAATTAGTTTTGCCCAGTTTAGCAGATAGTCATAAAACTTTTTTGAGAAAGCTTTATTTTGAACCTTCTATAGCCATTGAAGGTATAACCTCAGGTTATCAAGGTGAAGGCGTCAAAACAATTTTACCTGCTTATGCTAAATGTAAAGCAGAGGTTAGGTTAGTGCCAGGGTTAACCCCGAAAGGTGTACTAGATTCAATACAAAATCATTTGAAAGAGAATGGCTTTAATGACATTGAGCTAACCTATACCCTTGGTGAAATGTCTTATCGTAGTGATATGTCAGCGCCATCTATCCTAAAAGTTGTTGATTTAGCTGAGCAATTTTATCCAGAAGGGGTATCTCTGTTACCCACCTCACCAGGTACAGGACCAATGTATTTAGTTCATCAAGCTCTAAGAGCGCCAATTGCAGCTTTTGGCATAGGACATGCCAATAGTCGAGACCATGGCGTTGATGAAAATGTTAGTATTGCTGATTATTACACCCATATTGAATTAGTGGAGGCTTTAATAGAATCATATGAG

SEQ ID NO: 7672 - protein, 458 aa, Streptococcus agalactiae
MTLTKEENQIQKFLSDTIVQDDINILRDLIAIKSIFAQKVGLNDLASYLGEVFRKAGAEVIIDDSYSAPFIVANFKSSKVDAKRIIFYNHYDTVPADEVEQWTEDPFTLSLRYGKMYGRGVDDDKGHITARLSAVKKYLSRHKGELPLDITFIVEGAEESASVGLDYYLEKYQEQLQGADLIVWEDGPKNPKGQLEIAGGNKGIVTFDLSVSSADVDIHSSFGGVVDSSTWYLIQALNTLRDNKGHILVEGIYDKVIPPTKRELELVEKYSYRSAKALEDAYQLVLPSLADSHKTFLRKLYFEPSIAIEGITSGYQGEGVKTILPAYAKCKAEVRLVPGLTPKGVLDSIQNHLKENGFNDIELTYTLGEMSYRSDMSAPSILKVVDLAEQFYPEGVSLLPTSPGTGPMYLVHQALRAPIAAFGIGHANSRDHGVDENVSIADYYTHIELVEALIESYE

SEQ ID NO: 7673 - protein, 822 aa, Streptococcus agalactiae
ATGAAGTTAAAACATATTGTCTTAGGATTAGCCTTAACAACACTTTTAGGAGTCACATTTAGTAATCAAGAAGTTTCAGCAAGCTCAACTTCAAGTAAAGTTGTTAAAGTTGGTGTTATGACCTTTTCTGACACTGAAAAAGCACGTTGGGATAAAATTGAAAAGCTAGTAGGCGATAAAGCTAAAATCAAATTCACAGAATTTACAGATTATACACAACCAAATCAAGCGACAGCCAATAAGGATGTGGATATTAATGCCTTTCAACATTACAATTTCTTAGAAAACTGGAATAAGGAAAATAAGAAAAACTTAATTCCACTTGAAAAGACTTACTTAGCCCCAATTCGTATCTATTCTGAGAAGGTAAAATCTCTTAAAAAATTGAAAAAAGGAGCCACTATTGCAATTCCAAATGATGCAACAAATGGTAGCCGTGCATTGTATGTCCTTCAGTCAGCAGGTTTAATCAAATTGAATGTTTCTGGTAAGAAGGTTGCAACAGTTGCTAATATCACATCTAATAAAAAAGATATTAATATTCAGGAGTTAGATGCGAGTCAAACACCACGTGCACTCAAAGATGTAGATGCAGCTATTATTAATAATACATACATTGAGCAAGCTAATTTAAAACCTTCAGATGCTATCTTTGTTGAGAAATCAGATAAAAATTCAAAACAATGGATTAATATCATTGCGGGACGTAAAAATTGGAAAAAGCAAAAGAACGCTAAAGCTATCCAAGCTATCTTGGATGCTTATCACACAGATGAAGTGAAAAAAGTTATCAAAGATACTTCAGCTGATATTCCACAATGG

SEQ ID NO: 7674 - protein, 274 aa, Streptococcus agalactiae
MKLKHIVLGLALTTLLGVTFSNQEVSASSTSSKVVKVGVMTFSDTEKARWDKIEKLVGDKAKIKFTEFTDYTQPNQATANKDVDINAFQHYNFLENWNKENKKNLIPLEKTYLAPIRIYSEKVKSLKKLKKGATIAIPNDATNGSRALYVLQSAGLIKLNVSGKKVATVANITSNKKDINIQELDASQTPRALKDVDAAIINNTYIEQANLKPSDAIFVEKSDKNSKQWINIIAGRKNWKKQKNAKAIQAILDAYHTDEVKKVIKDTSADIPQW

SEQ ID NO: 7675 - protein, 831 aa, Streptococcus agalactiae
ATGACAATAAAAAAAGTGTTAAGTGTAACAGGAATTATTTTAGTGACAGTAGCGTCTCTAGCTGCTTGTAGCTCAAAATCTCATACTACCAAGACGGGCAAAAAAGAAGTTAATTTTGCAACTGTCGGAACAACGGCACCTTTTTCTTATGTAAAGGATGGGAAACTGACTGGCTTTGATATTGAAGTAGCCAAAGCTGTTTTTAAAGGTTCAGATAACTATAAAGTCACTTTTAAAAAAACAGAGTGGTCATCGGTATTTACCGGTATTGATTCAGGAAAGTTTCAAATGGGTGGAAATAATATTTCTTATTCATCAGAGAGATCTCAAAAATATTTATTTTCATACCCAATAGGCTCTACTCCTTCAGTTTTAGCAGTTCCTAAGAATAGTAATATCAAAGCTTATAATGATATTACTGGTCATAAAACACAGGTTGTCCAAGGAACGACAACTGCCAAGCAATTAGAAAATTTCAATAAAAAGCATCAGAAAAATCCTGTTACTCTAAAATATACTAATGAAAATATTACACAGATTCTAACGAATTTGAGTGATGGAAAAGCTGATTTTAAACTTTTTGACGGACTAACGGTTAACGCTATCATAAAGAATCAAGGTCTCACGAATTTAAAAACCATCCCTTTGACTATGAGAGATCAGCCTTATATTTATTTCATCTTTGGTCAGGATCAAAAAGACTTGCAAAAGTATGTGAATAATTGCCTTAAACAATTACGTAAAGATGGGACACTTTCAAAAATAGCTAAAGAATACCTTGGAGGTGATTACGTACCAAATGAGAAAGATCTCGTTACTCCTAAGGAGAAG

SEQ ID NO: 7676 - protein, 277 aa, Streptococcus agalactiae
MTIKKVLSVTGIILVTVASLAACSSKSHTTKTGKKEVNFATVGTTAPFSYVKDGKLTGFDIEVAKAVFKGSDNYKVTFKKTEWSSVFTGIDSGKFQMGGNNISYSSERSQKYLFSYPIGSTPSVLAVPKNSNIKAYNDITGHKTQVVQGTTTAKQLENFNKKHQKNPVTLKYTNENITQILTNLSDGKADFKLFDGLTVNAIIKNQGLTNLKTIPLTMRDQPYIYFIFGQDQKDLQKYVNNCLKQLRKDGTLSKIAKEYLGGDYVPNEKDLVTPKEK

SEQ ID NO: 7677 - protein, 687 aa, Streptococcus agalactiae
ATGTTAACAAAGCCTATTATTGGTATTACAGGAAATGAAAGAGAAATGTCAGATATTCCAGGTTATTATTATGATTCGGTATCTAGGCATATTTCGGAAGGAGTTAAAAACGCAGGCGGGTTACCAGTTATCCTACCAATAAGTGAAGCAGAAAGTGCCAAAGCTTATGTTGAGATGATAGATAAGCTGATCATATCTGGTGGCCAAAATGTTTTACCATCCTATTATGGTGAAGAGAAGATAATTGAGAGTGATGATTATTCACTTGCGCGTGATATTTTTGAATTTGCATTAGTCGACGAAGCGTTGAAACAAAATAAACCAATCTTTGCGATTTGCCGTGGCATGCAGTTAGTAAATGTGGCACTTGGTGGTACACTTAATCAATCTATTGATAATCACTATCAAGAGCCTTACATTGGATTTGCTCATTATTTAAATGTGGAAAAAGGGAGTTTTCTAGAAGGCTTTATATCAGGTGATTTTAGGATCAATTCTCTTCATAGACAAAGTGTTAAACTGTTAGCTGAAGGTCTGATAGTTAGTGCTAGAGATCCTAGAGATGGGACAGTAGAAGCTTATGAAAGTCGAACAGAACAATGTATTATAGGTGTTCAATGGCATCCAGAATTAATGCTTCACCAAATTGAAAACCAAACCTTATTTGGTTATTTTGTTAATGAAACG

SEQ ID NO: 7678 - protein, 229 aa, Streptococcus agalactiae
MLTKPIIGITGNEREMSDIPGYYYDSVSRHISEGVKNAGGLPVILPISEAESAKAYVEMIDKLIISGGQNVLPSYYGEEKIIESDDYSLARDIFEFALVDEALKQNKPIFAICRGMQLVNVALGGTLNQSIDNHYQEPYIGFAHYLNVEKGSFLEGFISGDFRINSLHRQSVKLLAEGLIVSARDPRDGTVEAYESRTEQCIIGVQWHPELMLHQIENQTLFGYFVNET

SEQ ID NO: 7679 - protein, 111 aa, Streptococcus agalactiae
TTGATAGGTATTGTTAAAGAAGTGATAGGTAAAAAATATTATTCAAAAAGTTTTTTTAGGTGTAAAATGATAATTATTAGACAGTTATTGGTTGATGAGGGAGCAAAATGT

SEQ ID NO: 7680 - protein, 37 aa, Streptococcus agalactiae
MIGIVKEVIGKKYYSKSFFRCKMIIIRQLLVDEGAKC

SEQ ID NO: 7681 - protein, 714 aa, Streptococcus agalactiae
ATGGGACGTAAGTGGGCCAATATTGTTGCTAAAAAGACTGCTAAAGATGGTGCTAACTCAAAAGTATACGCTAAATTCGGTGTTGAAATATATGTTGCTGCAAAGCAAGGTGAACCAGACCCCGAGTCAAACTCAGCTCTAAAATTCGTTTTGGACCGTGCTAAGCAAGCACAAGTTCCAAAGCATGTTATTGATAAAGCGATTGATAAAGCCAAAGGAAACACAGATGAAACTTTCGTAGAGGGACGCTATGAAGGTTTTGGTCCAAATGGTTCAATGATTATTGTGGATACTTTGACATCAAATGTTAACCGTACGGCAGCAAATGTACGTACTGCTTACGGTAAGAACGGTGGCAATATGGGAGCTTCAGGATCGGTATCCTACTTATTTGATAAAAAAGGTGTCATCGTTTTTGCTGGTGATGATGCTGACACTGTCTTCGAACAATTACTTGAAGCGGATGTAGACGTAGATGATGTTGAAGCAGAAGAGGGAACAATAACAGTTTATACCGCCCCAACAGATCTTCATAAAGGTATCCAAGCACTTCGCGATAATGGTGTAGAAGAATTCCAAGTTACTGAACTTGAAATGATTCCTCAATCAGAAGTAGTATTGGAAGGTGATGACCTTGAAACTTTTGAAAAGCTTATTGACGCACTCGAATCAGATGATGATGTTCAAAAAGTTTATCATAATGTAGCAGATTTC

SEQ ID NO: 7682 - protein, 238 aa, Streptococcus agalactiae; identical to SEQ ID NO: 3028

SEQ ID NO: 7683 - protein, 984 aa, Streptococcus agalactiae
ATGAGAAAAACAGAACATCATAAAATGGAATATGTTTTTGAAACAATAAAAGCAATCACTAAAACTAACCCTAAAGTAGAGCAAATAAAAGATTTGCCCGCTATTCATTATTTAGGGCAATCCGAACAAGTAATTCCGATTTTATCAGGAGGAGGCAGCGGACATGAGCCAGCTCACTTTGGATATGTTGGTGAGGGAATGCTATCGGCAGCGATTAGTGGTCCTATTTTTGTACCACCATGTGCTAGTGATATTCTAGAGACTATTAGATTTATCAATCGAGGCAAAGGTGTTTTTGTTATTATCAAAAATTTCGAAGCTGATTTGGAAGAATTTTCCCAAGCGATTGAACAGGCTCGTCAAGAAGGCATTCCAATCAAATACATCGTTTCTCATGATGACATCTCTGTTGAAACATCAAATTTTAAAATTCGTCATCGAGGCGTTGCTGGTACTGTGTTGCTACATAAAATTATTGGACAAGCTGCTTTAGAAGGAGCAAGCTTAGATGAATTAGAACAGCTAGGACTATCTTTGACAACTTCAATGGCTACTTTAGGTGTAGCAAGTAAGTCAGCCACTATTTTAGGTCAGCATCAACCTGTTTTTGATTTAGAAGAAGGTTACATCTCATTTGGAATCGGTATTCATGGTGAGCCAGGATACCGGACAATGCCTTTCGTGTCCATGGAACATTTGGCAAACGAACTAGTTAACAAATTGAAAATGAAATTACGTTGGCAAGATGGAGAAGCATTCATTCTATTGATAAATAATCTTGGAGGAAGTTCTAAAATGGAGGAATTACTTTTTACAAATGCTGTCATGGAATTTCTGGCTTTAGACGATTTACAATTACCTTTTATTAAAACAGGCCACCTAATTACAAGTTTAGATATGGCTGGTTTATCAGTTACCTTGTGTCGTGTAAAGGATAGTAGATGGATTGATTACTTAAAACATAAGACAGATGCTAGAGCTTGG

SEQ ID NO: 7684 - protein, 328 aa, Streptococcus agalactiae; identical to SEQ ID NO: 3030

SEQ ID NO: 7685 - protein, 534 aa, Streptococcus agalactiae
ATGGCTTCTTCGCTTATTACTAAGAAAAAAATAGCCAAGTCATTTAAACGTTTATTTATTTCGCAAGCTTTTGACAAAATATCGGTGAGTGATATTATGGAAGATGCAGGTATTAGACGTCAAACATTTTATAATCACTTTGTTGATAAATATGCTTTATTAGAATGGATTTTCCAAACAGAATTAAGCGAACAAGTTACGGATAATTTAGACTATATCTCAGGTTTTCAGTTGTTATCAGAGTTGTTGACTTTTTTTAAAATGAATCAAGAATTCTATATTAAATTATTTCAAATTGAAGATCAAAATGATTTTTCTTCGTATTTTGAGTCTTACTGTGAGCAGTTAGTAGATAAGCTTCTTTCTGATTATAGTAAATCTAACTTTAGTCAGAAAGAAAGAGTTACATTTATCAATTATCATAGTAAAGCCCTCTCTTATTTTATAAAATATGAGTTAATAAATAACTCAAAAGAAGAATTATTTAATAGGAAAGTCATTGAAAAAATTATCAGAACATCAATAGAAAATTAT

SEQ ID NO: 7686 - protein, 178 aa, Streptococcus agalactiae
MASSLITKKKIAKSFKRLFISQAFDKISVSDIMEDAGIRRQTFYNHFVDKYALLEWIFQTELSEQVTDNLDYISGFQLLSELLTFFKMNQEFYIKLFQIEDQNDFSSYFESYCEQLVDKLLSDYSKSNFSQKERVTFINYHSKALSYFIKYELINNSKEELFNRKVIEKIIRTSIENY

SEQ ID NO: 7687 - protein, 111 aa, Streptococcus agalactiae
ATGATTATTGAAAACCCTAACAAAGCGGACAAACAAGAAAATCTGTCCATTCCGGAAAAGGCTTACAAATTTTATAATAAAAGAGAATTAAACATAAAAGGAGTTTCCAAA

SEQ ID NO: 7688 - protein, 37 aa, Streptococcus agalactiae; identical to SEQ ID NO: 3034

SEQ ID NO: 7689 - protein, 987 aa, Streptococcus agalactiae
ATGAAAAAAATTCTCAATCAACCAACTGATGTTGTTACTGAAATGCTAGATGGATTAGCATATGTTCATAATGATTTAGTACATCGCGTAGAAGGTTTTGATATCATTGCTCGCAATGAAGAGAAGTCAGGAAAAGTGGCTCTCATTTCTGGCGGAGGAAGTGGACATGAGCCTTCACATGCTGGTTTCGTAGGCGAAGGAATGTTATCTGCAGCTGTGTGTGGTGCAGTATTTACTTCTCCAACTCCTGACCAAGTTCTTGAAGCAATTAAAGAAGCTGATGAGGGAGCTGGAGTTTTCATGGTTATCAAAAATTATTCAGGAGATATCATGAACTTTGAAATGGCACAAGATATGGCTGAAATGGAAGGCATTGACGTTGCAAGTGTGGTCGTTGATGATGATATTGCAGTCGAAGACAGTCTTTACACACAAGGAAAACGTGGTGTAGCTGGTACGATACTTGTCCATAAAATTCTAGGACATGCTGCTCGTCATGGCAAATCACTTCAGGAAATCAAAGCTATTGCTGATGAATTAGTACCAAACATTCACACTGTTGGACTTGCACTAAGCGGGGCTACTGTTCCTGAAGTAGGCAAGCCAGGATTTGTTCTTGCAGAAGATGAAATTGAATTTGGTATCGGTATTCATGGTGAACCAGGTTATCGTAAAGAAAAAATGCAACCTTCAAAGGCTTTAGCGACAGAATTAGTTGATAAGTTAATTGAATCGTTCGATGCTAAATCTGGCGAAAAATATGGTGTCCTTATTAACGGTATGGGTGCAACCCCACTTATGGAACAATATGTCTTTGCTAACGATGTTGCCAAACTCCTTGAAGATAAAGGCATTGAAGTGAATTACAAAAAACTTGGTAACTATATGACTTCAATTGATATGGCTGGTTTATCACTAACCTTGATTAAACTGGAAAATCAAGAGTGGTTAGAAGCACTTAATAGTGACGTTACAACCATTGCTTGG

SEQ ID NO: 7690 - protein, 329 aa, Streptococcus agalactiae
MKKILNQPTDVVTEMLDGLAYVHNDLVHRVEGFDIIARNEEKSGKVALISGGGSGHEPSHAGFVGEGMLSAAVCGAVFTSPTPDQVLEAIKEADEGAGVFMVIKNYSGDIMNFEMAQDMAEMEGIDVASVVVDDDIAVEDSLYTQGKRGVAGTILVHKILGHAARHGKSLQEIKAIADELVPNIHTVGLALSGATVPEVGKPGFVLAEDEIEFGIGIHGEPGYRKEKMQPSKALATELVDKLIESFDAKSGEKYGVLINGMGATPLMEQYVFANDVAKLLEDKGIEVNYKKLGNYMTSIDMAGLSLTLIKLENQEWLEALNSDVTTIAW

SEQ ID NO: 7691 - protein, 576 aa, Streptococcus agalactiae
ATGGAAGTAAAAACTGCAATAGAATGGATGCACACTTTTAACCAAAAAATTCAATCCAACAAGGACTATTTATCCGAACTAGATACTCCAATAGGTGATGGCGACCATGGTGGCAATATGGCGCGTGGTATGACTGCTGTTATTGAAAACCTTGATAACAATGAATTTAGTAGTGCTGCCGATGTTTTCAAAACCGTATCCATGCAACTTTTAAGCAAAGTAGGCGGAGCATCTGGACCACTCTATGGTTCTGCATTTATGGGAATTACAAAAGCTGAACAGAGTGAAAGTACCATTTCAGAGGCACTTGGCGCAGGACTTGAAATGATTCAAAAACGTGGTAAAGCTGAACTTAATGAAAAAACAATGGTTGATGTTTGGCACGGTGTTATTGAAGCGATTGAAAAAAATGAATTGACTGAAGACCGTATTGATTCCTTAGTAGATGCTACAAAAGGGATGAAAGCAACAAAAGGACGCGCTTCTTATGTTGGAGAACGCTCATTAGGACACATTGATCCAGGGTCATTTTCTTCAGGATTATTATTTAAAGCATTACTAGAAGTTGGAGGTGTC

SEQ ID NO: 7692 - protein, 192 aa, Streptococcus agalactiae
MEVKTAIEWMHTFNQKIQSNKDYLSELDTPIGDGDHGGNMARGMTAVIENLDNNEFSSAADVFKTVSMQLLSKVGGASGPLYGSAFMGITKAEQSESTISEALGAGLEMIQKRGKAELNEKTMVDVWHGVIEAIEKNELTEDRIDSLVDATKGMKATKGRASYVGERSLGHIDPGSFSSGLLFKALLEVGGV

SEQ ID NO: 7693 - protein, 372 aa, Streptococcus agalactiae
ATGTCTGATATTGGTATTATTGTTGTTTCTCACTCTAAAAATATTGCTCAAGGAGTTGTTGATCTTATTTCAGAGGTAGCAAAGGATGTCTCAATAACTTACGTGGGTGGAACAGAAGATGGTGAGATTGGTACTTCTTTTGATCAAGTTCAACAGATTGTAGAGCAAAATGATAAAAAGACGTTATTAGCTTTCTTTGATTTAGGTTCAGCAAAAATGAATTTAGAGTTAGTAGCTGATTTTTCAGAAAAAAATATTATCATTAACTCTGTCCCAGTAGTGGAGGGAGCTTACACCGCTGCTGCTCTTCTACAGGCAGGTGCTGACCTGGATAGTATTCAATCACAATTAGCTGAATTAACTATCAATAAA

SEQ ID NO: 7694 - protein, 124 aa, Streptococcus agalactiae; identical to SEQ ID NO: 3040

SEQ ID NO: 7695 - protein, 711 aa, Streptococcus agalactiae
ATGACTCAATTTCTTGGGGAATTTTTAGGAACATTTATTTTGGTTCTTCTTGGGGATGGCGTAGTTGCAGGAAATGTGCTCAGTAAAACCAAAGAAGAAGGAACTGGATGGACTGCTATTGTTTTTGGTTGGGGAATTGCTTGTACCGTTGCTGTTTATGTTTCTGGATTATTTAGTCCTGCTCATCTAAATCCAGCAGTCACATTAGCAATGGCTTCTATTGGAGCAATTTCTTGGGGACAAGTTATCCCCTTTATCATTGCACAGATGTTAGGAGCAATGGTTGCGGCAACGATTTTATGGTTACACTATTATCCTCATTGGAAAGAAACAAAAGATAGTGGACTTATCCTTGCCAGCTTCTCAACCGGACCTGCTATCCGTCATACACCATCGAATCTCCTTGGTGAAATTATCGGTACTGCTATTCTTGTGATTACAATTATGGCAATTGGTCCTAGTAAAGTTGCAGCAGGTCTTGGTCCAATTATCGTTGGTATAGTTATTTTCGCAGTAGGATTCTCTCTTGGTCCAACAACTGGTTATGCTATTAACCCTGCACGTGACCTAGGGCCTCGTCTTATGCATGCTATCTTACCTATTGAAAATAAGGGCGACTCAGATTGGTCATACGCTTGGATTCCAGTTGTAGGTCCAATTATCGGCGGTGTCCTTGGCGCTATCTTATACAATATTGCTTTAACTTTAATT

SEQ ID NO: 7696 - protein, 237 aa, Streptococcus agalactiae
MTQFLGEFLGTFILVLLGDGVVAGNVLSKTKEEGTGWTAIVFGWGIACTVAVYVSGLFSPAHLNPAVTLAMASIGAISWGQVIPFIIAQMLGAMVAATILWLHYYPHWKETKDSGLILASFSTGPAIRHTPSNLLGEIIGTAILVITIMAIGPSKVAAGLGPIIVGIVIFAVGFSLGPTTGYAINPARDLGPRLMHAILPIENKGDSDWSYAWIPVVGPIIGGVLGAILYNIALTLI

SEQ ID NO: 7697 - protein, 447 aa, Streptococcus agalactiae
GTGGCAAAAAGAGTAGACTGTAGGCATAGAAAGGTAGGTACCGTTATGAAAGGATTTCATGGGAATATCGAAAAATTGACACTAGGAAATACAAATTTCCGCCAAGTCCTCTATACCGCAGAACATTGTCAACTCGTTTTAATGACACTGCCTGTTGGTGGAGAAATTGGTAGCGAGATTCATGCAGAAAATGATCAGTTTTTCCGTTTTGAAGCTGGTCATGGTAAGGTTGTCATTGATGGTAATGAATATGAAGTTGCAGATGGAGACGCTATAATAGTTCCGGCAGGTGCTGAACATAACGTAATTAACACTTCTGAAACCGAGATGTTAAAACTCTATACAATTTACAGTCCAGCTCATCACAAAGATGGTATTATCCGTGCCACAAGAGAAGAAGCTGAAGAAAATGAAGAAGATTTTGATGGAGTTACTTCTGAAACTAAA

SEQ ID NO: 7698 - protein, 149 aa, Streptococcus agalactiae
MAKRVDCRHRKVGTVMKGFHGNIEKLTLGNTNFRQVLYTAEHCQLVLMTLPVGGEIGSEIHAENDQFFRFEAGHGKVVIDGNEYEVADGDAIIVPAGAEHNVINTSETEMLKLYTIYSPAHHKDGIIRATREEAEENEEDFDGVTSETK

SEQ ID NO: 7699 - protein, 711 aa, Streptococcus agalactiae
ATGAAAACAGTTAAAGAAATAAGTCACATTTCTGGTATTAGTGTGCGCACACTTCATTATTATGATGAAATAGATTTGTTACCTCCTTCATTTGTAGGAGAGAATGGTTATCGTTACTATGATGATGAATCACTGATTAAGTTACAAGAAATTTTGTTATTTAAGGAACTGGAATTTCCTCTTAAAAAAATAAAAGAGATAATGGATAGTCCAAATTATGATCGTAATCAAGCACTTCTTGATCAAATTAGGTGGCTGGAACTAAAGAAACAGCGACTAGAAGAAGTAATTGAACATGCTAAGTCTATCCAGAGGGGTAAAAATATGTCAGATTTTACAGCTTATAATCAAGAAGAATTAGAAGCATTTCAAGAGGAAGCTAGAACACGCTGGGGGGATACAGATAGTTACAAAGAATTTGAAAATAGCTATAGTAAGAATGATTTTTCAATGATTTCACAAGCTATGAGTCAGATTTTTAAAGACTTTGGACAGTTGAAAGAACTTTCTCCGACAGATGAGAAAGTTCAAAAACAAGTTCAGATTTTACAAGATTATATCACAGCTCAGTTTTACAACTGCACTAACGATTTATTAGCAAGTCTTGGAATAATGTACATCCAAGATGAGCGTTTCCAAAGGTCTATTGATAATTGGGGAGGCCAGGGAACAGCATTATTTGTTTCTAAAGCTATAGATAGCTATTGTCAG

SEQ ID NO: 7700 - protein, 237 aa, Streptococcus agalactiae
MKTVKEISHISGISVRTLHYYDEIDLLPPSFVGENGYRYYDDESLIKLQEILLFKELEFPLKKIKEIMDSPNYDRNQALLDQIRWLELKKQRLEEVIEHAKSIQRGKNMSDFTAYNQEELEAFQEEARTRWGDTDSYKEFENSYSKNDFSMISQAMSQIFKDFGQLKELSPTDEKVQKQVQILQDYITAQFYNCTNDLLASLGIMYIQDERFQRSIDNWGGQGTALFVSKAIDSYCQ

SEQ ID NO: 7701 - protein, 1107 aa, Streptococcus agalactiae
ATGACAGTTACAGGAATTGTTGCTGAATTTAATCCTTTTCATAATGGCCATAAGTACCTTTTAGAACAAGCTCAAGGAATAAAAGTAATAGCCATGTCGGGTAATTTTATGCAACGTGGTGAGCCGGCGATTGTAGATAAATGGACCCGTGCCCAGATGGCACTAGAAAATGGTGCTGATTTAGTGATTGAACTCCCTTTTTTGGTTTCGGTACAGTCAGCGGATTATTTCGCTAGTGGAGCTGTGTCTATCCTGGCACGATTAGGTGTGGATAACTTATGCTTCGGTACCGAAGAAATGCTTGATTATGACCGTATTGGGGATATTTATGTGAATAAAAAAGAGGAGATGGAAGCTTTTTTGAAAAAACAATCGGATTCTCTTTCCTATCCACAAAAAACGCAAGCTATGTGGCAAGAATTTGCAGGGATTGCATTTTCGGGACAAACCCCAAATCACATTTTAGGCTTAGCCTACACCAAAGCAGCTAGCCAAAATGGTATTCGATTAAATCCGATACAACGTCAAGGAGCTGGTTATCATTCATCAGAAAAAACAGAGATATTTGCTTCCGCAACAAGTCTTCGTAAACATCAATCTGATCGTTTCTTTGTAGAAAAAGGTATGCCTAACAGTGACTTGTTTTTGAATAGTCCACAAGTAGTTTGGCAAGATTATTTTAGTTTACTCAAATATCAGATAATGACGCATTCTGATTTGACACAAATTTATCAAGTGAATGAAGAGATAGCCAATCGTATAAAAAGTCAAATTCGTTATGTGGAGACTGTGGATGAGTTAGTTGATAAAGTCGCAACTAAACGGTATACCAAAGCAAGAATTCGACGTTTATTAACCTATATCTTGATAAATGCTGTGGAAAGTCCTATACCAAATGCTATTCATGTCTTAGGTTTTACACAAAAAGGTCAACAGCATTTAAAGTCTGTGAAGAAGTCTGTGGATATCGTGACGAGGATTGGTTCACAAACGTGGGATAGTTTGACGCAACGAGCAGATTCTGTTTATCAGATGGGAAATGCTAATATAGCAGAGCAAACATGGGGACGTATCCCTTTTCATCAATCTGTTAGTCAAAGCGACCTT

SEQ ID NO: 7702 - protein, 369 aa, Streptococcus agalactiae
MTVTGIVAEFNPFHNGHKYLLEQAQGIKVIAMSGNFMQRGEPAIVDKWTRAQMALENGADLVIELPFLVSVQSADYFASGAVSILARLGVDNLCFGTEEMLDYDRIGDIYVNKKEEMEAFLKKQSDSLSYPQKTQAMWQEFAGIAFSGQTPNHILGLAYTKAASQNGIRLNPIQRQGAGYHSSEKTEIFASATSLRKHQSDRFFVEKGMPNSDLFLNSPQVVWQDYFSLLKYQIMTHSDLTQIYQVNEEIANRIKSQIRYVETVDELVDKVATKRYTKARIRRLLTYILINAVESPIPNAIHVLGFTQKGQQHLKSVKKSVDIVTRIGSQTWDSLTQRADSVYQMGNANIAEQTWGRIPFHQSVSQSDL

SEQ ID NO: 7703 - protein, 249 aa, Streptococcus agalactiae
ATGATAATATTCTTATACGCTTGTCTGATGATATTTGGGATACTTTATATTATTGAACGTCGGGTAAGTCAGAAAAAGTCTAAAGTTATTTTGGGATTATTGATGAACCCTAAACTTCATTTGGATTTATTATCGGCATTAAAACCATTTGAAAAAGAAACAGATCGTCTCATATACCTTCGTAAAACTTATCACCTAGATATTATTGATGCTGTTACTTTAAATAATCAATTGAAAGAGAAAGAAGTA

SEQ ID NO: 7704 - protein, 83 aa, Streptococcus agalactiae
MIIFLYACLMIFGILYIIERRVSQKKSKVILGLLMNPKLHLDLLSALKPFEKETDRLIYLRKTYHLDIIDAVTLNNQLKEKEV

SEQ ID NO: 7705 - protein, 246 aa, Streptococcus agalactiae
ATGGTGTGGGATACTTATGAAGATGATGCACCTCATTCTATTGTCCATGAATTAACATTTTTTGTTCAAGAAGAAGATGGTCGATTTACACGTCATGATGAAGTTCATGAAGAGCGTACTTATGATATTTTGACTTATGATATTTTACTTGAACAGGCAGGTTTTAAAGATGTTAAGGTGTATGCAGATTTTGAAGATAAAAAACCAACTGCAACTTCTGCTCGCTGGTTTTTTGTAGCTCATAAA

SEQ ID NO: 7706 - protein, 82 aa, Streptococcus agalactiae
MVWDTYEDDAPHSIVHELTFFVQEEDGRFTRHDEVHEERTYDILTYDILLEQAGFKDVKVYADFEDKKPTATSARWFFVAHK

SEQ ID NO: 7707 - protein, 378 aa, Streptococcus agalactiae
ATGGCAACGTATGAAACTTTTGCAGCTGTTTATGATGCTGTCATGGATGATACTTTATATGATAAATGGACTGATTTTTCACTTCGTCATTTTCCAAAAGGTAAGAAAAAACTTTTGGAATTAGCATGTGGTACGGGAATTCAGTCTGTTCGATTTTCACAAGCTGGTTATGCTGTTACAGGACTTGATCTTAGTGGCGATATGCTGAAACTTGCCAAAAAACGTGCAACTTCTGCTCACCAAAGTATCCAGTTTATTGAAGGAAATATGTTAGATTTATCTAATGTTGGTAAATATGATCTCATCACGTGCTATTCAGACTCTATTTGTTATATGCAAGATGAAGTCGAGGTTGGTGATGTTTTTTATCGAAGTCTA

SEQ ID NO: 7708 - protein, 126 aa, Streptococcus agalactiae
MATYETFAAVYDAVMDDTLYDKWTDFSLRHFPKGKKKLLELACGTGIQSVRFSQAGYAVTGLDLSGDMLKLAKKRATSAHQSIQFIEGNMLDLSNVGKYDLITCYSDSICYMQDEVEVGDVFYRSL

SEQ ID NO: 7709 - protein, 354 aa, Streptococcus agalactiae
ATGACAGAAAAAGACTTACTACAGCTAGTCGTTAAGGCTGCAGATGAAAAACGAGCAGAAGATATTGTAATTTTAGATTTACAGCCTGTAACGAGTGTTGCAGATTACTTTGTGATTATGAGTGCAAGTAATAGTAGGCAGTTAGAAGCAATCGCAGACAATATCCGTGAACAAGTAAAAGGAAATGGTGGGGATGCTAGCCACCTTGAAGGCGATAGTAAAGCTGGTTGGGTACTTCTTGACCTCAATAGCGTCGTGGTTCATATCTTCTCTGAAGATGAGAGACAGCACTATAACCTTGAAAAACTTTGGCATGAAGCACCATTGCTTGATGCTGAAGACTTTATGACAGAA

SEQ ID NO: 7710 - protein, 118 aa, Streptococcus agalactiae
MTEKDLLQLVVKAADEKRAEDIVILDLQPVTSVADYFVIMSASNSRQLEAIADNIREQVKGNGGDASHLEGDSKAGWVLLDLNSVVVHIFSEDERQHYNLEKLWHEAPLLDAEDFMTE

SEQ ID NO: 7711 - DNA, 519 bp, Streptococcus agalactiae
atgacttgtgcacttttactaattgatatccaacaaggtattatggataagaaaccaaagcatttaacaaattttgcagagcttttagatgatttacttttaagtgccaaaggttctaattgtgaagtgatatggataaggcatcatgatgaggaattgcctcaaggttctccacagtgggaaatttgggaacggcgacatcttgtgacgcatcacaaaataattgataaaacttacaatagttgttttaaagatactcatttacatgattacttgcaaagtaagcatattagtcaattgatcatgatgggacttcaaacagaatactgttttgatacatcagtaaaagttgcttttgaatatggttatgatatctttattccacaaggtggacacctaacatttgatacaccaactttaagtggggattctattaaaaaacattacgagaatatttggcatcatcgttttgcgacaatggtagcaaaagataacttattgaaattaataaacgaggaa

SEQ ID NO: 7712 - protein, 173 aa, Streptococcus agalactiae
MTCALLLIDIQQGIMDKKPKHLTNFAELLDDLLLSAKGSNCEVIWIRHHDEELPQGSPQWEIWERRHLVTHHKIIDKTYNSCFKDTHLHDYLQSKHISQLIMMGLQTEYCFDTSVKVAFEYGYDIFIPQGGHLTFDTPTLSGDSIKKHYENIWHHRFATMVAKDNLLKLINEE

SEQ ID NO: 7713 - DNA, 312 bp, Streptococcus agalactiae
  misc_feature 303, 304, 305, 306, 307: n = A,T,C or G
atgacctacaaagattacacaggtttagatcggactgaacttttgagtaaagtgcgtcatatgatgtccgacaagcgctttaatcatgtgttaggagtagagcgtgctgcaatagaattagcagaacggtatggttatgataaggaaaaagcgggcctagctgctttattacatgattatgctaaagaactatctgatgatgaatttcttagattaattgataaataccaactagatcccgacctaaaaaaatggggtaataatatttggcatggtcttgttggcatttataaaatacaagannnnnttaat

SEQ ID NO: 7714 - protein, 104 aa, Streptococcus agalactiae
  VARIANT 101, 102, 103: Xaa = Any Amino Acid
MTYKDYTGLDRTELLSKVRHMMSDKRFNHVLGVERAAIELAERYGYDKEKAGLAALLHDYAKELSDDEFLRLIDKYQLDPDLKKWGNNIWHGLVGIYKIQXXXN

SEQ ID NO: 7715 - DNA, 630 bp, Streptococcus agalactiae
atggcactcgaattgctaacaccatttacaaaagttgaattagaagagaaaaagcgagatactaacagaaaacaaattggaattatgggaggaaattttaaccctgttcataacgcccaccttgttgttgcagatcaagtacgtcagcaattgtgtttagaccaagttctgttgatgcctgaatttcagccaccacatattgataaaaaagagacaattgatgaacagcatcgtctcaagatgcttgaattagcaatagaaggcattgatggtttatctattgaaccgattgaaattgaacgtaaaggtatcagctatacatacgatacgatgaagcttctaattgaaaaaaatccagatgttgattattatttcattattggggcagatatggtggaatatctacctaagtggcatcgtattgatgaacttgttaaaatggtgcagtttgttggtgttcaacgtccaaaatataaagctggtacatcatatcccgttatttgggtggatctgccattgatggatatctcatcaagtatgattcgtcaatttattaaaagtaatcgtcagcccaactatttactgcctaaagaggtattagattatatcaggaaagaaggtctttacaaa

SEQ ID NO: 7716 - protein, 210 aa, Streptococcus agalactiae
MALELLTPFTKVELEEKKRDTNRKQIGIMGGNFNPVHNAHLVVADQVRQQLCLDQVLLMPEFQPPHIDKKETIDEQHRLKMLELAIEGIDGLSIEPIEIERKGISYTYDTMKLLIEKNPDVDYYFIIGADMVEYLPKWHRIDELVKMVQFVGVQRPKYKAGTSYPVIWVDLPLMDISSSMIRQFIKSNRQPNYLLPKEVLDYIRKEGLYK

SEQ ID NO: 7717 - DNA, 276 bp, Streptococcus agalactiae
atggcactcgaattgctaacaccatttacaaaagttgaattagaagagaaaaagcgagatactaacagaaaacaaattggaattatgggaggaaattttaaccctgttcataacgcccaccttgttgttgcagatcaagtacgtcagcaattgtgtttagaccattatatgtctcacttaaataatactcagttgataataacaattgcttcatctcagtacttagtttcgaaatcgacacacctggctgtacaatggttattctcatatcagtac

SEQ ID NO: 7718 - protein, 92 aa, Streptococcus agalactiae
MALELLTPFTKVELEEKKRDTNRKQIGIMGGNFNPVHNAHLVVADQVRQQLCLDHYMSHLNNTQLIITIASSQYLVSKSTHLAVQWLFSYQY

SEQ ID NO: 7719 - DNA, 315 bp, Streptococcus agalactiae
atgttaacatctaaacaacgtgctttcttaaaatcagaagcacattctatgaaacccattattcaaattgggaaaaatggtttaaatgatcaaatcaaaacaagcgtacgtaatgcactcgatgcacgtgagctaatcaaagtaacccttttacaaaataccgatgaagatatccacgatgtcgctgaagttctggaagatgaaattggctgcgatactgtccttaaaataggacgtatcttgattctttataaagagtcagcgcgcaaagaaaatcgtaaaatttcagttaaagtaaaagcagtaaaatcaaac

SEQ ID NO: 7720 - protein, 105 aa, Streptococcus agalactiae
MLTSKQRAFLKSEAHSMKPIIQIGKNGLNDQIKTSVRNALDARELIKVTLLQNTDEDIHDVAEVLEDEIGCDTVLKIGRILILYKESARKENRKISVKVKAVKSN

SEQ ID NO: 7721 - protein, 1116 aa, Streptococcus agalactiae
ATGGAAGAGTTATTTTGTATTGGCTGCGGAGCCAGGATTCAAACTGAAAATAAAGATGCTGCTGGCTATACACCTCGTGCAGCACTTGAAAAAGGTTTAGAGACAGGAGAATTATACTGTCAGCGTTGTTTCAGATTGCGCCACTATAATGAGATTACTGACGTTCATATCACTGATGATGAATTTTTGAAATTACTACATGAGGTTGGAGATAGTGATGCCCTTGTGGTGAATGTCATTGATATTTTTGATTTCAATGGTTCAATTATTCCTGGTCTTAGTCGTTTCGTTGCAGGAAACGATGTTCTTTTAGTAGGAAATAAAAAAGATATTCTTCCCAAATCGGTTAAAGATGGAAAAGTAACACAATGGTTAACTGAGAGAGCTCATGAAGAGGGGCTTCGTCCTGTTGATGTCATCTTGACAAGTGCCCAAAATCATCATGCTATTAAGGATTTGATTGATACGATTGAAAAGTATCGTCATGGTCGAGATGTTTATGTTGTTGGGGTTACTAATGTTGGAAAGTCAACTCTTATTAACGCTATTATTCGTGAAATCACTGGTAGTCGTGATGTTATTACGACCTCACGTTTCCCAGGTACAACATTAGATAAAATAGAAATACCTCTTGATGATGGTAGCTATATTTTTGATACCCCGGGTATTATTCATCGTCATCAAATGGCTCATTATTTGACAGCAAAAAATCTTAAATATGTTAGTCCTAAAAAAGAAATAAAACCCAAAACTTATCAGCTTAATTCAGAACAAACATTATTCTTGGCTGGCCTAGCACGTTTTGATTTTATTTCTGGTCAAAAACAAGGTTTTACGGCATATTTTGATAATAACCTGAATTTACACCGCACTAAACTAGTTGGAGCAGATGAATTTTACACTAAACATGTTGGAAAATTATTAACACCACCAACAGGTAAGGAAGTTTCAGATTTTCCTAAATTAGTTCGTCATGAATTTACAATCAAGAATAAAATGGATATTGTTTATTCGGGCCTTGGTTGGATACGTGTGAAATCAGAAGCAGAAAATCCAGTAGTAGTAGCTGCTTGGGCTCCAGAAGGCGTGGCAGTTGTTTTACGCAAAGCTTTAATT

SEQ ID NO: 7722 - protein, 372 aa, Streptococcus agalactiae
MEELFCIGCGARIQTENKDAAGYTPRAALEKGLETGELYCQRCFRLRHYNEITDVHITDDEFLKLLHEVGDSDALVVNVIDIFDFNGSIIPGLSRFVAGNDVLLVGNKKDILPKSVKDGKVTQWLTERAHEEGLRPVDVILTSAQNHHAIKDLIDTIEKYRHGRDVYVVGVTNVGKSTLINAIIREITGSRDVITTSRFPGTTLDKIEIPLDDGSYIFDTPGIIHRHQMAHYLTAKNLKYVSPKKEIKPKTYQLNSEQTLFLAGLARFDFISGQKQGFTAYFDNNLNLHRTKLVGADEFYTKHVGKLLTPPTGKEVSDFPKLVRHEFTIKNKMDIVYSGLGWIRVKSEAENPVVVAAWAPEGVAVVLRKALI

SEQ ID NO: 7723 - protein, 531 aa, Streptococcus agalactiae
ATGAAATTGAGTATAGATGATTATAGGCCGACCTTCGTGGTTGAGGCAGTTTATGATTTAAGAGCAGAAGATTTATTACGTCATGGCATTCGTGCGGTTTTAGTTGATTTAGATAATACACTCATTGCTTGGAATAATCCAGATGGTACTGCTGAGGTGCGTGCATGGTTAGATGAGATGACAACAGCGGATATTTCAGTTGTAGTAGTGTCTAACAACAATCATGCTCGCGTAGAACGTGCAGTATCACGTTTTGGTGTGGATTTTGTAAGTCGTGCGATGAAACCATTTACTCGTGGTATAAACATGGCAATTGAGCGTTATGGCTTTGATCGTGACGAGGTGATTATGGTTGGAGATCAATTGATGACAGATATTCGTGCTAGTCATCGCGCAGGAATAAAGTCCGTATTGGTAAAACCAATTGTTAAATCTGATGCTTGGAATACCAAGTTCAATCGCTTACGTGAACGTCGCGTTTGGAAAAAAATAGAAGAGAATTACGGTAAAATCGTATATCAAAAAGGAATT

SEQ ID NO: 7724 - protein, 177 aa, Streptococcus agalactiae
MKLSIDDYRPTFVVEAVYDLRAEDLLRHGIRAVLVDLDNTLIAWNNPDGTAEVRAWLDEMTTADISVVVVSNNNHARVERAVSRFGVDFVSRAMKPFTRGINMAIERYGFDRDEVIMVGDQLMTDIRASHRAGIKSVLVKPIVKSDAWNTKFNRLRERRVWKKIEENYGKIVYQKGI

SEQ ID NO: 7725 - protein, 885 aa, Streptococcus agalactiae
ATGACCTTAGCTGCCGGACTAGCATGGGGCATTTCTGGAATTAGTGGTCAATACTTGATGTCGCACGGAGTACACGTTAACCTTTTGACTTCTTTACGATTGTTGATAACAGGTATCTTTCTCTTGTCTTTAGCTAGATCAAAACAAAAGGAGCATTTAGTAGCAGCGTGGAAACAGCCAAAATTTTTAAAGCAGGTTTTACTTTTTTCTATATTTGGTTTAGTTTTAAATCAATATGCTTTTCTCAGAGCGATTCATTTAACAAATGCTGGAACTGCAACGGTTTTGCAATATATGGCACCAATACTTATTTTGAGTATTGTTTGTATCCTAAACAGACAAAGACCAACATCTTTTGAAATAATAGCAATTGCTATGGCAATTTTAGGAACCTATATGATTGCAACGCATGGGAAATTAGGAAGTTTAGCTATCACACCGAAAGGATTAATGTGGGGGCTTGGTTCAGCCATTACTTATTCTATTTATATTTTATTACCTGTAAAACTTATTCATGAATGGGGAAGTACGATTGTTATTGGTTCAGGAATGTTTATAGGTGGGATTTTATTTAGTTTGGTGACAAAAGCGTGGCAATACCCCTTACAAATTAATGTGATGAGTATACTTGCTTATATTGGCATTATTGGTATTGGGACCATTTTTGCTTACACTTTTTTCCTTAAAGGGGTTAGTATTGTAGGTGCTGTCAAGGGTAGCTTATTAGCATCGGTAGAGCCAGTTTCTTCGGTGTTTTTGACAGTACTTGTTTTAGGAGAAATTTTTTATCCAATAGATTTACTTGGGATGTTGTTTATTTTCCTTGCTGTAACTCTAATCTCTTACAAAGATTTAATTGCATTGAAGAAAATGAAACGAGTAAAA

SEQ ID NO: 7726 - protein, 295 aa, Streptococcus agalactiae
MTLAAGLAWGISGISGQYLMSHGVHVNLLTSLRLLITGIFLLSLARSKQKEHLVAAWKQPKFLKQVLLFSIFGLVLNQYAFLRAIHLTNAGTATVLQYMAPILILSIVCILNRQRPTSFEIIAIAMAILGTYMIATHGKLGSLAITPKGLMWGLGSAITYSIYILLPVKLIHEWGSTIVIGSGMFIGGILFSLVTKAWQYPLQINVMSILAYIGIIGIGTIFAYTFFLKGVSIVGAVKGSLLASVEPVSSVFLTVLVLGEIFYPIDLLGMLFIFLAVTLISYKDLIALKKMKRVK

SEQ ID NO: 7727 - protein, 1440 aa, Streptococcus agalactiae
ATGAATTTTGAAACAGTCATTGGACTTGAAGTCCATGTTGAATTAAATACGAACTCTAAAATTTTCTCACCTTCTTCCGCTCATTTTGGTCAGGAACAAAATGCTAATACAAATGTAATTGACTGGTCTTTCCCAGGTGTCCTTCCAGTCATGAATAAAGGAGTTGTTGATGCAGGAATCAAGGCAGCACTTGCCTTGAATATGGATATCCATCAGAACATGCATTTTGACCGTAAAAATTATTTCTATCCAGATAATCCTAAAGCTTATCAAATTTCACAGTTTGATGAGCCTATTGGTTACAATGGTTGGATTGAAATCGAATTAGAAGATGGTACACGAAAAAAAATTCGTATTGAGCGTGCCCACCTCGAAGAAGATGCAGGAAAAAATACACATGGGACAGATGGTTATTCCTATGTTGACCTTAATAGACAAGGTGTTCCACTGATTGAAATTGTATCAGAAGCTGATATGCGTTCTCCTGAGGAAGCTTATGCTTATTTGACAGCTCTCAAAGAGATTATCCAATATACTGGAATTTCTGACGTTAAAATGGAAGAAGGTTCTATGCGTGTAGATGCCAATATTTCACTTCGTCCTTATGGTCAAGAAGAGTTTGGTACTAAAGCAGAACTTAAGAACCTTAACTCATTCAATAATGTACGTAAAGGTTTGATACATGAAGAAAAACGTCAAGCACAAGTTTTACGATCTGGTGGTCAAATTCAGCAAGAGACTCGTCGTTTTGATGAAACAACAGGTGAGACTATTTTGATGCGTGTCAAGGAAGGCTCATCAGATTACCGCTATTTCCCTGAACCAGATCTACCACTATTTGATATCTCGGATGAATGGATTGATCAAGTTCGTTTAGAATTACCAGAATTTCCACAGGAACGTCGTGCGAAATATGTATCGTCTTTTGGTCTATCATCTTATGATGCTAGCCAATTAACAGCTACAAAAGCAACTTCTGATTTCTTTGAAAAAGCTGTTGCTATTGGGGGTGATGCAAAACAAGTTTCCAATTGGTTACAAGGAGAAGTGGCGCAATTTCTTAACAGTGAATCAAAATCAATCGAAGAAATTGGTCTGACTCCTGAGAATTTGGTTGAGATGATTAGCTTGATTGCTGACGGTACAATTTCATCCAAAATTGCTAAAAAAGTTTTTGTGCATTTAGCTAAAAATGGTGGTTCAGCTGAAGAATTCGTTAAAAAGGCTGGTTTAGTTCAAATTTCAGATCCTGAAGTATTAATCCCAATTATTCATCAAGTCTTTGCAGATAATGAAGCTGCTGTGATTGACTTTAAGTCAGGAAAACGCAATGCTGATAAGGCCTTCACAGGTTATCTAATGAAAGCAACAAAAGGACAAGCTAATCCACAAGTTGCTCTGAAGCTGTTAGCGCAAGAATTAGCAAAATTAAAAGAAGAA

SEQ ID NO: 7728 - protein, 480 aa, Streptococcus agalactiae
MNFETVIGLEVHVELNTNSKIFSPSSAHFGQEQNANTNVIDWSFPGVLPVMNKGVVDAGIKAALALNMDIHQNMHFDRKNYFYPDNPKAYQISQFDEPIGYNGWIEIELEDGTRKKIRIERAHLEEDAGKNTHGTDGYSYVDLNRQGVPLIEIVSEADMRSPEEAYAYLTALKEIIQYTGISDVKMEEGSMRVDANISLRPYGQEEFGTKAELKNLNSFNNVRKGLIHEEKRQAQVLRSGGQIQQETRRFDETTGETILMRVKEGSSDYRYFPEPDLPLFDISDEWIDQVRLELPEFPQERRAKYVSSFGLSSYDASQLTATKATSDFFEKAVAIGGDAKQVSNWLQGEVAQFLNSESKSIEEIGLTPENLVEMISLIADGTISSKIAKKVFVHLAKNGGSAEEFVKKAGLVQISDPEVLIPIIHQVFADNEAAVIDFKSGKRNADKAFTGYLMKATKGQANPQVALKLLAQELAKLKEE

SEQ ID NO: 7729 - protein, 1464 aa, Streptococcus agalactiae
ATGTCGTTTAATAATCAATCAATTGATCAGTTGCATGATCTTCTCGTTAAAAAAGAAATTTCAGCAACTGAATTAACAAAAGCTACATTGGAAGATATTCATGCGCGTGAACAAGCGGTTGGATCTTTTATTACTATTTCTGATGATATGGCAATAGCTCAAGCCAAAGAAATTGATGATAAAGGAATTGATGCTGATAATGTTATGTCAGGTATTCCCTTAGCAGTTAAAGATAATATTTCAACAAAGGGGATTCTTACAACAGCTGCTTCTAAAATGCTCTATAACTATGAGCCAATCTTTGATGCTACGGCTGTTGAAAAGTTATATGCTAAAGATATGATTGTGATTGGTAAAGCAAACATGGATGAATTTGCCATGGGAGGCTCTACAGAAACATCTTATTTTAAAAAGACAAATAACGCTTGGGACCATAGTAAAGTTCCGGGAGGATCATCAGGTGGTTCTGCAGCAGCAGTAGCTTCAGGACAAGTACGTTTGTCATTGGGCTCTGATACAGGTGGTTCAATTCGCCAGCCGGCTTCATTTAATGGAATCGTTGGTATGAAGCCAACTTACGGACGTGTATCACGCTTTGGTTTGTTTGCTTTCGGTAGTTCGCTTGACCAGATTGGACCGATGTCTCAAACAGTAAAAGAGAATGCACAGCTTTTGACAGTTATTTCTGGGCATGATGTAAGAGATTCAACTTCTTCTGAGCGTACTGTAGGCGATTTTACTGCTAAAATTGGTCAAGATATTCAAGGAATGAAAATTGCTTTACCAAAAGAATATTTGGGAGAAGGAATAGCGCCAGGAGTTAAAGAAACGATTATTAAGGCCGCAAAACATCTGGAAAAACTAGGTGCAGTTATTGAGGAAGTTAGTTTACCGCATTCTAAATACGGTGTTGCTGTTTATTATATTATTGCTTCATCGGAAGCTTCTTCAAACCTACAACGTTTTGATGGTATTCGTTATGGATACCGTACAGAAAATTATAAAAACTTGGATGATATCTATGTCAATACACGATCTGAAGGTTTTGGAGACGAAGTTAAGCGTCGCATTATGCTGGGAACGTTCAGTTTATCTTCTGGGTATTACGATGCTTATTATAAAAAAGCAGGTCAAGTTCGTAGTTTGATTATTCAAGATTTTGAAAAAGTTTTCGCAGATTATGACTTGATTTTAGGTCCAACAGCTCCAACAACAGCCTTTGACTTAGATTCTTTAAATCACGATCCAGTTGCAATGTACCTAGCTGATATTCTAACAATACCAGTTAATTTGGCTGGTTTACCAGGTATTTCAATCCCTGCTGGTTTTGATAAAGGTCTACCGGTTGGTATGCAGTTGATTGGTCCGAAATTCAGTGAAGAAACAATATATCAGGTTGCTGCTGCTTTCGAAGCAACGACAGATTATCATAAACAACAACCTAAAATTTTTGGAGGTGAGAAC

SEQ ID NO: 7730 - protein, 488 aa, Streptococcus agalactiae
MSFNNQSIDQLHDLLVKKEISATELTKATLEDIHAREQAVGSFITISDDMAIAQAKEIDDKGIDADNVMSGIPLAVKDNISTKGILTTAASKMLYNYEPIFDATAVEKLYAKDMIVIGKANMDEFAMGGSTETSYFKKTNNAWDHSKVPGGSSGGSAAAVASGQVRLSLGSDTGGSIRQPASFNGIVGMKPTYGRVSRFGLFAFGSSLDQIGPMSQTVKENAQLLTVISGHDVRDSTSSERTVGDFTAKIGQDIQGMKIALPKEYLGEGIAPGVKETIIKAAKHLEKLGAVIEEVSLPHSKYGVAVYYIIASSEASSNLQRFDGIRYGYRTENYKNLDDIYVNTRSEGFGDEVKRRIMLGTFSLSSGYYDAYYKKAGQVRSLIIQDFEKVFADYDLILGPTAPTTAFDLDSLNHDPVAMYLADILTIPVNLAGLPGISIPAGFDKGLPVGMQLIGPKFSEETIYQVAAAFEATTDYHKQQPKIFGGEN

SEQ ID NO: 7731 - DNA, 300 bp, Streptococcus agalactiae
atgaaaatttctgaagaagaagtgcgtcatgttgccaatctgtcaaaattgcgcttttctgatcaagagactaaagaatttgcgtcaagtttgtcaaagattgttgatatgattgaactcttaaatgaagttgacacagaaggcgtaccagtaacaacgaccatggcagatcgcaaaaccgtgatgcgtgaagatattgctcaaccaggcaataatcgtgatgacttatttaaaaatgtaccacagcatcaagattattatattaaagtacctgcaattcttgaggatggaggagatgcc

SEQ ID NO: 7732 - protein, 100 aa, Streptococcus agalactiae
MKISEEEVRHVANLSKLRFSDQETKEFASSLSKIVDMIELLNEVDTEGVPVTTTMADRKTVMREDIAQPGNNRDDLFKNVPQHQDYYIKVPAILEDGGDA

SEQ ID NO: 7733 - DNA, 2643 bp, Streptococcus agalactiae
atggaaactaagtttgtgtatcattttgatgaaggttgtaaggaaatgaaggaactgctaggtggtaagggagctaatctagctgaaatgacgagtattgggttaccggtaccacaaggttttactattacaacacaggcttgtaatgattattatgataacgcttgccatatccgagagagtattcttagtcaaattgatcaagcaatggcacaattggaggttgaacagaacaagcaattaggaagtgttgatgatcctttgttggtgtcagttcggtcaggagcagttttttcgatgcctggtatgatggatacagttttaaatttagggttaaatgatcgtagtgtccaaggtttagtgaaaaagacagaagacgagcgttttgcttatgacagttatcgtcgttttatccaaatgtttgcagatgtggttacaggcattccaaaatataaatttgataccattttagatcgacttaagacagataaatgttatcaagatgacacagaactaactggttcagatttacagagacttgttgaattttacaaagaactatatcaaaaagaagcaggagaaaaatttccgcaagatcctaaaaggcagcttttgttagcaattgaggcagtttttaaatcatggaataatccaagagctaagatttatcgtaaattaaatgatatttcggagacgcttggaacagccgttaatattcaagctatggtttttgggaatatgggaaataacagcggaacgggagttgcttttacacgaaacccatcaactggagcagcaaatttatttggtgagtatttgattaatgcacaaggagaagatgttgttgcaggtatcagaacaccacaatccatatcaaagttggcagaacaaatgcctattatttaccaagagtttgtaagcgttacccaaaagttagaagctcattatcgcgatatgcaagatatggagtttacaattgaaaatggtaatctttatatgcttcagacgagaagcggtaagcgtacagcgaaggcagctatcaaaatagcagtagatcaagtaaatgaaggcctaattagtaaagaagaagctatactacgtatcgagcctaaacaattagatcagttattacacccttcttttgacttggaaagtttaaagaaagctattcttttgacgacaggacttccagcctctcctggagctgcttatgggaaagtttatttccatgcagaagatgttgttcaagagatgaaaaagggaaatccagtgctattggtcagacaagagacatcacctgaagatatcgaggggatggttagtgcaaacgggattataacagcaagaggcggaatgacctcccatgcggcagtagtagccagaggaatggggaaaccatgcgttgcaggctgtagtcaattattggttgatgaagtaagacgagaaatttctattgggcatcaaacgataaaagaaggtgagatgttatcaatcgatggtgctacaggaaatgtttatataggacaagttccgatggcagagactagcgtagattgtgattttgagatatttatgaaatgggtagatgaaaatcgagatatgatggtgtgttcaaatgcagataatccgagagatgctcaaaaggccttggactttggagcagaaggaataggtctttgtcgcacggaacatatgttttttgacgatgaacgtattccagtcgttagagaaatgattttagcagatgatgtattgagtcgaaggaaggctctagaaaggcttttatctttccaaagagacgatttttatcaaatttttaaggtattgaaaggtaaaacttgtacgattcgtttgcttgaccctcctttacatgaattcttaccccatgataaagagtctatcgaatctatggcaagacaaatggggatatctactttagctattgaaaaacggattcaaacattagaagaattcaaccctatgttaggtcatcgtggttgtagacttgcgattacctatccggaaatttaccaaatgcagatgagagctcttgtacaaggcgctatacttgcaatgaaagagggatatgaggcaaagccagaaattatgattcctttagtgtcagcgcatgaagaaatctctataatacgtgatctgattgaagagacaattattgaggagagtaaatctaaaaaaattaacttatcatttcctattgggacaatgattgaaacaccaagagcttgtatgatagcggatgatattgcaaagtttgcggatttctttagttttgggaccaatgatttaacacaaatgagctttggattttcacgagatgatgctggaaaattcttaggagaatacgttgataaaggacttctaaaaaaagaccctttccaagctttagatcaaaaaggaataggaaggtttattgagcaggcagtgaggttaggaaaagaagttaagccaaaccttaaaataggtatctgtggagagcatggtggagaaccatcatctattgagttctgttaccaacaggggttacattatgtatcgtgttcgccgtttagaattcctattgctaaattagcggctgcacaggctaaaatcaaacaaagtagaaatgatataacaatagataaa

SEQ ID NO: 7734 - protein, 881 aa, Streptococcus agalactiae
METKFVYHFDEGCKEMKELLGGKGANLAEMTSIGLPVPQGFTITTQACNDYYDNACHIRESILSQIDQAMAQLEVEQNKQLGSVDDPLLVSVRSGAVFSMPGMMDTVLNLGLNDRSVQGLVKKTEDERFAYDSYRRFIQMFADVVTGIPKYKFDTILDRLKTDKCYQDDTELTGSDLQRLVEFYKELYQKEAGEKFPQDPKRQLLLAIEAVFKSWNNPRAKIYRKLNDISETLGTAVNIQAMVFGNMGNNSGTGVAFTRNPSTGAANLFGEYLINAQGEDVVAGIRTPQSISKLAEQMPIIYQEFVSVTQKLEAHYRDMQDMEFTIENGNLYMLQTRSGKRTAKAAIKIAVDQVNEGLISKEEAILRIEPKQLDQLLHPSFDLESLKKAILLTTGLPASPGAAYGKVYFHAEDVVQEMKKGNPVLLVRQETSPEDIEGMVSANGIITARGGMTSHAAVVARGMGKPCVAGCSQLLVDEVRREISIGHQTIKEGEMLSIDGATGNVYIGQVPMAETSVDCDFEIFMKWVDENRDMMVCSNADNPRDAQKALDFGAEGIGLCRTEHMFFDDERIPVVREMILADDVLSRRKALERLLSFQRDDFYQIFKVLKGKTCTIRLLDPPLHEFLPHDKESIESMARQMGISTLAIEKRIQTLEEFNPMLGHRGCRLAITYPEIYQMQMRALVQGAILAMKEGYEAKPEIMIPLVSAHEEISIIRDLIEETIIEESKSKKINLSFPIGTMIETPRACMIADDIAKFADFFSFGTNDLTQMSFGFSRDDAGKFLGEYVDKGLLKKDPFQALDQKGIGRFIEQAVRLGKEVKPNLKIGICGEHGGEPSSIEFCYQQGLHYVSCSPFRIPIAKLAAAQAKIKQSRNDITIDK

SEQ ID NO: 7735 - DNA, 828 bp, Streptococcus agalactiae
atggaagatcaactcactatatttattatttcagattctttaggggaaacagccaaagctattgcaaaagcgtgtttgtcacaatttccaggacatgatgattggcattttcaatgtttttcctatattaacagtcaggaacgcttagaacaagtttttgaagaggctagccagaagacagtatttatgatgtttagtttagttgatgttgctttggcttcctatgcacagaaacgatgtgaaagtgaacattatgcttatgttgacttattaacaaatgttattcaaggaatatcaaggatatcgggtatagatcctttgggagaaccagggattttacgacgcttagacaatgattatttcaaaagagtagaatcaatagaatttgcagtaaaatatgatgatgggagagatccgcgaggtattttacaagcagatttagttattataggaatttcaagaacttctaaaacgccattaagtatgtttttagcagataaaaatattaaagttattaatattcctttggttccagaggttcctgttcctaaagaattacgtatgattgattctaggagaattatcggactaactaattcggttgatcatcttaatcaagtccgaaaagttcgattaaagtccttaggtctttctagtacggcaaattatgccagtttagaacggattttggaggagacgaggtatgctgaagaagttatgaaaaatttaggttgcccaatcattaatgtatctgataaagcaatcgaagaaacagcaacgattattttagaaatcttaaaaacaaatggacaagtagctaaaaatctg

SEQ ID NO: 7736 - protein, 276 aa, Streptococcus agalactiae
MEDQLTIFIISDSLGETAKAIAKACLSQFPGHDDWHFQCFSYINSQERLEQVFEEASQKTVFMMFSLVDVALASYAQKRCESEHYAYVDLLTNVIQGISRISGIDPLGEPGILRRLDNDYFKRVESIEFAVKYDDGRDPRGILQADLVIIGISRTSKTPLSMFLADKNIKVINIPLVPEVPVPKELRMIDSRRIIGLTNSVDHLNQVRKVRLKSLGLSSTANYASLERILEETRYAEEVMKNLGCPIINVSDKAIEETATIILEILKTNGQVAKNL

SEQ ID NO: 7737 - DNA, 495 bp, Streptococcus agalactiae
atgctaggtatcatagatgcaaaacctaaggttggttatttttatttaggacagtatcatgcttcaatagggacaagtcattttgaaaagatgacagtttcagaaattatggggatccctctgacagttcatcaaaaagattcagtttatgatgttattgtacatatttttatggaagatgctggttgtgcttttatcttggatgatgatgattttctctgtggagtcgtgtcacgtaaagatttattaaagaccagtattggcggaggagatctttctaaaatgccaataggaatggtgatgacacgtatgccacacgtgacaactgttttagaaaatgaaagtctttttgcggcagctgataaattagtgagcagaaaagtggatagtctccctgtcgttcgtcatgataagcaatatcccgaaaaatttaaagtgatcgggaaattatctaaaacaatcctcgctagtttgtttttagaaataagagattat

SEQ ID NO: 7738 - protein, 165 aa, Streptococcus agalactiae
MLGIIDAKPKVGYFYLGQYHASIGTSHFEKMTVSEIMGIPLTVHQKDSVYDVIVHIFMEDAGCAFILDDDDFLCGVVSRKDLLKTSIGGGDLSKMPIGMVMTRMPHVTTVLENESLFAAADKLVSRKVDSLPVVRHDKQYPEKFKVIGKLSKTILASLFLEIRDY

SEQ ID NO: 7739 - DNA, 1131 bp, Streptococcus agalactiae
ttgtatactatttattttatatgttatattatatatctttttttactgaaatcaagtaaaaaaagatactattttaaaaataatcatactatatatttgcttttagacatatcttttgttaaactttcttcgaaaacgttttcgaatataagtatcggaggttgtaatatgacaattaaaaatctcactgttgcaggaagtggcgttctaggtagtcaaatcgcctttcaagcagcttacaaaggaatgtctgtcaccatctatgacattaacgatgaagctttaaataagggaaaagaacgtatcaaaaaattagctaaagtctatcaatcagaaattgaaacagcaaaagaagcatatagtgataaagctaaaagtatcaagtataataaaaacttattgcctagcttagaccatatttttctttcaaaagttgccgattcattagacttgattgctgatttaccaaaccaaattactttttcaaaaaacttagaccaagctgtaagtgacgccgatttagtaatcgaagctgtcccagaaacagttagtataaaagaagatttttacaaacaattagctaaagtggcaccttcaaagacaatctttgcaacaaattcttcaacacttgttccaagtcagtttgctgatataacaggacggcctgataaatttttagcaatgcatttcgctaacaatatttggcaaaataatattgttgaaattatgggacataagggaactgacgacgaggttgtcaaagaagctttggcattctcaaaagatattggtatggtacctttacatattcataaagaacaacctggctatattcttaattcaatactagttccattcttagagagtgcattagcattgtactataataaggtttctgattctgaaactattgataaaacctggaagttaggaacaggagcaccgatgggacctttagaaattttagatattattggcatcgataccgcttataatatcatgaagaattattcagataccaacagcgatcctaatagtcttcatgctcaccttgcaaaaatgcttaaagaagaattcattgataaaggacgtaccggtaaagctgctggacacggcttttatgattacgac

SEQ ID NO: 7740 - protein, 377 aa, Streptococcus agalactiae
MYTIYFICYIIYLFLLKSSKKRYYFKNNHTIYLLLDISFVKLSSKTFSNISIGGCNMTIKNLTVAGSGVLGSQIAFQAAYKGMSVTIYDINDEALNKGKERIKKLAKVYQSEIETAKEAYSDKAKSIKYNKNLLPSLDHIFLSKVADSLDLIADLPNQITFSKNLDQAVSDADLVIEAVPETVSIKEDFYKQLAKVAPSKTIFATNSSTLVPSQFADITGRPDKFLAMHFANNIWQNNIVEIMGHKGTDDEVVKEALAFSKDIGMVPLHIHKEQPGYILNSILVPFLESALALYYNKVSDSETIDKTWKLGTGAPMGPLEILDIIGIDTAYNIMKNYSDTNSDPNSLHAHLAKMLKEEFIDKGRTGKAAGHGFYDYD

SEQ ID NO: 7741 - protein, 546 aa, Streptococcus agalactiae
ATGACAAAAGCACTCATCTCAATAGACTACACATATGATTTTGTGGCAGATGATGGGAAATTAACGGCAGGTAAACCAGCGCAATCTATCGCTTCAGCTATAGCTGACGTTACAGAGAAAGCATACCGGTCAGGGGATTATATTTTTTTTGCGATTGATAATCATGATATTGGAGATGTTTTTCATCCAGAGACCAATCTTTTTCCTGAGCATAATATTAAAGGGACTTCTGGTAGAAACCTATATGGTCCTTTGGGAACTCTATATGAAACTATTAAGGAAGATAGTCGTGTTTTTTGGATAGATAAGCGCCATTATTCTGCCTTTTCTGGCACTGATTTAGATATTCGCCTACGTGAAAGACGAATAGATACTTTGATATTGACAGGAGTATTGACAGATATTTGTGTATTACACACAGCAATTGATGCTTATAACTTAGGTTATAAAATTGAGGTCCCAGCAGCAGCTGTAGCTAGCTTAAATGATAGTAATCATCAATGGGCTTTAAATCATTTTAAAACTGTTCTTGGTGCAACTATTCTT

SEQ ID NO: 7742 - protein, 182 aa, Streptococcus agalactiae
MTKALISIDYTYDFVADDGKLTAGKPAQSIASAIADVTEKAYRSGDYIFFAIDNHDIGDVFHPETNLFPEHNIKGTSGRNLYGPLGTLYETIKEDSRVFWIDKRHYSAFSGTDLDIRLRERRIDTLILTGVLTDICVLHTAIDAYNLGYKIEVPAAAVASLNDSNHQWALNHFKTVLGATIL

SEQ ID NO: 7743 - protein, 783 aa, Streptococcus agalactiae
ATGCCGAATTTATTAGAAAAAACTAGAAAAATTACATCCATCTTACAGCGTTCCGTAGATAGCTTAGATGCCGAATTACCATATAATACAATGGCGGCTCAACTAGCTGATATTATTGACTGTAACGCATGTATTATTAATGGTGGTGGTAACTTACTTGGCTATGCCATGAAATATAAAACAAACACTGACCGTGTGGAAGAATTTTTTGAAACAAAACAATTCCCAGATTACTATGTTAAATCTGCTAGTCGTGTTTATGATACAGAAGCTAACTTATCAGTAGATAATGATTTGTCAATTTTCCCAGTTGAGACAAAGGAAAACTTCCAAGATGGTATTACAACAATCGCTCCAATTTATGGTGGTGGAATGCGCTTGGGAACATTTATTATCTGGCGTAATGATAAAGAATTTAGCGACGATGATTTGATTTTAGTTGAAATTGCAAGCACCGTTGTTGGTATTCAATTACTTAACCTTCAAACAGAAAATCTAGAAGAAAATATTCGTAAACAAACAGCGGTGACAATGGCTATCAACACTCTATCTTATTCAGAAATGAAAGCTGTAGCTGCTATCTTAGGAGAATTAGATGGACTTGAAGGACGCCTAACGGCATCTGTTATTGCAGACCGTATTGGAATTACACGTTCCGTTATTGTAAATGCTCTTCGTAAATTGGAGTCTGCGGGAATCATTGAGAGCCGCTCACTCGGTATGAAGGGAACATACCTCAAAGTTATTAACGAAGGTATTTTTGACAAATTAAAAGAATATAAT

SEQ ID NO: 7744 - protein, 261 aa, Streptococcus agalactiae
MPNLLEKTRKITSILQRSVDSLDAELPYNTMAAQLADIIDCNACIINGGGNLLGYAMKYKTNTDRVEEFFETKQFPDYYVKSASRVYDTEANLSVDNDLSIFPVETKENFQDGITTIAPIYGGGMRLGTFIIWRNDKEFSDDDLILVEIASTVVGIQLLNLQTENLEENIRKQTAVTMAINTLSYSEMKAVAAILGELDGLEGRLTASVIADRIGITRSVIVNALRKLESAGIIESRSLGMKGTYLKVINEGIFDKLKEYN

SEQ ID NO: 7745 - protein, 1127 aa, Streptococcus agalactiae
ATGAGGGCAAATGGTGAAAAGATATTGCGGTTAAACACTGGAAATCCAGCTGCCTTTGGCTTCGAAGCGCCAGATGAAGTCATTCGTGATTTATTACGAATGCGCGTGAATCAGAAGGTTACTCTGATTCGAAAGGTATTTTTTCAGCTCGTAAGGCTGTTATGCAGTATTACCAGTTACAAAACATCCATGTTGACATGGATGATATATACATTGTTAATGGTGTTAGTGAGGGAATCTCTATGTCAATGCAAGCTTTGCTTGATAATGATGACGAGGTTCTAGTTCCAATGCCAGATTACCCGTTATGGACAGCTTGTGTTAGCCTTGCTGGTGGAAATGCTGTGCATTATATTTGTGATGAGGAAGCTAATTGGTATCCTGATATTGATGATATCAAATCAAAAATCACATCCAAAACAAAAGCAATTGTCCTCATTAATCCAAATAATCCAACTGGAGCAGTCTATCCGCGTGAAATTTTGCAAGAGATTGTGGATATTGCTAGACAAAATGACTTGATTATTTTTTCAGACGAGGTTTATGACCGTTTAGTTATGGATGGAATGGAGCATATCCCAATTGCTTCTATTGCAGAGGATATTTTTACAGTTACTTTATCTGGCTTATCTAAATCACATCGCATCTGTGGTTTCCGCGTTGGTTGGATGGTATTGTCTGGTCCGCGACAACATGTTAAAGGTTATATTGAAGGTTTGAATATGTTAGCTAACATGAGGCTGTGTTCAAATGTTCTTGCTCAACAGGTTATTCAAACATCGTTAGGCGGACAGCAATCTATTGATAGTATGTTGTTGCCAGGAGGTCGTATCTACGAGCAACGTAATTATATCCATAAAGCAATTAATGAAATACCTGGTTTATCTGCTGTAAAACCAAATGCTGGACTGTATCTTTTCCCTAAAATTGATACAGATATGTACCGTATTGATAATGATGAAGAGTTTGTGCTTAATTTCTTAAAACAAGAAAAAGTATTACTAACACACGGTAGAGGATTTAATATGAATACCGCTGACCATTTTAGAATTGTTTACTTACCACGTGTTGATGAATTGACTGAACTACAAGAAAAAATGGCTCGCTTTTTAAGCCAATACAAGCGC

SEQ ID NO: 7746 - protein, 376 aa, Streptococcus agalactiae; identical to SEQ ID NO: 3072

SEQ ID NO: 7747 - protein, 450 aa, Streptococcus agalactiae
ATGTCACAAAAATATGAACGCATCCTTGTCGCTATTGATGGATCAACAGAATCTGAACTTGCTTTTGAAAAGGCAGTTAACGTTGCTCTTCGCAATGATTCTGAATTAATCTTGACACATGTTATAGATACACGTGCTTTACAAAGCTTTGCGACATTTGATACTTATATCTATGAAAAATTAGAAAAAGAAGCAAAAGATGTCCTTGAGGAATATGAAAAACAAGCTCGTGAAAAAGGAGCAGATAAAGTTAGACAAGTTATTGAATTTGGTAATCCCAAAACATTACTTGCACATGATATTCCAGAAAAAGAAAAAGTAGACTTGATTATGGTTGGTGCAACAGGTCTTAATACCTTTGAGCGTTTCCTTATCGGATCTTCCTCAGAATACATCCTTCGTCACGCTAAAGTAGATTTACTCATTGTACGTGATCCTAATAAAACAATG

SEQ ID NO: 7748 - protein, 150 aa, Streptococcus agalactiae; identical to SEQ ID NO: 3074

SEQ ID NO: 7749 - protein, 470 aa, Streptococcus agalactiae
ATGGATGGTGAACTATTGAAACGCCACGCTTATATGACAGTAAGGAAGCTGGTTTCAGGTCAGACTTTAAAGTAGAAGAAATCGTTGAGTTCTTGTATGCTGCTAGTCAAGGTAACCAAAAAGTATTTGACCAATCTATCCGTAATTTACACTTAGCTATTGATAAAGCAAGAGATAAGGTTATTTCTAAAGACCATCCAGAAACACCATTAGTGGGAGAAGTGGATGCCTTAACAGATTTACTTTATCTGACTTATGGCTCCTTTGTTCTTATGGGAGTCGACCCAAAACCTCTTTTTGATACAGTACATGAGGCCAATATGGGTAAAATCTTTCCAGATGGCAAAGCTCATTTTGATCCTGTTACTCATAAAATTTTAAAACCAGACGACTGGGAAGAACATTTCGCTCCTGAGCCATCAATTCGACGTGAATTAGATAGCCAAATTCAGAAATCCTTAAATCGAAAA

SEQ ID NO: 7750 - protein, 157 aa, Streptococcus agalactiae
MDGETIETPRLYDSKEAGFRSDFKVEEIVEFLYAASQGNQKVFDQSIRNLHLAIDKARDKVISKDHPETPLVGEVDALTDLLYLTYGSFVLMGVDPKPLFDTVHEANMGKIFPDGKAHFDPVTHKILKPDDWEEHFAPEPSIRRELDSQIQKSLNRK

SEQ ID NO: 7751 - DNA, 870 bp, Streptococcus agalactiae
  misc_feature 861, 862, 863, 864, 865: n = A,T,C or G
gtggcaattaaggcagtattttttgatattgatggtacacttcttaatgatcgtaagaatgtacaaaagtcaacaattaaagcaattcgaaatttgaaagaccaaggaatactagtcggtttagcaacggggcgaggtcctagttttgtacaaccttttttagaaaaccttggtttagattttgctgtaacctataatggtcaatatatctatagtagaagtgaaattatttataccaatcaattatctaagacaactgtctatcgtctgattcgatatgctggagcaagaagaagagaaatttcattaggaacagcctcgggattactcggttcaggtattattggtctaggaactagccgtttggggcagattgtatctagccttgttccgagaaaatgggcaaaagcgattgaacgaagctttaagcattttattcgtcggattaaacctcaaaatattgatagcctcatgattatcttacgagaacctatttatcaggtcgttttagttgcaacagagggcgaatcagagcgaattcaaaaacaatttcctcgtgttaaattaacaagaagcagtccttactcaatggatgtcatttctgaagagcagtcaaaagttaagggaattgaacgtgttggtcaacgctatggttttgatttatccgaagtgatagcatttggagattctgataatgatattgagatgttatctcaagttggcattggtgttgccatggggaacgccagtcagcaagtgaaagaaaatgcacgttatacaactgctgacaataatgatgatggtatctctaaggcattagcccattatggacttattcatttgagattgaaaaacattcannnnnttaat

SEQ ID NO: 7752 - protein, 290 aa, Streptococcus agalactiae
  VARIANT 287, 288, 289: Xaa = Any Amino Acid
MAIKAVFFDIDGTLLNDRKNVQKSTIKAIRNLKDQGILVGLATGRGPSFVQPFLENLGLDFAVTYNGQYIYSRSEIIYTNQLSKTTVYRLIRYAGARRREISLGTASGLLGSGIIGLGTSRLGQIVSSLVPRKWAKAIERSFKHFIRRIKPQNIDSLMIILREPIYQVVLVATEGESERIQKQFPRVKLTRSSPYSMDVISEEQSKVKGIERVGQRYGFDLSEVIAFGDSDNDIEMLSQVGIGVAMGNASQQVKENARYTTADNNDDGISKALAHYGLIHLRLKNIXXXN

SEQ ID NO: 7753 - DNA, 891 bp, Streptococcus agalactiae
atgtccagcgccgataacccaatgaaatacgttgatttatcattagatgaccttgatttgactgttgtagattttctaaatcttcccagtcctcaaatcacccctcatcatatgcttgatatctatcactatctgaaacaacatgccagtaattttgatggtgttgtcattacgcatgggactgacactttagaagaaacagcatattttttagacacaatgatactccctaaaatcccaatcatcattactggtgctatgagaagcacaaatgaacttggtagcgatggcgtttataattacctatcagccctccgtgtcgctaatagtactaaagctgccgacaagggggtgctagttgtcatgaatgatgagatacatgctgctaaatatgtcacaaaaacacatacaacaaacgtttcgaccttccaaacccctacacatgggccccttgggattattatgaaacaagacctgcttttctttaaagcaactgaagagagagttcgttttgatttagataaaattacaggaactgttcctatcgtgaaagcatatgctggcatgggtgatagtggtatcattagctttttaaattctcaaaatattagcggattagttattgaagcactcggtgcagggaatatgcccccaaaagctgcacaagaaatcgaagaattaattgagcaaggtgtccctgttgttctagtgtctcgctgttttaatggtattgctgagccagtttacggatatgaaggtggcggagcaagattacaagaatctggtgtcatgtttgttaaagaactaaacgctcccaaagccagactcaaattactcattgcactcaatgcaggtctcacagggcaaaatctaaaagactatattgaaggt

SEQ ID NO: 7754 - protein, 297 aa, Streptococcus agalactiae
MSSADNPMKYVDLSLDDLDLTVVDFLNLPSPQITPHHMLDIYHYLKQHASNFDGVVITHGTDTLEETAYFLDTMILPKIPIIITGAMRSTNELGSDGVYNYLSALRVANSTKAADKGVLVVMNDEIHAAKYVTKTHTTNVSTFQTPTHGPLGIIMKQDLLFFKATEERVRFDLDKITGTVPIVKAYAGMGDSGIISFLNSQNISGLVIEALGAGNMPPKAAQEIEELIEQGVPVVLVSRCFNGIAEPVYGYEGGGARLQESGVMFVKELNAPKARLKLLIALNAGLTGQNLKDYIEG

SEQ ID NO: 7755 - DNA, 876 bp, Streptococcus agalactiae
atgaattcattaaatggggaaactttactaactggtctaattgccaatcctgcacgccactctctatccccgttaatgtggaatacctcttttcaagaaaaaaacatgaattatgcctatctgacatttgaagtagaagagggtaaattaacagaagctgttcgaggtgtcagggcattgggtattcgtggtgttaatgtttcaatgccatttaaacagagtgttatccctttgctagatgatttatctcctcaagctaaattagtgggtgctgtaaatactatcgttaatcaaggtggaaccggacgtttagtaggccatatgacagatggcattggttgttttaaagctttagcagctcaaggtttcagtgctaaaaataaaatagttacaatagctggtattggtggttcaggtaaagcagttgcagttcaagcagctatggagggagttgcggaaattagattatttaatcgtaatagctcaaattacgataaggtcattgacttatcagataaaattaaaaaacagtttcaaataaaggtagtcgttgattatctagaaaataagacagcatttaaagacgctattagaactagtcatttttatattgatgctactagtttaggaatgaggccattagataattatagtttaattaacgatccagaaattttaacacccaatttagtagttgtcgacttggtttacaagcctaaagaaacagcattgttacgatttgttagacaaaatggagtgaaacatgcttataatggtctagggatgctgatttatcaaggagcagaagcatttcaattaataacgaatcaagaaatgcctattagcagtgttgagagagtattacaaactgaaaat

SEQ ID NO: 7756 - protein, 292 aa, Streptococcus agalactiae
MNSLNGETLLTGLIANPARHSLSPLMWNTSFQEKNMNYAYLTFEVEEGKLTEAVRGVRALGIRGVNVSMPFKQSVIPLLDDLSPQAKLVGAVNTIVNQGGTGRLVGHMTDGIGCFKALAAQGFSAKNKIVTIAGIGGSGKAVAVQAAMEGVAEIRLFNRNSSNYDKVIDLSDKIKKQFQIKVVVDYLENKTAFKDAIRTSHFYIDATSLGMRPLDNYSLINDPEILTPNLVVVDLVYKPKETALLRFVRQNGVKHAYNGLGMLIYQGAEAFQLITNQEMPISSVERVLQTEN

SEQ ID NO: 7757 - DNA, 912 bp, Streptococcus agalactiae
atgttacaaaacattggacaaacaggcattcaagcaactcgaattgctttaggttgtatgagaatgagtgacttggaaggaaaacaagctgaagaagtagttggaacagcattagatttgggtattaatttttttgatcatgctgatatttatgggggagggctatctgaattacgctttcgagatgcaatcaaacatttaaatgtcaatcgtgacaaaatgattattcaatctaaatgtgggatacgagaaggttactttgatttttctaaagagtatattttatcatcagtagatggtattttagaaagattagggacagaatatttagattttctcattcttcatcgtccagatgtattagttgagcctgaagaagtagctgaagcatttactaaactaagggcagaaggtaaagtaaaacactttggtgttagcaatcaaaaccggtttcaaatggaattgttacaatcctaccttgacgagcccttagcagtgaatcaacttcaattatcgccagcacatacaccaatgtttgatgcagggttaaatgttaacatgttaaataaagcttcaattgaacatgatgatggcattgttgattattgtcgtctcaaaagagttaccattcaagcttggtctccatttcaaattgatttatctcgtggtttatttgttaatcatccggattataaggaattaaatgaaaccatagctaaactggcaaaaaactacaatgttagcagcgaagctattgtgattgcatggattttacgtcatcctgcccaaatacaggcgattgttggttcaatgaatccatctcgtttaaaggcaattgataaggctaatgatatcgctttaacccgtgaagaatggtatgatatttaccgtagtgcaggtaatatattgcct

SEQ ID NO: 7758 - protein, 304 aa, Streptococcus agalactiae
MLQNIGQTGIQATRIALGCMRMSDLEGKQAEEVVGTALDLGINFFDHADIYGGGLSELRFRDAIKHLNVNRDKMIIQSKCGIREGYFDFSKEYILSSVDGILERLGTEYLDFLILHRPDVLVEPEEVAEAFTKLRAEGKVKHFGVSNQNRFQMELLQSYLDEPLAVNQLQLSPAHTPMFDAGLNVNMLNKASIEHDDGIVDYCRLKRVTIQAWSPFQIDLSRGLFVNHPDYKELNETIAKLAKNYNVSSEAIVIAWILRHPAQIQAIVGSMNPSRLKAIDKANDIALTREEWYDIYRSAGNILP

SEQ ID NO: 7759 - DNA, 2013 bp, Streptococcus agalactiae
atgctattacaatcaccaatttctaatcttaagggatttggaccaaaatcagcagaaaaatttcagaaattagatatttatacagtagaagatttacttctttattatccgtttcgctatgaagattttaaatcaaaatctgtttttgatttagtggatggtgaaaaagcagtcattacaggcctagtcgttactccagctaatgtacaatattatggttttaaacgtaaccgtttaagttttaagttgcgtcaaggggaagctgtcttaaatgttagtttttttaatcaaccctatttagctgataaaatagaacttggtcaagaggtagctgtctttggtaaatgggatgcaactaaatcagctattactgggatgaaggttttagctcaagttgaagatgacatgcaacctgtttatcgcgtagctcagggaatttcacagtctactttgattaaagctattaagtcagcttttgaaatcagtgcgcatttggaattgaaggaaaatttaccagctactttattggaaaaataccgattgatgggtcgtagtcaggcttgtttagctatgcatttcccaaaagatatcacagagtataagcaagcgctccgtcggattaaatttgaagaattattttactttcaaatgaaccttcaagttttgaaatccgaaaataaatctgaaacaaatggtttgcctattctttatagtaaacatgctatggagacaaaaatttcctctttaccttttattctaacgaatgctcaaaagcgctctttagatgaaatattatctgatatgtcatcgggagctcatatgaatcgtttattgcaaggagatgtaggatcaggaaagacagtcattgctggtctatcaatgtatgcagcttatacagcaggttttcaatcggctttgatggttccaacggaaatcctagctgaacaacactacattagtctgcaagagttatttccagatttatcaatcgctatattaacttcgggtatgaaagcagctgttaagcgtacggttttagcagctattgcaaatggctcggttgatatgattgtaggaactcatgctcttatccaggactcggtacagtaccataaactggggcttgtaattacagacgagcaacatcgttttggtgttaaacagcgtagaattttccgtgaaaagggagaaaatcctgatgttttaatgatgacagccaccccaattccccgaactctagcaatcacagcttttggagaaatggatgtttctattattgatgaattacctgccggtcgtaaacctattattacacgctgggtgaaacacgagcagctaggtactgtgttggaatgggtaaaaggtgaattgcaaaaagatgctcaagtgtatgtcatttcaccgttgattgaagagtcagaagctttagatttaaagaatgcagtagcattgcatgctgaattatctacttattttgaaggaattgctaaggttgctcttgtacatggacgtatgaaaaatgatgaaaaagatgctataatgcaagawttcaaggataaaaaaagtcatattttagtatctacaacagttattgaagtaggggtaaatgtcccaaatgcaacgatcatgattattatggatgccgatcgttttggattaagccagctacatcaacttcgtgggcgtgttggtcgtggatataaacaatcatacgctgttttagtggctaatcccaaaactgattctgggaaaaaacgaatgacaatcatgacagaaacgacagatggtttcgttttagctgagtcggatttaaaaatgcgtggttctggtgaaatctttggtactcgtcagtctggaattccagaatttcaagtagctgatatcgttgaggattatcctattttagaagaagccagacgtgttgctagtgatattgtcaaagataataattggaaagaaaatacagaatgggcacttattctagataatttacgccaacattcagattttgat

SEQ ID NO: 7760 - protein, 671 aa, Streptococcus agalactiae
  VARIANT 516: Xaa = Any Amino Acid
MLLQSPISNLKGFGPKSAEKFQKLDIYTVEDLLLYYPFRYEDFKSKSVFDLVDGEKAVITGLVVTPANVQYYGFKRNRLSFKLRQGEAVLNVSFFNQPYLADKIELGQEVAVFGKWDATKSAITGMKVLAQVEDDMQPVYRVAQGISQSTLIKAIKSAFEISAHLELKENLPATLLEKYRLMGRSQACLAMHFPKDITEYKQALRRIKFEELFYFQMNLQVLKSENKSETNGLPILYSKHAMETKISSLPFILTNAQKRSLDEILSDMSSGAHMNRLLQGDVGSGKTVIAGLSMYAAYTAGFQSALMVPTEILAEQHYISLQELFPDLSIAILTSGMKAAVKRTVLAAIANGSVDMIVGTHALIQDSVQYHKLGLVITDEQHRFGVKQRRIFREKGENPDVLMMTATPIPRTLAITAFGEMDVSIIDELPAGRKPIITRWVKHEQLGTVLEWVKGELQKDAQVYVISPLIEESEALDLKNAVALHAELSTYFEGIAKVALVHGRMKNDEKDAIMQXFKDKKSHILVSTTVIEVGVNVPNATIMIIMDADRFGLSQLHQLRGRVGRGYKQSYAVLVANPKTDSGKKRMTIMTETTDGFVLAESDLKMRGSGEIFGTRQSGIPEFQVADIVEDYPILEEARRVASDIVKDNNWKENTEWALILDNLRQHSDFD

SEQ ID NO: 7761 - protein, 1536 aa, Streptococcus agalactiae
ATGTCAAAACAAAAAGTAATGGCAACTTTGTTGTTATCCACTTTAGTCTTATCGCTATCATCACCTTTAGTGACCTTAGCAGAAACTATTAATCCAGAAACAAGCCTGACAATGGCAACAGCATCAACAGAAAGTTCTTCTGAAGCAGAGAAACAGGAAAAAACACAACCTACAGATTCAGAAACTGCTTCACCTTCAGCCGAAGGAAGTATCTCAACAGAAAAAACAGAGATTGGTACGACAGAGACATCATCAAGCAATGAATCATCATCAAGTTCATCACATCAATCTTCTTCCAACGAAGATGCTAAAACATCTGATTCTGCTTCAACAGCATCTACTCCTAGCACTAATACTACAAACAGTAGTCAAGCAGACAGTAAGCCAGGTCAATCAACAAAGACTGAATTAAAACCTGAGCCTACCTTACCATTAGTAGAGCCTAAAATAACTCCCGCTCCGTCTCAGATAGAAAGTGTTCAGACAAATCAGAATGCTTCTGTTCCTGCTTTATCCTTTGATGATAATTTATTATCAACACCGATTTCACCAGTGACAGCAACGCCATTCTACGTAGAACACTGGTCTGGTCAGGATGCCTACTCTCACTATTTATTGTCACATCGTTACGGTATCAAAGCTGAACAATTAGATGGGTACTTAAAATCTTTAGGGATTCAATATGATTCTAATCGTATCAATGGTGCTAAGTTATTACAATGGGAAAAAGATAGTGGTTTAGATGTCCGTGCTATTGTAGCTATTGCTGTCCTTGAAAGTTCATTGGGAACTCAAGGAGTGGCTAAGATGCCAGGTGCTAATATGTTTGGTTATGGTGCCTTTGATCATGACTCTAGCCATGCTAGTGCTTATAATGATGAAGAAGCAATTATGTTGTTGACAAAAAATACAATTATTAAAAACAACAACTCTAGCTTTGAAATCCAAGATTTGAAAGCACAGAAATTATCTTCTGGACAACTTAATACAGTTACTGAGGGTGGTGTTTATTATACAGATAACTCTGGAACTGGTAAACGTCGTGCCCAGATTATGGAAGATTTAGACCGCTGGATTGATCAACATGGAGGGACACCAGAAATTCCTGCTGCCTTGAAAGCTTTATCGACAGCAAGTTTAGCAGATTTACCAAGTGGTTTTAGCTTATCAACAGCAGTTAACACAGCTAGCTATATTGCATCAACTTATCCATGGGGTGAATGTACATGGTATGTCTTTAACCGCGCTAAAGAGTTAGGTTATACATTTGATCCATTTATGGGTAATGGTGGAGATTGGCAACATAAGGCTGGTTTTGAAACAACACATTCACCAAAAGTAGGCTATGCTGTATCATTTTCACCAGGACAAGCTGGTGCTGATGGCACTTACGGTCACGTAGCTATTGTTGAAGAAGTTAAAAAAGATGGTTCAGTTCTTATTTCAGAATCTAATGCAATGGGACGTGGTATTGTCTCTTACCGTACTTTTAGTTCAGCACAAGCTGCACAATTAACTTATGTTATTGGCCATAAA

SEQ ID NO: 7762 - protein, 512 aa, Streptococcus agalactiae
MSKQKVMATLLLSTLVLSLSSPLVTLAETINPETSLTMATASTESSSEAEKQEKTQPTDSETASPSAEGSISTEKTEIGTTETSSSNESSSSSSHQSSSNEDAKTSDSASTASTPSTNTTNSSQADSKPGQSTKTELKPEPTLPLVEPKITPAPSQIESVQTNQNASVPALSFDDNLLSTPISPVTATPFYVEHWSGQDAYSHYLLSHRYGIKAEQLDGYLKSLGIQYDSNRINGAKLLQWEKDSGLDVRAIVAIAVLESSLGTQGVAKMPGANMFGYGAFDHDSSHASAYNDEEAIMLLTKNTIIKNNNSSFEIQDLKAQKLSSGQLNTVTEGGVYYTDNSGTGKRRAQIMEDLDRWIDQHGGTPEIPAALKALSTASLADLPSGFSLSTAVNTASYIASTYPWGECTWYVFNRAKELGYTFDPFMGNGGDWQHKAGFETTHSPKVGYAVSFSPGQAGADGTYGHVAIVEEVKKDGSVLISESNAMGRGIVSYRTFSSAQAAQLTYVIGHK

SEQ ID NO: 7763 - protein, 1097 aa, Streptococcus agalactiae
ATGATTTCAAGTTATCATAGACCAACCAGAGCCTTGATAGATTTAGAGGCGATTGCAAATAACGTTAAATCTGTACAAGAGCACATTCCAAGTGATAAAAAAACATTTGCTGTAGTTAAGGCTAATGCTTATGGGCATGGTGCTGTTGAAGTTTCAAAATACATTGAGTCTATTGTAGATGGTTTTTGCGTATCCAATTTAGATGAGGCTATTGAGCTACGTCAAGCAGGAATTGTAAAAATGATATTGGTATTAGGTGTTGTTATGCCTGAGCAGGTTATACTAGCCAAAAATGAAAATATTACTCTAACAGTTGCTAGCTTGGAGTGGTTACGTTTATGTCAGACATCAGCAGTAGATTTATCTGGTCTAGAAGTACATATCAAAGTTGATAGTGGAATGGGACGTATAGGTGTTCGCCAGTTAGATGAAGGAAATAAGCTAATTTCTGAATTGGGGGAAAGTGGTGCCTCTGTCAAGGGGATTTTCACCCATTTTGCAACAGCTGATGAAGCCGATAACTGTAAATTCAATCAACACTTACTTTTTTTAAAGACTTTATTTCAGGATTAGATAATTGTCCGGACCTTGTTCATGCTAGTAATTCTGCTACAAGCCTTTGGCATAGTGAGACAATTTTTAATGCCGTTAGATTGGGTGTTGTTATGTACGGCTTAAATCCAAGTGGAACTGATTTAGACTTACCTTACCCTATAAACCCTGCTTTAAGTTTAGAGTCTGAGCTAGTACATGTTAAACAACTACACGATGGTTCTCAAGTTGGCTATGGCGCAACCTATCAAGTTACTGGAGACGAATTTGTTGGAACAGTACCGATTGGCTACGCTGATGGATGGACACGAGATATGCAAGGATTTTCAGTTATAGTAAATGGAGAACTTTGTGAAATTATTGGGCGTGTCTCGATGGATCAAATGACTATCCGTTTACCTCAAAAATATACTATCGGAACTAAAGTAACCTTGATTGGTCAACAAGGTAGTTGTAACATTACAACTACGGACGTCGCTCAAAAAAGACAGACGATTAATTATGAAGTACTTTGTCTTTTAAGCGATCGTATTCCGAGATATTAT

SEQ ID NO: 7764 - protein, 366 aa, Streptococcus agalactiae
MISSYHRPTRALIDLEAIANNVKSVQEHIPSDKKTFAVVKANAYGHGAVEVSKYIESIVDGFCVSNLDEAIELRQAGIVKMILVLGVVMPEQVILAKNENITLTVASLEWLRLCQTSAVDLSGLEVHIKVDSGMGRIGVRQLDEGNKLISELGESGASVKGIFTHFATADEADNCKFNQQLTFFKDFISGLDNCPDLVHASNSATSLWHSETIFNAVRLGVVMYGLNPSGTDLDLPYPINPALSLESELVHVKQLHDGSQVGYGATYQVTGDEFVGTVPIGYADGWTRDMQGFSVIVNGELCEIIGRVSMDQMTIRLPQKYTIGTKVTLIGQQGSCNITTTDVAQKRQTINYEVLCLLSDRIPRYY

SEQ ID NO: 7765 - protein, 357 aa, Streptococcus agalactiae
ATGATTGTTGGACACGGAATTGATTTACAAGAGATAGAGGCGATTACTAAAGCATATGAGCGTAATCAACGTTTTGCAGAACGCGTTTTGACCGAACAAGAATTGCTTCTTTTTAAAGGAATTTCCAATCCCAAGCGTCAGATGTCTTTTTTAACAGGGCGATGGGCAGCAAAAGAGGCTTATAGCAAAGCACTTGGAACAGGAATTGGGAAAGTTAATTTTCATGATATCGAAATTTTATCGGATGATAAAGGAGCGCCTTTGATTACAAAAGAACCGTTTAATGGAAAATCTTTTGTTTCAATATCTCATAGTGGTAATTATGCACAAGCTAGTGTTATTTTGGAGGAAGAAAAA

SEQ ID NO: 7766 - protein, 119 aa, Streptococcus agalactiae
MIVGHGIDLQEIEAITKAYERNQRFAERVLTEQELLLFKGISNPKRQMSFLTGRWAAKEAYSKALGTGIGKVNFHDIEILSDDKGAPLITKEPFNGKSFVSISHSGNYAQASVILEEEK

SEQ ID NO: 7767 - protein, 1005 aa, Streptococcus agalactiae
ATGGGATTTCATCAGTTAAGTGATAAAATTAATATTGAAATATTGAAGCAGAAAACTAGCTTAGATCTAGAAGTTAGCCAAAAAAAATTAGCCAAAGAAGAAGAGTTAAAAAATATCATAAAAGGTGAGGATCAGCGGTTTCTAGTAATAGTAGGTCCTTGTTCTGCGGATAATCCAAAGGCGGTGCTAACTTATGCAAAGCGTTTAGCTAAATTGGAAGCTGCCTTTAAAGATAAAATGTTTTTGGTTATGAGAGTTTATACCGCTAAGCCAAGAACGAATGGTGATGGTTATAAAGGCTTAGTTCACCATTCTGACAAACTAGGAGTTTTTTTTCAAGCACGTAAGATGCACTATGACATCATTCGAGAGACTGGACTCCTGACAGCTGATGAATTACTTTATCCAGAGATGTTATCAGTGATGGATGATTTAGTTTCTTACTATGCTATTGGTGCGCGTTCAGTGGAAGATCAGGGACACCGTTTTATATCTTCAGGTATAGATGCACCAGTAGGTATGAAAAATCCAACGTCTGGTAATTTAAGAGTCATGCTTAATGCGGTCTATGCAGCACAAAATCAACAGGAATTATTCTATCAAAATAAGCAAGTTAGAACAGATGGTAATTTGCTGTCACATGTTATTTTGAGAGGATATCATAATGCCGACTATCGAAGTATCCCTAATTATCATTATGAAAACCTTTTAGAAACTATTACTCATTATGAAGAGACTGATTTGCAAAATCCCTTTATTGTTGTTGATACAAATCATGACAATTCAGGTAAGCAATTTTTAGAACAAATTCGCATTGTGAAATCAGTACTTGCAGACCGACAGTGGCATACTAAAATTAGAAACTATGTTCGTGGTTTTTTGATAGAATCTTATTTAGAAGATGGAAGACAAGATAAACCAGATGTTTTTGGTAAGTCTATCACAGATCCATGTCTAGGTTGGGATAAAACAGAAATGCTAATTAGGGATATTTACAATAGTTTG

SEQ ID NO: 7768 - protein, 335 aa, Streptococcus agalactiae
MGFHQLSDKINIEILKQKTSLDLEVSQKKLAKEEELKNIIKGEDQRFLVIVGPCSADNPKAVLTYAKRLAKLEAAFKDKMFLVMRVYTAKPRTNGDGYKGLVHHSDKLGVFFQARKMHYDIIRETGLLTADELLYPEMLSVMDDLVSYYAIGARSVEDQGHRFISSGIDAPVGMKNPTSGNLRVMLNAVYAAQNQQELFYQNKQVRTDGNLLSHVILRGYHNADYRSIPNYHYENLLETITHYEETDLQNPFIVVDTNHDNSGKQFLEQIRIVKSVLADRQWHTKIRNYVRGFLIESYLEDGRQDKPDVFGKSITDPCLGWDKTEMLIRDIYNSL

SEQ ID NO: 7769 - protein, 2079 aa, Streptococcus agalactiae
TTGGCTGGATATCTCTGTAGGGAAACTTAGCAGCTAAGTCACCATGAAACGCGAAAGCTTACAATTGTGATATCACATACTCAACTAACGCAGAAGTCGGATTGACTACCTTCGAGACAATATTGTCGCCAAGAAGATATGGTGCAACGCCCACTCAACTATGCTTTGGTTGATGAGGTTGACTCTGTATTAATCGATGAAGCTAGGACGCCATTGATTGTTTCAGGTCCTGTAAGCTCTGAGATGAACCAACTGTATACACGTGCGGACATGTTTGTAAAAACGCTTAATAGCGATGATTATATCATTGATGTTCCAACAAAAACAATTGGTTTATCAGATACAGGTATTGACAAGGCTGAAAACTATTTCCATCTAAATAACTTGTATGATCTCGAAAATGTTGCCTTAACTCACTACATTGATAACGCTCTTCGAGCTAACTATATTATGTTGTTAAATATTGATTATGTGGTTAGTGAAGAACAAGAGATTTTAATTGTGGACCAATTTACCGGTCGTACGATGGAAGGACGTCGTTTCTCAGATGGCTTACACCAAGCTATTGAAGCAAAAGAGTCAGTGCCAATCCAAGAAGAATCAAAAACGAGCGCTTCAATTACTTACCAAAATATGTTCCGTATGTACCATAAATTAGCAGGAATGACTGGTACTGGTAAGACTGAGGAAGAAGAGTTTCGTGAAATTTATAATATGCGCGTTATTCCTATCCCAACAAATCGTCCTGTTCAACGTATAGATCATTCAGATCTACTTTATCCAACTCTTGACTCTAAATTTAGAGCGGTGGTAGCAGATGTCAAAGAACGTTATGAACAAGGACAACCTGTACTGGTTGGTACAGTAGCTGTTGAAACGTCAGACTTAATTTCTAGAAAATTAGTTGCTGCTGGAGTACCACATGAAGTTTTGAATGCTAAAAATCACTTTAAAGAAGCTCAAATCATTATGAATGCTGGGCAACGTGGTGCTGTTACAATCGCAACCAACATGGCTGGTCGTGGTACTGATATCAAGCTTGGTGAAGGGGTTCGTGAACTTGGTGGTTTATGTGTTATTGGTACAGAGCGTCATGAAAGCCGTCGTATTGATAACCAGCTTCGTGGTCGTTCGGGTCGTCAAGGAGATCCAGGTGAATCACAATTCTATCTTTCGTTAGAAGATGATTTGATGCGTCGCTTTGGTACAGATCGTATTAAAGTGGTTCTTGAGCGAATGAATTTAGCTGAAGATGATACAGTTATTAAATCAAAAATGTTGACACGACAAGTTGAATCAGCTCAACGCCGCGTTGAAGGTAATAACTATGACACACGTAAACAAGTCTTGCAATACGATGATGTTATGCGTGAACAACGTGAGATTATTTATGCTAACCGTAGAGAAGTGATTACTGCTGAGCGTGATTTAGGACCAGAGCTCAAAGGGATGATTAAACGTACGATTAAAAGAGCAGTTGATGCACATAGCAGAAGCGATAAAAATACTGCAGCAGAAGCTATTGTTAATTTTGCAAGATCGGCGTTATTAGATGAAGAAGCTATCACAGTTTCAGAACTTCGTGGTCTAAAAGAGGCTGAAATTAAAGAACTTCTTTATGAACGTGCCTTAGCTGTTTATGAGCAACAAATTGCTAAATTAAAAGATCCAGAAGCTATTATCGAATTCCAAAAAGTCTTAATCTTGATGGTAGTGGATAATCAATGGACAGAGCATATTGATGCCTTAGATCAATTACGTAACTCCGTTGGACTTCGTGGTTATGCTCAAAATAACCCAATCGTTGAGTATCAATCAGAAGGTTTCCGTATGTTCCAAGATATGATTGGTTCGATTGAGTTTGATGTGACACGTACATTGATGAAAGCTCAAATTCATGAACAAGAGCGTGAACGTGCTTCTCAACATGCTACGACAACAGCAGAGCAAAATATCTCGGCACAACATGTACCTATGAATAATGAATCACCAGAATACCAAGGGATTAAACGTAATGATAAATGTCCTTGTGGCTCTGGCATGAAGTTTAAAAATTGTCATGGTCTGAGATGTTTACAA

SEQ ID NO: 7770 - protein, 695 aa, Streptococcus agalactiae
  VARIANT 36: Xaa = Any Amino Acid
MAGYLCRDNLAAKSPLKTRKLTIVISHTQLTQKSDXTTFETICVRQEDMVQRPLNYALVDEVDSVLIDEARTPLIVSGPVSSEMNQLYTRADMFVKTLNSDDYIIDVPTKTIGLSDTGIDKAENYFHLNNLYDLENVALTHYIDNALRANYIMLLNIDYVVSEEQEILIVDQFTGRTMEGRRFSDGLHQAIEAKESVPIQEESKTSASITYQNMFRMYHKLAGMTGTGKTEEEEFREIYNMRVIPIPTNRPVQRIDHSDLLYPTLDSKFRAVVADVKERYEQGQPVLVGTVAVETSDLISRKLVAAGVPHEVLNAKNHFKEAQIIMNAGQRGAVTIATNMAGRGTDIKLGEGVRELGGLCVIGTERHESRRIDNQLRGRSGRQGDPGESQFYLSLEDDLMRRFGTDRIKVVLERMNLAEDDTVIKSKMLTRQVESAQRRVEGNNYDTRKQVLQYDDVMREQREIIYANRREVITAERDLGPELKGMIKRTIKRAVDAHSRSDKNTAAEAIVNFARSALLDEEAITVSELRGLKEAEIKELLYERALAVYEQQIAKLKDPEAIIEFQKVLILMVVDNQWTEHIDALDQLRNSVGLRGYAQNNPIVEYQSEGFRMFQDMIGSIEFDVTRTLMKAQIHEQERERASQHATTTAEQNISAQHVPMNNESPEYQGIKRNDKCPCGSGMKFKNCHGLRCLQ

SEQ ID NO: 7771 - DNA, 102 bp, Streptococcus agalactiae
  misc_feature 93, 94, 95, 96, 97: n = A,T,C or G
atgcactacgacatcattcgagagactggcctcctgacagatgatgaattactttatccagagatgttatcagtgatggatgatttagtttcnnnnnttaat

SEQ ID NO: 7772 - protein, 34 aa, Streptococcus agalactiae
  VARIANT 32, 33: Xaa = Any Amino Acid
MHYDIIRETGLLTDDELLYPEMLSVMDDLVSXXN

SEQ ID NO: 7773 - DNA, 117 bp, Streptococcus agalactiae
  misc_feature 108, 109, 110, 111, 112: n = A,T,C or G
atggtccgtatgtaccataaattagcaggaatgactggtactggtaagactgaggaagaaagagttcgtgaatttatatatgcgcggtattcctatccccacaatcgnnnnnttaat

SEQ ID NO: 7774 - protein, 39 aa, Streptococcus agalactiae
  VARIANT 37, 38: Xaa = Any Amino Acid
MVRMYHKLAGMTGTGKTEEERVREFIYARYSYPHNRXXN

SEQ ID NO: 7775 - DNA, 1101 bp, Streptococcus agalactiae
atggcaaatattctacgcactgttattgaaaatgacaagggtgaattaaaaaaattagataaaatagctaagaaagttgactcttacgcagatcatatggctgcgttatcagatgaagctttacaagcaaaaactccagaatttaaagaacgttatcaaaatggtgaaactttagatcaattgttaccggaagcgtttgcggtagttcgtgaagcttctaaacgtgtattaggtttatacccataccacgtccaaattatgggtggtatcgttcttcaccatggtgatattccagaaatgcgtactggtgagggaaaaactttaacagcgacaatgcctgtttatctaaatgctatctcaggattaggtgttcatgttattactgttaatgagtacttatcaacacgtgatgcgaccgaaatgggtgaggtttatagttggcttggattatctgtagggattaacttagcagctaagtcaccatttgaaaaacgcgaagcttacaattgtgatatcacatactcaactaacgcagaagtcggatttgactaccttcgagacaatatggttgttcgccaagaagatatggtgcaacgcccactcaactatgctttggttgatgaggttgactctgtattaatcgatgaagctaggacgccattgattgtttcaggtcctgtaagctctgagatgaaccaactgtatacacgtgcggacatgtttgtaaaaacgcttaatagcgatgattatatcattgatgttccaacaaaaacaattggtttatcagatacaggtattgacaaggctgaaaactatttccatctaaataacttgtatgatctcgaaaatgttgccttaactcactacattgataacgctcttcgagctaactatattatgttgttaaatattgattatgtggttagtgaagaacaagagattttaattgtggaccaatttaccggtcgtacgatggaaggacgtcgtttctcagatggcttacaccaagctattgaagcaaaagagtcagtgccaatccaagaagaatcaaaaacgagcgcttcaattacttaccaaatatggtccgtatgtaccataaat

SEQ ID NO: 7776 - protein, 367 aa, Streptococcus agalactiae
MANILRTVIENDKGELKKLDKIAKKVDSYADHMAALSDEALQAKTPEFKERYQNGETLDQLLPEAFAVVREASKRVLGLYPYHVQIMGGIVLHHGDIPEMRTGEGKTLTATMPVYLNAISGLGVHVITVNEYLSTRDATEMGEVYSWLGLSVGINLAAKSPFEKREAYNCDITYSTNAEVGFDYLRDNMVVRQEDMVQRPLNYALVDEVDSVLIDEARTPLIVSGPVSSEMNQLYTRADMFVKTLNSDDYIIDVPTKTIGLSDTGIDKAENYFHLNNLYDLENVALTHYIDNALRANYIMLLNIDYVVSEEQEILIVDQFTGRTMEGRRFSDGLHQAIEAKESVPIQEESKTSASITYQIWSVCTIN

SEQ ID NO: 7777 - DNA, 945 bp, Streptococcus agalactiae
atgtcggaaccattatttttagaagcaagcatgcacgataaaatctggggtggaacaaagttaagggatgaatttggctatgatattccaagtgaaacaacaggagaatattgggctatttcagctcatcctaacggtgtctcaagagttaagaatggtcgctttaaaggttgttttttagataagctgtatcaaggtgaaaaaagcttatttggcaaccctgatgatactgtctttcctttactaactaaaatcttagatgctaatgactggcttagtgtacaggttcatccggatgatgcttatgctcttaaacatgaaggtgaacttggtaaaacagaatgttggtatattatttctgctgatgaaggatctgaaattatctatggtcataatgctaaaactaaagaagaacttcgccaaatgattgaatctggagattgggaacatcttttaacccgaattcctgttaaatcaggggatttttactacgttccaagtgggacaatgcatgctataggtaaagggatattaattttagaaacacagcaatctagtgatactacttatcgtgtttatgattttgatcgtccagatgcttcaggaaaattacgtgatttacacattgaacaatcaatagatgttctcacgattggtaaacctgccaatactgttcctgccaatatgaagttaaaacatctatcttcaactttattagtttcaaatgatttctttacagtttataaatgggaaatttctggtgttaccaactttaaacaatttgcaccctaccttttggttagtgtcttagacggagcgggtcacattacagtagataacaaagtttatacacttaaaaaaggtgaccactttatcttgccaaatgatgttgtcaaatgggatattgatggacagttagaaattatagcaagtcatgttaaaaaa

SEQ ID NO: 7778 - protein, 315 aa, Streptococcus agalactiae; identical to SEQ ID NO: 3084

SEQ ID NO: 7779 - DNA, 879 bp, Streptococcus agalactiae
atgacaaagttatatggtagtattgaagcaggtgggacaaagtttgtttgtgcagttggtgatgaggaattaaaagttgtagaaaaaatacaatttccaacaacgacgcctcaagaaacgattaaaaagactgttgatttctttaaaagatttgaaaagaagttagaggcagttgctattggttcttttggtcccattgatattgataaaaaatcaaagacatacggttatatcacaacgaccccaaagttacattgggctaatgttaatttactcggcttaatttctaaagatttcaatgttccattttatttcacaacagatgttaatagctctgcctatggtgaagttatagctcgtaacaacattgattcacttgtttattacaccattggtacaggaattggtgcaggagctatacaaaagggtgaatttataggaggaactggtcatactgaagcaggtcatacttatatggcgatgcatccgcaggaccaagcaaatgattttaaaggtatctgtccatttcataatagctgtttagaaggtttggcatctggtccaactctagaagctaggactggtattcgtggtgaattgattgaagaaaattcaatggtttgggatgttcaagcctattatattgctcaggctgcaatacaagcaactgtattatatcgtccacaagtcattgtatttggtggaggcgtcatggcacaaaaacacatgttaagacgtgttcgccagacatttgcaactttattaaatgggtatttaccagttcccaatttgtctgattatattgtgacaccagctgtagaagaaaatggttctgcaacgttaggaaattttgctttagcaaagaaaatatcaaaaggt

SEQ ID NO: 7780 - protein, 293 aa, Streptococcus agalactiae
MTKLYGSIEAGGTKFVCAVGDEELKVVEKIQFPTTTPQETIKKTVDFFKRFEKKLEAVAIGSFGPIDIDKKSKTYGYITTTPKLHWANVNLLGLISKDFNVPFYFTTDVNSSAYGEVIARNNIDSLVYYTIGTGIGAGAIQKGEFIGGTGHTEAGHTYMAMHPQDQANDFKGICPFHNSCLEGLASGPTLEARTGIRGELIEENSMVWDVQAYYIAQAAIQATVLYRPQVIVFGGGVMAQKHMLRRVRQTFATLLNGYLPVPNLSDYIVTPAVEENGSATLGNFALAKKISKG

SEQ ID NO: 7781 - protein, 1917 aa, Streptococcus agalactiae
ATGGCTTCAAATACAGAAATTGCTAAACAAGTCATTAATGCGATTGGTGGTGCTAGTAATGTGCGTAGCGTAGCACACTGTGCCACTCGTCTTCGCGTTATGGTAAAAGATGAGACAGTCATTGATAAAAATACTGTTGAAAATATCGAAAAAGTTCAGGGAGCATTTTTCAATTCAGGTCAATATCAAATTATTTTTGGAACTGGTACTGTTAATAAGATTTATGATGAAGTAGTGGCTCAAGGTTTGCCAACTTCGTCAACCTCTGATCAAAAGGCAGAAGCAGCTAAACAAGGGAATGCTTTCCAACGAGCTATTCGTACTTTCGGTGATGTTTTTGTTCCATTGTTGCCAGCCATTGTTGCTACTGGTTTATTTATGGGGATTCGCGGTGCGATTAATAATGATACAGTTTTAGCTTTATTTGGGACGACTTCAAAAGCATTTTCAAGTTCTAATTTTTATACCTATACTGTCGTTTTGACTGACACGGCCTTTGCTTTTTTTCCTGCCTTGATTTCTTGGTCAGCTTTTAGAGTTTTTGGTGGAAATCCTGTTATCGGTCTCGTATTAGGATTGATGATGGTTAACTCTGCCCTTCCAAACGCTTGGGCAGTGGCCTCAGGTGATGCCCATCCCATAAAATTTTTCGGCTTTATTCCAGTAGTTGGTTATCAAAATTCAGTATTGCCGGCATTCTTTGTAGGTTTACTTGGTGCTAAACTTGAAAAATGGTTGCATAAGAAAATCCCAGATGTTCTTGATTTACTATTAGTGCCGTTCCTAACTTTTACAGTTATGTCAATTTTAGCACTTTTTGTCATTGGTCCTATTTTCCATTCAGTTGAAAACTATGTTTTAGCAGGGACAAAATTTGTCCTTAATTTACCTCTTGGCCTATCAGGTCTTATTTTAGGTGGTGTTCATCAGATAATCGTTGTTACAGGTGTTCATCATATCTTTAATTTACTTGAAGCTCAGTTAATTGCTGCTGATGGGAAAGATCCATTTAATGCTATTATTACAGCTGCTATGACAGCACAAGCAGGTGCCACTTTGGCAGTTGGTGTTAAAACAAAAAATAAAAAATTAAAAGCCCTTGCTTTTCCGGCAGCGCTTTCAGCTGGACTTGGTATTACAGAACCGGCTATATTTGGAGTAAACTTACGTTTTGGTAAGCCATTTATTATGGGATTAATTGCAGGAGCAGCAGGTGGCTGGTTAGCTTCAATATTGAAATTAGCAGGAACTGGTTTTGGTATTACCATTATCCCAGGAACATTACTTTATTTAAATGGTCAAATTGTTAAGTACCTTATTATGGTGATTGGAACTACGGCTTTGGCTTTTGTATTAACTTATATGTTTGGATATGAAGATAAAGATGAAAAAGTAGTAGCTGAAGTTAGTCCTTTGGTTGAAGAAACAGATGACAATCCAACAATTACTCAAACTAGCCAATTAAGGGCAGAAACGATTGTTAGCCCTCTTGATGGACAGGTTATTGCTCTTGATACAGTAAGTGACCCAGTTTTTTCATCAGGTATTATGGGAGATGGCCTTGCTATTAAACCAAGCGGTAATACAATTTACTCACCTGTTGATGGTTTTGTCCAAATTGTTTTTGAAACAGGTCATGCTTACGGTATCAAATCAGATAAAGGTGCAGAAATTTTGATTCATATAGGTATTGATACTGTCACCATGAATGGCACAGGGTTTACTTCTAAAGTAAAGGCAGACCAAAAAGTGAAAAAAGGTGATATTCTTGGCACCTTTGATTCAGCCAAGATTGCAGAAGCAGGTCTGGATAATACAGCTATGATTATTGTGACTAATACAGCTGATTTTGCTGATGTTATACCATTGGTAAAAGAGGGTGTTGTTACTACAGGTGACATGATTATTGATGTTAAG

SEQ ID NO: 7782 - protein, 639 aa, Streptococcus agalactiae
MASNTEIAKQVINAIGGASNVRSVAHCATRLRVMVKDETVIDKNTVENIEKVQGAFFNSGQYQIIFGTGTVNKIYDEVVAQGLPTSSTSDQKAEAAKQGNAFQRAIRTFGDVFVPLLPAIVATGLFMGIRGAINNDTVLALFGTTSKAFSSSNFYTYTVVLTDTAFAFFPALISWSAFRVFGGNPVIGLVLGLMMVNSALPNAWAVASGDAHPIKFFGFIPVVGYQNSVLPAFFVGLLGAKLEKWLHKKIPDVLDLLLVPFLTFTVMSILALFVIGPIFHSVENYVLAGTKFVLNLPLGLSGLILGGVHQIIVVTGVHHIFNLLEAQLIAADGKDPFNAIITAAMTAQAGATLAVGVKTKNKKLKALAFPAALSAGLGITEPAIFGVNLRFGKPFIMGLIAGAAGGWLASILKLAGTGFGITIIPGTLLYLNGQIVKYLIMVIGTTALAFVLTYMFGYEDKDEKVVAEVSPLVEETDDNPTITQTSQLRAETIVSPLDGQVIALDTVSDPVFSSGIMGDGLAIKPSGNTIYSPVDGFVQIVFETGHAYGIKSDKGAEILIHIGIDTVTMNGTGFTSKVKADQKVKKGDILGTFDSAKIAEAGLDNTAMIIVTNTADFADVIPLVKEGVVTTGDMIIDVK

SEQ ID NO: 7783 - protein, 411 aa, Streptococcus agalactiae
ATGGTTGCAAAATTAACAGATGTTGCTGCACTTGCCGGTGTTAGCCCAACGACTGTATCACGCGTTATTAACAAAAAAGGCTATTTATCTCAAAAAACAGTCACCAAAGTCAATGAAGCCATGAGAACCCTTGGTTATAAACCTAATAATTTAGCACGTAGCTTACAGGGAAAGTCCGCTAAATTAATTGGACTCATTTTCCCCAACATCCGTAACATTTTTTACGCTGAATTAATTGAACACCTTGAAATTGAGTTGTTTAAGCATGGTTATAAAACTATCTTATGTAATAGTGAAAAGGATCCTATCAAAGAAAAAGAATACCTCGAAATGCTAGGAGCAAATCAAGTAGACGGTATCATTTCAAGTAGTCACAACCTAGGAATTGAGATTACGAGAAANNNNNTTAAT

SEQ ID NO: 7784 - protein, 137 aa, Streptococcus agalactiae
  VARIANT 134, 135, 136: Xaa = Any Amino Acid
MVAKLTDVAALAGVSPTTVSRVINKKGYLSQKTVTKVNEAMRTLGYKPNNLARSLQGKSAKLIGLIFPNIRNIFYAELIEHLEIELFKHGYKTILCNSEKDPIKEKEYLEMLGANQVDGIISSSHNLGIEITRXXXN

SEQ ID NO: 7785 - protein, 1017 aa, Streptococcus agalactiae
ATGACAAGTGATGGCAAGATTACAAAATTTGATAAGGTCCTTATTTCACAACCAAATGATGTCACTGAGCATTTTCGTGACCCTCAGATTTTCAATTATGATAATCAATTCTATGCTGTTATTGGGGCGCAAAATAGTAAAAAATGCGGATTCATTAAATTATATAAAGCACTTAATAATGACATCCATCATTGGGAGTTTGTGGGAGATTTAGATTTTGGTGGTACTGGATCTGAGTATATGATTGAATGTCCAAATATTATTTTTGTCAAAGGAAAACCTGTATTACTTTATAGTCCTCAAGGACTAGATAAAAACGAATTGGACTACCAAAACATTTATCCAAATACCTACAAAATCGGACAATATTTCGATGCTAACTCATCTAAGATAGTTGAACCATCCCCTATCTATAATTTAGATTATGGTTTTGAAGCCTATGCTACTCAAGGATTTAACACTTCTGATGGTCGTGCCTTTATCGTGAGTTGGATAGGCTTGCCAGATATTGATTATCCTAGCGATCAATTTGATTATCAAGGAGCTATGAGTTTAGTTAAAGAGTTAAGTATAAAAAATGGGAACCTTTATCAATATCCCGTTCCTGCTATGAAAAATCTTCGTCAACATCAAGCAGAATTTAAAACACAACTTCAAACTAACAACACCTATGAATTAGAATTACTGGTTCCTAGAAATGATCTTTCTTCATTTGTTCTCTTTGCTAATCCGAAAGGACAAGGACTATCCATTACTATTGATACTGCAAAGGGGAAAGTTATCGTTGACCGCTCACAAGCCGGACAGCAGTACGCCACAGAATTTGGTACTAGTCGCCAGTGTAACATTCCAAAAGATGCTACTAGTGTCAATGTTTTTATCGATAAGTCCATCTTTGAAATCTTTATAAATAAAGGAGAAAAAGTATTTACGGGACGAGTCTTTCCAGATGCAGAACAATCAGGGATTCAACTAAAAGAAGGACACGTTCATGGTAAATATTTTGAATTAAAATAT

SEQ ID NO: 7786 - protein, 339 aa, Streptococcus agalactiae
MTSDGKITKFDKVLISQPNDVTEHFRDPQIFNYDNQFYAVIGAQNSKKCGFIKLYKALNNDIHHWEFVGDLDFGGTGSEYMIECPNIIFVKGKPVLLYSPQGLDKNELDYQNIYPNTYKIGQYFDANSSKIVEPSPIYNLDYGFEAYATQGFNTSDGRAFIVSWIGLPDIDYPSDQFDYQGAMSLVKELSIKNGNLYQYPVPAMKNLRQHQAEFKTQLQTNNTYELELLVPRNDLSSFVLFANPKGQGLSITIDTAKGKVIVDRSQAGQQYATEFGTSRQCNIPKDATSVNVFIDKSIFEIFINKGEKVFTGRVFPDAEQSGIQLKEGHVHGKYFELKY

SEQ ID NO: 7787 - protein, 960 aa, Streptococcus agalactiae
ATGGTTGCAAAATTAACAGATGTTGCTGCACTTGCCGGTGTTAGCCCAACGACTGTATCACGCGTTATTAACAAAAAAGGCTATTTATCTCAAAAAACAGTCACCAAAGTCAATGAAGCCATGAGAACCCTTGGTTATAAACCTAATAATTTAGCACGTAGCTTACAGGGAAAGTCCGCTAAATTAATTGGACTCATTTTCCCCAACATCCGTAACATTTTTTACGCTGAATTAATTGAACACCTTGAAATTGAGTTGTTTAAGCATGGTTATAAAACTATCTTATGTAATAGTGAAAAGGATCCTATCAAAGAAAAAGAATACCTCGAAATGCTAGGAGCAAATCAAGTAGACGGTATCATTTCAAGTAGTCACAACCTAGGAATTGATGATTACGAGAAAGTTGAGGCTCCCATAGTAGCATTCGATAGAAATTTAGCTCCACACATCCCTATCGTCTCATCTGATAATTTCTTTGGAGGAAAAATGGCTGCTCAAACCCTTAAAAAACATGGCTGTCAAAAGATGATTATGATTACAGGGAATGATAATTCAGATTCTCCTACTGGACTTAGGCGGCTAGGTTTTTCCTATGAATCAAAGGAATCCAAAGTTATCACAGTCACAAATGGGCTATCTAATATGAGACGTGAGATGGAATTAAAATCAATTATCTCGACTCACAAACCAGATGGTATTTTTACATCAGACGACTTAACTGCTTTATTAGTAATCAAACTTATCAGCCAACTAGGGTTGTCCATTCCAGAAGATATCAAAGTGATTGGATATGATGGTACAAGTTTCATTCAAGATTACGTCCCACATCTAACCACTATTAAACAGCCTATTCGAGAAATTGCGCAATTGATGGTTGAAATACTCCTAGCTAAGATTGAGGGGCAAAAGACAAATAAGGATTATATTTTACCAGTCAGTCTCATCCCTGGTAGTAGCGTT

SEQ ID NO: 7788 - protein, 320 aa, Streptococcus agalactiae; identical to SEQ ID NO: 3092

SEQ ID NO: 7789 - protein, 432 aa, Streptococcus agalactiae
ATGACTAGTGTATTTAAAGATTCAAGACGTGATTTACGTGAACGTGCTTTTCAAACACTATTTAGCTTAGAAACTGGTGGAGAGTTTATTGATGCGGCTCACTTTGCTTATGGTTATGATAAAACAGTATCTGAAGACAAAGTTTTAGAGGTTCCAATCTTTTTACTTAATCTTGTTAATGGTGTTGTAGATCACAAAGATGAATTAGATACTTTGATTTCTAGTCACTTAAAATCAGGATGGAGCTTAGAACGTCTAACATTGGTTGATAAATCTCTCTTACGCTTAGGCCTCTATGAAATTAAATATTTTGATGAAACGCCTGATCGTGTAGCTCTAAATGAGATTATCGAGATTGCTAAAAAATATTCAGATGAGACGTCAGCAAAATTTGTCAATGGTTTATTAAGTCAATTTATAACAAATGAAAAT

SEQ ID NO: 7790 - protein, 144 aa, Streptococcus agalactiae; identical to SEQ ID NO: 3094

SEQ ID NO: 7791 - DNA, 387 bp, Streptococcus agalactiae
atgacaactgaaaatcttggagaaattgtcatttcaccacgtgtacttgaggtaattacaggtattgctgcaactaaagttgatggtgttcattcgttacgtaacaaagcggtaacggatagccttagtaagaaatctctaggtagaggtgtctaccttaaaaatgaagaagatgatacagtagctgcagatatttatgtttacttgcagtatggtgtaaatgtaccagcagtttcaattgctattcaacaagctgtcaaaacagctgtatatgacatggcagaagtaaaaatttcttcggtcaatatccatgttgaaggtattgttccagagaaaacaccaaaaccagacttgaagtcattgtttgatgaggatttcttagatgac

SEQ ID NO: 7792 - protein, 129 aa, Streptococcus agalactiae; identical to SEQ ID NO: 3096

SEQ ID NO: 7793 - DNA, 558 bp, Streptococcus agalactiae
atgattgaagcaagtaagcttaaagcaggcatgacttttgaaacggctgatgggaaattaatccgtgttcttgaagctagccaccacaaaccaggtaaaggtaacacaatcatgcgtatgaaattgcgtgatgttcgtactggttcaacttttgatacaagttaccgtcctgaagaaaaatttgagcaagctattattgaaactgtacctgctcaatacctttataaaatggatgatacagcttacttcatgaataatgaaacttacgatcaatatgaaattccaactgttaacattgaaaatgaattactctacattcttgaaaactcagaagtaaaaattcaattctatggaacagaagttattggtgttcaaattccaacaactgttgaattgacagttgctgaaactcaaccatcaatcaaaggtgctactgtaactggttcaggaaaacctgcaactatggaaacaggacttgttgttaacgttccagactttattgaagctggacaaaagttagtaatcaatacagcagaaggaacttacgtttcacgcgcc

SEQ ID NO: 7794 - protein, 186 aa, Streptococcus agalactiae; identical to SEQ ID NO: 3098

SEQ ID NO: 7795 - DNA, 129 bp, Streptococcus agalactiae
ttgcttaatcagtttaaaaatattgtatcgtcaaaaggcaatattatcaaaactgaagtaagaggaaagtgtcaagtgcttcagtcttatttacgccctcttggtgattttatttatttatcaagaaat

SEQ ID NO: 7796 - protein, 43 aa, Streptococcus agalactiae
MLNQFKNIVSSKGNIIKTEVRGKCQVLQSYLRPLGDFIYLSRN

SEQ ID NO: 7797 - DNA, 1704 bp, Streptococcus agalactiae
atggataaatacggaataacagaagacagctcaatagatctaattaaagcttcgatagcgtcgttctggaaaaatgtagtatacatgttccctataacgcttatattattttttctcatgaatataagcaactcgaaatatctacaagagtggttttattttgtaagcatattaattgtctttgttgtaatgtactattttacaaatagacaatatataaaatcgtattctacaacatttaagggaagtaaaaatttaagaatagaacttgtagaaataataaaaagactaccgttatcatatttttcaacacatgatttgacagatttatcgcaaacagtaatggctgatgtgtcaaaaatcgaacaagccttatctcatgctatatgtgcgtattatggatggattggttattttgtttttctaagtttgagccttttaattggatctttacaattaggactatgtattattgtacctgtaataactgcattgctgatattgtatctgtcgaaaaatattcaatatagaataaatagaaagtattataaaaaactgagagagaattctcaggcatttcaagattcttttgagatgcaacaagatataaaatcttataacatgcaacatacagtgagaaaagatgtacaagacaaattgaaagacagtgaaaaaatacagataaaaacagagctgtttacaacgataccatcaagcttattatcaattttgccacagttctcgatagctctggttattattttcgggtttcaactgtatttgactggtcaaatacagttaatcttctatataggatatataatttgtgccacaaaggtagccagtggttttacgggcatgttagacagtcttttaatgataataaactttcaaagcagttttaaacaagttacggcaataagaaagactcctttacaagaaggggtaaatgcagatattcagacattcaatgttgaatttagggatgttagctttgcttatgagaaaggaagaaatgttgtaagtaatttatctttcaatgcaaatcaaggagaagttactgcgatagtagggccctccggttgtggaaagtcaactattttaaaactactatcaagattatacgactataatgccggacaaatattgataggcgggaaagatatttctgaaatatcaacaaatagtttatttgaaaatatttcaacagtcttccaagatgttgagttatttgatgatactatttttgaaaacattaaatgtggaaatcccaaagctactatcgaagaagtgttagaagctgcgaaaattgcaaatgtagatgagattgctgataaattcgtagataaatatgacacaaaaataggtgaaaacgggagtaaattatcaggaggcgaaagacaaagaatttctattgcaagagccattcttaaagatgcaccaataatactgcttgatgaaatctctgccagtttagatatagaaaatgaaataaagatacaagccggtttagataagcttataaaaaataaaacagttattatcgtttctcatagaatgaagtctatagaaaacgcaaataagattatagttattgaaaacggaaaggtagagaattttggaactcatagctatttattggaaaattcgacgagatacagaaaattagttgaatgctctcaattggcaagtgaatatgaatat

SEQ ID NO: 7798 - protein, 568 aa, Streptococcus agalactiae
MDKYGITEDSSIDLIKASIASFWKNVVYMFPITLILFFLMNISNSKYLQEWFYFVSILIVFVVMYYFTNRQYIKSYSTTFKGSKNLRIELVEIIKRLPLSYFSTHDLTDLSQTVMADVSKIEQALSHAICAYYGWIGYFVFLSLSLLIGSLQLGLCIIVPVITALLILYLSKNIQYRINRKYYKKLRENSQAFQDSFEMQQDIKSYNMQHTVRKDVQDKLKDSEKIQIKTELFTTIPSSLLSILPQFSIALVIIFGFQLYLTGQIQLIFYIGYIICATKVASGFTGMLDSLLMIINFQSSFKQVTAIRKTPLQEGVNADIQTFNVEFRDVSFAYEKGRNVVSNLSFNANQGEVTAIVGPSGCGKSTILKLLSRLYDYNAGQILIGGKDISEISTNSLFENISTVFQDVELFDDTIFENIKCGNPKATIEEVLEAAKIANVDEIADKFVDKYDTKIGENGSKLSGGERQRISIARAILKDAPIILLDEISASLDIENEIKIQAGLDKLIKNKTVIIVSHRMKSIENANKIIVIENGKVENFGTHSYLLENSTRYRKLVECSQLASEYEY

SEQ ID NO: 7799 - DNA, 900 bp, Streptococcus agalactiae
ttgttatacaacgcttttaataaagtgatgtttttgggacaaaataaggctaaagccaaaaactctatagataagctggaagaaatttttaacaaaatgcaggtaaaaaaattagatagtgggctttcagatgaaatacaaaattttgatattgaatttgaaaaagtatcgtttaaatacgaaggaaatacaccatatgttttaaaagacttatcgtttaagttggattcgggaaaaagttatgcacttattggttcatctggcagtggaaaatccacaattgctaagttaatttccgggttttatgatgttgattccggagtaataaaaattggtggacgagatattaaagagtattcaagggaaacgatagcaagtagtatcgcttttgttttccagaatgcgaaattatttaaaatgagtatttatgacaacgtgagaattggaaatcctgatgctacttatgaagagattatgcaagctcttgaaaaggctaggtgcaatgaaattttggataagtttgagctgagggaaaatacaatgatcggagcagaaggcgtttatctctcaggaggagaaactcaaagaatagtaattgcaagagcaattctaaaaaattcacccattataatacttgatgaggcaagtgcagctgctgatccggaaaatgaatatgaactccagatggcatttacgcaattgataaaaaataaaacagtaataatgattgctcacaggctgtcagcaattaaaaacatggacgaaatcatagttgtagaaaatggacagattatagaaagaggaagtagcaaacttttattagaggataaaagctctaaatacagctattttatgaatatgtatattcgagcaaatgattggataatgtctaatgaagtc

SEQ ID NO: 7800 - protein, 300 aa, Streptococcus agalactiae
MLYNAFNKVMFLGQNKAKAKNSIDKLEEIFNKMQVKKLDSGLSDEIQNFDIEFEKVSFKYEGNTPYVLKDLSFKLDSGKSYALIGSSGSGKSTIAKLISGFYDVDSGVIKIGGRDIKEYSRETIASSIAFVFQNAKLFKMSIYDNVRIGNPDATYEEIMQALEKARCNEILDKFELRENTMIGAEGVYLSGGETQRIVIARAILKNSPIIILDEASAAADPENEYELQMAFTQLIKNKTVIMIAHRLSAIKNMDEIIVVENGQIIERGSSKLLLEDKSSKYSYFMNMYIRANDWIMSNEV

SEQ ID NO: 7801 - protein, 879 aa, Streptococcus agalactiae
GTGGACGTTTTAAGAAGATTATATAAGTTCGCACCTGAAAAAAAGGTGTACTCCTATGCGTCGCTAGTTTTATCTGCAATAGCTACTATATTCTCAGTAGTCCCATATTTTTATTTATGGAAGTTTTTGAATGAACTTTTAGTACTTAAAAACCTTGAAAGTGCAAATAAATATGCGTTATGGATTTTTATGTTTTTGGTTTTACAAACATTAGTGTATTTTTTGAGTTTATATTGTAGCCACATGTTTGCTTTTAGAGTCGAAAGAAATTTAAAAATAGAAGGCTTAAACAACCTTTTAGAGGCATCTTTTTCTTTTTTTGATACAAATCCATCAGGAAAAACTAGGCAAATAATAGACGATAATGCGTCGGAAACACATTCCATACTTGCTCACATGCAACCGGACATGGTCAATGCTATGGTTTATCCTGTAATTTTGCTGGTTGTAAGTTTTTTGGTAAGTATAAGTTTTGGGATAGTAATGGTTGTATCATTAGTTTTAGGCGTATTTTTAATCACGAAAATGTTTGGGAATCAAAATTTTCTCCAAAAATATATGGCTTCCAATGAAGATATGAGTTCCGAAATAGTTGAATATATAAGAGGTGTCAAGGTTATCAAAATATTCAATATAGGAATAGAAAAATTTCGTTCTTTGCATAAAACAATCATCACCTCTTCAGAACTAGGTTATGCGTACGCTATCTCGTGTAGAAAATGGAAGGTTTTTTACGATTCATTTTTCATGGGGCTATGCATGGTTACGATACCTTATGGTGTATATTTGCTAAACATTAATACGCATCTAGGAGAAATTATTTCCTACACCGTATTTTCACAGCATTTATTGAATTGTTATACAACGCTTTTAATAAAG

SEQ ID NO: 7802 - protein, 293 aa, Streptococcus agalactiae
MDVLRRLYKFAPEKKVYSYASLVLSAIATIFSVVPYFYLWKFLNELLVLKNLESANKYALWIFMFLVLQTLVYFLSLYCSHMFAFRVERNLKIEGLNNLLEASFSFFDTNPSGKTRQIIDDNASETHSILAHMQPDMVNAMVYPVILLVVSFLVSISFGIVMVVSLVLGVFLITKMFGNQNFLQKYMASNEDMSSEIVEYIRGVKVIKIFNIGIEKFRSLHKTIITSSELGYAYAISCRKWKVFYDSFFMGLCMVTIPYGVYLLNINTHLGEIISYTVFSQHLLNCYTTLLIK

SEQ ID NO: 7803 - protein, 1377 aa, Streptococcus agalactiae
GTGATTGAATTAAAAGGGGTTAATTTCAAATATAAAAACACCAAAAACAGCTGCTTAGACAATATAGATTTGGAAATAAAAAAGGGAGAATTCGTCTTAATTTCCGGTGCTTCAGGTTCTGGAAAAACATCTATAACGAGAGTTATAAATAAGCTGATTCCTTATTATTACGAAGGTGAATTAGAAGGCACAGTAAAAATAAACAACGATTTAGTATCTAGCTACCAAATGTTTGAGCTTTCAGAAATAGTAGGTAGTGTTTTTCAGAATCCTAGAACACAATTTTTCAATGTGGACACAAATAGTGAAATAGTTTTTGGTTTAGAAAATCAAGGGGTTTCTAGAGACATTTTAAAAAAAAGATTAAAAGAGACTTGTGAGACGTTGGATATAAACAAATTGCAGAATAGGAATATCTTTCATCTGTCAGGAGGGGAAAAGCAGAAGATTGCTTTTGCGTCGGTGTATGCAATGAATCCCGATATTTATTTACTGGATGAACCCTCATCTAATTTGGATATACCAACGATAGAGGTGCTAAAAAGACATTTGTCTGTTTTAAAAAACAGTGGCAAAACGGTTATTATATCTGAACATCGAATCTACTATTTGATGGATTTGGTTGACAAAGTTATATATATGAAAAATGGACAAATTCAAAAAAGTTATTCAAAAGAAGATTTTTTGAATTTGTCTGAAGATGAAATTAAAGCTATGGCTTTAAGATGCAGAAAAAAAACAAAACTGAATATAGAAATGTCTAATAATGAAAAACATCCATATTTACAAGTGAATGATTTTTCTATATACAGGAAAGATAATTGCATTATAAATAACATGAACTTTTCTGCGAACAAAGGCGATATTGTTGCGGTTATAGGTTCGAATGGTGTTGGTAAAACAACATTTTTAAGAACTCTTTGTGGTCTGCATGACAACTATAAAGGTGATGTGTTGTTGAATTCTAAAAAAACAGATGCAAAAAAAAGAAGACAAAAAAACTATATGGTTATGCAAGATGTGAATTATCAATTATTTGCCGAGAGTGTCTTTGCTGAATGTAAATTAGGAATAGAAAATGTGAGCGATGATCTTATAGAAGAAATACTAAATGAATTTGATTTGAGCGACTATAAAAATAATCATCCAAACACCTTATCCGGAGGACAAAAACAAAGATTGGCAATAGCCGTAGGACTAATATGCAAAAAAGAAATTTTTGTGTTAGATGAACCAACTAGTGGACTTGACTATACGAATATGGTAAAGACTGTAGAATTGTTAAAACGTTATTCCAAAGACAAAATTATTTTTATTGCTACGCATGATACCGAATTTGCTAATTTGATTTGTAATCGGGTATTGGACTTAGAAAAA

SEQ ID NO: 7804 - protein, 459 aa, Streptococcus agalactiae
MIELKGVNFKYKNTKNSCLDNIDLEIKKGEFVLISGASGSGKTSITRVINKLIPYYYEGELEGTVKINNDLVSSYQMFELSEIVGSVFQNPRTQFFNVDTNSEIVFGLENQGVSRDILKKRLKETCETLDINKLQNRNIFHLSGGEKQKIAFASVYAMNPDIYLLDEPSSNLDIPTIEVLKRHLSVLKNSGKTVIISEHRIYYLMDLVDKVIYMKNGQIQKSYSKEDFLNLSEDEIKAMALRCRKKTKLNIEMSNNEKHPYLQVNDFSIYRKDNCIINNMNFSANKGDIVAVIGSNGVGKTTFLRTLCGLHDNYKGDVLLNSKKTDAKKRRQKNYMVMQDVNYQLFAESVFAECKLGIENVSDDLIEEILNEFDLSDYKNNHPNTLSGGQKQRLAIAVGLICKKEIFVLDEPTSGLDYTNMVKTVELLKRYSKDKIIFIATHDTEFANLICNRVLDLEK

SEQ ID NO: 7805 - protein, 711 aa, Streptococcus agalactiae
ATGAGAAAAGTATCAAATGTTCAATTTAACCCTTGCACAAAAATAGTTTTACTATTTTTGTGCATAATCATTTCAAGTTTATTATCTTCAATAGAATTGGAGCTAATTTTTGTATTTATAATTGCGTTATTTTGCATTATAAACAAAAAGATTAAATTTGCTCTTAATGGGTTTCTGATTTACCTAGGTGTATATTTTGTTAGCATTTTGACTGTGCAGTACGGTAGCAATACCTTAAGAAGCTTATTAATGCCTTTTCTAGGTTTAGTACATAAGCTTTACCCGGTGTGCATGTTTTCTGTGCTAATACTAAGTACTACAAAAGTAGGTGAATTTTTATCTGCTATGGAATTTGCAGGTGTTTCTAAAAAAATCACAATTCCTTTAGCTGTAATGCTTAGATATATTCCAACCGTGCGTGAAGACTGGATATATATAAAGGATTCAATGTATTTAAGAAGTATCTCGCCTTCTTTTTTCGGTTTTATAAAAAATCCGGATCTAACAATAGAGTGTATTTATTCACCTATAATTATTATGGCTTCTAAAGCAGCAGACGAATTAACTATCGCTTCTATTACAAGAGGAATTGAATCTCCTAAAAAACGAAGTTCAATTATTGAAATTCGTTTTGATATTCAAGACGTTTTAGCTTTACTGATTGGAGTGGTAATTACTGTATTTGTGATATATAGGAGGTTTTTCTGTGAT

SEQ ID NO: 7806 - protein, 237 aa, Streptococcus agalactiae
MRKVSNVQFNPCTKIVLLFLCIIISSLLSSIELELIFVFIIALFCIINKKIKFALNGFLIYLGVYFVSILTVQYGSNTLRSLLMPFLGLVHKLYPVCMFSVLILSTTKVGEFLSAMEFAGVSKKITIPLAVMLRYIPTVREDWIYIKDSMYLRSISPSFFGFIKNPDLTIECIYSPIIIMASKAADELTIASITRGIESPKKRSSIIEIRFDIQDVLALLIGVVITVFVIYRRFFCD

SEQ ID NO: 7807 - protein, 594 aa, Streptococcus agalactiae
ATGAATAACAAAGAAAACAAATTACAGGTGAAAGATTTAATAATGATTGGTGTATTTTCCGCATTATACTTCTTGTTTAATATGGTAGGAGGAATACCTTTTGCTATGAATCCGGTGCTAACATTTTATCAACCGATGGGAAGTGCATTTTTATCAGGAATAATATTTATGTTTTTGATCGCAAAAGCACCTAAAAAAGGAACAATTTCTATTTTAGCAATCATCATGTGTATTTTAAGGCTGGCAACAGGAATGCATTGGGCTATGGCGGTAGGAACTTTAATAACAGGAATAGTAGCTGAGCTTATTGCAGGAAGTAAGAGTTATAAAAACAAGAAAATGAACATGTTGTCTTTTGGAGTTTTTGCACTTGGAGATATCGGAACATTTTTAGTGTATTTTATGAATCCTAAGTCTTGGTCAGATGCGATGATAAAAAAAGGGACAGATATCACCTACATTGAGTCTATGAATGCTGCAGCTGCTGATTGGATGATTTATGTAATTGTTATTGGAACTTTCTTGGTTGCTTTATTAAGTGCTTGGATTGGAATGAAGCTTTTGAAAAAACAATTTGAAAAGGCCGGCATTGTA

SEQ ID NO: 7808 - protein, 198 aa, Streptococcus agalactiae
MNNKENKLQVKDLIMIGVFSALYFLFNMVGGIPFAMNPVLTFYQPMGSAFLSGIIFMFLIAKAPKKGTISILAIIMCILRLATGMHWAMAVGTLITGIVAELIAGSKSYKNKKMNMLSFGVFALGDIGTFLVYFMNPKSWSDAMIKKGTDITYIESMNAAAADWMIYVIVIGTFLVALLSAWIGMKLLKKQFEKAGIV

SEQ ID NO: 7809 - protein, 153 aa, Streptococcus agalactiae
ATGGAACTTAACGGTGTAAAAGAAAATGCCAAAATATTAGTAAAAGATTGGCTTAAAGATATATTTGCTGAAGAAGTAATTTCTGAAGATGAAAATTTAATAGAAAAAGGATTAAGCTCTATTAAAATTATGCAAACAATATTCCGATATGCA

SEQ ID NO: 7810 - protein, 51 aa, Streptococcus agalactiae
MELNGVKENAKILVKDWLKDIFAEEVISEDENLIEKGLSSIKIMQTIFRYA

SEQ ID NO: 7811 - protein, 441 aa, Streptococcus agalactiae
TTGACAACGAGCATAGATGATGACGAAAAAACCGTATGGCAAACACAGGGTAAGCCAATTAGCGAACATGATGAAATACTCATTGTGGATAAAGCGAGAAAATTAAAAGATGGCAATTATCAAATTGCCGGAAGAATTAAAGAGATAATCAACAGAGCGGGCGAAAAGATTACACCACTCGAATTGGAAGAAATCTTATTAACACATGATTGCATAAATTCCGTTCAAGTTTTAGGAGTGCCTGATAAATTACATGGCGAAGCAATTGCCGTATTCATTTTAAAAAGCGAAAGCAAGAGGCTTACACTTGAAGAAGTAAGGAAATTTTTAATATCAAATAACGTAGCAGACTTCAAACTACCTGATGCGGTTAAGTATATAGATAGTTGGCCGTTAACAGCGTTAGGCAAAATAGATAGAAACAAATTAAAAGAAAATTTT

SEQ ID NO: 7812 - protein, 147 aa, Streptococcus agalactiae
MTTSIDDDEKTVWQTQGKPISEHDEILIVDKARKLKDGNYQIAGRIKEIINRAGEKITPLELEEILLTHDCINSVQVLGVPDKLHGEAIAVFILKSESKRLTLEEVRKFLISNNVADFKLPDAVKYIDSWPLTALGKIDRNKLKENF

SEQ ID NO: 7813 - protein, 813 aa, Streptococcus agalactiae
ATGATAAAAAATGGTGATAGCATAGCTGTTGTAAACGGAGACATAGAGTTGTCTTACAAGGATATTGATAGGCAGTCAAACTCTTTTGCCAATGGACTTTTAAAAGCTGGCTTCAAATGTGGAGATAAAATAGTTTTACAATTACCGAATTATCACGAGTTTATAATAATTGCTTTCGCCATGTTTAAAGTAGGCATTATCCCGATTATGAGTTTGCCTGCTCATAGAAAAAACGAACTAAAAGGGATAATAGAAAAATCGGAAGCTGTGGCATACATAGCAAAAGATAAGTACCTAGGCTTTTCTTATGTTGATATGATACGAGATATAAAGATAGAGTCAGACAGAGAATTTAAAGTTTATATACTTGGTGAAGGAGATGAATTTAAAAAATTTTCTGAATTGAATGATAATAATTATATCTATCAAAAAACCGAGGTTGATTATAAAAACATAGGACTACTTCTTTTATCCGGAGGAACAACCAGAATACCAAAGCTGATTCCGAGAAGGCACTGTGATTATCTGTATGTAGCAAAGAAAACATCTATTATAAGCGGTATGGATAGAGGCAGTATATACTTAGCAGCCTTGCCGATGGCACATAATTTTCCTTTGTGTTGCCCCGGCATTCTCGGAACTTTTGCTGTAGGTGGGAAAGTTGTTGTATGTGAGGTAACCAGTCCTGATGAAATACTACCTCTGATAGAGGAAGAAAAGGTTACAATAACGGGTTTTGTGCCAGCCATCGCAAATATTTGCATGGATTATTTACAGTATGAAGATTATGATCTTTCATCATTAAAGATATTG

SEQ ID NO: 7814 - protein, 271 aa, Streptococcus agalactiae
MIKNGDSIAVVNGDIELSYKDIDRQSNSFANGLLKAGFKCGDKIVLQLPNYHEFIIIAFAMFKVGIIPIMSLPAHRKNELKGIIEKSEAVAYIAKDKYLGFSYVDMIRDIKIESDREFKVYILGEGDEFKKFSELNDNNYIYQKTEVDYKNIGLLLLSGGTTRIPKLIPRRHCDYLYVAKKTSIISGMDRGSIYLAALPMAHNFPLCCPGILGTFAVGGKVVVCEVTSPDEILPLIEEEKVTITGFVPAIANICMDYLQYEDYDLSSLKIL

SEQ ID NO: 7815 - protein, 372 aa, Streptococcus agalactiae
ATGCATAGATCTTTTTTAGAAGAAAATTACTTGGAAGCGATTTATATCTTACAACAAAGAAATGAAAGTGTTAGAAGTATTGATGTAGCCGAATACTTGTCTGTTGCTAAATCTTCGGTGAACTCAGCAGTAAATAAATTACTCACTCAGCAATATATAACCTTTGAAGATGATAAGATTATAAGGATGACCGCTGAGGGAGAAAAAATAGCGGAATTTGTTTATGAAAAACATCTATATTTAAAAAAATTACTATGTAAGATGGGAATTGACGAAACAGAAGCAGATGAAATAGCTTGTCTTCTAGAACACATTTTAAAAGAAGACAGCTTTAAAAAAATAAAAAAATTTGTCCAAGACAAAAAAATTATT

SEQ ID NO: 7816 - protein, 124 aa, Streptococcus agalactiae
MHRSFLEENYLEAIYILQQRNESVRSIDVAEYLSVAKSSVNSAVNKLLTQQYITFEDDKIIRMTAEGEKIAEFVYEKHLYLKKLLCKMGIDETEADEIACLLEHILKEDSFKKIKKFVQDKKII

SEQ ID NO: 7817 - protein, 450 aa, Streptococcus agalactiae
ATGAATAGACTTTCTTGGGAAGATTATTTTATGGCAAATGCAGAGTTGATTTCTAAACGTTCTACCTGTGACCGTGCTTTTGTTGGAGCTGTTTTAGTCAAAAATAATCGCATCATTGCTACAGGTTATAACGGAGGAGTCTCTGAGACAGATAACTGTAACGAAGTGGGACATTATATGGAAGATGGTCACTGTATTAGGACTGTTCATGCTGAGATGAATGCCCTTATTCAGTGTGCTAAAGAAGGTATTTCTACTAATAATACAGAAATTTATGTGACGCATTTTCCTTGTATCAATTGCACCAAGGCGCTCTTGCAAGCCGGGGTTAAGAAAATTACTTATAAAGCTAATTATCGCCCACACCCATTTGCTATTGAACTTATGGAAGCAAAAGGAGTTGCTTATGTTCAACATGATGTTCCAGAGGTAACACTAGGGATGGAAGAG

SEQ ID NO: 7818 - protein, 150 aa, Streptococcus agalactiae
MNRLSWEDYFMANAELISKRSTCDRAFVGAVLVKNNRIIATGYNGGVSETDNCNEVGHYMEDGHCIRTVHAEMNALIQCAKEGISTNNTEIYVTHFPCINCTKALLQAGVKKITYKANYRPHPFAIELMEAKGVAYVQHDVPEVTLGMEE

SEQ ID NO: 7819 - protein, 1065 aa, Streptococcus agalactiae
ATGGGTTTTGAACAACGTCTAACTAGATGTCAAACAGCAATTTCACAATTATCATGTGACGCACTCTTAATAACGAATTTAACAAATATTTTTTATTTGACTGGTTTTTCAGGAACTAATGCAACGGTACTCATTAGTCCAAAACACCGGATTTTTGTTACAGATTCACGATATGCCTTGATAGCAAAGAATACTGTAAGAGAGTTTGATATTATCATTAGCAGAGAACCACTTGCGGCTATTTTGAAAATTATTCGAGATGACGCCTTGATGGCGATTGGTTTTGAAACTGATATCTCTTATCATATGTACAAACATATGGTGGAAGTTTTTGAAGATTATCGCTTGATAGAAGCTCCATCTGTTGTTGAAAAGTTACGTATGATTAAAGATGCAACAGAACTTGCGATCATCCGTCAAGCCTGTCGTATTTCGGACCAAGCTTTTTTAGATGTGTTGGATTTTATAAAGCCTGATCGAACAACTGAATTGCAAGTTGCTAATTTTTTAGACTTTCGCATGAGAGAATTAGGAGCAACTGGTCCTTCATTTGATTTTATTGTAGCATCTGGATATCGATCAGCGATGCCACATGGGGTTGCGAGTCAGAAGACTATTCAATCGGGAGAAGCTCTGACTTTAGATTTTGGTTGTTACTATCAGCACTATGTTAGTGATATGACACGTACGATTCATATCGGTCATGTCACTGATCAGGAACGCGAGATTTACGATATCGTTTTGAAAAGTAATCAAGCTATTATTGATAATGTAAAATCAGGAATGAAGCGTTGTGATTATGATTACTTGGCGCGACAAGTCATTGAAAATTCTGGATACGGTAATCATTTTACCCACGGTATAGGGCATGGTATGGGGCTTGATGTTCATGAAATTCCTTATTTTGGTAAGTCAGAGGGAGTGATTGCATCTGGGATGGTAGTGACTGACGAGCCAGGAATATATCTCGATAATAAATACGGTGTTCGTATTGAAGATGATTTATTAATAACGGAAACAGGTTGCGAAGTATTGACATCTGCACCTAAAGAATTAATTGTACTT

SEQ ID NO: 7820 - protein, 355 aa, Streptococcus agalactiae
MGFEQRLTRCQTAISQLSCDALLITNLTNIFYLTGFSGTNATVLISPKHRIFVTDSRYALIAKNTVREFDIIISREPLAAILKIIRDDALMAIGFETDISYHMYKHMVEVFEDYRLIEAPSVVEKLRMIKDATELAIIRQACRISDQAFLDVLDFIKPDRTTELQVANFLDFRMRELGATGPSFDFIVASGYRSAMPHGVASQKTIQSGEALTLDFGCYYQHYVSDMTRTIHIGHVTDQEREIYDIVLKSNQAIIDNVKSGMKRCDYDYLARQVIENSGYGNHFTHGIGHGMGLDVHEIPYFGKSEGVIASGMVVTDEPGIYLDNKYGVRIEDDLLITETGCEVLTSAPKELIVL

SEQ ID NO: 7821 - protein, 714 aa, Streptococcus agalactiae
ATGATTATTTTGATTATTGCACTGGCAACTATTTTGACATTTGTCACATGGATGTTGATTCGTCCAAAAGCTCTACGGTATATTCTAGGTCTTCTCTCATTAGCTTTGTTATTTGCCTCAGTTTGGATGTTAACGGATCACTTTGTTAATCATACAGGTATGACTATTGAAACTAAGACAAAGACACGTGAGATTTATAGTGCGGGTGATAGTAACGCTCCATTTGGTCTCATGATTTATAAAGAGATTGGTACTCATTCGAGTAATAATGTTTTAGTTTATCGAACAGATTTAAATCAAAAAGAAGCAAAAGCTCACTTTGTTCCAAATACAAAAGAAGTGACAAGTGCTGTGAAAAAATCTGCTAGCTACCAATTAGCTGATGTGAAAAAAGCCACAGTAACAACAAAGACTAAACGTTATGTGTGGAAAGATAGTCTTTCGAAACTACTTTATGGCTTTGCAGGTGAAAATGGAGAATTGATTTCTCAGAAATCAGTTGCTAAAATACCACGAAAAACTTGGCTAGTTTTGACTAAAGAGCAGTCCGAACACTTAGAATCAGCTGCGGCTAAACTAAAAGAACAGATGACTTTGCAAGCAAAAGTAAACCCAGTGAAAGCTATGGAGATAAAGACATTAGCTAAGACAAATCCAGAAGCTTATGCTGAGATGCAAGTTAAAGCATTAAAAGAAGCTCTTAATATAAAAGAA

SEQ ID NO: 7822 - protein, 238 aa, Streptococcus agalactiae
MIILIIALATILTFVTWMLIRPKALRYILGLLSLALLFASVWMLTDHFVNHTGMTIETKTKTREIYSAGDSNAPFGLMIYKEIGTHSSNNVLVYRTDLNQKEAKAHFVPNTKEVTSAVKKSASYQLADVKKATVTTKTKRYVWKDSLSKLLYGFAGENGELISQKSVAKIPRKTWLVLTKEQSEHLESAAAKLKEQMTLQAKVNPVKAMEIKTLAKTNPEAYAEMQVKALKEALNIKE

SEQ ID NO: 7823 - protein, 1495 aa, Streptococcus agalactiae
ATGACTACAAAAGCAAAACATGATATTCATGGCAAACCATATAATCGTACAGCCATGATCACCTTATTGTTGATTGCTACATTTGCAGGGGTGTTAAATCAGACAAGTTTGGGAACGGCTATCCCAACTTTGATGAATAGCTTTAACATTTCGTTGTCAACGGCTCAACAAGCAACAACATGGTTTTTATTAGCGAATGGGATTATGATTCCTGTTTCAGCTTATTTAGCGACACGTTTTTCAACAAAATGGTTGTATGTGACATCCTACGTTGTTTTACTTATTGGACTGTTAATGACGACGTTAGCACCTACATCTAACTGGAACCTTTTTTTAGTAGGACGTATTATTCAAGCGATTTCTGTAGGGATTTCTATGCCTTTGATGCAGGTTGTTATGGTGAATGTTTTTCCTCCAGAGCAGCGTGGTGCCGCTATGGGACTTAATGGTTTGGTGGTTGGTCTTGCCCCAGCTATTGGGCCTACATTAGCAGGGTGGATTTTAAAACAAGAATTTCATTTTGCAGGGCATGATTTGACATGGCGTGCAATTTTCCTTCTTCCTTTACTAATTTTAACGGTCACTACAATTTTATCCCCCTTTGTTCTAAAAGATGTGGTTGATAATAAGTCAGTTAAATTGGAAGTGCCTTCCCTTATTCTTTCAATAATTGGTTTTGGTAGTTTTTTGTGGGGCTTCACAAATGTGGCAACTTATGGATGGGGAGATATTGATATGTTATTTCTCCTATTATGGTGGTATTATTTTTATCGCCTTATTCATTCATCGTCAATTAAAACTAGAAACACCGTTCTTAGATATCCGTGTTTTCAAAAATAAACAATTCTCAGTAACAACAGCAGCTATTGCACTTTCAATGATGGCGATGATGGGTGTTGAAATGATGCTACCGCTTTACTTGCAAAATGTTCATGGTCTCTCTGCACTTGATTCTGGTTTAGCTTTATTACCAGGTGCCTTGATGATGGGGATAGTTAGTCCAATTTCTGGAGCTGTATATGATAAAGTTGGTGCAAGACGTATGGCTATGATTGGTTTTACCATACTAGGTGTAGCGACGTTACCTTTTGTTTTCTTAACGACTACAACACCAGATCATTTTATTACCCTCTTATATGCAGTACGTATGTTTGGTATTGCTATGGTTATGATGCCATTGACAGCAAGTGCGATGAGCGCACTTCCACCACATGAGGCAGCACATGGAACAGCAGCTAATAATACTGCTCGTCAAATTGCTTCAGCAGTTGTAGTTGCATTGCTTTCAAGTGTTGCTCAAAATATTATCACCAACAATAAACCATCAAAAGATTTGCTAACAATGAATCCTTTAAAATATGCAAATCAGATGTTGAATGCTAGTCTTGATGGCTTCCATGTTTCTTTTGCCATTGGTTTTGTATTTGCGGTTCTTGGTTTACTGGTATCTCTTTTCCTGAGAAAAGGGAAAATTATTGAGACGGAAAAGGAGGTA

SEQ ID NO: 7824 - protein, 499 aa, Streptococcus agalactiae
  VARIANT 253: Xaa = Any Amino Acid
MTTKAKHDIHGKPYNRTAMITLLLIATFAGVLNQTSLGTAIPTLMNSFNISLSTAQQATTWFLLANGIMIPVSAYLATRFSTKWLYVTSYVVLLIGLLMTTLAPTSNWNLFLVGRIIQAISVGISMPLMQVVMVNVFPPEQRGAAMGLNGLVVGLAPAIGPTLAGWILKQEFHFAGHDLTWRAIFLLPLLILTVTTILSPFVLKDVVDNKSVKLEVPSLILSIIGFGSFLWGFTNVATYGWGDIGYVISPIMXGIIFIALFIHRQLKLETPFLDIRVFKNKQFSVTTAAIALSMMAMMGVEMMLPLYLQNVHGLSALDSGLALLPGALMMGIVSPISGAVYDKVGARRMAMIGFTILGVATLPFVFLTTTTPDHFITLLYAVRMFGIAMVMMPLTASAMSALPPHEAAHGTAANNTARQIASAVVVALLSSVAQNIITNNKPSKDLLTMNPLKYANQMLNASLDGFHVSFAIGFVFAVLGLLVSLFLRKGKIIETEKEV

SEQ ID NO: 7825 - protein, 2810 aa, Streptococcus agalactiae
ATGATAAGAGGAGCAAGAGCTCACAATTTAAAAAATATAAGTGTCGACATCCCACGAGACAAGTTAGTTGTCGTTACGGGACTATCAGGATCAGGTAAGTCTAGTTTGGCCTTTGACACTATCTATGCAGAAGGACAACGTCGTTACGTTGAAAGTCTTTCTGCTTACGCGCGCCAATTTTTGGGAAATATGGAAAAGCCTGATGTAGATTCTATTGATGGCCTTAGTCCAGCTATTTCTATTGATCAGAAAACAACAAGTAAGAATCCTCGCTCTACTGTTGGGACTGTAACAGAAATTAACGATTATTTACGTTTGCTTTATGCTCGTGTTGGAACCCCATATTGTATCAATGGTCACGGAGCCATCACAGCATCTTCTGTAGAGCAAATTGTGGATAAGGTACTAGCGCTTCCAGAGCGAACAAAGATGCAAATTTTAGCCCCAATTATACGTCGAAAAAAAGGACAACACAAATCAACATTTGAGAAAATACAAAAAGATGGTTACGTTCGTGTTCGTATTGATGGTGATATTCACGATGTTACTGAGGTGCCTGAATTATCAAAAAGTAAGATGCACAATATTGATATTGTAGTAGATCGATTAATTAATAAAGAGGGCATTCGTTCCCGCTTATTTGATTCCGTTGAAGCGGCTCTACGTTTGTCGGATGGTTATGTCGTTATTGATACAATGGATGGCAATGAGTTATTGTTTTCAGAGCATTATTCTTGTCCTGAATGTGGTTTTACTGTTCCTGAATTAGAGCCACGCCTTTTTTCTTTTAATGCTCCCTTTGGTTCTTGTACGACCTGTGATGGCTTAGGAATTAAGTTAGAAGTGGATATAGATTTGGTTATTCCAGATAAAAGCAAGACCCTTAGAGAAGGGGCCTTAGTTCCTTGGAATCCAATTTCATCAAATTATTATCCAACGATGCTAGAGCAAGCTATGACTCAATTTGGTGTTGATATGGATACGCCATTTGAAAAATTAAGCAAGGCGGAGCAGGACCTAGCCCTATATGGTTCAGGCGAACGAGAGTTCCATTTCCATTATATTAACGATTTTGGAGGCGAGAGAAATATTGATTTGCCTTTTGAAGGGGTTGTCAATAATATTAATCGTCGTTACCATGAAACTAATAGCGATTACACACGCAATGTTATGCGAGAATATATGAACGAGCTAAAATGTAACACTTGTCATGGCTATCGTCTCAATGATCAAGCACTTTGCGTAAGAGTTGGGGGAGAAGAAGGTCTTAATATTGGGCAAGTCTCAGATTTATCGATAGCAGACCATTTAGAACTTTTAGAAACGTTGCGTTTATCTTCAAATGAACAATTAATTGCTCGACCAATTATCAAAGAAATTCATGACCGCCTAAGTTTCTTAAATAATGTTGGGCTTAATTATTTAAATCTGTCACGTTCTGCAGGAACGCTTTCCGGGGGCGAGAGTCAACGTATTCGTTTGGCTACTCAAATTGGGTCTAATTTATCAGGTGTCCTTTATGTACTTGATGAACCGTCCATTGGACTTCATCAGCGAGACAATGACCGTTTGATTGATAGTCTTAAGAAAATGCGTGATTTGGGTAATACGCTTATTGTTGTTGAACATGATGAAGATACAATGATGGCAGCTGATTGGTTAATCGATGTGGGACCTGGCGCTGGTGCGTTTGGTGGTGAGATTGTGGCCTCTGGCACACCGAAGCAAGTAGCTAAAAATACTAAATCTATTACAGGACAATATTTGTCAGGTAAGAAAGTGATTCCTGTGCCATCTGAACGAAGAGTAGGCAATGGTCGCTTTTTAGAAATCAAAGGTGCGGCAGAAAACAACCTACAAAATTTAGATGTCAAGTTCCCTCTCGGTAAATTTATTGCCGTAACTGGTGTCTCAGGTTCTGGAAAATCAACCTTAATTAATAGTATTTTGAAAAAAGCTGTTGCGCAGAAGCTTAACCGTAACTCAGATAAACCAGGTAAATATGTTTCTTTAGAAGGCATTGAATATGTTGATCGATTGATTGATATTGACCAAAGTCCAATTGGTCGGACCCCACGTTCTAATCCCGCAACCTATACAGGTGTTTTTGATGATATTCGTGATCTTTTTGCTCAAACTAATGAGGCAAAAATTCGAGGTTATAAAAAAGGACGCTTCTCATTTAACGTCAAAGGTGGACGTTGTGAGTCTTGTTCTGGTGATGGTATCATCAAAATTGAGATGCATTTTTTACCAGATGTCTACGTTCCTTGTGAAGTATGCCACGGCACGCGCTATAATAGTGAGACTCTGGAAGTACATTACAAAGAAAAAATATTGCACAAATTCTTGATATGACAGTGAATGATGCAGTTACATTTTTTGCAGCTATTCCTAAAATTGCTCGTAAGTTACAGACTATTAAGGATGTTGGTTTGGGATATGTCACTTTGGGGCAACCAGCTACAACCTTATCAGGAGGAGAAGCTCAGCGAATGAAGTTGGCAAGTGAATTACATAAGCGTTCGACAGGTAAGAGTCTTTACATATTAGACGAACCAACAACGGGGCTTCATGCAGATGATATTGCTCGCTTACTTAAGGTTTTGGATCGTTTTGTAGATGATGGTAATACAGTGCTTGTTATTGAGCATAACCTTGATGTTATTAAAACTGCTGACCACATTATTGATCTCGGCCCTGAAGGAGGTATTGGTGGCGGACAAATTGTAGCTATCGGAACACCAGAAGAAGTTGCTGAAAATCCTAAATCCTATACAGGATATTATTTAAAAGAGAAGTTAGCAAGA

SEQ ID NO: 7826 - protein, 937 aa, Streptococcus agalactiae
MIRGARAHNLKNISVDIPRDKLVVVTGLSGSGKSSLAFDTIYAEGQRRYVESLSAYARQFLGNMEKPDVDSIDGLSPAISIDQKTTSKNPRSTVGTVTEINDYLRLLYARVGTPYCINGHGAITASSVEQIVDKVLALPERTKMQILAPIIRRKKGQHKSTFEKIQKDGYVRVRIDGDIHDVTEVPELSKSKMHNIDIVVDRLINKEGIRSRLFDSVEAALRLSDGYVVIDTMDGNELLFSEHYSCPECGFTVPELEPRLFSFNAPFGSCTTCDGLGIKLEVDIDLVIPDKSKTLREGALVPWNPISSNYYPTMLEQAMTQFGVDMDTPFEKLSKAEQDLALYGSGEREFHFHYINDFGGERNIDLPFEGVVNNINRRYHETNSDYTRNVMREYMNELKCNTCHGYRLNDQALCVRVGGEEGLNIGQVSDLSIADHLELLETLRLSSNEQLIARPIIKEIHDRLSFLNNVGLNYLNLSRSAGTLSGGESQRIRLATQIGSNLSGVLYVLDEPSIGLHQRDNDRLIDSLKKMRDLGNTLIVVEHDEDTMMAADWLIDVGPGAGAFGGEIVASGTPKQVAKNTKSITGQYLSGKKVIPVPSERRVGNGRFLEIKGAAENNLQNLDVKFPLGKFIAVTGVSGSGKSTLINSILKKAVAQKLNRNSDKPGKYVSLEGIEYVDRLIDIDQSPIGRTPRSNPATYTGVFDDIRDLFAQTNEAKIRGYKKGRFSFNVKGGRCESCSGDGIIKIEMHFLPDVYVPCEVCHGTRYNSETLEVHYKEKNIAQILDMTVNDAVTFFAAIPKIARKLQTIKDVGLGYVTLGQPATTLSGGEAQRMKLASELHKRSTGKSLYILDEPTTGLHADDIARLLKVLDRFVDDGNTVLVIEHNLDVIKTADHIIDLGPEGGIGGGQIVAIGTPEEVAENPKSYTGYYLKEKLAR

SEQ ID NO: 7827 - protein, 669 aa, Streptococcus agalactiae
ATGACTTTACAAGACTTAACTAAAAAGAATCAAGAGTTTGTTCATATTGCAACTAATCAACTTTTAGCTGATGGAAAATCAGATGCAGAAATCAAAGCTATTTTAGAAGAACATCTCCCAGAGATTATAGATAATCAGAAAAAAGGAATTACCGCACGCTCACTCTTAGGAGCACCAACTACTTGGGCAGCCTCATTCACTGAGCGACCTGAGGATAAAGCTAGAGTATCTGTACAAAAAAATACCAATCCTTGGTTGATGTGGTTAGATACTTCCTTACTATTTCTTGGCTTAGTAACTGCTTTGAATGGTTTAATGTTGCTATTTGGTCAATCTAATGTCAATACAGGGCTTATTTCAATTTTAACTCTTGGTTTTGGTGGTGGTGCGGCCATGTACGTTACTTATTACTATATTTATCGCCATATGGGTAAACCAAAATCTGAAAGACCAGGCTGGCTTAAATCTTTCGCAGTACTGGCACTAGTTATGTTAGTTTGGTTTGCCTTATTTGCAGTAGTACCTCTTCTACCTGCAACTATTAATCCTAAACTTCCTGAGGTTGTTTTGTTTATTATTGCTTTAGCATCGTTTGGTTTGCGCTTTTATTTACAACGTAAATATAATATTCAAAGCTCAATGGCACCAGTGGCACCACAACAAAGAAGA

SEQ ID NO: 7828 - protein, 223 aa, Streptococcus agalactiae; identical to SEQ ID NO: 3116

SEQ ID NO: 7829 - protein, 942 aa, Streptococcus agalactiae
ATGAAGCAAATGTTTCTTTCAACGGCAATTGAATTTAAAGAAATTGAAACATTCGAGCCAGGTGCTTGGATAAATCTGGTTAATCCCTCCCAGGAAGAATCCGAACAAGTAGCTGATCAATTTGGTATTGATATTGATGATTTACGTGCTCCCCTCGATGTGGAAGAAACTTCCCGTATCTCGGTTGAAGATGATTATACTTTAGTTATTGTTGACGTTCCTACCTATGAAGAACGCAATAACAAAAGTTATTATATGACTATTCCTATGGGCATTATCGTTACTGACAACGCTGTTATTACTACTTGCCTAGAACATTTGACGCTGTTTGATCACTTTTATAGACGACGTGTCAAAAATTTTTATACCTTTATGAAGACACGTTTTGTTTTCCAATTGCTTTATCGCAATGCCGAATTATACTTACAGGCTTTGCGTACTATCGATAGGCAGAGCGATAAAATTGAAGCACAACTAGAGAGTGCAACTCGAAATGAGCAATTGATCGACATGATGGAATTGGAAAAATCTATTGTCTATCTAAAGGCCTCTTTAAAATTTAATGAGCGAATCGTCAAAAAATTGACCAGTAGTACCAGTAGTTTAAAAAAATACATTGAAGATGAAGATCTGCTTGAAGATACATTGATCGAAACTCAGCAGGCTATTGAAATGGCAAATATCTATGAAAATGTCTTAAATGCCATGACAGAAACGACTGCTTCAATCATCGGTAATAATCAAAATACCATTATGAAAACCTTAGCCCTAGTAACCATGACATTGGATATTCCAACGGTTATTTTTTCGGCGTATGGGATGAACTTTCAAAATAATTGGATGCCTTTGAATGGTCTCGCACATGGCTTTATCTATGTTGTCCTTTTGGCCTTTTTGATGAGTTCATTTGTTGTATTTTATTTTATTCGTAAAAAATGGTTT

SEQ ID NO: 7830 - protein, 314 aa, Streptococcus agalactiae
MKQMFLSTAIEFKEIETFEPGAWINLVNPSQEESEQVADQFGIDIDDLRAPLDVEETSRISVEDDYTLVIVDVPTYEERNNKSYYMTIPMGIIVTDNAVITTCLEHLTLFDHFYRRRVKNFYTFMKTRFVFQLLYRNAELYLQALRTIDRQSDKIEAQLESATRNEQLIDMMELEKSIVYLKASLKFNERIVKKLTSSTSSLKKYIEDEDLLEDTLIETQQAIEMANIYENVLNAMTETTASIIGNNQNTIMKTLALVTMTLDIPTVIFSAYGMNFQNNWMPLNGLAHGFIYVVLLAFLMSSFVVFYFIRKKWF

SEQ ID NO: 7831 - protein, 144 aa, Streptococcus agalactiae
ATGGCTCAACAACGTCGTGGCGGATTCAAACGCCGTAAAAAAGTTGATTATATCGCAGCTAACAAGATTGAATATGTTGATTACAAAGATACAGAGCTTCTTAGCCGTTTCGTTTCAGAACGTGGAAAAANNNNNTTAATTAAT

SEQ ID NO: 7832 - protein, 48 aa, Streptococcus agalactiae
  VARIANT 44, 45: Xaa = Any Amino Acid
MAQQRRGGFKRRKKVDYIAANKIEYVDYKDTELLSRFVSERGKXXLIN

SEQ ID NO: 7833 - protein, 489 aa, Streptococcus agalactiae
ATGATTAATAATGTAGTACTTGTAGGTCGCATGACCCGTGATGCAGAACTTCGTTATACACCAAGTAATCAAGCGGTAGCCACTTTTTCACTTGCAGTTAATCGTAATTTTAAAAATCAATCTGGCGAACGTGAGGCTGATTTTATTAACTGTGTTATTTGGCGCCAACAAGCTGAAAACTTGGCTAACTGGGCAAAAAAAGGTGCTTTGGTTGGAATTACAGGTCGTATCCAAACACGTAATTATGAAAACCAACAAGGTCAACGTGTCTATGTAACAGAAGTTGTTGCGGAAAGTTTCCAATTATTGGAAAGTCGTGCTACACGAGAAGGTGGTTCACCTAACTCTTATAATAATGGTGGCTATAACAATGCTCCGTCAAATAATAGTTATTCAGCTTCTTCTCAACAAACACCTAATTTTAGTCGTGATGAGAGTCCGTTTGGTAACTCAAATCCAATGGATATTTCAGATGATGATCTACCATTC

SEQ ID NO: 7834 - protein, 163 aa, Streptococcus agalactiae; identical to SEQ ID NO: 3122

SEQ ID NO: 7835 - protein, 285 aa, Streptococcus agalactiae
ATGGCTAAATACGAAATTCTTTATATTATTCGTCCAAACATTGAGGAAGAAGCTAAAAACGCTTTGGTAGCACGTTTTGATTCTATCTTATCTGACAACGGTGCAACTGTTGTTGAATCAAAAGATTGGGAAAAACGTCGTCTTGCATACGAAATCCAAGATTTCACTGAAGGACTTTACCATATCGTTAACGTTGAAGCTGAAGATGCAGTAGCTCTTAATGAGTTTGACCGTCTTTCAAAAATCAACGGTGACATTCTTCGTCACATGATCGTTAAAGTAGAC

SEQ ID NO: 7836 - protein, 95 aa, Streptococcus agalactiae; identical to SEQ ID NO: 3124

SEQ ID NO: 7837 - protein, 1122 aa, Streptococcus agalactiae
ATGTGGCCTGAAGATAGAATCGCTTCTTTTCGTCGCACACTTTTAGGGTGGTATGACCAAGAAAAACGTGATCTCCCTTGGCGAAGAACTACTAATCCATACTATATTTGGGTTTCTGAAATCATGTTGCAACAAACACAAGTTAATACAGTAATCCCTTATTATAAACGTTTTCTAGAGTGGTTTCCTCAAATAAAAGATTTGGCAGACGCTCCTGAAGAACAATTACTAAAGGCATGGGAGGGACTAGGTTATTATTCTCGGGTGCGTAATATGCAAAAGGCTGCACAGCAAGTGATGGTTGATTTTGGTGGCATATTTCCTCACACTTATGATGATATTGCTTCATTAAAAGGGATTGGTCCTTATACTGCAGGTGCTATCGCCAGCATCTCATTCAACTTACCAGAGCCTGCCGTTGATGGCAATGTGATGCGTGTCATGGCTCGTTTGTTTGAAGTTAATTATGACATCGGTGACCCTAAAAATCGTAAAATTTTTCAAGCTATTATGGAAATACTAATTGACCCTGACAGACCCGGTGATTTTAACCAAGCACTTATGGATCTGGGTACAGACATCGAATCCGCTAAGACACCTAGACCTGATGAAAGCCCTATTCGTTTCTTTAATGCTGCTTATTTGAATGGTACTTATAGTAAATATCCCATAAAAAATCCTAAGAAAAAGCCTAAACCAATGCGAATTCAGGCTTTTGTCATTCGTAACCAAAATGGCCAATATCTACTGGAGAAAAATACTAAAGGGAGACTTCTAGGGGGTTTTTGGTCATTTCCTATTATCGAAACGTCACCTCTTTCTCAACAATTAGATTTATTTGATGACAATCAATCCAACCCCATAATCTGGCAAACCCAAAATGAAACTTTCCAAAGAGAATATCAATTAAAGCCCCAATGGACTGATAATCACTTTCCCAATATTAAGCACACTTTTAGTCACCAGAAGTGGACAATAGAACTCATAGAGGGGGTGGTCAAAGCAACAGATTTACCTAATGCTCCTCACCTAAAGTGGGCAGCAATTGAGGACTTTTCTCTGTATCCCTTTGCAACGCCACAAAAGAAAATGCTGGAGACCTACTTAAAACAGAAAAATGCT

SEQ ID NO: 7838 - protein, 374 aa, Streptococcus agalactiae
MWPEDRIASFRRTLLGWYDQEKRDLPWRRTTNPYYIWVSEIMLQQTQVNTVIPYYKRFLEWFPQIKDLADAPEEQLLKAWEGLGYYSRVRNMQKAAQQVMVDFGGIFPHTYDDIASLKGIGPYTAGAIASISFNLPEPAVDGNVMRVMARLFEVNYDIGDPKNRKIFQAIMEILIDPDRPGDFNQALMDLGTDIESAKTPRPDESPIRFFNAAYLNGTYSKYPIKNPKKKPKPMRIQAFVIRNQNGQYLLEKNTKGRLLGGFWSFPIIETSPLSQQLDLFDDNQSNPIIWQTQNETFQREYQLKPQWTDNHFPNIKHTFSHQKWTIELIEGVVKATDLPNAPHLKWAAIEDFSLYPFATPQKKMLETYLKQKNA

SEQ ID NO: 7839 - protein, 591 aa, Streptococcus agalactiae
ATGGAAATTGGTCAGCAAATTATTCGCTACCGTAAACAACAAGCGCTCTCTCAAGAAGAATTAGCCGAGAAAGTCTATGTAAGCCGTCAGAGCATATCTAACTGGGAAAATGACAAAACCTACCCAGACATCTATAGCCTCTTACTCCTAAGTCAAATTTTTCAAGTGAGCTTAGACCAACTAATTAAAGGAGACATTGAGAAAATGAAATATACCATCACTCAGGTTGATAAAAAGAATTTTGAACGAGATACCAAAGTAATGGTAACATTGATGATACTATTAATGATTTCAAGTTATCCATTAGTCTATTTCTTAGAGTGGCTAGGACTTGGCATTTTTGTTTTATTATCGATAATTACTATGACTTATGCTAATCGTGTGGAACGTTTTAAGAAAAAATATGATGTGCAAACTTATAAGGAAATCCTAGCTGTTTCAAGTGGAAAATTATTAGACGAAATCGAAAAACGGGAAGAAAGAGCAAAACTTCCTTATCAGAAACCCCTTATTGTCACTGTATTTTTCCTCATTACTGTTGCCACCTTTTTTGCAAGTCGTTTTATTTTTACATGGTTGTTCCATTTAAGT

SEQ ID NO: 7840 - protein, 197 aa, Streptococcus agalactiae
MEIGQQIIRYRKQQALSQEELAEKVYVSRQSISNWENDKTYPDIYSLLLLSQIFQVSLDQLIKGDIEKMKYTITQVDKKNFERDTKVMVTLMILLMISSYPLVYFLEWLGLGIFVLLSIITMTYANRVERFKKKYDVQTYKEILAVSSGKLLDEIEKREERAKLPYQKPLIVTVFFLITVATFFASRFIFTWLFHLS

SEQ ID NO: 7841 - protein, 312 aa, Streptococcus agalactiae
ATGGCATTAGAAGTAACAGATGCTACGTTTGTAGAAGAAACTAAAGAAGGTTTAGTACTCATTGATTTTTGGGCAACTTGGTGTGGTCCATGTCGTATGCAAGCACCAATCTTAGAACAGTTATCTCAAGAAATCGATGAAGATGAACTCAAAATTTTGAAAATGGATGTTGATGAAAATCCGGAAACTGCCCGTCAGTTTGGTATTATGTCAATTCCAACATTGATGTTTAAAAAAGACGGAGAAGTGGTTAAACAAGTTGCAGGTGTTCATACTAAAGACCAACTGAAAGCTATTATTGCTGAATTGAGT

SEQ ID NO: 7842 - protein, 104 aa, Streptococcus agalactiae; identical to SEQ ID NO: 3130

SEQ ID NO: 7843 - protein, 498 aa, Streptococcus agalactiae
ATGGAATCATATGAACAATTTTATGCCAAACTATCTCAACCTTTTAGAAAATCCCCACAGTTAATAATTCTTTTAAATTTTTTACTAAAAATAGTCACAGGAATGATGTACATACTCTATCCATCTTTTCTGATATTTACTCTTTGGCAAGGGATGACATTTCAATTATGGTTAAGGCTATTAATTATCCCTGCTGTTGGCTTTATAGCTTTGTCTTACATTAGGAAACGCCTTGATTTTCCACGACCATATGAAAAATGGAATATTAAACCTTTAATTTATAAGGATACTGAGGGAAGGTCAATGCCTAGCAGACATGTTTTTTCAGCTACGATGATTAGTATGTGTTTGTTACGATATTATGTTTACTTTGGAATAGTTTGTTTAATATTATCGGTTCTATTGGCAATTTGCCGTGTGATAGCAGGTATTCACTATCCTAAGGATGTTATTGTAGGTTACCTTATTGGCTTGATTTTAGGGCTTTGTTTATTTATT

SEQ ID NO: 7844 - protein, 166 aa, Streptococcus agalactiae
MESYEQFYAKLSQPFRKSPQLIILLNFLLKIVTGMMYILYPSFLIFTLWQGMTFQLWLRLLIIPAVGFIALSYIRKRLDFPRPYEKWNIKPLIYKDTEGRSMPSRHVFSATMISMCLLRYYVYFGIVCLILSVLLAICRVIAGIHYPKDVIVGYLIGLILGLCLFI

SEQ ID NO: 7845 - protein, 2346 aa, Streptococcus agalactiae
ATGAAGAGTATGAATAACAAGATTTTAGAACAGTTAGAATTTAACAAAGTTAAGGAATTGATATTACCTTATCTCAAGACAGAACAATCACAAGAAGAATTATCAGAGCTGGAGCCGATGACGGAGGCTCCTAAAATAGAAAAAAGTTTTAATGAAATTTCTGACATGGAACAGATTTTTGTTGAACATCACTCATTTGGCATAGTCAGCCTAAGTTCAATCTCTGAGAGTTTAAAACGCTTAGAGCTTTCAGCTGATCTTAATATTCAAGAACTTTTGGTTATCAAAAAAGTTTTACAGAGTTCTTCGGATATGATTCACTTTTATTCTGATTTGGATAATGTTTCTTTCCAATCTTTGGATCGTTTGTTTGAAAATTTGGAACAATTCCCTAATCTGCAAGGGTCTTTTCAAGCTATCAATGATGGTGGTTTTTTAGAACATTTTGCGAGTCCAGAATTAGAGCGTATCCGTCGTCAATTAACAAACAGTGAACGACGGGTTCGTCAGATTTTACAGGATATGCTTAAGGAAAAAGCAGAGCTTTTATCAGAGAATCTAATCGCTAGTCGTAGTGGACGAAGTGTCCTACCAGTAAAAAATACTTATCGGAATCGTATTTCTGGTGTGGTTCATGACATCTCTTCTTCAGGAAGTACTGTTTATATTGAGCCTCGTGCTGTAGTTACACTAAACGAAGAGATAACGCAGCTTAGAGCTGACGAACGTCATGAAGAAAGTCGTATTTTACACGCATTTTCAGACTTGTTAAGACCCCATGTCGCCACTATTAGAAATAATGCATGGATTCTTGGGCATCTTGATTTTGTAAGGGCTAAATATCTTTTTATGTCTGATAATAAGGCGACGATACCTGAGATTTCTAATGACAGCACGTTAGCATTAATCAATGTTCGTCATCCTCTGTTAAGTAACCCTGTGGCTAATGACTTACATTTTGATCAAGATTTAACTGCAATTGTCATCACTGGTCCCAATACTGGTGGTAAGACGATTATGCTAAAAACACTCGGTTTAGCACAATTAATGGGACAGTCTGGTTTGCCAGTATTAGCGGATAAAGGTAGTAAAATTGCAGTATTTAACAATATCTTTGCAGATATTGGCGATGAGCAATCTATTGAACAAAGTCTATCAACCTTTTCTAGTCATATGACGCACATAGTTAGTATTTTAAACGAGGCTGACCACAATAGTTTAGTTCTCTTTGATGAACTGGGAGCAGGAACGGATCCTCAAGAAGGTGCTAGTTTGGCTATGGCTATTTTAGAACACCTTAGGTTAAGTAATATCAAAACGATGGCGACCACGCACTATCCAGAATTAAAAGCTTATGGGATTGAGACAAATTTTGTAGAGAATGCGAGCATGGAATTTGATGCCGAAACGCTTAGCCCTACGTATCGCTTTATGCAAGGAGTTCCTGGACGATCAAATGCATTTGAAATTGCTTCTCGCCTTGGTTTAGCTCCATTTATTGTTAAACAAGCTAAGCAGATGACAGATTCTGACTCAGATGTTAACCGTATTATTGAACAGTTAGAGGCACAGACACTTGAGACACGTAGAAGACTGGATCATATTAAAGAAATTGAACAAGAAAACCTCAAATTCAATCGTGCGGTTAAGAAACTCTATAATGAATTTTCGCATGAGCGCGATAAAGAGTTAGAAAAAATCTATCAAGAAGCTCAAGAAATTGTAGATATGGCTTTGAATGAGAGTGATACTATCTTAAAAAAACTCAATGATAAGAGCCAATTAAAACCTCACGAAATTATAGATGCTAAGGCACAAATAAAAAAATTAGCACCTCAAGTTGATTTATCAAAAAATAAAGTCTTAAATAAGGCTAAAAAAATCAAAGCAGCTCGTGCTCCTAGAATTGGTGATGATATTATAGTGACTAGCTATGGACAGCGAGGTACCTTAACTAGTCAATTAAAAGATGGACGTTGGGAAGCACAAGTGGGAATTATCAAAATGACATTAACACAAGATGAATTTACCCTTGTTAGAGTCCAAGAAGAACAGAAAGTCAAAAGTAAACAGATTAATGTGGTTAAAAAAGCTGATAGTTCTGGACCAAGAGCTCGACTTGATCTTAGAGGTAAAAGATACGAAGAAGCTATGCAAGAGTTAGATAATTTTATTGATCAAGCATTGCTTAACAACATGGGACAAGTTGATATCATTCATGGTATTGGTACAGGCGTTATCCGTGAGGGAGTGACAAAATATCTTCGTCGTAATAAGCACGTTAAGCATTTTGCTTATGCCCCACAAAATGCAGGGGGATCTGGCGCCACAATTGTAACGTTAGGG

SEQ ID NO: 7846 - protein, 782 aa, Streptococcus agalactiae
MKSMNNKILEQLEFNKVKELILPYLKTEQSQEELSELEPMTEAPKIEKSFNEISDMEQIFVEHHSFGIVSLSSISESLKRLELSADLNIQELLVIKKVLQSSSDMIHFYSDLDNVSFQSLDRLFENLEQFPNLQGSFQAINDGGFLEHFASPELERIRRQLTNSERRVRQILQDMLKEKAELLSENLIASRSGRSVLPVKNTYRNRISGVVHDISSSGSTVYIEPRAVVTLNEEITQLRADERHEESRILHAFSDLLRPHVATIRNNAWILGHLDFVRAKYLFMSDNKATIPEISNDSTLALINVRHPLLSNPVANDLHFDQDLTAIVITGPNTGGKTIMLKTLGLAQLMGQSGLPVLADKGSKIAVFNNIFADIGDEQSIEQSLSTFSSHMTHIVSILNEADHNSLVLFDELGAGTDPQEGASLAMAILEHLRLSNIKTMATTHYPELKAYGIETNFVENASMEFDAETLSPTYRFMQGVPGRSNAFEIASRLGLAPFIVKQAKQMTDSDSDVNRIIEQLEAQTLETRRRLDHIKEIEQENLKFNRAVKKLYNEFSHERDKELEKIYQEAQEIVDMALNESDTILKKLNDKSQLKPHEIIDAKAQIKKLAPQVDLSKNKVLNKAKKIKAARAPRIGDDIIVTSYGQRGTLTSQLKDGRWEAQVGIIKMTLTQDEFTLVRVQEEQKVKSKQINVVKKADSSGPRARLDLRGKRYEEAMQELDNFIDQALLNNMGQVDIIHGIGTGVIREGVTKYLRRNKHVKHFAYAPQNAGGSGATIVTLG

SEQ ID NO: 7847 - protein, 540 aa, Streptococcus agalactiae
ATGCTATCATTGCTTTTGCTGATTATTGTTATTTGGCATTTTTATATTGGCTACAGTAGAGGTATTTTTTTACAAGTCTTTTACGTGTTAATGTCAATGGTATCTTTGATGATTGCTAGTCAATTTTACCAAGAATTAGCTAGTCAGATTACGTTATGGGTACCGTATTCTAATCCTGTACAAGGAGTAGAAGTTTACTTTTTTAAAGATATTAGCAAATTTCAATTGAGTCATGTTTATTATGCAGGTGTTGCCTTTGTTTTTATCTACAGTTTATCTTACTTAGTAGGTCGCTTGCTAGGTGTTTTACTACATTTAGCACCAGTTGAACATTTTGATAGCTTACAAAATAATATTATTAGTGGTTTTTTAGCCGTTCTGGTTTGTCTCTTATTTATGAGTATGTGTTTGACTATTCTGGCAACAGTCCCTATGTCATTTGTTCAAGAAAAGTTATGGAATAGTCTGTTTGTTAGATTTTTAATTAACGACTTACCATTCTTCTCTCAGTTTTTGGTAAGGACTTGGGCGGTAGGTCTT

SEQ ID NO: 7848 - protein, 180 aa, Streptococcus agalactiae; identical to SEQ ID NO: 3136

SEQ ID NO: 7849 - protein, 309 aa, Streptococcus agalactiae
ATGGAAACAAAAATAAATAATAGTCAGAAAAATCGTTATAAATTTGTCTTTGGAGATAAGCCTCTCACATTGACGACAGATAAAGACAACCTTTTTATGGAAGAGATTGAGCGTGTAGCTACAGAAAAGTATGAAGCTATTAAAGAAAAATTACCTAATGCTGATAATGAAACGATTGCTATTCTCATGGCAATTAATGCTTTATCAGTGCAACTAAGTCGAGAAATTGACATTGAAAAAATGGAAGATGAGCTCAATAAGTTACGCTCCAAAACGATTTCGGACATTAAAGAAAAAGTGAGTGAGGAT

SEQ ID NO: 7850 - protein, 103 aa, Streptococcus agalactiae; identical to SEQ ID NO: 3138

SEQ ID NO: 7851 - protein, 891 aa, Streptococcus agalactiae
ATGAACACAATCGTCATGCAAGCAGATAAAAAATTGCAAGAAAAGATAAGAACCGATTTAGCTCAACATCATATAAGTAATAATAATCCTTATGTGGTATTTTCAGCTAAAATATCAGGAACTACTGTTCTTTTATATACTTCTGGAAAACTTGTCTTCCAGGGTTCTAACGCTTCACATATCGCCCAAAAGTATGGTTATATTGAGCAAAAAGAAAGTTGTTCCTCTGAGACTCAAGATATTCCCATAATTGGTACTGATGAAGTGGGAAATGGCTCTTACTTTGGTGGACTGGCAGTGGTAGCTAGTTTTGTAACTCCTAAGGACCATGCTTACCTCAAAAAATTAGGTGTTGGTGATTCAAAAACACTTACTGATCAAAAAATTAAGCAAATCGCACCTCTTTTGGAAAAAGCAATTCCACACAAAGCATTATTGTTATCGCCTCAAAAATATAATCAAGTGGTTGGTCCAAATAACAAACATAATGCTGTCTCCGTAAAAGTTGCTTTGCACAACCAAGCTATCTTCCTTCTTCTTCAAGATGGTTTTGAACCAGAAAAAATCGTTATTGATGCTTTTACTAGCTCCAAAAACTATCAAAACTATTTGAAAAATGAAAAGAATCAATTTAAACAAACGATTACTCTGGAAGAAAAAGCTGAAAATAAATATCTAGCTGTAGCGGTCAGTTCTATTATTGCACGTAATCTATTCTTAGAAAATCTTAACAAATTAAGCGACGACGTAGGATATAAACTTCCAAGTGGAGCTGGTCACCAATCTGATAAGGTCGCTAGCCAATTACTCAAAGCTTATGGTATCTCTTCGCTTGAACACTGCGCAAAACTTCATTTTGCCAACACCAAAAAAGCACAAGCATTATTAAAA

SEQ ID NO: 7852 - protein, 297 aa, Streptococcus agalactiae
MNTIVMQADKKLQEKIRTDLAQHHISNNNPYVVFSAKISGTTVLLYTSGKLVFQGSNASHIAQKYGYIEQKESCSSETQDIPIIGTDEVGNGSYFGGLAVVASFVTPKDHAYLKKLGVGDSKTLTDQKIKQIAPLLEKAIPHKALLLSPQKYNQVVGPNNKHNAVSVKVALHNQAIFLLLQDGFEPEKIVIDAFTSSKNYQNYLKNEKNQFKQTITLEEKAENKYLAVAVSSIIARNLFLENLNKLSDDVGYKLPSGAGHQSDKVASQLLKAYGISSLEHCAKLHFANTKKAQALLK

SEQ ID NO: 7853 - protein, 591 aa, Streptococcus agalactiae
ATGAAAGAATTTATTAAAGAATGGGGTGTCTTTATCCTCATCCTCTCACTTTTTTTACTATCGCGTATCTTTTTATGGCAATTCGTTAAAGTTGACGGACACTCCATGGATCCAACTTTAGCTGACAAGGAACAGCTAGTAGTTCTCAAACAAACAAAAATCAATCGATTCGATATTGTAGTGGCTAACGAAGAAGAAGGCGGCCAAAAGAAAAAAATTGTTAAACGTGTCATTGGTATGCCAGGTGATGTCATCAAATATAAAAATGACACCTTAACTATTAACAATAAAAAAACAGAAGAACCTTACCTCAAGGAATATACTAAATTATTTAAAAAGGATAAATTACAGGAAAAATATTCGTATAACCCACTTTTCCAAGACCTAGCACAAAGCTCTACCGCTTTCACTACTGACAGCAATGGCAGCAGCGAATTTACTACTGTCGTGCCTAAAGGCCACTATTATCTTGTTGGTGATGACCGAATTGTCTCTAAAGATAGTCGTGCCGTCGGTCCCTTCAAAAAATCAACAATTGTGGGAGAGGTTAAATTCCGCTTCTGGCCAATTCGTCGTTTTGGAACTATCAAC

SEQ ID NO: 7854 - protein, 197 aa, Streptococcus agalactiae; identical to SEQ ID NO: 3142

SEQ ID NO: 7855 - protein, 2418 aa, Streptococcus agalactiae
ATGGAAGTATTTTTTACAGGAACCATTGAACGCATTATATTTGAAAATGCCAGCAATTTTTTTAAAATATTACTTCTGGAAATCGAAGATACGGATAGCGATTTTGATGATGTAGAAGTAATTATTACTGGTACTATGGCCGACGTTATAGAGGGAGAAGAATATACTTTTTGGGGAACACTAACCCAACATCCAAAATACGGCGAGCAACTACAAAGTGTACGCTATGAAAGAGCCAAGCCTACTTCAGGTGGCCTTGTGAAATACTTTTCTAGCGAACAATTTAAAGGAATTGGTAAAAAGACTGCCCAACGCATCGTAGAACTCTATGGAGATAATACCATTGATAAAATCCTTGAATCCCCTGAACAGTTAAGTACAATCTCAGGACTATCAAAAATTAATAGAGAAGCATTCATCGCTAAACTGAAACTCAATTATGGAACAGAGCAAGTTTTAGCTAAACTCGCTGAATATGGGTTAAGCAATCGTGCTGCTATTCAAATATTTGATCACTATAAAGAAGAATCACTTGAAGTGATAAACGAAAATCCTTATCAACTTGTTGAGGATATCCAAGGTATCGGTTTTAAAATAGCTGACCAACTTGCTGAACAAGTCGGTATTGAAAGTGATTCTCCTAAACGCTTTCGTGCTGCTATTATTCATACTTTAGTTGAGTCTTCTATGGAGCAAGGAGATACCTATATTGAGGCTCGTACTCTCTTGGAAAAAACCATTACTCTCCTTGAAGAAGTTCGTCAAATCGAACTAGATCCTTCAATTGTTGCTAAGGAATTGACAAATTTAATTGCAGAAGATAAAGTGCAACATATTGGAACTAAAATTTTTAGTAATACTCTATTTTTTGCCGAAGAAGGCATCAAAAAAAACTTACAACGAATACTAAATCAGCCTCTTGATAAACAACTAAGTCACAAAGATATTGACCGTGAAATCAGAGATATTCAAAAATCTTTAAATATCCACTACGATAATATCCAAGAAAAAGCTATTAGAGAAGCTTTACTAAGTAAGGTATTTATCTTGACTGGTGGCCCAGGAACAGGTAAAACAACAGTTATAAATGGTATTATTGAAGCCTATTCCGAGTTACATCATATTGATTTAAACAAAAATGATATTCCTATTGTACTTGCTGCTCCTACAGGTCGTGCTGCTAGACGCATGAATGAACTTACCGGTTTACCGAGTGCTACTATTCATAGGCATTTGGGATTAAACGGAGATAGTGACTATCAAAGTCTAGATGACTATCTAGATTGTTCCTTAATTATCATTGATGAATTTTCAATGGTTGACACTTGGCTTGCTAATCAATTATTTGACGCTTTGGACTCGCACACACAAGTTATTATTGTCGGAGATAGTGATCAATTACCGTCTGTAGGTCCAGGACAAGTTCTAGCAGATCTTTTAAATATAAATGCACTTCCACACATTAAACTTGAAAAGATTTTTAGACAATCAGAAGAATCAACTATTGTGACTTTAGCTAATCAAATGAGACAGGGCTTTTTGCCAGAGGACTTTACAGCTAAAAAAGCCGATCGCTCATACTTTGAAGCATCTGCTAATATCATCCCAAATATGATTTCTAAAATTGTTCAATCTGCACTTAAGAGCGGTATTGAAGCTCATGAAATTCAAATTTTAGCTCCTATGTATCGCGGCCAAGCAGGTATTAATAATCTTAACCTTATCATGCAAAATCTCCTCAATCCATTAAAAGATAATAACCAATTTACTTTTAATGATATAAATTTCCGAATAGGAGATAAAGTGTTACATTTAGTCAACGATACAGAGCTTAATGTTTTTAATGGGGATATTGGTTACATAACGGACCTTATACCAGCTAAATATACTGAGAGCAAGCAAGATGAGATTTATATGACTTTTGATGGTCAAGAAGTTATCTACCAACGCAAAGAATGGCTTAAAATAACACTAGCCTATGCTATGAGTATTCATAAATCACAGGGTTCTGAATTTCAAGTTGTTATTCTGCCAATAACGAGACAGAGTGGTCGAATGTTACAGCGAAACCTTATTTATACAGCTATTACGAGATCTAAAAGTAAACTAATACTTTTAGGAGAAATTGGTGCATTTGATTTCGCTGTTAAAAACGAGGGGGCAAAGCGCAATACTTATCTGATAGAAAGATTTGAAAACAAGCAAGAAATAGCTAATTCTCAAAAAATTGAAGATAGCTCAATAGATCAAAAGATTGACAACACAATAATTAATACGTCCATTCCAAAAACAGCAACACCAATTGAGCAGACTAATCTTTCAAAAATAACTTATCGCCTAACTGAAGAAAATTATTTAACAATCGATCCAATGATTGGTATTAATCAACAAGATATAAGTGCAATTTTTGATAGTAAA

SEQ ID NO: 7856 - protein, 806 aa, Streptococcus agalactiae
MEVFFTGTIERIIFENASNFFKILLLEIEDTDSDFDDVEVIITGTMADVIEGEEYTFWGTLTQHPKYGEQLQSVRYERAKPTSGGLVKYFSSEQFKGIGKKTAQRIVELYGDNTIDKILESPEQLSTISGLSKINREAFIAKLKLNYGTEQVLAKLAEYGLSNRAAIQIFDHYKEESLEVINENPYQLVEDIQGIGFKIADQLAEQVGIESDSPKRFRAAIIHTLVESSMEQGDTYIEARTLLEKTITLLEEVRQIELDPSIVAKELTNLIAEDKVQHIGTKIFSNTLFFAEEGIKKNLQRILNQPLDKQLSHKDIDREIRDIQKSLNIHYDNIQEKAIREALLSKVFILTGGPGTGKTTVINGIIEAYSELHHIDLNKNDIPIVLAAPTGRAARRMNELTGLPSATIHRHLGLNGDSDYQSLDDYLDCSLIIIDEFSMVDTWLANQLFDALDSHTQVIIVGDSDQLPSVGPGQVLADLLNINALPHIKLEKIFRQSEESTIVTLANQMRQGFLPEDFTAKKADRSYFEASANIIPNMISKIVQSALKSGIEAHEIQILAPMYRGQAGINNLNLIMQNLLNPLKDNNQFTFNDINFRIGDKVLHLVNDTELNVFNGDIGYITDLIPAKYTESKQDEIYMTFDGQEVIYQRKEWLKITLAYAMSIHKSQGSEFQVVILPITRQSGRMLQRNLIYTAITRSKSKLILLGEIGAFDFAVKNEGAKRNTYLIERFENKQEIANSQKIEDSSIDQKIDNTIINTSIPKTATPIEQTNLSKITYRLTEENYLTIDPMIGINQQDISAIFDSK

SEQ ID NO: 7857 - protein, 480 aa, Streptococcus agalactiae
ATGGTTTCATATGAAAAAGTCCGCCGCTCTCTGCGCACAGCTACAATCACTATCATTGTATTAAATAGTTTGTCTTTAGTATTCAGATTGTTTACAGGAATTTCAGTGCAGCTAGCCAAAACTGAAATTAATAAAGGGAACACAGGTAATCTTCCTAAAGAACATATCGAAGCAGTCTTGAGCGCCACAACACCATTTATGCTATTTGTCACTGCTTTAATAGTATTAGTCAACATTGCCATTGTTATTTTCTGTATTAAAAATTTAAGAGCAATTAAAAGAAATCAAATGGTTAATTACCTTCCTTATTATCTTGGCTTCGCCATTACTGTAGGACTTGTTATTTTGGGTTTTCTAACTACTAAAGCACCATGGGCAATAGCTATAAATATCGTCTTCCAAGCTATTTTCGGTCTTCTTTATTTCCATGCTTATCAAAAAGCACAAAAACTCAACGAACGTGATCTTGAAGAGACTAAC

SEQ ID NO: 7858 - protein, 160 aa, Streptococcus agalactiae; identical to SEQ ID NO: 3146

SEQ ID NO: 7859 - protein, 1092 aa, Streptococcus agalactiae
ATGTTAATTTTTCCTTTAATAAATGATACGTCGCGTAAAATTATCCACATTGATATGGATGCTTTTTTTGCATCTGTGGAAGAGCGTGACAATCCCTCTCTTAAAGGAAAGCCTGTTATTATTGGTTCTGATCCCAGAAAAACCGGCGGCAGAGGGGTTGTTTCTACTTGTAATTATGAGGCTCGAAAGTTTGGAGTTCATTCAGCTATGTCTTCAAAAGAAGCGTATGAACGATGCCCTCAAGCTATCTTTATTTCGGGAAATTACCAAAAATATCGCCAAGTAGGAATGGAAGTACGAGATATATTTAAAAAGTATACGGATTTGGTTGAACCGATGAGTATAGACGAAGCTTATTTAGATGTAACTGAAAATAAAATGGGAATAAAATCTGCTGTTAAACTTGCTAAAATGATACAATACGATATTTGGAATGATGTCCATTTGACCTGTTCAGCGGGTATTTCCTACAATAAATTTTTGGCAAAATTGGCTTCTGACTTTGAGAAACCAAAAGGACTTACCCTCATCCTACCAGATCAAGCTCAAGATTTCTTGAAGCCCTTACCAATAGAGAAATTTCATGGTGTTGGTAAACGCTCCGTCGAAAAATTACATGCTTTAGGGGTTTATACTGGTGAGGACCTCCTTTCCTTATCTGAAATTTCTTTAATTGATATGTTTGGTCGTTTCGGGTATGACCTTTATCGTAAGGCAAGAGGGATTAATGCTTCCCCGGTAAAACCTGATAGAGTTCGTAAATCAATAGGAAGTGAGAAAACCTATGGGAAATTACTATATAACGAAGCAGATATCAAAGCTGAGATTTCAAAGAACGTTCAGAGAGTTGTTGCTTCTCTGGAGAAAAATAAGAAAGTTGGTAAGACAATCGTTTTAAAAGTTAGATATGCGGATTTTGAAACATTGACGAAACGTATGACATTAGAAGAGTATACTCAAGATTTTCAAATCATTGATCAAGTTGCTAAAGCGATATTTGATACCTTAGAAGAGTCAGTTTTTGGCATACGACTCTTAGGTGTTACAGTAACGACCCTGGAAAATGAACATGAAGCTATCTATTTAGATTTT

SEQ ID NO: 7860 - protein, 364 aa, Streptococcus agalactiae; identical to SEQ ID NO: 3148

SEQ ID NO: 7861 - protein, 2310 aa, Streptococcus agalactiae
ATGGCAACAGTTAAAACAAACACAGATATCTTTGAACAAGCTTGGGAAGGCTTTAAAGGTGTTGATTGGAAAGAAAAAGCAAGTATTGCTCGCTTCGTTCAAGCAAACTATGCACCTTACGATGGAGATGAAAGCTTCTTAGCTGGAGCAACTGAACGTTCACTTCACATCAAAAAAGTGATTGAAGAAACAAAAGCTCACTATGAAGAAACTCGCTTCCCAATGGATACTCGTGTTGCTTCAATTTCTGAATTACCAGCTGGTTTTATCGACAAAGATAGCGAACTCATCTTTGGTATTCAAAACGACGAGCTTTTCAAATTGAACTTCATGCCTAAAGGTGGTATCCGTATGGCGGAAACTACACTTAAAGAAAATGGTTATGAACCTGATCCAGCTGTTCACGAAATCTTCACTAAGTACGCTACAACAGTAAATGATGGTATCTTCCGCGCTTATACTTCTAACATTCGTCGTGCTCGCCATGCACACACTGTTACTGGTCTTCCAGACGCTTATTCACGCGGACGTATCATTGGTGTATATGCTCGTCTAGCTGTTTACGGTGCTGACTACTTGATGCAAGAAAAAGTTAATGACTGGAATGCATTGAATGATATTGATGAAGAGTCAATTCGTCTTCGTGAAGAAATCAACCTTCAATACCAAGCTCTTGGTGAAGTTGTAAAACTTGGTGACCTTTACGGCGTAGATGTTCGTAAACCAGCCATGAACACTAAAGAAGCCATTCAATGGGTGAACATTGCTTTCATGGCTGTATGTCGTGTTATCAATGGTGCTGCAACATCACTTGGACGTGTTCCTATTGTCCTTGATATCTTTGCAGAACGTGACCTCGCTCGCGGTACATTCACAGAATCAGAAATCCAAGAATTTGTTGATGATTTTGTCCTTAAACTCCGTACTGTAAAATTTGCTCGTACTAAAGCTTATGATGCCCTTTACTCAGGTGACCCAACCTTTATCACAACTTCAATGGCAGGTATGGGAGCTGATGGACGTCATCGTGTTACCAAAATGGACTATCGTTTCTTAAATACACTTGACAATATCGGTAACTCACCAGAACCAAACTTAACTGTTCTTTGGTCAGACCAATTACCATATGCTTTCCGTCGCTACTGTATGTCAATGAGTCATAAACACTCTTCAATCCAATATGAAGGTGTATCAACAATGGCTAAAGAAGGCTACGGTGAAATGTCATGTATTTCATGTTGTGTATCTCCACTTGATCCAGAAAACGAAGACAAACGTCACAACCTTCAATATTTTGGTGCTCGTGTTAACGTTATGAAAGCACTTCTTACTGGTCTTAACGGTGGTTATGATGATGTTCATAAAGATTACAAAGTATTTGACATCGACCCAATTCGTGACGAAGTACTCAACTTTGACACTGTAAAAGCTAACTTTGAAAAATCTCTTGACTGGTTGACTGATACTTATGTTGATGCGATGAATATCATCCACTACATGACTGATAAATACAACTATGAAGCTGTACAAATGGCATTCTTACCTTCACATGTACGTGCTAATATGGGATTTGGTATCTGTGGTTTTGCAAATACTGTCGATTCATTATCTGCGATTAAATACGCTACTGTTAAACCAATCCGTGACGAAGATGGTTACATCTACGACTACGAAACAGTTGGTGACTTCCCACGTTATGGTGAAGATGATGATCGTGTTGACTCAATCGCTGAATGGTTACTTGAAGCCTTCCATGGACGCCTTGCTAAACACAAACTTTATAAAGATGCTGAAGCAACTGTTTCTCTTCTTACAATCACATCAAACGTTGCTTACTCTAAACAAACTGGTAACTCACCGGTACATAAAGGAGTATATCTCAATGAAGATGGTAGTGTAAACCTTTCTAAAGTAGAATTCTTCTCACCAGGCGCTAACCCTTCTAACAAAGCTAAAGGTGGCTGGTTACAAAACTTGAATTCACTTTCTAAACTTGATTTCGCTCATGCAAATGATGGTATTTCATTGACAACTCAAGTTTCTCCACGCGCTCTTGGTAAAACATTTGATGAACAAGTTGATAACTTGGTAACAGTCCTTGATGGTTACTTTGAAAACGGTGGTCAACACGTTAACTTGAATGTCATGGACCTTAAAGATGTCTATGACAAGATTATGAATGGTGAAGATGTTATCGTTCGTATCTCAGGTTACTGTGTCAATACTAAATATCTAACTCCTGAGCAAAAAACTGAGTTAACACAACGTGTCTTCCATGAAGTACTTTCAATGGACGATGCATTAACTAAC

SEQ ID NO: 7862 - protein, 770 aa, Streptococcus agalactiae
MATVKTNTDIFEQAWEGFKGVDWKEKASIARFVQANYAPYDGDESFLAGATERSLHIKKVIEETKAHYEETRFPMDTRVASISELPAGFIDKDSELIFGIQNDELFKLNFMPKGGIRMAETTLKENGYEPDPAVHEIFTKYATTVNDGIFRAYTSNIRRARHAHTVTGLPDAYSRGRIIGVYARLAVYGADYLMQEKVNDWNALNDIDEESIRLREEINLQYQALGEVVKLGDLYGVDVRKPAMNTKEAIQWVNIAFMAVCRVINGAATSLGRVPIVLDIFAERDLARGTFTESEIQEFVDDFVLKLRTVKFARTKAYDALYSGDPTFITTSMAGMGADGRHRVTKMDYRFLNTLDNIGNSPEPNLTVLWSDQLPYAFRRYCMSMSHKHSSIQYEGVSTMAKEGYGEMSCISCCVSPLDPENEDKRHNLQYFGARVNVMKALLTGLNGGYDDVHKDYKVFDIDPIRDEVLNFDTVKANFEKSLDWLTDTYVDAMNIIHYMTDKYNYEAVQMAFLPSHVRANMGFGICGFANTVDSLSAIKYATVKPIRDEDGYIYDYETVGDFPRYGEDDDRVDSIAEWLLEAFHGRLAKHKLYKDAEATVSLLTITSNVAYSKQTGNSPVHKGVYLNEDGSVNLSKVEFFSPGANPSNKAKGGWLQNLNSLSKLDFAHANDGISLTTQVSPRALGKTFDEQVDNLVTVLDGYFENGGQHVNLNVMDLKDVYDKIMNGEDVIVRISGYCVNTKYLTPEQKTELTQRVFHEVLSMDDALTN

SEQ ID NO: 7863 - protein, 372 aa, Streptococcus agalactiae
ATGTTAAATCACAAATTTCTTCAAGTTCTAAAGTATGAGGGTGTCGTTTCGATAACAAGCTGGACTGAATTAGCTCCTCACGTTACAAACACTTGGAATAGTTACCTGACTATTACAGATGACCAGCGTATCTTAGCTCCTGCAGCAGGAATGACTCATCTTGAAAATGATCTCAATAATAATTCTAAAATTATTATGACTCTGGGCAGCCGTGAAGTCGAGGGTCGTGATGGTTATCAAGGTACAGGCTTTAGAATTGAAGGAACTGCTAAGCTATTAGAAGCAGGAAGCGATTTTGAAATTGTTAAAAAAAAATACCCTTTTCTGCGTAAAGTATTGGAAGTAACTCCCATAAATGTTATCCAACTTTTA

SEQ ID NO: 7864 - protein, 124 aa, Streptococcus agalactiae
MLNHKFLQVLKYEGVVSITSWTELAPHVTNTWNSYLTITDDQRILAPAAGMTHLENDLNNNSKIIMTLGSREVEGRDGYQGTGFRIEGTAKLLEAGSDFEIVKKKYPFLRKVLEVTPINVIQLL

SEQ ID NO: 7865 - protein, 942 aa, Streptococcus agalactiae
TTGGATTTCAAAAGAATGATTAAAACTAATACCGTTTTAGAACTCATTAAAGAGCAAATCAAAGATAATCTTTATCATGGTGCAAGCTTAGCTATTTATGAAAATGGAGAGTGGCACGAACATTACTTGGGGACAATTGATGGCAATGAGAAAGTTAAAGCGGGATTGGTCTATGATCTAGCCAGTGTATCAAAAGTTGTCGGCGTGGGAACTTTACTAGCAAAGTTAGTTTATCAAGGGACTATTGATATTGATAAGCCATTAAGGTATTATTACCCTACGTTTCATCATCAGACGTTAACTGTAAGGCAACTAGCTACACATAGCAGTGGGATTGATCCTTTTATTCCAAATCGTGATCAGTTGAATGCTACTCAGCTGAAAGATGCCATTAATCATATCAAGGTTTTGGAAGATAAATCGTTTAAATACACTGATATTAATTTTCTTTTACTTGGTTTTATGTTAGAAGAGGTATTAGGGGATAGTTTGGATAAACTTTTCAAACGTTATATTTTTACTCCTTTTCAGATGAAAGAAACCTCTTTTGGTCCTAGAGTAGAAGCTGTTCCAACTGTAGCTGGTATTAACGATGGTATTGTACATGATCCTAAAGCTAAGGTATTAGGAAAGCATACTGGTTCTGCAGGTTTATTTTCAACTATTGATGATTTACAAAGATTTTCTATTCATTATTTAAAAGATGATTTTGCGAAACCTTTGTGGAATAATTATAGTTTGAGTAAATCAAGATCATTAGCTTGGGATATAGATAAGGATTGGATAAACCATACTGGTTATACTGGTCCTTTTATTGCACTAAATTATCAAAAGCAGGCAGCAGCTATTTTTTTGACAAACAGAACCTTTTCCTATGATGACCGTCCACTTTGGATTAAGAAACGACGACATGTACAAGAGGCGATAACATCGTACTTTGAA

SEQ ID NO: 7866 - protein, 314 aa, Streptococcus agalactiae; identical to SEQ ID NO: 3154

SEQ ID NO: 7867 - protein, 753 aa, Streptococcus agalactiae
ATGACGTTATTTCATTCATTGACATTTAAACACCCAGTATTACGTGTTAATAATAGAGACTTGAATATTGCATTTTATCAGGAGTCTCTTGGATTTAAATTGATAAGTGAAGAAAATGCAATCGCAGTTTTCTCAGCATGGCAGAACAAAGAGGCTAGCTTTATTATTGAGGAATCCCCAACTTATCGTACTCGTGCGGTGAATGGTACTAAGAAGTTAGCAAAGATTATTGTTAAGTCTCAAGATGCAAAAGATATTGAAAAGCTTTTGGCAAATGGTGCGCAAACCACTCAAGTATATCAAGGTCAAAATGGTTATGCCTATGAAACAGTTTCGCCCGAGGGAGACCTTTTCTTACTTCATGCTGAAGATGATTTGTCACAATTAGTAGCAATTGAGCGTCCAGAGTTAGAAAAAAATGATGACACTACAGGTCTATCAAACTTTGTTTTCCAATCTATTAGTTTGAATGTACCTGATGCCGTGAAAGCTGAAGCTTTTTACGATAAAGTATTTGCTGGGAAGTTCCCAATTAATTTATCTTTCAAAGAAGCACAAGGACAAGATTTGCAAATTGCTCCAAATGAAACTTGGGATATTGAGATATTAGAATGCTGTGTTAATGAAGATACTAATTTAAACGACTTGAAATCAACTTTTGAATCATTGGGACTTGATGTTTACCTTGATTCTAAAGAAAAGATTTTAGTCATCTCTGACACTAGTAATATTGAGATTTGGATTTCAAAAGAA

SEQ ID NO: 7868 - protein, 251 aa, Streptococcus agalactiae
MTLFHSLTFKHPVLRVNNRDLNIAFYQESLGFKLISEENAIAVFSAWQNKEASFIIEESPTYRTRAVNGTKKLAKIIVKSQDAKDIEKLLANGAQTTQVYQGQNGYAYETVSPEGDLFLLHAEDDLSQLVAIERPELEKNDDTTGLSNFVFQSISLNVPDAVKAEAFYDKVFAGKFPINLSFKEAQGQDLQIAPNETWDIEILECCVNEDTNLNDLKSTFESLGLDVYLDSKEKILVISDTSNIEIWISKE

SEQ ID NO: 7869 - protein, 957 aa, Streptococcus agalactiae
TTGTGCTCTCAATACCATAAAGTCAAATTGACAGTTTCACTATTTTTTTGTAGACTGGATATTATGAATGAAACACTACTATTACATGGGATTCAGCTTATTCTGATTATCGCCATGATTATCACTTTTTATCAGATTGTTAGACATATTAGGTCTCAAAAAATAAATCCTTTCAAACGATTTTTCACTGGTTTGTGGATCGGTTTTGTAACTGATGCTCTCGATACTCTTGGTATCGGCTCTTTTGCAACAACGACCACATTTTTTAAACTAACTAAGCTTGTTGAAGACGATCGTAAGATACCCGCAACAATGACAGCTGCACACGTACTTCCAGTTTTGTTGCAGTCACTCTGTTTTATTTTTGTTGTAAAAGTAGAGGCTTTAACACTAATAACAATGGCTGGTGCAGCTTTTATTGGGGCTTTTGTTGGAGCTAAAATGACTAAAAATTGGCACGCTCCTACTGTTCAACGTATTCTAGGAACACTGCTCATCACAGCTGCTATTATTATGCTCTATCGTATGATCACTAACCCTGGCGCTGGTATTTCAGATTCAGTGCATGGTCTACACGGCATTTGGTTATTTGTTGGTATCGTCTTCAATTTTATTATTGGTGTATTAATGACTATGGGACTAGGTAATTATGCTCCTGAACTTATCTTCTTCTCCCTAATGGGACTGAGTCCTGCAGTTGCTATGCCTGTCATGATGCTAGATGCAGCTATGATAATGACAGCTTCTAGTACACAATTTATCAAGAGTGGTCGTGTTAATTGGAACGGCTTTGCCGGTCTGGTTACTGGGGGAATATTAGGCGTTATTGTCGCTGTTCTCTTCTTAACTAACCTTGACCTTAACAGCTTGAAAACACTGGTTGTAGGTATTGTTTTATTTACTGGAGCAATGTTAATACGTTCTTCCTTTAAAAAAACTATGCCCAAAAGTCATCAT

SEQ ID NO: 7870 - protein, 319 aa, Streptococcus agalactiae
MCSQYHKVKLTVSLFFCRLDIMNETLLLHGIQLILIIAMIITFYQIVRHIRSQKINPFKRFFTGLWIGFVTDALDTLGIGSFATTTTFFKLTKLVEDDRKIPATMTAAHVLPVLLQSLCFIFVVKVEALTLITMAGAAFIGAFVGAKMTKNWHAPTVQRILGTLLITAAIIMLYRMITNPGAGISDSVHGLHGIWLFVGIVFNFIIGVLMTMGLGNYAPELIFFSLMGLSPAVAMPVMMLDAAMIMTASSTQFIKSGRVNWNGFAGLVTGGILGVIVAVLFLTNLDLNSLKTLVVGIVLFTGAMLIRSSFKKTMPKSHH

SEQ ID NO: 7871 - protein, 825 aa, Streptococcus agalactiae
GTGAAGTATATCACAGAATTTATCGCAACCGCTTTTCTTATCATCTTAGGAAATGGGGCTGTAGCTAACGTTGACTTAAAAGGCACAAAAGGAAATAATTCAGGTTGGATTATTATTGCAATTGGTTATGGTTTAGGTGTTATGATGCCAGCGCTTATGTTTGGTAATGTCTCTGGAAACCATATTAACCCAGCTTTCACACTTGGATTGGCATTTTCAGGTCTTTTCCCTTGGGCACACGTTGGACAATACATTCTTGCACAAATTTTGGGAGCAATGTTTGGACAGTTAGTTGTCGTTATGGTTTATCAACCTTACTTTGTTAAGACAGAAAATCCAAATCATGTTCTTGGATCATTTTCAACTATTTCTGCATTAGATGATGGACAGAAATCAAGTCGTAAAGCGGCTTACATTAATGGTTTCTTAAATGAATTCGTTGGTTCTTTTGTTCTTTTCTTTGGAGCTTTGGCTTTAACGAAGAACTATTTCGGTGTAGAACTTGTTGGTAAACTTGTTCAAGCTGGTTATGACCAAACGACAGCAGCGACAAGGATTTCACCATACGTAACTGGTTCACTTGCTGTAGCTCACTTAGGTATTGGTTTCTTGGTAATGACTCTAGTTGCTTCTTTAGGTGGACCGACTGGACCTGCATTGAACCCTGCGCGTGACCTTGGTCCACGTATTGTTCACCGCTTATTACCAAAACAAATTCTTGGACAAGCTAAAGAAGATTCAAAATGGTGGTATGCATGGGTGCCAGTTTTAGCACCAATCGTAGCAAGTATACTCGCTGTAGCCTTGTTCAAACTATTATATCTT

SEQ ID NO: 7872 - protein, 275 aa, Streptococcus agalactiae; identical to SEQ ID NO: 3160

SEQ ID NO: 7873 - protein, 450 aa, Streptococcus agalactiae
ATGACACAAAAATATGAGCGTATTCTTATTGCTATCGATGGGTCTTACGAGTCAGAATTGGCGGTAGAAAAAGGGATAAATGTTGCTCTTCGTAATGATGCTGAATTACTGCTAACGCATGTTATAGATGCTCACGCTTACCAAAGTGAGGGAGTCTTTAGTGACTATGTTTTTGATAGGCAAGAACAAGAGTCAGCAGATGTGCTAGCCTATTTTGAGAAATTGGCACACTCAAAAGGCCTTACAAAGATCAAAAAAATTACTGAAATCGGAAATCCTAAGACTCTTTTGGCAAAGGATATCCCCATAAGGGAAAAAGCAGATTTAATTATGGTAGGCGCAACAGGATTAAACACTTTTGAAAGACTATTGATCGGCTCAACTTCAGAATACATTTTACGTCATTCGAAAGTTGATATGCTAGTCGTTCGTGATAGTAAGAAAACCTTA

SEQ ID NO: 7874 - protein, 150 aa, Streptococcus agalactiae; identical to SEQ ID NO: 3164

SEQ ID NO: 7875 - protein, 1200 aa, Streptococcus agalactiae
TTGGAAGACAAATTATTCAACAAACATTTTATAGGCATTACTATTTTAAACTTTATTGTTTATATGGTCTATTATTTGTTTACCGTTATCATAGCTTTTATTGCGACTAAAGAGTTAGGTGTTAGCACTAGTCAAGCGGGATTAGCAACGGGGATTTATATTGTAGGGACTTTGATTGCTCGTCTTATATTTGGTAAGCAATTAGAAGTTCTAGGACGTAAGTTAGTTTTACGTGGAGGGGCTATTTTTTACTTACTAACAACTTTAGCTTATTTTTATATGCCAAGTATCGGAGTAATGTATTTAGTTCGTTTCCTAAATGGTTTTGGTTATGGTGTCGTGTCAACAGCAACTAATACTATTGTAACAGCCTATATACCAGCTGATAAAAGAGGTGAAGGGATTAATTTTTACGGTCTATCAACAAGTTTAGCCGCAGCTATTGGTCCTTTTGTAGGAACATTTATGCTAGACAACCTTCATATTAACTTTAAAATGGTTATTGTATTATGTAGTATTTTAATTGCGATTGTAGTGTTGGGAGCATTTGTTTTCCCAGTCAAAAATATTACTTTAAATCCAGAACAGTTAGCTAAATCAAAATCATGGACTATTGATAGTTTCATTGAGAAAAAAGCAATCTTTATCACAATTATTGCATTTTTGATGGGTATCTCCTATGCTTCCGTGTTAGGTTTCCAAAAATTATATACAACAGAAATTAATTTGATGACAGTAGGAGCTTATTTCTTTATTGTTTATGCACTTGTCATCACTTTAACCAGACCATCTATGGGAAGATTAATGGACGCTAAGGGAGATAAGTGGGTGCTTTATCCAAGTTATCTGTTCTTAACTTTGGGACTTGCTTTATTAGGGAGTGCTATGGGAAGTGTTACCTACCTTCTATCAGGTGCTTTGATTGGTTTTGGTTATGGCACCTTTATGTCTTGTGGCCAAGCAGCATCAATCAAAGGTGTTGAGGAACATCGTTTCAATACAGCCATGTCAACTTACATGATAGGTCTTGATTTAGGGTTAGGTGCTGGACCTTACATTTTGGGACTTGTTAAAGATGGTTTTCTTGGAGCTGGTGTGCAATCCTTTAGGGAATTATTCTGGATAGCAGCGATTATTCCTGTTGTTTGTGGTATTCTATATTTCTTAAAATCATCTCGACAAGTTGAAACTAAAACTATA

SEQ ID NO: 7876 - protein, 400 aa, Streptococcus agalactiae
MEDKLFNKHFIGITILNFIVYMVYYLFTVIIAFIATKELGVSTSQAGLATGIYIVGTLIARLIFGKQLEVLGRKLVLRGGAIFYLLTTLAYFYMPSIGVMYLVRFLNGFGYGVVSTATNTIVTAYIPADKRGEGINFYGLSTSLAAAIGPFVGTFMLDNLHINFKMVIVLCSILIAIVVLGAFVFPVKNITLNPEQLAKSKSWTIDSFIEKKAIFITIIAFLMGISYASVLGFQKLYTTEINLMTVGAYFFIVYALVITLTRPSMGRLMDAKGDKWVLYPSYLFLTLGLALLGSAMGSVTYLLSGALIGFGYGTFMSCGQAASIKGVEEHRFNTAMSTYMIGLDLGLGAGPYILGLVKDGFLGAGVQSFRELFWIAAIIPVVCGILYFLKSSRQVETKTI

SEQ ID NO: 7877 - protein, 657 aa, Streptococcus agalactiae
ATGAATCATCAAATTTTACAAAATTACATTAATAGTCATAATCTTCCAATTATCGAAAAAGACTACCATAAATACCTTACATTTGAAAGTTTAGAAGAAGACTATACTTATATCCTAAAAGATGGTATTGTTAAACAAAGTGTTCTCTCTAAATATGGTACTGAGTTCAATCTGCGTTATGTGACAGGCTTAGAAATCACTTCTATCCTAAATACAGACTACTCCCAACACATGGGAGAACCTTACAACGTTCGAATCGAATCCGAAACTGCCCACTTTTACAAAGTACGTCGCTCTACCTTCCTAAAAGATATCAATAATGATATTGAACTGCAAGGATATGTGAAAGATTTCTATCATAACCGCCTTGAAAAATCTATGAAAAAAATGCAATGTATGCTCACTAATGGTCGAATTGGTGCTATCTCCACACAATTATATGACCTCAGTAAGATGTTTGGTGAAGAACGAGATAACGGTGATATCTATATTAATTTTGTTATCACGAACGAAGAACTTGGTAAATTTTGCGGTATATCCACAGGAAGTAGCGTGAGCCGCATTTTGAAACAACTAAAAGACGATCATATTATTCGTATTGAAAAACAACATATCATTATTACAAATGTTGAGAAATTAAAAGATCATATTGTATTT

SEQ ID NO: 7878 - protein, 219 aa, Streptococcus agalactiae; identical to SEQ ID NO: 3170

SEQ ID NO: 7879 - protein, 2282 aa, Streptococcus agalactiae
ATGCGTTATAATCAATTCAGCTACATTCCAACTAAACCTAACGAAGCTTTTGAAGAGCTCAAAGGACTAGGTTTTCCATTAAACAAAAAGAATTCTGATAAAGCTAATTTGGAAGCTTTTCTCAGACATTCTTTTTTAAATCAAACTGATACTGATTACGCTCTTAGTCTCCTTATCGTTGATGCAAAAACCGATGCTCTAACCTTTTTTAAATCAAATAGTGACTTAACACTAGAAAATTTACAATGGATTTATTTACAGTTATTAGGCTTTGTCCCCTTTGTAGACTTTAAAGACCCTAAAGCTTTCTTACAAGATATTAACTTCCCAGTCTCATATGACAATATTTTTCAAAGTCTACATCACTTACTCGCCTGTCGTGGAAAATCTGGCAATACATTAATCGACCAATTAGTTGCTGATGGTTTACTTCATGCAGATAATCACTACCATTTTTTCAATGGGAAGTCTCTGGCCACTTTCAATACTAACCAATTGATTCGCGAAGTTGTCTATGTTGAAATATCCTTAGATACTATGTCTAGTGGTGAACATGATTTAGTAAAAGTTAACATTATCAGACCCACTACCGAGCATACTATCCCCACGATGATGACAGCTAGCCCCTATCATCAAGGTATCAATGATCCTGCCGCAGACCAAAAAACATACCAAATGGAGGGTGCGCTAGCAGTTAAACAGCCTAAACACATACAAGTTGACACAAAACCATTTAAAGAAGAAGTAAAACATCCTTCAAAATTACCCATCAGCCCTGCAACTGAAAGCTTCACACACATTGACAGTTATAGTCTCAATGACTATTTTCTTTCTCGTGGTTTTGCTAATATATACGTTTCAGGTGTGGGTACTGCTGGCTCTACGGGTTTCATGACCAGTGGGGATTACCAACAAATACAAAGCTTTAAAGCAGTCATTGATTGGTTAAATGGTAAGGTTACTGCATTCACAAGTCATAAACGAGATAAACAAGTCAAGGCTGATTGGTCAAACGGCCTTGTAGCAACCACAGGTAAATCTTATCTCGGTACCATGTCAACTGGTTTAGCAACAACTGGCGTTGAGGGGCTGAAAGTCATTATCGCTGAAGCCGCAATCTCCACATGGTATGATTATTATCGAGAAAATGGGCTTGTGTGTAGTCCAGGCGGCTACCCCGGTGAAGATTTAGACGTTTTAACAGAATTAACATACTCACGAAACCTCTTAGCTGGTGATTACATCAAAAACAACGATTGCTATCAAGCATTGTTAAATGAACAATCAAAAGCAATTGACCGTCAAAGTGGGGATTACAACCAATACTGGCATGACCGTAATTACCTAACTCACGTCAATAATGTCAAAAGTCGAGTAGTTTACACTCATGGACTACAGGATTGGAATGTTAAGCCAAGACATGTCTACAAAGTTTTCAATGCATTGCCTCAAACCATCAAAAAACACCTTTTTTACATCAAGGTCAACATGTGTATATGCATAATTGGCAGTCGATTGATTTTCGTGAAAGCATGAATGCCTTACTAAGCCAAGAACTACTTGGCATTGACAATCATTTCCAATTAGAAGAGGTCATTTGGCAAGATAATACTACTGAGCAAACTTGGCAAGTTTTAGATGCTTTCGGAGGAAACCATCAAGAGCAAATTGGTTTAGGTGATAGTAAAAAACTTATTGATAACCATTATGACAAAGAAGCCTTTGATACTTATTGTAAAGACTTCAATGTGTTCAAAAATGATCTTTTCAAGGGAAATAATAAAACCAATCAAATCACTATTAATCTTCCTCTAAAGAAAAATTATCTCCTGAATGGACAGTGCAAACTCCATCTACGTGTTAAAACTAGTGACAAAAAGGCCATTTTATCAGCCCAAATCTTAGACTATGGTCCTAAAAAACGATTCAAAGATACACCAACCATCAAATTCTTAAACAGCCTTGATAATGGTAAAAATTTTGCCAGAGAAGCTTTACGTGAACTCCCGTTTACTAAAGATCATTATCGTGTCATCAGTAAAGGTGTCTTGAACCTTCAAAATCGTACAGACTTACTTACAATTGAGGCTATCGAGCCAGAACAATGGTTTGATATCGAGTTTAGCCTCCAACCAAGTATATATCAATTGAGTAAAGGTGATAATCTAAGGATTATCCTTTATACAACTGATTTTGAACATACCATTCGAGATAATGCTAGTTACTCTATAACAGTAGATTTGAGTCAATCTTATTTAACTATCCCAACTAATCAAGGAAAT

SEQ ID NO: 7880 - protein, 761 aa, Streptococcus agalactiae
  VARIANT 492: Xaa = Any Amino Acid
MRYNQFSYIPTKPNEAFEELKGLGFPLNKKNSDKANLEAFLRHSFLNQTDTDYALSLLIVDAKTDALTFFKSNSDLTLENLQWIYLQLLGFVPFVDFKDPKAFLQDINFPVSYDNIFQSLHHLLACRGKSGNTLIDQLVADGLLHADNHYHFFNGKSLATFNTNQLIREVVYVEISLDTMSSGEHDLVKVNIIRPTTEHTIPTMMTASPYHQGINDPAADQKTYQMEGALAVKQPKHIQVDTKPFKEEVKHPSKLPISPATESFTHIDSYSLNDYFLSRGFANIYVSGVGTAGSTGFMTSGDYQQIQSFKAVIDWLNGKVTAFTSHKRDKQVKADWSNGLVATTGKSYLGTMSTGLATTGVEGLKVIIAEAAISTWYDYYRENGLVCSPGGYPGEDLDVLTELTYSRNLLAGDYIKNNDCYQALLNEQSKAIDRQSGDYNQYWHDRNYLTHVNNVKSRVVYTHGLQDWNVKPRHVYKVFNALPQTIKKHLFXHQGQHVYMHNWQSIDFRESMNALLSQELLGIDNHFQLEEVIWQDNTTEQTWQVLDAFGGNHQEQIGLGDSKKLIDNHYDKEAFDTYCKDFNVFKNDLFKGNNKTNQITINLPLKKNYLLNGQCKLHLRVKTSDKKAILSAQILDYGPKKRFKDTPTIKFLNSLDNGKNFAREALRELPFTKDHYRVISKGVLNLQNRTDLLTIEAIEPEQWFDIEFSLQPSIYQLSKGDNLRIILYTTDFEHTIRDNASYSITVDLSQSYLTIPTNQGN

SEQ ID NO: 7881 - protein, 357 aa, Streptococcus agalactiae
ATGAAACTTCTTACTAAAGAACGGTTTGATGATTCTCAACACTTTTGGTACCAGATCAATTTATTACAAGAGAGTAACTTCGGAGCAGTTTTTGACCATGATAATAAAAACATTCCACAGGTTGTTGCAACTATTGTTGATGATTTACAAGGTTCCGGAAGTTCGAATCATTTCTGGTATTTTGGCAATACTACTGATACTTCCATCCTTATGATTGCTCATTTAAATCGAAAATTCTATATTCAGGTTAATTTAAAGGACTTTGACTTTGCACTCAATTTAATAGCTATAAATAATTGGAAGAGTCTCCTCCAAACTCAACTTGAAGCTCTAAACGATACCCTAGCAATATTTCAA

SEQ ID NO: 7882 - protein, 119 aa, Streptococcus agalactiae
MKLLTKERFDDSQHFWYQINLLQESNFGAVFDHDNKNIPQVVATIVDDLQGSGSSNHFWYFGNTTDTSILMIAHLNRKFYIQVNLKDFDFALNLIAINNWKSLLQTQLEALNDTLAIFQ

SEQ ID NO: 7883 - protein, 978 aa, Streptococcus agalactiae
ATGTCATCTTATTGGAATAACTATCCTGAACTTAAAAAAAATATTGATGAAACCAATCAACTAATTCAAGAAAGAATACAGGTCAGAAATAAAGATATTGAAGCGGCGCTAAGCCAACTCACAGCTGCGGGAGGAAAACAGCTCAGACCAGCATTCTTTTACCTTTTTTCTCAACTTGGTAATAAGGAGAATCAAGATACTCAGCAACTAAAGAAAATCGCTGCTTCTTTAGAAATCCTTCACGTTGCTACATTAATCCATGATGATGTCATTGATGACTCACCACTAAGACGTGGAAATATGACCATTCAAAGCAAGTTTGGCAAAGACATCGCAGTTTATACTGGGGATTTACTTTTCACAGTCTTTTTCGATCTTATTTTAGAATCTATGGCTGATACACCATTTATGAGGATTAATGCAAAATCTATGCGTAAAATTCTCATGGGAGAATTGGACCAGATGCACCTTCGTTACAATCAACAACAAGGTATCCATCACTATTTACGTGCGATTTCAGGTAAGACAGCCGAACTCTTTAAATTAGCTAGCAAAGAAGGAGCTTACTTTGGTGGTGCAGAGAAGGAGGTTGTTCGTCTAGCAGGCCATATCGGCTTTAACATTGGTATGACATTCCAAATTTTGGATGATATCCTGGATTATACTGCAGATAAAAAAACATTTAATAAGCCTGTCTTAGAGGATTTAACACAAGGCGTTTACAGCCTTCCTCTACTTCTTGCCATTGAAGAAAATCCTGATATTTTCAAACCTATTTTAGATAAAAAAACAGATATGGCTACTGAAGACATGGAAAAAATTGCTTATCTCGTCGTTTCCCATAGAGGTGTTGACAAAGCTCGCCATCTAGCTCGTAAATTTACTGAGAAAGCTATTAGTGACATAAATAAGCTACCCCAGAACTCTGCAAAAAAACAGTTGCTACAATTAACTAATTACCTTTTAAAACGCAAAATT

SEQ ID NO: 7884 - protein, 326 aa, Streptococcus agalactiae
MSSYWNNYPELKKNIDETNQLIQERIQVRNKDIEAALSQLTAAGGKQLRPAFFYLFSQLGNKENQDTQQLKKIAASLEILHVATLIHDDVIDDSPLRRGNMTIQSKFGKDIAVYTGDLLFTVFFDLILESMADTPFMRINAKSMRKILMGELDQMHLRYNQQQGIHHYLRAISGKTAELFKLASKEGAYFGGAEKEVVRLAGHIGFNIGMTFQILDDILDYTADKKTFNKPVLEDLTQGVYSLPLLLAIEENPDIFKPILDKKTDMATEDMEKIAYLVVSHRGVDKARHLARKFTEKAISDINKLPQNSAKKQLLQLTNYLLKRKI

SEQ ID NO: 7885 - protein, 486 aa, Streptococcus agalactiae
GTGATACAACAAGCGCCCTACCTTTTTAATACAACCCTGCTAAATAACATTCGCATTGGAAACCAAGATGCTAGTGAAGAAGATGTATGGAAAGTTCTTGAACGAGTTGGATTGAAAGAGATGGTCACTGATTTATCAGATGGTCTCTATACAATGGTTGATGAAGCTGGACTTAGGTTTTCAGGTGGCGAAAGGCATAGAATTGCTTTGGCTAGAATCTTACTAAAAGATGTCCCAATTGTTATCTTAGATGAGCCAACTGTTGGACTTGATCCTATTACTGAACAAGCCTTACTAAGGGTATTTATGAAAGAATTGGAAGGTAAGACCTTAGTTTGGATTACACATCACTTAAAAGGTATTGAACATGCTGATCGTATCTTATTTATAGAAAATGGGCAATTAGAGTTGGAAGGTTCTCCTCAAGAATTGTCTCAAAGTAGTCAACGTTACCGTCAGCTGAAAGCCGCTGATGATGGTGATCTA

SEQ ID NO: 7886 - protein, 162 aa, Streptococcus agalactiae
MIQQAPYLFNTTLLNNIRIGNQDASEEDVWKVLERVGLKEMVTDLSDGLYTMVDEAGLRFSGGERHRIALARILLKDVPIVILDEPTVGLDPITEQALLRVFMKELEGKTLVWITHHLKGIEHADRILFIENGQLELEGSPQELSQSSQRYRQLKAADDGDL

SEQ ID NO: 7887 - protein, 498 aa, Streptococcus agalactiae
ATGCTACGAGCATTAAAAGAAGATTTTTTTCTAACCTTAACCTCTTTAAAAAATCAATTTTGGGTTTACATTGGAACTGGTATCTTAATCCAAACTTTAGTTGCTTATTTAGTAAAAGGAATTCTGAGTTTTATCTTTCGTCGTAGAAAATCCCCACAGTTAATAATTCTTTTAAATTTTTTACTAAAAATAGTCACAGGAATGATGTACATACTCTATCCATCTTTTCTGATATTTACTCTTTGGCAAGGGATGACATTTCAATTATGGTTAAGGCTATTAATTATCCCTGCTGTTGGCTTTATAGCTTTGTCTTACATTAGGAAACGCCTTGATTTTCCACGACCATATGAAAAATGGAATATTAAACCTTTAATTTATAAGGATACTGAGGGAAGGTCAATGCCTAGCAGACATGTTTTTTCAGCTACGATGATTAGTATGTGTTTGTTACGATATTATGTTTACTTTGGAATAGTTTGTTNNNNNTTAATTAAT

SEQ ID NO: 7888 - protein, 166 aa, Streptococcus agalactiae
  VARIANT 162, 163: Xaa = Any Amino Acid
MLRALKEDFFLTLTSLKNQFWVYIGTGILIQTLVAYLVKGILSFIFRRRKSPQLIILLNFLLKIVTGMMYILYPSFLIFTLWQGMTFQLWLRLLIIPAVGFIALSYIRKRLDFPRPYEKWNIKPLIYKDTEGRSMPSRHVFSATMISMCLLRYYVYFGIVCXXLIN

SEQ ID NO: 7889 - protein, 741 aa, Streptococcus agalactiae
ATGGAACAGATTTTTGTGGAACATCACTCATTTGGCATAGTCAGCCTAAGTTCAATCTCTGAGAGTTTAAAACGCTTAGAGCTTTCAGCTGATCTTAATATTCAAGAACTTTTGGTTATCAAAAAAGTTTTACAGAGTTCTTCGGATATGATTCACTTTTATTCTGATTTGGATAATGTTTCTTTCCAATCTTTGGATCGTTTGTTTGAAAATTTGGAACAATTCCCTAATCTGCAAGGGTCTTTTCAAGCTATCAATGATGGTGGTTTTTTAGAACATTTTGCGAGTCCAGAATTAGAGCGTATCCGTCGTCAATTAACAAACAGTGAACGACGGGTTCGTCAGATTTTACAGGATATGCTTAAGGAAAAAGCAGAGCTTTTATCAGAGAATCTAATCGCTAGTCGTAGTGGACGAAGTGTCCTACCAGTAAAAAATACTTATCGGAATCGTATTTCTGGTGTGGTTCATGACATCTCTTCTTCAGGAAGTACTGTTTATATTGAGCCTCGTGCTGTAGTTACACTAAACGAAGAGATAACGCAGCTTAGAGCTGACGAACGTCATGAAGAAAGTCGTATTTTACACGCATTTTCAGACTTGTTAAGACCCCATGTCGCCACTATTAGAAATAATGCATGGATTCTTGGGCATCTTGATTTTGTAAGGGCTAAATATCTTTTTATGTCTGATAATAAGGCGACGATACCTGAGATTTCTAAGAAAAGCACGTTANNNNNT

SEQ ID NO: 7890 - protein, 247 aa, Streptococcus agalactiae
  VARIANT 246, 247: Xaa = Any Amino Acid
MEQIFVEHHSFGIVSLSSISESLKRLELSADLNIQELLVIKKVLQSSSDMIHFYSDLDNVSFQSLDRLFENLEQFPNLQGSFQAINDGGFLEHFASPELERIRRQLTNSERRVRQILQDMLKEKAELLSENLIASRSGRSVLPVKNTYRNRISGVVHDISSSGSTVYIEPRAVVTLNEEITQLRADERHEESRILHAFSDLLRPHVATIRNNAWILGHLDFVRAKYLFMSDNKATIPEISKKSTLXX

SEQ ID NO: 7891 - protein, 165 aa, Streptococcus agalactiae
GTGGCTAACGAAGAAGAAGGCGGCCAAAAGAAAAAAATTGTTAAACGAGTCATTGGTATGCCACGTGATGTCATCAAATATAAAAATGACACCTTATCTATTAACAATAAAAAAACAGAAGAACCTTACCTCAAGGAATATACTATATTATTTAANNNNNTTAAT

SEQ ID NO: 7892 - protein, 55 aa, Streptococcus agalactiae
  VARIANT 52, 53, 54: Xaa = Any Amino Acid
MANEEEGGQKKKIVKRVIGMPRDVIKYKNDTLSINNKKTEEPYLKEYTILFXXXN

SEQ ID NO: 7893 - protein, 1674 aa, Streptococcus agalactiae
ATGTTTAAAATCCCTTTGTTTAAAGAATTAAAGACAGATCAATGGGTAAAACCATTTTTCAAACAATATAAAGTTTCCTTAGTAATTGCTCTTTTCCTTGGTTTTATGACTTTCTTTTCTGCCAGTGCTCTTATGTTTAATTCGGGCTATCTGATTAGTAAGTCAGCTTCACTACCGAGTAATATTCTTCTAGTATATGTTCCAATTGTACTAACACGTGCTTTTGGTATTGGACGTCCTGTTTTTCGTTATATAGAACGCCTAACGAGTCACAATTGGGTATTACGAATGACTTCACAACTGCGCTTGAAGCTTTACCATTCCTTAGAAAGCAATGCTATCTTTATGAAGCGTGATTTTCGTTTAGGAGATGTTATGGGGCTTTTAGCGGAGGATATTAATTATTTGCAAAATTTGTATCTTAGGACAATATTTCCAACGATTATAGCGTGGTTATTATATAGCTTTATTATTATTGCAACAGGCTTCTTTTCTCTATGGTTTGCTTTAATGATGTTGCTTTATTTAGCTATTATGATTTTTCTTTTTCCACTTTGGTCGATTTTAGCTAATGGTGCTCGTCAGACTCGTGAAAAAGAATTAAAAAATCATCTTTATACTGATTTGACGGATAATGTCTTAGGTATTTCAGACTGGATTTTTAGTCAACGTGGTCAAGAGTACGTCGCCTTGCATGAACGTTCGGAAAGTGAACTAATGGCTGTTCAGAAAAAAATTCGTTCCTTTAATAATCGTAGAGCTCTTATTGTGGAATTAGTTTTTGGCTTTCTAGCTATTTTGGTTATTATTTGGGCTAGTAATCAGTTTATTGGTCACAGAGGTGGCGAAGCTAACTGGATTGCAGCATTTGTTCTAACAGTATTTCCCTTGTCAGAGGCATTTGCTGGTTTGTCTGCTGCTGCTCAAGAAACAAATAAATATTCTGATTCAATTCATCGTCTTAATGAATTATCAGAAACGTATTTTGAAACAACTCAAAATCAATTGCCTAATAAGCCATATGATTTTTCCGTCAAGAATTTAAGTTTCCAGTATAAGCCACAAGAGAAATGGGTTTTGCATCATTTAGATTTGGATATTAAAGAAGGAGAAAAAATTGCTATTTTAGGGCGGAGTGGTTCTGGCAAGAGTACCTTAGCTAGTCTACTTCGTGGCGACTTGAAAGCAAGTCAAGGGAAGATTACCCTAGGCGGTGCTGATGTTTCAATAGTTGGTGATTGCATTTCTAACTATATTGGAGTGATACAACAAGCGCCCTACCTTTTTAATACAACCCTGCTAAATAACATTCGCATTGGAAACCAAGATGCTAGTGAAGAAGATGTATGGAAAGTTCTTGAACGAGTTGGATTGAAAGAGATGGTCACTGATTTATCAGATGGTCTCTATACAATGGTTGATGAAGCTGGACTTAGGTTTTCAGGTGGCGAAAGGCATAGAATTGCTTTGGCTAGAATCTTACTAAAAGATGTCCCAATTGTTATCTTAGATGAGCCAACTGTTGGACTTGATCCTATTACTGAACAAGCCTTACTAAGGGTATTTATGAAAGAATTGGAAGGTAAGACCTTAGTTTGGATTACACATCACTTAAAAGGTATTGAACATGCTGATCGTATCTTATTTATAGAAAATGGGCAATTNNNNNTTAAT

SEQ ID NO: 7894 - protein, 558 aa, Streptococcus agalactiae
  VARIANT 555, 556, 557: Xaa = Any Amino Acid
MFKIPLFKELKTDQWVKPFFKQYKVSLVIALFLGFMTFFSASALMFNSGYLISKSASLPSNILLVYVPIVLTRAFGIGRPVFRYIERLTSHNWVLRMTSQLRLKLYHSLESNAIFMKRDFRLGDVMGLLAEDINYLQNLYLRTIFPTIIAWLLYSFIIIATGFFSLWFALMMLLYLAIMIFLFPLWSILANGARQTREKELKNHLYTDLTDNVLGISDWIFSQRGQEYVALHERSESELMAVQKKIRSFNNRRALIVELVFGFLAILVIIWASNQFIGHRGGEANWIAAFVLTVFPLSEAFAGLSAAAQETNKYSDSIHRLNELSETYFETTQNQLPNKPYDFSVKNLSFQYKPQEKWVLHHLDLDIKEGEKIAILGRSGSGKSTLASLLRGDLKASQGKITLGGADVSIVGDCISNYIGVIQQAPYLFNTTLLNNIRIGNQDASEEDVWKVLERVGLKEMVTDLSDGLYTMVDEAGLRFSGGERHRIALARILLKDVPIVILDEPTVGLDPITEQALLRVFMKELEGKTLVWITHHLKGIEHADRILFIENGQXXXN

SEQ ID NO: 7895 - protein, 1716 aa, Streptococcus agalactiae
ATGCTAGATAAAGCGGTTATGCGCTTGTCAGGTATTCATAAGTTGTTAGGATTGCTTGCGGGACTTGATGTTCTTCAAGCAATCTTTATTATCGGACAAGCTTATTATTTGAGTCTTTCTATAACTGGTTTGTGGGAAGGGCAAAAACTTTCTTCTCAAACGGTTTATATTTTGTTATTTATGGTCTCATATTTAGGCCGTCATGTTATTGATTACATCAAAAATAGAAAGCTTGATGACTTTTCAACAGCACAATCTAGTCTTTTGAGACGTCAATTATTAGATAAGTTATTTGATCTAGGTCCTAAAGTCGTTCAAGAACAAGGAACTGGTAATGTTGTTACAATGGCACTAGATGGTGTTTCTTTAGTTGAAAATTATTTACGTTTAGTCTTGAATAAGATGATTAACATGTCTATTATCCCATGGATTATTCTAGCTTATATTTTCTATTTAGATATTGAATCAGGTGCAATTTTACTTATCGTTTTTCCTTTAATTATCATCTTTATGATTATTTTAGGCTATGCGGCTCAAGCTAAAGCAGATAAACAATATGAATCCTATCAAGTGCTTTCTAATCATTTTTTAGATTCATTACGAGGCATTGATACTCTCAAATATTTTGGTCTTAGTAAACGTTATGGTAAAAGCATTTATCAAACAAGTGAATCTTTTCGTAAAGCAACAATGAGTACTTTGAAAATTGGTATTTTATCAACGTTTGCTTTAGACTTTTTTACAACTTTATCCATTGCTATCGTTGCTGTTTTTCTGGGTTTACGATTATTAAATGAGCAGATTTACCTTTTACCGGCTTTAACAATTTTGATTTTATCCCCTGAATACTTTTTACCCGTAAGAGATTTTTCTAGTGATTATCATGCAACGTTAGACGGGAAAAATGCATTTCAAGCGATTCAAAAGGTTCTAAACAAAACTGGTATTAAAGGTGAGCAATTAGTCATAGATGATTGGTCTAAAGAGAGTCATTTGGATTTAGAAAACATTGCTATTGCGTACGACCAAAAACGTGTTGTTGAGGATGTAACCTTACGATTTAGAGGACATCAAAAGGTTGCTTTAGTAGGAGTTAGTGGTTCAGGTAAGTCTAGCTTAATTAACCTTCTGAGTGGTTTTTTAGGGCCTGATAAAGGTTCTTTAAAAGTGGATGGTAGAGAAGTGGTTAACCTTGATCAAGAAGATTGGCATAAACAGATGATCTATATTCCTCAAACTCCTTATGTTTTTGAAATGTCATTACGTGATAATATTACCTTCTATACTCCCAATGCTAGTGACGAAGAGGTGATAAGAGCGATTCATATGGTAGGTTTAGATAGCTTACTAAGCGAGTTACCCGATGGTTTAGAAACGCGTATTGGTAATGGAGCGCGTCCACTTAGTGGAGGACAAGCCCAGCGTATAGCTCTGGCTCGTGCTTTTCTTGATCAAAATCGTCGTATTATGGTTTTTGATGAACCAACTGCTCATTTAGATATTGAAACAGAGTTAGAATTAAAAGAGAAAATGTTGCCACTGATGTCAGATCGTTTAGTTATCTTTGCAACTCATCGTCTTCACTGGTTGAACCAAATGGACGTTATAGTCGTTATGGAGAAGGGGAGAGTTGTAGAAGTAGGCTCTTATCAGGAATTATTAGCTAAAAAAGGATATCTCTATCAACTGAAGCATGCTATGGGAGGAAATAATGTT

SEQ ID NO: 7896 - protein, 572 aa, Streptococcus agalactiae
MLDKAVMRLSGIHKLLGLLAGLDVLQAIFIIGQAYYLSLSITGLWEGQKLSSQTVYILLFMVSYLGRHVIDYIKNRKLDDFSTAQSSLLRRQLLDKLFDLGPKVVQEQGTGNVVTMALDGVSLVENYLRLVLNKMINMSIIPWIILAYIFYLDIESGAILLIVFPLIIIFMIILGYAAQAKADKQYESYQVLSNHFLDSLRGIDTLKYFGLSKRYGKSIYQTSESFRKATMSTLKIGILSTFALDFFTTLSIAIVAVFLGLRLLNEQIYLLPALTILILSPEYFLPVRDFSSDYHATLDGKNAFQAIQKVLNKTGIKGEQLVIDDWSKESHLDLENIAIAYDQKRVVEDVTLRFRGHQKVALVGVSGSGKSSLINLLSGFLGPDKGSLKVDGREVVNLDQEDWHKQMIYIPQTPYVFEMSLRDNITFYTPNASDEEVIRAIHMVGLDSLLSELPDGLETRIGNGARPLSGGQAQRIALARAFLDQNRRIMVFDEPTAHLDIETELELKEKMLPLMSDRLVIFATHRLHWLNQMDVIVVMEKGRVVEVGSYQELLAKKGYLYQLKHAMGGNNV

SEQ ID NO: 7897 - protein, 1017 aa, Streptococcus agalactiae
ATGAGTGCTTTACAATTCTTTTGGTTTTTCCTAATCGGCCTCCTATTTTCAGGATTCTTCTTCCTTGAAGGATTCGACTTTGGGGTTGGGATGGCTGTTCAAACTTTAACACATAATGAGCATGAAAAAGATCAAGTAGTAGAAACCATTGGTCCAGTTTGGGATGGTAATGAAGTTTGGCTTCTTACCGGTGGTGGAGCAATGTTTGCTTCTTTTCCATACTGGTATGCTTCACTATTTAGTGGTTACTATTTGATTCTCCTTACGATTCTCTTTGGATTAATTATTCGTGGTGTTTCCTTCGAATTTAGACATAAAGTTCCTGCAGAGAAAAAGCAGTTTTGGAACTGGACCTTAACAATTGGTTCCGCTATTGTTCCATTCTTCTTTGGGATTATGTTTATAAGTTTGATTCAAGGTATGCCACTTGATGCCAGTGGTAACTTATCAGCTCAATTCAGTGATTACTTTAATATATTCTCGTTGGTGGGTGGAGTTGCAATGGTATTGCTAGCCTATCTTCATGGTTTAAACTACATTGCATTGAAGACAGAAGGGCCGATTAGAGAGCGTGCCCGTAATTATGCTCAGTTGCTTTACTGGGTACTCTATCTTGGTTTAGCCTTGTTTGCAGTTCTCTTGTATTTCAAGACAGATTTCTTTAGCAATCATCCGATAGTTACGACAATTATGGTTTTGGTTATTGTTGTATTAGCTGTATTAGCGCATGCTTCAACTTTTAAAGGAGCAGAGATGACAGCATTTTTAGCGAGTGGTCTCAGTCTTGTTTCAGTGGTTGTTCTGTTGTTCCAAGGTCTATTCCCACGAGTTATGATTTCATCAATTAGCCCTAAATATGATTTGCTGATTCAAAATGCATCCTCAACGCCATATACTTTAAAAGTAATGTCGATTGTCGCAATTACTCTAGTTCCCTTTGTTCTAGCTTATACAGCATGGGCATATTATATCTTTAGAAAACGTATTACCTTGCCAGTGATTGTGACAGGAGAAAAA

SEQ ID NO: 7898 - protein, 339 aa, Streptococcus agalactiae; identical to SEQ ID NO: 3184

SEQ ID NO: 7899 - protein, 1425 aa, Streptococcus agalactiae
ATGACAATTGAAACTTTAGCTCGTTTTCAATTTGCGATGACTACAGTTTTCCACTTTTTCTTTGTACCATTTACAATTGGTACATGCCTAGTGGTTGCTATTATGGAGACAATGTATGTTATCACAAAAAATGAAGAGTATAAAAAATTGACAAAATTTTGGGGTAATATCATGCTCCTTAGTTTTGCAGTTGGTGTTGTGACAGGTATCATTCAAGAGTTCCAATTTGGAATGAACTGGTCAGACTATTCACGTTTCGTAGGTGATATTTTTGGAGCTCCATTGGCTATTGAAGCTTTATTAGCTTTCTTTATGGAATCTACTTTCCTTGGTTTATGGATGTTTACATGGGATAACAAAAAAATTAGTAAAAAATTACATGTGACATTCATTTGGCTAGTGGTTTTTGGCTCATTAATGTCAGCGATGTGGATTCTTACTGCTAATAGCTTCATGCAACATCCTGTTGGTTATGAAGTTGTAAACGGTAGAGCGCAAATGACTGATTTTCTTGCACTTGTAAAAAATCCACAGTTCTTCTATGAATTTACCCATGTTATTTTTGGTGCCATTACGATGGGTGGTACAGTGGTTGCTGGTATGTCAGCCTTCCGCCTCTTAAAATCAGAACAGCTGAAAGATACAACGGTTGAACTTTATAAGAAATCAGTTCGTATTGGTTTAGTAGTAGCACTTCTTGGTTCAATTTCAGTTATGGGAGTTGGGGATTTACAAATGAAAGCCTTGATTCACGATCAACCAATGAAATTTGCTGCTATGGAAGGTGATTATGAAGATTCGGGTGATCCTGCAGCTTGGAGTGTAGTTGCTTGGGCAAATGAAGCAGAACACAAACAAGTTTTTGGGATCAAGATTCCTTATATGTTGAGTATTTTATCTTACGGGAAACCATCTGGTTCTGTGAAAGGTATGGATACAGCTAATAAAGAATTGGTTGCTAAGTATGGTAAAGATAACTACTATCCAATGGTTAACCTACTTTTCTATGGTTTCCGTACAATGGCGGCGATGGGAACAGCTATTATGGGTGTTTCTGTTTTAGGACTCTTTTTAACTCGTAAGAAAAAACCAATTCTTTATAAACACAAATGGATGCTATGGATTGTTGCTTTAACAACCTTTGCACCATTCTTAGCTAATACATTTGGTTGGATTGTGACAGAACAAGGACGATACCCTTGGACTGTCTATGGTCTTTTCAAGATTAAGGACTCTGTCTCTCCAAACGTTTCAGTTGCATCATTATTTGTTTCCAATACTGTGTACTTCTTATTGTTTGGTGGTTTAGCGGTGATGATGATAAGCCTAACAATAAGAGAATTGAAGAAAGGGCCAGAGTATGAAGATGAACATGGACATCATGGTGCATATACTTCAATTGATCCCTTTGAGAAAGGAGCATAC

SEQ ID NO: 7900 - protein, 475 aa, Streptococcus agalactiae
MTIETLARFQFAMTTVFHFFFVPFTIGTCLVVAIMETMYVITKNEEYKKLTKFWGNIMLLSFAVGVVTGIIQEFQFGMNWSDYSRFVGDIFGAPLAIEALLAFFMESTFLGLWMFTWDNKKISKKLHVTFIWLVVFGSLMSAMWILTANSFMQHPVGYEVVNGRAQMTDFLALVKNPQFFYEFTHVIFGAITMGGTVVAGMSAFRLLKSEQLKDTTVELYKKSVRIGLVVALLGSISVMGVGDLQMKALIHDQPMKFAAMEGDYEDSGDPAAWSVVAWANEAEHKQVFGIKIPYMLSILSYGKPSGSVKGMDTANKELVAKYGKDNYYPMVNLLFYGFRTMAAMGTAIMGVSVLGLFLTRKKKPILYKHKWMLWIVALTTFAPFLANTFGWIVTEQGRYPWTVYGLFKIKDSVSPNVSVASLFVSNTVYFLLFGGLAVMMISLTIRELKKGPEYEDEHGHHGAYTSIDPFEKGAY

SEQ ID NO: 7901 - protein, 1206 aa, Streptococcus agalactiae
ATGAAAGAAATCCTAGTTTTAGGTGCTGGTTATGCCGGTTTGAAAGCAGTTCGTAATTTACAAAAACAATCAGGTGATTTTCATATTACCCTTGTTGACATGAATGATTATCACTACGAAGCTACAGAATTACATGAAGTAGCTGCAGGCTCTCAGCCAAAAGAAAAAATTACATTCCCAATTAAGGATGTTATCAACACTAATAAGGTTAACTTCATGCAAGATGAGGTGCTTAAAGTCGATGCTGAAAATAAAACAGTAACAGTTAAAAATAACGGTGAACTCCATTATGATTATGTCGTAGTTGCCTTAGGCTTTGTATCTGAAACTTTTGGCATCAAGGGTGCTATGGAGAATGCTTTGCAGATGACCAATATTTCGCAAGCAGAAAACATCCATAATCACATTGTTAATACAATGAAGTTGTATCGTGAGACAAAAGATGAAAATCTTCTCAAACTCTTAGTATGTGGTGCTGGTTTTACAGGTATTGAGTTAGCCGGAGCTATGGTTGATGAGCGACCAAAATATGCTGCTTTAGCGGGTGTAAAACCTGAACAAATTGAAATTATTTGTGTAGAGGCAGCAACTCGCATCCTACCAATGTTTGATGATGAATTAGCGCAATATGGTGTCAACTTAATTAAGGATTTAGGTATTAATTTGATGCTTGGAAGTATGATTAAGGAGATCAAACCGGGTGAAGTTGTTTATGGTACTAGTAAAGAGGATGAAGAACTCAAATCTATTACCGCAGGTACTATCATTTGGACAACAGGTGTTAGTGGAAGTCCGGTTATGGGAGAATCAGGATTTGATCAACGTCGTGGACGTGTAATGGTCAACAGTGATTTGCGTGATCCAAAATATGATAATGTTTATGTTATCGGTGATGTGTCTGCATTTATGGACACTGAGTCTGGTCGCCCATTCCCAACAACAGCTCAAATTGCAACTCGTATGGGAGCTCATGTTGCTAAAAACCTTTTACATCAAATCAAAGGTGAGGCTACAGAAGACTTTTCGTATAGTCCGCAAGGCACAGTTGCTTCAGTAGGAAATACGCATGGACTTGGTGTTGTTGGAAAAACTAAAATTAAAAAATACCCTGCGTCGGTTATGAAGAAGATTATCATGAACAAATCACTTGTTGATATGGGTGGACTTAAAGAACTTCTAGCTAAGGGACGTTTTGATTTATATCAT

SEQ ID NO: 7902 - protein, 402 aa, Streptococcus agalactiae
MKEILVLGAGYAGLKAVRNLQKQSGDFHITLVDMNDYHYEATELHEVAAGSQPKEKITFPIKDVINTNKVNFMQDEVLKVDAENKTVTVKNNGELHYDYVVVALGFVSETFGIKGAMENALQMTNISQAENIHNHIVNTMKLYRETKDENLLKLLVCGAGFTGIELAGAMVDERPKYAALAGVKPEQIEIICVEAATRILPMFDDELAQYGVNLIKDLGINLMLGSMIKEIKPGEVVYGTSKEDEELKSITAGTIIWTTGVSGSPVMGESGFDQRRGRVMVNSDLRDPKYDNVYVIGDVSAFMDTESGRPFPTTAQIATRMGAHVAKNLLHQIKGEATEDFSYSPQGTVASVGNTHGLGVVGKTKIKKYPASVMKKIIMNKSLVDMGGLKELLAKGRFDLYH

SEQ ID NO: 7903 - protein, 897 aa, Streptococcus agalactiae
ATGACATTACCAATCTTTCTAGAGTTGGTAGAAATGAAAGCCAAAACAGCTAGTGTTTTACCATTTTTGATTGGTTTGTGTTTTAGTGCTTATTACTACAATTCAATAAACCCTGTATATGTCGGTTTATTCTTCGTTGCTATGTTTTTATTCAATATGTTCGTTGACATTTGGAATAATTACAATGATTATCGGAATGCTGTGGATTTGGATTATAAGAATGACACTAACATTATTGGTCGTGAGAACCTATCCCTACGCCAAATAGAAGTTATTATGGCAAGTTTAGTCATTACTTCTAGTGTGATTGGTTTAGTTTTAGTTTCCCAAGTCGGTCTGCCTCTTTTATGGATGGGACTTTTTTGTTTTGGAATTGGTGTTTTATATTCCTTTGGTCCAAGATCTTTATCTAGTCTGCCCTTAGGAGAAGTATTTTCTGGCTTGACAATGGGATTTATGATTAGTTTAATTTGTGTATATCTAAACACTTATCAAAACTTTTCGTGGGATATCCTCAACTTAAGCAAAATTTTCTTGATTTCCTTGCCGAACACCTTATGGATTGCCAACCTAATGTTGGCGAATAATCTGTGCGACAAAGAAGAAGATGAAAAAAATCATCGCTATACTCTTGTACATTATACAGGGATAAGAGGTGGACTCTTGCTGTTTGCTATTTCTAATAGTATAGCTTTATTGGCAATTGTTTTTGAATTTCTTTTTGGACTTGCGCCTGTTACAGTACTCTTGAGTTTGTTATTAATACCATTTATTTATAAGCAGACAAAACTATTGTGGCAAAAACAGGTTAAGAGAGAAACATTTGTTTGTGCGGTACGTATTCTAGCACTGGGATCTGCAACCCAAGTCTTAACGTATCTAATTGGAATCATTTTT

SEQ ID NO: 7904 - protein, 299 aa, Streptococcus agalactiae
MTLPIFLELVEMKAKTASVLPFLIGLCFSAYYYNSINPVYVGLFFVAMFLFNMFVDIWNNYNDYRNAVDLDYKNDTNIIGRENLSLRQIEVIMASLVITSSVIGLVLVSQVGLPLLWMGLFCFGIGVLYSFGPRSLSSLPLGEVFSGLTMGFMISLICVYLNTYQNFSWDILNLSKIFLISLPNTLWIANLMLANNLCDKEEDEKNHRYTLVHYTGIRGGLLLFAISNSIALLAIVFEFLFGLAPVTVLLSLLLIPFIYKQTKLLWQKQVKRETFVCAVRILALGSATQVLTYLIGIIF

SEQ ID NO: 7905 - protein, 762 aa, Streptococcus agalactiae
ATGAAAAAACTTATTACAGAAAAAAAAGTCAACAACGTCTCAACTGTTAACTATTTGAAACTCGGTCTTGTCTCAGCAATGTTTGCTGGAGGAGCATTCGTAGCTCTTGGTTCTACACAAGGTGTTTCAGCTTCAACTTTCACAGCACCGCAAGCAACACATCCAAAAGCAGAACGTCAGTTAACAGATTCAGAAATCTATGAACGTGCCCAAAAACAAGTGTTACCAAAATATATCCAAGGTTCTCTTTCAGGTATCCTTAACCAACATTCAACACTTTACAAACAACAAAACGCAGCAGTGACACCGCAAGTATCAAGCCCCAAAGCAGAACGTCAGTTAACAGATTCAGAACTTTATGAAAGTGCCCAAAAACAAGTATTACCAAAATATATCCAAGGTTCTCTCTCAGGTATCCTTAACCAGCATTCAACACTTTACAAACAACAAAACGCAGCAGTGACACCGCAAGTATCAAGCCCCAAAGCAGAACGTCAGTTAACAGATTCAGAACTTTATGAAAGTGCCCAAAAACAAGTATTACCAAAATATATCCAAGGTTCTCTCTCAGGTATCCTTAACCAACATTCAACACTTTACAAACAACAAAACGCAGCAGTGACACCGCAAGTATCAAGCCCCAAAGCAGAACGTCAGTTAACAGATTCAGAAATCTATGAACGTGCTCAAAAACAAGTATTGCCAAATTATATTCAAGGTTCTCTCTCAGGTATCCTTAACCAACATTCAACTTTGAATGCT

SEQ ID NO: 7906 - protein, 254 aa, Streptococcus agalactiae
MKKLITEKKVNNVSTVNYLKLGLVSAMFAGGAFVALGSTQGVSASTFTAPQATHPKAERQLTDSEIYERAQKQVLPKYIQGSLSGILNQHSTLYKQQNAAVTPQVSSPKAERQLTDSELYESAQKQVLPKYIQGSLSGILNQHSTLYKQQNAAVTPQVSSPKAERQLTDSELYESAQKQVLPKYIQGSLSGILNQHSTLYKQQNAAVTPQVSSPKAERQLTDSEIYERAQKQVLPNYIQGSLSGILNQHSTLNA

SEQ ID NO: 7907 - protein, 297 aa, Streptococcus agalactiae
ATGATGAATATGCAAAATATGATGCGTCAAGCACAAAAGCTTCAAAAACAAATGGAACAAAAGCAAGCTGATTTAGCAGCTAGCCAGTTTACTGGAAAATCTGCTCAAGAGCTCGTTACTGTGACATTTACAGGCGATAAAAAGCTAATTTCAATTGATTACAAAGAAGCTGTGGTAGACCCTGAAGATATTGAAACACTACAAGACATGACAACTCAAGCTATCAATGACGCTTTAAGCCAAGTTGACGATGCTACAAAAAAAATTATGGGAGCATTTGCGGGTAAAATGCCATTC

SEQ ID NO: 7908 - protein, 99 aa, Streptococcus agalactiae; identical to SEQ ID NO: 3196

SEQ ID NO: 7909 - protein, 1188 aa, Streptococcus agalactiae
ATGGTTATGGATAGTCTAATCATAAAACAGTTGATTAAGAGTACATTTGATATACCCTTACAAGTCACTTATCCAAATGGGAATATTGAAACTTATAATGGTAACAATCCCCACGTCAAACTTAAACTAAACAAAAATTTCTCCGTCTCGGAGCTATCAAAAGACCCTTCTATTGTATTGGGTGAAGCTGTTATGGATGGAGATATTGAAATTGATGGTTCTATACAAGAATTAATTTTATCAGCTTACCGCTGTGGAGACAGCTTTCTACGTAATAGTAAATTTAGCAAATTGATTCCTAAACAATTTCATGATAAAAAACACAGTAAATCCGACATTCAAAAGCATTATGACATCGGAAATGATTTCTATAAACTTTGGCTTGATGATACCATGACTTATTCATGCGCCTATTTTAAACATGAAAATGACAGTCTAGAGCAAGCTCAACTAAACAAAGTACACCATATTCTTAATAAATTAAATGCTCAGCCGGGAGGGAAATTACTAGATATCGGTTGTGGCTGGGGGACACTTATCATTACTGCTGCTAAAGAATATGGCTTAAATGCAACAGGTATTACCTTAAGTGAAGAGCAGGCTTCCTTCATTACTAAGCGTATCAAGGAAGAAGGATTGGAAAATAAAGTAACAGTCCTCATTAAAGATTATCGTGACATTCATGAAACATACGATTATATCACTAGTGTTGGTATGTTTGAACATGTAGGAAAAGAAAATTTATCTCAATACTTCCAAACTATTTCTAAAAGACTCAACATCAATGGTCTAGCTCTTATTCATGGTATTACTGGACAAGTGGGTGATAATCATGGTAGTGGAACTAATTCTTGGATTAATAAGTATATCTTCCCAGGAGGATATATCCCTCGTTTAACTGAAAATTTAAATCATATAGCTAGTGCTGGACTTCAAATTGCTGACTTAGAACCGCTTCGTCGTCACTATCAAAAGACTCTCGAATTATGGACAAAAAATTTCCACAATGCCCTTCCTGAAGTTCAGAAAACTCATGATAAGCGTTTTATCAATATGTGGGACCTCTATCTTCAATCTTGTGCGGCCTCTTTTGAATCTGGCAATATTGATATTTTTCAATACTTGCTTTCAAAAGGTGTTTCAAAAGACACTATGCCTATGACACGCGATTATATGTATTCTGCTAAT

SEQ ID NO: 7910 - protein, 396 aa, Streptococcus agalactiae
MVMDSLIIKQLIKSTFDIPLQVTYPNGNIETYNGNNPHVKLKLNKNFSVSELSKDPSIVLGEAVMDGDIEIDGSIQELILSAYRCGDSFLRNSKFSKLIPKQFHDKKHSKSDIQKHYDIGNDFYKLWLDDTMTYSCAYFKHENDSLEQAQLNKVHHILNKLNAQPGGKLLDIGCGWGTLIITAAKEYGLNATGITLSEEQASFITKRIKEEGLENKVTVLIKDYRDIHETYDYITSVGMFEHVGKENLSQYFQTISKRLNINGLALIHGITGQVGDNHGSGTNSWINKYIFPGGYIPRLTENLNHIASAGLQIADLEPLRRHYQKTLELWTKNFHNALPEVQKTHDKRFINMWDLYLQSCAASFESGNIDIFQYLLSKGVSKDTMPMTRDYMYSAN

SEQ ID NO: 7911 - DNA, 723 bp, Streptococcus agalactiae
atgtcagaaaaatattcaactggtgacttagctaaagaagcaggagttactgttcgtactgttcagtactatgacaaaagaggaattttatccccatcagaactatctgaaggaggtaggagggtttatagtattgctgatttagaaaagcttagacaaattatttatttacgagatttagatttttcaattgataatatcaaaaatctatttactgaagacaatgctagccagattttagagctttttttacaagtgcagataagagaattaaggctagctattgatagtaaaaaagacaaacttgacaaagctgtcaacctactaaaaaccgtagaaaaacaagacagtaaaacattaggctatctttctgacattgtgcttatggaagaaaacaaaagaaaatggggtaaactacaaaaaagcatagtgctacaagtcgttatgattattatggtctatattacgttaataatagcagcagtttctctaaatcaaagatggcttatgtggatagcagtaacagtattcttaatagctatgaatggtatggtttggtattttaaacaacaggttgtttatctttgtccaaattgtcatcaaacctttacaccgacatatcaagcatttaatctagcgaaacatacccctaagacgcgaaaagtattctgtccacattgtcaccaaaagtcacattgtatagagttagccagagaagaacgt

SEQ ID NO: 7912 - protein, 241 aa, Streptococcus agalactiae
MSEKYSTGDLAKEAGVTVRTVQYYDKRGILSPSELSEGGRRVYSIADLEKLRQIIYLRDLDFSIDNIKNLFTEDNASQILELFLQVQIRELRLAIDSKKDKLDKAVNLLKTVEKQDSKTLGYLSDIVLMEENKRKWGKLQKSIVLQVVMIIMVYITLIIAAVSLNQRWLMWIAVTVFLIAMNGMVWYFKQQVVYLCPNCHQTFTPTYQAFNLAKHTPKTRKVFCPHCHQKSHCIELAREER

SEQ ID NO: 7913 - DNA, 585 bp, Streptococcus agalactiae
atgaaacaattacaagaatatatagcttttgatttagagtttaacacggttggtgagcatagccatattattcaagtgtcggccgttaaatattctaatcatcaagagattgctttatttgatacttatgttcacacaaaagttccattacaaagctttattaatggtttaacaggtattacagctagagatattataggggctcctaaaattgagacaattttgacagacttgcagagttttgttggagacacaccgttgattggttataatgggcataaatcggatttacctcttttagttgaaaatggtttggatctaactagtcaatatcaggtggacttatatgatgaagcttttgtgagacgtagtacagatttaaatggtatcgtcaaccttaaattgactactgttgctgactttttaggaataaagggtaaggcacataatagcttagaggatgcccgcatgactgcgcgtgtttatgaaaaatttctggacttggatgaaaataaaatctatttaaaacagcaaaaagaggtagcagttgatagcccatttgcggctttaggaaatttgtttgat

SEQ ID NO: 7914 - protein, 195 aa, Streptococcus agalactiae
MKQLQEYIAFDLEFNTVGEHSHIIQVSAVKYSNHQEIALFDTYVHTKVPLQSFINGLTGITARDIIGAPKIETILTDLQSFVGDTPLIGYNGHKSDLPLLVENGLDLTSQYQVDLYDEAFVRRSTDLNGIVNLKLTTVADFLGIKGKAHNSLEDARMTARVYEKFLDLDENKIYLKQQKEVAVDSPFAALGNLFD

SEQ ID NO: 7915 - DNA, 534 bp, Streptococcus agalactiae
atgacagttgaaaagacggttagtgaattagctgaaattttaggggttagtcgtcaagcgatgaataacagagttaaaacactccctgaagaatgtgtggaaaagaatagtaaaggcgttacagttgttaatcgtgatggcttgattaaattggaagaaatctataaaaaaactattttggaagaggaaccaattgacgaagaagcatcaagacgagaacttttagaaattctcgttgatgagaagaatactgaaatcacacgtttatatgaacagttaaaagcaaaagatattcagattgcttcaaaagacgagcagttacatgtaaaagatattcaaatagcagagaaagataagcaattagatcaacaacagcaattgactttaactgctatggaagatacgcaacgtctgcaacttgagttaaatgaagctaaagcagaggttgaagagattcaagaagccaaagaagaaaaaattcaagaattagaagctgttaaaaaaagtttctttggacgtttcttcaataaaaaa

SEQ ID NO: 7916 - protein, 178 aa, Streptococcus agalactiae; identical to SEQ ID NO: 3204

SEQ ID NO: 7917 - DNA, 1038 bp, Streptococcus agalactiae
atgatggcagctatttcctcaaatttttacggcaacaaaacacttcttattgagaaaaataaacgtttaggcaaaaaactagctggaacaggtggtggccgctgtaatgttaccaataatggaaaccttgatgagctcttagctggtatacctggaaatggccgtttcctatatagcgtcttctcacaatttgataaccatgatattattaacttctttcaagacaacggcgtcacacttaaagaagaagatcatgggcgtatgttccctactactgataaatctcgtactatcattaacgcccttgaaaataaaataaaagaacttggtggtcaaattatgactgacacagaagttgtctctgtcaaaaagataggagattcattctatatcaaaactaaagatacacagttcgcatccgataaacttatcgtaacaactggtggtaaatcctatccgtctacaggttctactggtttcggtcatgacattgctcgtcactttaaattagaagtcacagatatggaagccgccgaaagccctcttttaactgattttccccataaaaaactacaaggtatctccttagatgatgtcactttgtcatttgaaaagcatattattacacacgatcttctctttactcattttggattatcaggaccagcagccttgcgaatttccagctttgtcaaaggcggagaaactatatacctagatgttttgcccaatatctctgttaaagaattggaaacacacttccaaaatgaaagagaaaaatctttgaaaaacgctcttaaaatacttcttcctgagcgtttagctgaattttacgctgaagacttaccagaaaaagtaaaacaagtatctgtaaaagacttagaaacgttaattcaaaaacttaaaaaacttcctattttagtaactggtaagatgtctctagcaaaatcctttgtaacaaaagggggagttgatcttaaagaaataaaccccaaaacacttgaaagtaaaaaggtagctggtttacattttggctgg

SEQ ID NO: 7918 - protein, 346 aa, Streptococcus agalactiae
MMAAISSNFYGNKTLLIEKNKRLGKKLAGTGGGRCNVTNNGNLDELLAGIPGNGRFLYSVFSQFDNHDIINFFQDNGVTLKEEDHGRMFPTTDKSRTIINALENKIKELGGQIMTDTEVVSVKKIGDSFYIKTKDTQFASDKLIVTTGGKSYPSTGSTGFGHDIARHFKLEVTDMEAAESPLLTDFPHKKLQGISLDDVTLSFEKHIITHDLLFTHFGLSGPAALRISSFVKGGETIYLDVLPNISVKELETHFQNEREKSLKNALKILLPERLAEFYAEDLPEKVKQVSVKDLETLIQKLKKLPILVTGKMSLAKSFVTKGGVDLKEINPKTLESKKVAGLHFGW

SEQ ID NO: 7919 - DNA, 96 bp, Streptococcus agalactiae
ttggctggtgaagtcctagacatcaatgctcatacgggagggtttaacattacttctgccttatgtacagggtgggtagctggtagcttacactat

SEQ ID NO: 7920 - protein, 32 aa, Streptococcus agalactiae
MAGEVLDINAHTGGFNITSALCTGWVAGSLHY

SEQ ID NO: 7921 - protein, 866 aa, Streptococcus agalactiae
ATGAAGACTACAAAAGTTTTTTCAGTTTTATCGTTATCTGTTGCTGCATTTATGATGACAGCATGTCAGTCAAATCACAGCACTAAAAAAGCTGATATGTCTCCAGATAAGGTGGAGCAAAAGACGAAATTTAAAAATATTTCTCTAAGTTCTAATAAACTGTTGGCTAAGGAAAACACTATGTCTGTCCTTTGGTATCAAAATTCTGCAGAAGCCAAGGCTTTATATTTACAAGGTTATAATGTTGCTAAAATGAAGTTAGATGATTGGTTACAAAAGCCCAGTGAAAAACCATATTCAATTATCTTAGATTTAGATGAAACAGTTTTAGATAATAGCCCATATCAAGCAAAGAATATTAAAGATGGCTCTAGTTTCACGCCAGAGAGTTGGGATAAATGGGTGCAAAAGAAGTCAGCTAAGGCTGTTGCGGGTGCCAAAGCATTTTTGAAGTATGCTAATGAAAAGGGAATAAAAATTTATTATGTCTCAGATCGTACAGATGCTCAAGTTGATGCGACTAAAGAAAATTTAGAGAAGGAAGGTATACCTGTTCAAGGGAAAGACCACTTGCTTTTCCTTAAAAAAGGAATGAAATCTAAAGAGAGTCGCCGTCAGGCAGTTCAAAAAGATACTAATTTAATTATGCTTTTTGGAGATAATTTAGTTGATTTTGCTGATTTTTCTAAATCATCTAGTACAGATAGAGAACAACTACTAACTAAACTTCAAAGTGAGTTTGGTAGTAAATTTATTGTTTTCCCAAATCCTATGTACGGTTCTTGGGAAAGTGCTATTTATCAAGGAAACATCTGGATGTTCAAAAACAATTGAAAGAACGACAAAAAATGTTGCATTCGTATGAT

SEQ ID NO: 7922 - protein, 289 aa, Streptococcus agalactiae
MKTTKVFSVLSLSVAAFMMTACQSNHSTKKADMSPDKVEQKTKFKNISLSSNKLLAKENTMSVLWYQNSAEAKALYLQGYNVAKMKLDDWLQKPSEKPYSIILDLDETVLDNSPYQAKNIKDGSSFTPESWDKWVQKKSAKAVAGAKAFLKYANEKGIKIYYVSDRTDAQVDATKENLEKEGIPVQGKDHLLFLKKGMKSKESRRQAVQKDTNLIMLFGDNLVDFADFSKSSSTDREQLLTKLQSEFGSKFIVFPNPMYGSWESAIYQGKHLDVQKQLKERQKMLHSYD

SEQ ID NO: 7923 - protein, 117 aa, Streptococcus agalactiae
ATGATCCTTGACGGACCACACCGTGGTGGTGACCTTCGTCGTGCTCGTGCAGGTGCTGCAAACATCGTTCCTAACTCAACTGGTGCTGCAAAGCTATCGGACTTGTTATCCCAGAAT

SEQ ID NO: 7924 - protein, 39 aa, Streptococcus agalactiae
MILDGPHRGGDLRRARAGAANIVPNSTGAAKLSDLLSQN

SEQ ID NO: 7925 - protein, 432 aa, Streptococcus agalactiae
ATGCTTGCACACTTGTTGAAATATGACACAACTCAAGGTCGTTTCGACGGTACTGTTGAAGTTAAAGAAGGTGGATTCGAAGTTAACGGTCAATTTGTTAAAGTTTCTGCTGAACGCGAACCAGCAAACATTGACTGGGCTACTGATGGCGTAGAAATCGTTCTTGAAGCAACTGGTTTCTTTGCATCAAAAGAAAAAGCTGAACAACACATCCATGAAAATGGTGCTAAAAAAGTTGTTATCACAGCTCCTGGTGGAAACGACGTTAAAACAGTTGTTTTCAACACTAACCACGATATCCTTGATGGAACTGAAACAGTTATCTCAGGTGCTTCATGTACTACAAACTGTCTTGCTCCAATGGCTAAAGCTTTACAAGACAACTTTGGTGTTAAACAAGGTTTGATGACTACTATCCACGCATACACTGGG

SEQ ID NO: 7926 - protein, 144 aa, Streptococcus agalactiae
MLAHLLKYDTTQGRFDGTVEVKEGGFEVNGQFVKVSAEREPANIDWATDGVEIVLEATGFFASKEKAEQHIHENGAKKVVITAPGGNDVKTVVFNTNHDILDGTETVISGASCTTNCLAPMAKALQDNFGVKQGLMTTIHAYTG

SEQ ID NO: 7927 - protein, 2070 aa, Streptococcus agalactiae
ATGGCTCGCGAATTTTCACTTGAAAAAACTCGTAATATCGGTATCATGGCTCACGTCGATGCTGGTAAAACAACAACAACTGAGCGTATTCTTTACTATACTGGTAAAATCCACAAAATCGGTGAAACACACGAAGGTGCTTCACAAATGGACTGGATGGAACAAGAACAAGAACGTGGTATCACAATTACATCAGCTGCAACAACAGCACAATGGGATGGTCACCGTGTTAACATCATCGATACACCAGGACACGTGGACTTCACAATTGAAGTTCAACGTTCACTTCGCGTACTTGATGGTGCGGTAACAGTTCTTGATGCTCAATCAGGTGTAGAACCTCAAACTGAAACAGTTTGGCGTCAAGCAACAGAATACGGAGTTCCACGTATCGTTTTTGCTAATAAAATGGATAAAATCGGTGCTGACTTCCTCTATTCAGTACAATCACTTCATGACCGTCTTCAAGCGAATGCACACCCAATTCAATGCCAATGGTTCAGAAGACGATTCCGTGGTATTATTGACTTAATCAAAATGAAAGCTGAAATCTATACTAATGACCTTGGTACAGATATCCTTGAAGAAGATATTCCAGCAGAGTATGTTGATCAAGCAAATGAATACCGTGAAAAATTAGTAGAAGCAGTTGCTGATACTGATGAAGATTTGATGATGAAATACCTTGAAGGTGAAGAAATCACTAACGAAGAGTTGATGGCTGCTATTCGTAGAGCAACTATCAATGTTGAATTCTACCCTGTATTGTGTGGTTCAGCCTTCAAGAATAAAGGTGTTCAATTGATGCTTGATGCTGTTATTGATTACCTTCCAAGCCCACTTGATATTCCTGCAATCAAAGGTATTAACCCTGATACTGACGAAGAAGAAACACGTCCTGCTTCAGATGAAGAGCCATTTGCAGCGCTTGCCTTCAAGATCATGACAGATCCTTTCGTGGGTCGCTTAACATTCTTCCGTGTGTACTCAGGTGTTCTTAACTCAGGTTCATACGTGTTGAATACATCTAAAGGTAAACGTGAACGTATCGGACGTATCTTACAAATGCACGCAAATAGTCGTCAAGAAATTGAAACTGTTTATGCTGGGGATATCGCAGCAGCTGTTGGTTTGAAAGATACAACTACAGGTGATTCATTGACTGATGAAAAATCAAAAGTTATTCTTGAATCAATTGAAGTTCCAGAACCAGTTATCCAATTGATGGTGAGCCAAATCTAAAGCTGACCAAGATAAAATGGGTATTGCCCTTCAAAAACTTGCTGAAGAAGACCCAACGTTCCGCGTTGAAACTAACGTTGAAACTGGTGAAACAGTTATCTCAGGAATGGGTGAACTTCACCTTGATGTCCTTGTTGACCGTATGAAACGTGAATTCAAAGTTGAAGCAAACGTTGGTGCACCTCAAGTATCATACCGCGAAACATTCCGCGCTTCTACACAAGCACGTGGATTCTTCAAACGCCAATCTGGTGGTAAAGGTCAATTTGGTGATGTTTGGATTGAATTTACACCAAACGAAGAAGGTAAAGGATTCGAATTCGAAAATGCTATCGTCGGTGGTGTGGTTCCTCGTGAATTTATTCCAGCCGTTGAAAAAGGACTTGTAGAATCTATGGCAAAGGTGTTCTTGCTGGATATCCAATGGTTGACGTAAAAGCTAAACTTTACGATGGTTCATATCATGATGTTGACTCATCTGAGACAGCCTTCAAGATTGCTGCATCACTTGCACTTAAAGAAGCTGCTAAATCAGCGCAACCAGCTATCCTTGAGCCAATGATGCTTGTTACAATTACAGCTCCAGAAGACAATCTTGGTGACGTTATGGGTCACGTGACTGCACGTCGCGGTCGTGTTGATGGTATGGAAGCACGTGGTAACACACAAGTTGTTCGTGCCTTTGTTCCACTTGCTGAAATGTTTGGTTATGCAACAGTTCTTCGTTCTGCAACACAAGGACGTGGTACATTCATGATGGTATTTGACCACTACGAAGATGTTCCTAAGTCAGTTCAAGAAGAAATCATCAAGAAAAACTCTGGTGAA

SEQ ID NO: 7928 - protein, 692 aa, Streptococcus agalactiae
MAREFSLEKTRNIGIMAHVDAGKTTTTERILYYTGKIHKIGETHEGASQMDWMEQEQERGITITSAATTAQWDGHRVNIIDTPGHVDFTIEVQRSLRVLDGAVTVLDAQSGVEPQTETVWRQATEYGVPRIVFANKMDKIGADFLYSVQSLHDRLQANAHPIQLPIGSEDDFRGIIDLIKMKAEIYTNDLGTDILEEDIPAEYVDQANEYREKLVEAVADTDEDLMMKYLEGEEITNEELMAAIRRATINVEFYPVLCGSAFKNKGVQLMLDAVIDYLPSPLDIPAIKGINPDTDEEETRPASDEEPFAALAFKIMTDPFVGRLTFFRVYSGVLNSGSYVLNTSKGKRERIGRILQMHANSRQEIETVYAGDIAAAVGLKDTTTGDSLTDEKSKVILESIEVPEPVIQLMVEPKSKADQDKMGIALQKLAEEDPTFRVETNVETGETVISGMGELHLDVLVDRMKREFKVEANVGAPQVSYRETFRASTQARGFFKRQSGGKGQFGDVWIEFTPNEEGKGFEFENAIVGGVVPREFIPAVEKGLVESMANGVLAGYPMVDVKAKLYDGSYHDVDSSETAFKIAASLALKEAAKSAQPAILEPMMLVTITAPEDNLGDVMGHVTARRGRVDGMEARGNTQVVRAFVPLAEMFGYATVLRSATQGRGTFMMVFDHYEDVPKSVQEEIIKKNSGE

SEQ ID NO: 7929 - protein, 123 aa, Streptococcus agalactiae
ATGAAAGATCGTCTTGCAAAAGAAATCATGGATGCTGCAAACAACACAGGAGCATCAGTTAAGAAACGTGAAGATACTCACAAAATGGCTGAAGCTAACCGTGCCTTTGCACACTTCCGTTGG

SEQ ID NO: 7930 - protein, 41 aa, Streptococcus agalactiae
MKDRLAKEIMDAANNTGASVKKREDTHKMAEANRAFAHFRW

SEQ ID NO: 7931 - DNA, 297 bp, Streptococcus agalactiae
  misc_feature 292, 293, 294, 295, 296: n = A,T,C or G
atgagtcgtaaaaatcaagcgcctaaacgcgaagtattaccagatccattgtataactcaaaaatcgttacacgtcttatcaaccgtgtaatgcttgatggtaaacgtggtactgctgcaactatcgtatatgatgcttttgaagcaattaaagaagctactggaacagatgctcttgaagtattcgaaacagctatggaaaacatcatgcctgtacttgaggtacgcgcacgccgtgttggtggatcaaactacccagttctgtcgaagtcgtccagacgtcgtacacttnnnnnt

SEQ ID NO: 7932 - protein, 99 aa, Streptococcus agalactiae
  VARIANT 98, 99: Xaa = Any Amino Acid
MSRKNQAPKREVLPDPLYNSKIVTRLINRVMLDGKRGTAATIVYDAFEAIKEATGTDALEVFETAMENIMPVLEVRARRVGGSNYPVLSKSSRRRTLXX

SEQ ID NO: 7933 - DNA, 411 bp, Streptococcus agalactiae
atgcctacaattaaccagttggtacgtaaaccacgtaaatctaaagttgaaaaatcagattcacctgctttgaatattggttacaacagtcacagaaaagttcacactaaattatctgcaccacaaaaacgtggtgttgcaactcgtgttggaactatgacacctaaaaaacctaactctgcccttcgtaaatttgctcgtgtacgtttgagcaaccttattgaagttactgcttacattccaggtatcggacacaacttgcaagaacacagtgttgtgcttatccgtggtggacgtgtaaaagaccttccaggggtacgttaccatatcgttcgtggtgcacttgatactgcaggtgtagctgatcgtaaacaaggccgttctaaatacggtgctaaacgtcctaaaggg

SEQ ID NO: 7934 - protein, 137 aa, Streptococcus agalactiae; identical to SEQ ID NO: 3240

SEQ ID NO: 7935 - DNA, 810 bp, Streptococcus agalactiae
atgaaattaagacgtagcgaacgcatggttgttatttcaaattacctaataaataatccctatacattaactagtttaaatacatttgctagtaaatacggtgccgcgaaatcttcgatttcagaagatattgctattatcaaaaaagcttttgaacaagctcaaatcggagatattaaaactgtgactggtgcaagtggaggtgttatctttacaccaactattgctgaagcagaagcgaaagaaatcgttgaagaattaagacagcgtttatctgaaaacgatcgtattcttccgggaggttacatttatctttcagatctactcagtacaccaaaaatgttacaaagtattggtcgcattgtagcgaacgcttacagaggtcaaaaaattgatgctgtcatgacggttgcaacaaaaggtgttcctttagcaaacgcagtagcaaatgttttagatgttccttttgttattgtgagacgtgatttgaagattacggaaggttctactgtgtcagtaaactacgctagtggttcaagtggccgtattgaaaaaatgtttctttctaagcgtagcttaaaacctaacagtcgagttttaatagttgatgatttcttgaaaggtggaggtactgtttcggggatgattagtttactctcagaattcgatagcacattagtaggtgtcgctgtatttgcagaaaatgctcaggaacaacgtgagaagatggcctataaatctcttctgagagtatctgaaattgatgtaaaaaataatagagtctctgtagaagcggggaatatatttgat

SEQ ID NO: 7936 - protein, 270 aa, Streptococcus agalactiae
MKLRRSERMVVISNYLINNPYTLTSLNTFASKYGAAKSSISEDIAIIKKAFEQAQIGDIKTVTGASGGVIFTPTIAEAEAKEIVEELRQRLSENDRILPGGYIYLSDLLSTPKMLQSIGRIVANAYRGQKIDAVMTVATKGVPLANAVANVLDVPFVIVRRDLKITEGSTVSVNYASGSSGRIEKMFLSKRSLKPNSRVLIVDDFLKGGGTVSGMISLLSEFDSTLVGVAVFAENAQEQREKMAYKSLLRVSEIDVKNNRVSVEAGNIFD

SEQ ID NO: 7937 - DNA, 939 bp, Streptococcus agalactiae
atgaaaattaaccaaatgaaaaaagacgagctttttgaggggttttaccttataaagaaagcagaagttcgtaaaacgcgtgcaggtaaagactttattgcctttacctttcaagatgatactggcgaaatttcaggaaatatgtgggatgcacaaacctataatgtagaagagtttgtagccggtaaaattgttcatatgaaagggcgtcgtgaagtttataatggaactccccaagtcaaccaaattacattaagaaacatcaaagatggtgaacctaatgatcctagagattttaaagaaaaacctccaatcaatgttgacaacgtgagagagtacatggaacaaatgctctttaaaattgaaaatgcaacctggcagcgtgtggtaagagcactttatcgtaaatacaataaggaattttttacctatccagccgccaaaacaaaccaccacgcctttgaatcaggattggcatatcacacggcaacgatggttcgtttggcagatagtattggagatatctatccagaacttaataaaagtttgatgtttgctggtattatgctacatgatttagccaaggtcattgagttatcgggtcctgataatacagaatatactattcgaggtaaccttatcggtcatatttcacttattgatgaggaattaacaaaaatactagcagagcttaatattgatgatacaaaagaagaggttacagtgttacgccatgttattctgagtcaccatggacaattagaatatggaagcccggttcgtcctagaatcatggaggcagaaattatccatatgatcgataacattgatgcaaatatgatgatgatgacaacagctttaaatcgtgtcaacgaaggtgaaatgacaaatcgcatttttgccatggataaccgttctttttataaaccgaacattaaa

SEQ ID NO: 7938 - protein, 313 aa, Streptococcus agalactiae; identical to SEQ ID NO: 3244

SEQ ID NO: 7939 - DNA, 1272 bp, Streptococcus agalactiae
atgcttgtcatcattttgatcattgtactagctagtctgacagtgacgataatttcttaccaaaaaatgacggaattaacaaagtccgttgaaaaacaacttgaagataatgctgataatctatcagaccaactgacatatcagatagaagcggcgcaaaaagatcaaattctaacgttgactaatcagctaaaccgtatgcaacaggaaatttatcagttgcttaccgatatgcgtacagaattaaatcagcatttaacggagagtcgagatcgatcagacaaacgcttggaattgattaactccaatttatctcagtcagttcagaaaatgcaagattccaatgaaaaacgcttggatcaaatgcgccaaactgttgaggaaaagctagaaaaaacgctacaaacgcgtttgcaaacttcttttgaaactgtatcgcgtcaactagagagtgtcaatcaaggtcttggggagatgaaaactgttgcccaagatgttggtacgctgaacaaagtcttgtcaaatactaagacaaggggaatattaggggagttacaactcggccaaattatagaagatattatgacagttagtcaatatgagagagaatttcctacggtgtctggctcttctgagcgtgttgaatatgctattaaattacctggaaatggtcagggagattatatctatttgcctattgactctaagtttcctctagaagattattaccgattggaagatgcttatgaattgggtgacaaggttcaaatagaactctatcgtaaatctttactggcaagtattcgtaaatttgcaaaagatataaacaataagtacttaaatcctcctgaaacgacaaattttggtatcatgttcttaccaactgaagggctctattctgaagtggtaagaaatgcaacattctttgatagtctaagacgtgacgaaaatattgtagtagctggaccgtcaaccttatctgctttactaaattcattatctgttggctttaaaaccttaaatattcaaaagaatgctaatgatattagtaaaattttagggaatgtcaaggttgaatttggaaaatttggtggcatgttatcaaaagctcaaaaacaattaaatacagcaagtaaaagtattgataatttactcacaacgcggacaaacgctattatcagagccttaaatacagttgaagaacatcaagatcaagcaaccactagcttgttaaaccttcctataacagaagaagaggaaattaatgaaaat

SEQ ID NO: 7940 - protein, 424 aa, Streptococcus agalactiae
MLVIILIIVLASLTVTIISYQKMTELTKSVEKQLEDNADNLSDQLTYQIEAAQKDQILTLTNQLNRMQQEIYQLLTDMRTELNQHLTESRDRSDKRLELINSNLSQSVQKMQDSNEKRLDQMRQTVEEKLEKTLQTRLQTSFETVSRQLESVNQGLGEMKTVAQDVGTLNKVLSNTKTRGILGELQLGQIIEDIMTVSQYEREFPTVSGSSERVEYAIKLPGNGQGDYIYLPIDSKFPLEDYYRLEDAYELGDKVQIELYRKSLLASIRKFAKDINNKYLNPPETTNFGIMFLPTEGLYSEVVRNATFFDSLRRDENIVVAGPSTLSALLNSLSVGFKTLNIQKNANDISKILGNVKVEFGKFGGMLSKAQKQLNTASKSIDNLLTTRTNAIIRALNTVEEHQDQATTSLLNLPITEEEEINEN

SEQ ID NO: 7941 - protein, 630 aa, Streptococcus agalactiae
ATGACTAAAATTGCTTTATTTGCTGGCGGTGACTTAACTTATTTTGAATATGATTTTGACTATTTTGTCGGAATTGACCGTGGAAGCCTATTTTTATTAAAAAATGGGCTTTCTTTGGACATGGCAGTGGGTGATTTTGATTCTATAACAGAAGATGAACTGCTTTATATCAAACACTATTGTAGCAATATCGTTTCTGCTAGTGCAGAAAAAAATGATACAGATACAGAATTAGCTTTAAAAACTATTTTCAAAGAATTTCCAGAAGCTCAGGTGACCGTATTTGGAGCATTTGGTGGCAGGATTGACCATATGATGTCTAATATCTTTTTACCAAGTGACACAGATCTAGAACCATTTATGTCACAAATCAGACTCAAAGATGAACAAAACATAGTGACTTACCTACCATCCGGGAAAAATCAAGTCTCAAGGATTGAAGGGATGTCCTATGTCTCGTTCATGCCTGAGAGTGAGTCTACTTTGCAGATTTCTGGGGCTAAATATGAATTGAACAAAAGTAATTATTTTAAGAAAAAAATGTATTCCAGTAATGAATTTATGACTTCGCCAATTGAAGTAGAGCTCAAAGATGGTTACTTAATCATTATTTATAGTAAGGATAGAGGT

SEQ ID NO: 7942 - protein, 210 aa, Streptococcus agalactiae
MTKIALFAGGDLTYFEYDFDYFVGIDRGSLFLLKNGLSLDMAVGDFDSITEDELLYIKHYCSNIVSASAEKNDTDTELALKTIFKEFPEAQVTVFGAFGGRIDHMMSNIFLPSDTDLEPFMSQIRLKDEQNIVTYLPSGKNQVSRIEGMSYVSFMPESESTLQISGAKYELNKSNYFKKKMYSSNEFMTSPIEVELKDGYLIIIYSKDRG

SEQ ID NO: 7943 - protein, 660 aa, Streptococcus agalactiae
ATGTCAACCAATAAAATTGCCCCATCGATATTAGCAGCAGACTATGCTAATTTTGCTAACGAATTGAAACGTATTGAAGAGACAACAGCAGAATACGTTCATATTGATATCATGGATGGTCAATTTGTCCCTAATATTAGTTTTGGTGCGGATGTTGTATCCAGCATGCGTAAACACAGTAAACTTGTTTTTGATTGTCATCTGATGGTTGTTGATCCAGAACGTTATATTGAGGATTTTGCTCAAGCTGGTGCTGATATCATGACCATTCATGTTGAAGCAACGAAACACATACATGGTGCGCTTCAAAAGATAAAAGAGGCAGGAATGAAAGCAGGTGTGGTTATTAACCCAGGAACACCCGTAGAATCTCTTATTCCTATCTTAGATTTGGTTGACCAGATTTTAATTATGACTGTTAATCCTGGATTTGGTGGACAAGCCTTTATTCCAGAAATGATGTCAAAAGTAAAGACAGTTGCAGCATGGCGCAAAGAGTACGGTCATCATTATGATATTGAAGTTGATGGCGGTATAGATAATACTACAATTAAGGCAGCAGCAGAGGCTGGTGCAAATGTCTTTGTTGCAGGCTCTTATCTCTTTAAAGCAAGTGATTTACCTGCACAAGTAGAAACCTTAAGGGTGGCGCTCGATGAC

SEQ ID NO: 7944 - protein, 220 aa, Streptococcus agalactiae
MSTNKIAPSILAADYANFANELKRIEETTAEYVHIDIMDGQFVPNISFGADVVSSMRKHSKLVFDCHLMVVDPERYIEDFAQAGADIMTIHVEATKHIHGALQKIKEAGMKAGVVINPGTPVESLIPILDLVDQILIMTVNPGFGGQAFIPEMMSKVKTVAAWRKEYGHHYDIEVDGGIDNTTIKAAAEAGANVFVAGSYLFKASDLPAQVETLRVALDD

SEQ ID NO: 7945 - protein, 828 aa, Streptococcus agalactiae
GTGGAATCTGACGGTGTTGTTTATCAGACACGTGCGCGTGGAAATTTTAGAAAAAAAGGTCAAATTCCCTACGTTGGGGATTGGGTGGAATTTTCTTCGCAAGATCAATCAGAAGGATATATTCTATCAATTGAAGAGCGTAAAAATAGCCTCGTACGACCACCTATTGTTAATATTGACCAAGCTGTCGTTATCATGTCTGCTAAAGAACCTGATTTTAACGCTAACTTATTAGACCGGTTCTTAGTACTTCTAGAATATAAGATGATTCAGCCTATCATTTATATTTCCAAGTTGGATTTGTTAGACGATTTGGTTGTTATTGATGATATTCGCGAACATTATCAGAATATAGGCTACGTTTTCTGTTATTCTCAAGAGGAACTCTTGCCTCTGTTAGCAGATAAAGTGACTGTTTTTATGGGGCAGACAGGTGTCGGAAAATCAACGCTTCTCAACAAAATTGCTCCTGAGTTGAAACTTGAAACTGGTGAAATTTCGGATAGTTTAGGCCGTGGCCGACACACCACAAGAGCAGTTAGTTTCTATAATGTTCATAAAGGAAAAATTGCAGACACTCCTGGTTTTTCTTCTTTGGACTATGAAGTGGACAATGCAGAGGACTTAAACGAATCCTTTCCAGAGCTCCGTAGACTTAGTCATTTTTGTAAATTCCGCTCGTGTACGCATACACATGAGCCTAAATGTGCTGTAAAAGAAGCCTTGACTCAAGGTCAGTTATGGCAAGTCCGCTATGATAACTACCTCCAATTTTTAAGTGAAATTGAGAACCGTCGTGAAACATATAAGAAAGTTATTAAAAGAAAG

SEQ ID NO: 7946 - protein, 276 aa, Streptococcus agalactiae
MESDGVVYQTRARGNFRKKGQIPYVGDWVEFSSQDQSEGYILSIEERKNSLVRPPIVNIDQAVVIMSAKEPDFNANLLDRFLVLLEYKMIQPIIYISKLDLLDDLVVIDDIREHYQNIGYVFCYSQEELLPLLADKVTVFMGQTGVGKSTLLNKIAPELKLETGEISDSLGRGRHTTRAVSFYNVHKGKIADTPGFSSLDYEVDNAEDLNESFPELRRLSHFCKFRSCTHTHEPKCAVKEALTQGQLWQVRYDNYLQFLSEIENRRETYKKVIKRK

SEQ ID NO: 7947 - protein, 849 aa, Streptococcus agalactiae
ATGTTGGTTGACAAGAAGTGGCGTTTTGAAGATAGTGCAAGTTATTTCGCTTGTCCTAAATGTCAAAATCCCTTGATAAAAGAAAGTAACAGCCTCAAATGCTCTGATAATCATTGTTTTGATTTATCCAAATTTGGATATGTTAATCTTCTTGGAGGAAAGAAGATAGATGAACATTATGATAAAAAATCATTTGAAAATCGGCAGCTTGTCTTAGAAAACGGGTATTATAATCATATTTTAGAAGCTATTTCAAAGGTTTTGGAAAATAATTCTCAGTTTCATTCGGTTTTAGATATTGGTTGTGGAGAGGGCTTTTATTCTCGTCAATTAGTTAACAAGTATGAGAAGACTTTCTTGGCTTTTGATATTTCTAAAGATTCGATTCAATTAGCTGCTAAAAGTGATCAATCTAGGCTTGTGAAATGGTTTGTTTCTGATTTAGCTAACCTTCCTATTCAAGACTCATCAATTGATATCATTTTAGACATTTTTTCTCCTGCAAATTATAAAGAATTTAGGCGGGTACTGAGTGATGATGGTATCCTTGTAAAGGTTGTTCCTGTAGCTGAACATGTCCAAGAATTGCGAGAAAAAGCTAGTCAATACTTGAAACAGAAAGATTACTCTAATCAAAAAATTCTAGATTACTTTAGAGAAAATTTTGAAATTATTTCTGAGCAGAAAGTTGTTCAAAGTTATAACTGTTCTCAACAAGAACGTCAAGCTTTTATTGATATGACACCGTTGTTATTCAGCGTAGATAAAACGACTATTGATTGGGCGAGTATATCAGAAATTACAGTAGGTGCCTTAATAGTAATTGGAAAAAAGCGCAGTGTATCTAAA

SEQ ID NO: 7948 - protein, 283 aa, Streptococcus agalactiae
MLVDKKWRFEDSASYFACPKCQNPLIKESNSLKCSDNHCFDLSKFGYVNLLGGKKIDEHYDKKSFENRQLVLENGYYNHILEAISKVLENNSQFHSVLDIGCGEGFYSRQLVNKYEKTFLAFDISKDSIQLAAKSDQSRLVKWFVSDLANLPIQDSSIDIILDIFSPANYKEFRRVLSDDGILVKVVPVAEHVQELREKASQYLKQKDYSNQKILDYFRENFEIISEQKVVQSYNCSQQERQAFIDMTPLLFSVDKTTIDWASISEITVGALIVIGKKRSVSK

SEQ ID NO: 7949 - protein, 870 aa, Streptococcus agalactiae
ATGAGAATCGCAGATAAAACCGTTACCCGCGCTATTTTGGAGCGTCATGGGTTTACATTTAAGAAATCATTCGGTCAGAACTTTTTGACTGATACTAATATTTTACAGAAGATTGTTGACACGGCAGAGATTGACAAGGGTGTCAACGTGATTGAGATTGGTCCTGGTATCGGGGCTTTGACAGAGTTTTTGGCTGAGAATGCAGCTGAGGTGATGGCTTTTGAGATTGATGATCGTCTCATTCCTATCCTTGCTGATACGCTTGCGCGTTTTGACAATGTCCAAGTGGTCAATCAGGACATCCTCAAGGCTGATTTGCAGACCCAGATTCAGGCTTTCAAGAATCCTGACCTGCCTATCAAGGTAGTAGCAAACTTACCTTACTACATCACAACACCAATCCTCATGCACTTGATTGAGGGCAAGATTCCTTTTGCGGAGTTTGTAGTCATGATGCAAAGAGAAGTGGCAGATCGTATTTCAGCTATGCCAAATACTAAAGCATACGGTTCTTTGTCAATCGCAGTGCAGTATTATATGACTGCCAAAGTATCATTTATCGTTCCGAGAACTGTTTTTGTTCCTGCTCCAAATGTAGATTCAGCTATTTTGAAAATGGTCCGTAGAGATCAACCAGTAGTGAGTGTTCAAGATGAGGATTTCTTTTTCAGAGTGTCAAAAGTAGCCTTCGTACATCGTCGTAAAACACTTTGGAATAATCTAACGAGTCATTTTGGAAAATCAGAAGATACTAAAGCAAAATTGGAAAAAGCATTAGAAATAGCAAAAATTAAGCCATCTATTCGCGGAGAAGCCTTATCTATCCCTGATTTTGCAAGTTTAGCAGATGCCTTGAAAGAGGTTGGGATA

SEQ ID NO: 7950 - protein, 290 aa, Streptococcus agalactiae
MRIADKTVTRAILERHGFTFKKSFGQNFLTDTNILQKIVDTAEIDKGVNVIEIGPGIGALTEFLAENAAEVMAFEIDDRLIPILADTLARFDNVQVVNQDILKADLQTQIQAFKNPDLPIKVVANLPYYITTPILMHLIEGKIPFAEFVVMMQREVADRISAMPNTKAYGSLSIAVQYYMTAKVSFIVPRTVFVPAPNVDSAILKMVRRDQPVVSVQDEDFFFRVSKVAFVHRRKTLWNNLTSHFGKSEDTKAKLEKALEIAKIKPSIRGEALSIPDFASLADALKEVGI

SEQ ID NO: 7951 - DNA, 420 bp, Streptococcus agalactiae
atgattgaacgaaatgagaatccttattttgtgaaagaatatgaaacgggttatcttgttctgggagaccatcaatattttcaagattattgcctttttctctctaaaaaacacgtaacagagttacatgaattgcctagagattggcgaaatcagtatctttccgaaatggcagatgcttctgaaatagttgctaaggcttttagagcagataagatgaatattgagagtttgggaaatggagacgctcatctacattttcatctttttccaagaaaaacaggtgatttaaggaactatgggcataatggaaaaggtccagtttggtggtatccttttgagaagatgtatgcagatagtgtcagagcaactggtgcagaaatagaaaaattaaaagagaaattgttagatgtcttagga

SEQ ID NO: 7952 - protein, 140 aa, Streptococcus agalactiae
MIERNENPYFVKEYETGYLVLGDHQYFQDYCLFLSKKHVTELHELPRDWRNQYLSEMADASEIVAKAFRADKMNIESLGNGDAHLHFHLFPRKTGDLRNYGHNGKGPVWWYPFEKMYADSVRATGAEIEKLKEKLLDVLG

SEQ ID NO: 7953 - DNA, 564 bp, Streptococcus agalactiae
atgaaaaaaattgatattcaagaagtgattgttgtcgaagggaaagatgatactgctaatctgcgacgcttttacaatgttgatacctatgaaactagaggttcagcaattgatgaagatgatttagagcgtatcgaacgtttgcacaatttgcggggagttatcatctttaccgacccagattacaatggcgaacgtatccgtaaaatcatcatgaaggccattccgacagtccgccatgccttcctcaatcgagacgaggcaaagccagtttcaaagaccaagggacgatctctgggtgtcgagcatgccagctttgaggatttgcagaaggcactctcaaaagtgactcagcatttcgatgatgaagatcatttcgacatcacccaagccgacctcattcgctgggggttcattaccgctagtgatagccgcaaacgtcgtgagtatctgggtagccaacttcgcatcggctactcaaatggtaaacaactcctcaaacgcctcagactcttcggagtgaccaaggcagaagttgaagagtgtatggagaaatacgaggga

SEQ ID NO: 7954 - protein, 188 aa, Streptococcus agalactiae
MKKIDIQEVIVVEGKDDTANLRRFYNVDTYETRGSAIDEDDLERIERLHNLRGVIIFTDPDYNGERIRKIIMKAIPTVRHAFLNRDEAKPVSKTKGRSLGVEHASFEDLQKALSKVTQHFDDEDHFDITQADLIRWGFITASDSRKRREYLGSQLRIGYSNGKQLLKRLRLFGVTKAEVEECMEKYEG

SEQ ID NO: 7955 - DNA, 852 bp, Streptococcus agalactiae
atgcttcagtcttatgttataataataaagattaatgcttgtagctacgataagcaaagaaagaacaatgatatgataaaaatatttgatacccatacccaccttaacgtggaaaattttgaaggaaagatagacgaggaaattaatttagctagcgaactcggtgttacaaaaatgaatgttgtcggctttgaccaagataccatttcaaaatctttggaattatcttcccaatatgcacaggtatatagcacaataggatggcatccaactgaagctggttcttatgatgataatattgagtcaatgattatcagccatttagaaaatcccaaggttattgcacttggtgaaattggtctggattattattggatggaggatcccaaagatattcagatcgaggtgtttaagcgtcaaattgaactttcaaaagagtataaccttccttttgtcgttcatacacgtgatgcgttagaagacacttatgaagtcattaaggaatctggagttgggccttttggtggtataatgcactctttttctggttctttggaaatggctcagaaatttattgatttagggatgatgatttccttttctggtgttgtgacctttaagaaggcattagatgtacaagaagctgcacgagagttgccattagataagatattagtggaaacagatgctccttatttggctcctgtacctaaaagaggtcgagaaaacaaaactgcttatacgagatatgtcgttgaaaaaatagcagagctacgaggcataactgtggaagaggtagcggaggctacataccaaaatgcagtaaggatatttagacttgatgaaaaaaat

SEQ ID NO: 7956 - protein, 284 aa, Streptococcus agalactiae
MLQSYVIIIKINACSYDKQRKNNDMIKIFDTHTHLNVENFEGKIDEEINLASELGVTKMNVVGFDQDTISKSLELSSQYAQVYSTIGWHPTEAGSYDDNIESMIISHLENPKVIALGEIGLDYYWMEDPKDIQIEVFKRQIELSKEYNLPFVVHTRDALEDTYEVIKESGVGPFGGIMHSFSGSLEMAQKFIDLGMMISFSGVVTFKKALDVQEAARELPLDKILVETDAPYLAPVPKRGRENKTAYTRYVVEKIAELRGITVEEVAEATYQNAVRIFRLDEKN

SEQ ID NO: 7957 - DNA, 270 bp, Streptococcus agalactiae
atgtgggatgtcctgactggtaaggagtcagtaaggactttaaaaaaacaattggataaagaactgatacatagcgtgtacgcgccacgcaagagatctaagtttcacgatattattacgtcgcatcataaagaaatagacgaagtagccatcaacacaaagacagctattcataaagttgctaatcaattggacgaggcaataaaaggagaatttcgttcaaaggttgaggagtctattgaaagcaatcagcaaaaatataatcattta

SEQ ID NO: 7958 - protein, 90 aa, Streptococcus agalactiae
MWDVLTGKESVRTLKKQLDKELIHSVYAPRKRSKFHDIITSHHKEIDEVAINTKTAIHKVANQLDEAIKGEFRSKVEESIESNQQKYNHL

SEQ ID NO: 7959 - DNA, 390 bp, Streptococcus agalactiae
atggcactaattgatatcattgaaaaacaattagctgatactcagagaaaaatatcagatttagatgatgcctatcaccatagttgttgccagtttgaagaaaaattagacgatctctcagtaagaaaaaataagattactaatatgcttcaagaaacttacgacgctgttgaatatgatttgagatatagtaatgatagctcagatatgatgacgctcaatcgtattttagattcttatcatgacgacttagagcaagcttaccataaagagtactatgccttgtccgctcaagaagaagaatatagagctaactatattcggcaacgttcagaacatgaactaacctttgaagagttgcaaagggaaaagaaaagagaattaatgaag

SEQ ID NO: 7960 - protein, 130 aa, Streptococcus agalactiae
MALIDIIEKQLADTQRKISDLDDAYHHSCCQFEEKLDDLSVRKNKITNMLQETYDAVEYDLRYSNDSSDMMTLNRILDSYHDDLEQAYHKEYYALSAQEEEYRANYIRQRSEHELTFEELQREKKRELMK

SEQ ID NO: 7961 - protein, 1290 aa, Streptococcus agalactiae
ATGGAAAAAGTCTTGACTGATTTAGATAGGGTAAATATAGCGAAGCAAGAGTATGAATTAGGTAGCCAACTTGATACACTAGTCAAAATAATGAGCCAAGATAAGGTACTTCCCATCGGTAAAGTTGCTCACGTTCAAGATGGAGGCAAAGAAACTGGGGAACAAATTTATACCATCACTCCAAATGGAACTTTAGACAAGCCAGAGGATGTTAAGGAAGTTACGGTTTTATTTAAGGGGTCAACAGCACCGTTTGGAGGAGATGATTGGAAAACAGACTGGTTTAAAAATGATATTCCAATAGCTAGTAAACTATTATTAAAGAAATTTGGTTCACAAAGTGTATCTCATAAACAAGGTACAAAGCAGTTAGAACAATCAGCTCATCTGCTAAAAGAAGTTATGAATAAATATCCTAATGCAAAAATTTCGGTCTACGGACACTCGTTAGGGTCAATGAATGCACAGTATGCTATTGCAGAATTGGATGATAATCAAATTTACCGAGTTCAAGGAGCTTGGATATATAACGGTCCAAACCTTTATAGTATTTTGACAGATAAACAAAAAGAACAGGTTGATAAAATAAAAGGGGTAGTCAATAATTACGTTGATTCCAAGGATAAAATTGGAATAGGTTATCCTAAAGAAGGAAGCGATAATGCTGTCGGAATTGTTAAAATAGTTGACAGTAAAGCTGTTTCAGGAGGTAGCTGGGTTGCTAATTTTACCAATCAGCACATTTGGGGAGGCTACCAGTACAATCAAGATGGTTCTTTAAAATTAGCAGAAGATAAATTTGCTTACAAAGAAAACTATTCAGTAGTTCATACGAATGTGAATCAAAGAATGCATGCTATTAAAGCGAAACTTAGTAGCTTTAAAAGTACGGGAAAAGAAGTTAGTAAGAATCAAGCTATTTTCCTAGATAGTCAACAAGCAAAAGTGATTTCTAGTGGTTTGGTAACGATATCAAAAGAAGCAGTTGAAGAAGTTAAAAAAGTTGAGCAAAAAGCAGTTGCTAAAGCAGAAGAGCTTTATCAATCTTTAAAAGTAGCTCCTACAGGAGTTACTGAACTAAGTCCTCAAGAATTGGAAGAAGCGTATGCTCAGTCAGGTGTTAGCTATGCGAGCATTGTCGGAGAAGCTCAAACCTTTTTCTCAAATAAAATTCAAGCGGCAGAAAGCATTTCTCACGCTTACGTTGAATTAGAAAACCAAATTAATAAAGGGGTTGAAGCTATGTTGCAACAAGATAGTAACTTGTCAGGGGAGTTTAAACAATGGCAC

SEQ ID NO: 7962 - protein, 430 aa, Streptococcus agalactiae
MEKVLTDLDRVNIAKQEYELGSQLDTLVKIMSQDKVLPIGKVAHVQDGGKETGEQIYTITPNGTLDKPEDVKEVTVLFKGSTAPFGGDDWKTDWFKNDIPIASKLLLKKFGSQSVSHKQGTKQLEQSAHLLKEVMNKYPNAKISVYGHSLGSMNAQYAIAELDDNQIYRVQGAWIYNGPNLYSILTDKQKEQVDKIKGVVNNYVDSKDKIGIGYPKEGSDNAVGIVKIVDSKAVSGGSWVANFTNQHIWGGYQYNQDGSLKLAEDKFAYKENYSVVHTNVNQRMHAIKAKLSSFKSTGKEVSKNQAIFLDSQQAKVISSGLVTISKEAVEEVKKVEQKAVAKAEELYQSLKVAPTGVTELSPQELEEAYAQSGVSYASIVGEAQTFFSNKIQAAESISHAYVELENQINKGVEAMLQQDSNLSGEFKQWH

SEQ ID NO: 7963 - protein, 390 aa, Streptococcus agalactiae
ATGAAGTCAATAAAATTACTTAGTTTTATTGTAATAATCCTTTTAGGGCTTGGTTTCACTGTAGGAGGTTTAAAAGTGACTGAAAACAATAAACAACAAGAATTATGGGAAATAGCTAATAGCAAAGACGCTAAAAATGCTTATCAAAAGTGGATTTATGCAGAAGATAAAGACGCTTTCAAAGAGAATGCTGTTATTAAGTCGTATGATATTGACAAAGAAAGTATCAAAAAAAATCCTATGGGAGGGATTTCGGTAAGGTTAATCATTAATAAAGATCCTAACTTATATATTACTTGTAATTTGGATAAGGATAATCAAGGGCGTTTGGTCAGTCAAAGTAGCCATCAATCTCCCCAGTTAACTCATTTATTGGAAAGTAGAGGTCAT

SEQ ID NO: 7964 - protein, 130 aa, Streptococcus agalactiae
MKSIKLLSFIVIILLGLGFTVGGLKVTENNKQQELWEIANSKDAKNAYQKWIYAEDKDAFKENAVIKSYDIDKESIKKNPMGGISVRLIINKDPNLYITCNLDKDNQGRLVSQSSHQSPQLTHLLESRGH

SEQ ID NO: 7965 - protein, 1260 aa, Streptococcus agalactiae
ATGCTTAAACGTCTAGGTAAAGTATTTGGACCTCTAGTTTGTGCTTTACTATTGTTGGTAGGATTATATCTTGTTTTTCCTGTTTCTCAGCCTCATCATTTAGGTAAGGAAAAAAACAGTGCAGTAGCGTTGACAAAGGCAGGTTTTAAAAGCAGAGTTCAAAAAGTTAGAGCTTTCAGTGATCCTAAAGCCAATTTTGTCCCTTTCTTTGGTTCAAGTGAGTGGTTAAGATTTGATGCAATGCATCCATCAGTTTTAGCAGAGGCTTACAAAAGGCCTTATATCCCATATCTTTTAGGTCAAAAAGGGGCGGCTTCTCTGACACAATACTATGGCATTCAACAGATTAAAGGACAAATCAAAAATAAAAAAGCTATCTATGTTATTTCTCCGCAATGGTTTGTTCGCAAGGGAGCCAACAAAGGTGCTTTTCAAAACTATTTCAGCAACGATCAAACCATTCGATTTTTGCAAAATCAAACAGGGACAACCTACGATAGGTATGCTGCTCGTCGATTGTTAAAATTATATCCTGAAGCTTCTATGTCAGATTTGATAGAAAAAGTTGCAGATGGCCAAAAACTATCAAATAAAGACAAACAAAGACTAAAGTTTAATGATTGGGTATTTGAGAAGACAGATGCTATTTTTAGCTATCTACCACTAGGAAAAACTTATAATCAGGTAATAATGCCTCATGTTGGTAAATTACCGAAAGCATTCTCATATAATCATTTATCGCGTATTGCATCACAAGATGCTAAAGTAGCAACGAGATCAAATCAATTTGGTATTGATGATCGCTTTTACCAAACAAGAATTAAAAAGCACTTAAAAAAATTGAAAGGGTCACAACGACATTTCAATTATACTAAGTCACCAGAATTTAATGATTTACAGTTGGTTCTTAATGAATTCTCAAAACAAAATACAGATGTCCTTTTTGTCATACCACCAGTAAATAAAAAGTGGACAGACTACACAGGGCTTGATCAAAAAATGTATCAAAAATCTGTAGAAAAAATAAAACACCAACTTCAAAGTCAAGGTTTCAATCATATCTCTGACCTTTCTCGAGATGGAGGTAAGCCATACTTTATGCAAGATACAATCCATTTAGGTTGGAATGGTTGGTTAGAGCTAGATAAGCATATCAATCCATTTTTAACAGAGGAAAACAGCAAGCCAAATTATCACATTAATAATAAATTTTTGAAGAGATCTTGGGCAAAATATACAGGACGTCCAAGTGATTACAAG

SEQ ID NO: 7966 - protein, 420 aa, Streptococcus agalactiae
MLKRLGKVFGPLVCALLLLVGLYLVFPVSQPHHLGKEKNSAVALTKAGFKSRVQKVRAFSDPKANFVPFFGSSEWLRFDAMHPSVLAEAYKRPYIPYLLGQKGAASLTQYYGIQQIKGQIKNKKAIYVISPQWFVRKGANKGAFQNYFSNDQTIRFLQNQTGTTYDRYAARRLLKLYPEASMSDLIEKVADGQKLSNKDKQRLKFNDWVFEKTDAIFSYLPLGKTYNQVIMPHVGKLPKAFSYNHLSRIASQDAKVATRSNQFGIDDRFYQTRIKKHLKKLKGSQRHFNYTKSPEFNDLQLVLNEFSKQNTDVLFVIPPVNKKWTDYTGLDQKMYQKSVEKIKHQLQSQGFNHISDLSRDGGKPYFMQDTIHLGWNGWLELDKHINPFLTEENSKPNYHINNKFLKRSWAKYTGRPSDYK

SEQ ID NO: 7967 - protein, 237 aa, Streptococcus agalactiae
ATGGATATTAAATCAGAAGTATTAGCAATTATTGATGACCTATTTATGGAGGATGTTTCTTCTATGATGGATGAAGACTTATTTGACGCAGGAGTTCTAGACAGCATGGGTACTGTTGAACTAATTGTTGAGTTGGAAAGCCACTTTAATATTGATATTCCGATTGCGGAATTTGGTCGTAATGACTGGAACACAGCTAATAAAATTGTTGCTGGAGTAACGGAGCTCTGCAATGCT

SEQ ID NO: 7968 - protein, 79 aa, Streptococcus agalactiae; identical to SEQ ID NO: 3278

SEQ ID NO: 7969 - protein, 1263 aa, Streptococcus agalactiae
GTGATACAGGCATTTTTAGAAAAACTTCCTCACTTGGATGTTTATGGGAATCCACAATATTTCTTCTACCTTATCTTAGCTGTTCTACCAATTTACATCGGCTTATTCTTTAAGAAGCGTTTTGCCTTATATGAGATTATTTTTAGTCTAAGTTTTATTGTAATGATGTTGACTGGTAGTACTTTTAATCAATTGAAGTCACTATTGGCATACGTTGTCGGACAATCTCTGCTAGTTTTTATCTATAAAGCTTACCGGAAACGATTTAATCATACTTTGGTCTTTTATGTAACGGTTTGTTTATCTATTTTTCCGCTATTTTTGGTAAAATTAATTCCAGCTATATCTGAGGATGGGCATCAGTCACTTTTTGGGTTTCTAGGAATTTCTTACCTTACTTTTAGAGCTGTTGCTATGATTATTGAAATGAGAGACGGTGTCTTGAAAGAATTTACTTTATGGGAATTCTTAAGATTTTTACTCTTCTTTCCAACTTTCTCAAGTGGACCAATTGATCGTTTTAAACGATTCAATGAGGATTACATTAATATCCCAGATCGAAATGAACTCCTAGATATGTTAGGTCAAGCGATTCATTATTTGATGTTAGGTTTTCTCTATAAGTTTATTTTAGCCTATATTTTTGGAAGTCTGATTATGCCTCCTCTAAAAGAATTAGCACTAGAACAGGGTGGTGTGTTTAATTGGCCAACACTTGGGGTTATGTATGCCTTTGGTTTTGATTTGTTCTTTGATTTTGCAGGTTACACAATGTTTGCGTTGGCTATTTCTAACCTAATGGGGATTAAGTCTCCGATTAACTTTGACAAACCTTTCAAATCACGCGACCTAAAAGAATTTTGGAATAGATGGCATATGAGCCTTTCTTTCTGGTTTAGAGACTTTGTTTTCATGAGGCTTGTTAAGCTTTTAGTTAAAAATAAAGTTTTTAAAAACCGTAATGTTACTTCAAGTGTAGCTTATATTATCAATATGCTTCTTATGGGATTCTGGCATGGGTTAACTTGGTACTATATAGCCTATGGTCTCTTTCATGGGATTGGCCTAGTTATTAATGACGCTTGGGTACGTAAGAAGAAAAATATTAATAAAGAAAGAAGATTGGCTAAAAAACCACTTTTACCAGAAAACAAATGGACTTATGCTTTGGGTGTCTTCATCACCTTTAATGTAGTTATGTTTTCTTTCTTGATTTTTTCAGGATTTTTAGATCTTTTGTGGTTCCCACAACCGCATAACAAA

SEQ ID NO: 7970 - protein, 421 aa, Streptococcus agalactiae; identical to SEQ ID NO: 3280

SEQ ID NO: 7971 - DNA, 1533 bp, Streptococcus agalactiae
atgatacatgatatgattaaaacaattgagcattttgctgagacacaagctgattttccagtgtatgatattttaggggaagtccatacttatggacaacttaaagtagactctgactctctagctgctcatattgatagcctaggtcttgttgaaaaatcacctgtcttagtattcggtggtcaagaatatgaaatgttggcgacatttgttgctttaacaaagtcagggcatgcttatataccggttgaccaacactctgctttggatagaatacaggctattatgacagttgctcaaccaagccttatcatttcaattggtgaatttcctcttgaagttgataatgtcccaatcctagacgtttctcaagtttcagctatttttgaagaaaagactccttatgaggtaacacattctgttaaaggtgatgataattactatattattttcacttcagggactactggtttaccaaaaggtgtgcaaatttcacatgacaatttattgagctttacaaattggatgatttctgatgatgagttttcagttcctgaaagaccgcaaatgttggctcaaccgccatattcatttgacttatcagttatgtattgggcaccaacactagctatgggaggcaccctgttcgccctaccaaaaacagtggttaatgatttcaaaaaactattcgctaccattaatgaattgccaatacaggtttggacttcgacaccatcatttgctgatatggcgctactatctaacgatttcaattcagagaccttgccacaattaacacatttttattttgatggggaagagttaactgtcaagactgcacaaaaacttcgtcaacgttttccaaaagctcgtatcgttaatgcatatgggccaacagaagcaacagttgctctatccgcagtagcaattactgatgaaatgttagaaacatgcaaacgccttccaattggttacactaaagatgactcaccaacgtatgtgattgatgaagaaggtcataaattaccaaacggagagcaaggtgaaatcattattgctggaccagcagtatcaaaaggctatcttaacaatccagaaaagacagctgaggcatttttccaattcgaaggtctacctgcttaccataccggtgacttaggaagtatgaccgatgaaggtcttctgctttacggtgggcgtatggatttccaaattaaatttaacggctatcgtattgaattagaagatgtttctcaaaacttaaataaatcgcagtatgtaaaatcagcagtagcagtgccacgttataacaaggatcataaagttcaaaatttattagcctatattgtcttaaaagaaggtgtaagagatgattttgaacgtgatttggatttgacaaaagcaattaaggaagacttaaaggacattatgatggattacatgatgccatctaaatttatctatcgagaagatttacctttgacaccaaatggaaaaattgatatcaaaggtcttatgagcgaggtaaacaag

SEQ ID NO: 7972 - protein, 511 aa, Streptococcus agalactiae [sequence omitted]

SEQ ID NO: 7973 - DNA, 1185 bp, Streptococcus agalactiae
atgtttagtgatttacgcaaaaaatttgtctttttgaccatgtcaatccttattgtcgttgttctctttctctttgcagtgagtaatcgctacaatcaatattgggatgaatatgatgcatataggattgttaaattagttgccaaaaatgattatttaggaataccaggcgatgaaccgattgctttggtgactatagataaccaaaagatggttaagattcaaagcaataatactgatttgacaaatgatgttatcgaaaaatctagtttgaagctccttgagcaaggaaagaagtcacgaaaatggaagtcttttatatattccataaaagaatataaagataaaacctacaccatagctattatggatttggctagttatgaagtcccttatgcaaggcgttttctaattcttgtttttactatttttggattttgtttattagcagctgtaagtctttatctttctcgatttatcgtagggcctgtagagacagaaatgactcgcgaaaaacagttcgtttcagatgcgagtcatgagctgaagacccctattgcagctatacgagccaacgttcaggttctggaacagcaaattccaggaaatcgttatctggatcatgttgtttcggagactaagcgaatggagtttttaattgaagatttgcttaatttgtctagacttgatgaaaaacgctccaaggtaaatttcaaaaagttaaacttatctgtcttatgtcaagaagtacttctgacatatgaaagtttggcatatgaagaagaaaagtgtttaaatgatacgattgaagatgatgtctggattgttggagaagagagtcagattaagcaaattttaataattcttttggataatgctattaggcattctttgtcaaaatcagaaatccagtttagtcttaaacaggctcgaagaaaagctattctgacaatatcaaatccaagtgctatctattccaaagaggttatggataatctctttgagcgtttttatcaagctaaagatgatcatgcagattctctcagttttggtctaggcttatctattgctaaggcaatcgtggaacgccataaggggagaattagagcatatcaagaaaaagaccaattacgtcttgaagtccagttaccaattgatggattttggaccaataccatgattaat

SEQ ID NO: 7974 - protein, 395 aa, Streptococcus agalactiae
MFSDLRKKFVFLTMSILIVVVLFLFAVSNRYNQYWDEYDAYRIVKLVAKNDYLGIPGDEPIALVTIDNQKMVKIQSNNTDLTNDVIEKSSLKLLEQGKKSRKWKSFIYSIKEYKDKTYTIAIMDLASYEVPYARRFLILVFTIFGFCLLAAVSLYLSRFIVGPVETEMTREKQFVSDASHELKTPIAAIRANVQVLEQQIPGNRYLDHVVSETKRMEFLIEDLLNLSRLDEKRSKVNFKKLNLSVLCQEVLLTYESLAYEEEKCLNDTIEDDVWIVGEESQIKQILIILLDNAIRHSLSKSEIQFSLKQARRKAILTISNPSAIYSKEVMDNLFERFYQAKDDHADSLSFGLGLSIAKAIVERHKGRIRAYQEKDQLRLEVQLPIDGFWTNTMIN

SEQ ID NO: 7975 - DNA, 486 bp, Streptococcus agalactiae
atgagacttcttgtagttgaggatgaaaaaagtatagcagaggctattcaggctttattggcagataaaggttattctgttgatttagcatttgatggagatgatgggttagaatacattttgacaggtctctatgatttagtcctgttggatattatgttacccaaacgctcaggattatctgttttaaaaagagtgagggaagctggtttagaaaccccaataatctttttaactgcaaaatcacagacttatgataaagttaatggtttagatttaggggcagatgattatatcacaaaaccctttgaagcagatgaattgctagctagaattaggctgagaaccagacaatcttctctaatcagagcaaatcaattgcggcttggaaatataaggcttaacacagattcacatgagctagaatctaaagaaagtagtgtaaaattatccaataaagaatttctcttgatggaagtttttatg

SEQ ID NO: 7976 - protein, 162 aa, Streptococcus agalactiae
MRLLVVEDEKSIAEAIQALLADKGYSVDLAFDGDDGLEYILTGLYDLVLLDIMLPKRSGLSVLKRVREAGLETPIIFLTAKSQTYDKVNGLDLGADDYITKPFEADELLARIRLRTRQSSLIRANQLRLGNIRLNTDSHELESKESSVKLSNKEFLLMEVFM

SEQ ID NO: 7977 - DNA, 132 bp, Streptococcus agalactiae
gtgaaacgtacttatcaaccaagtaaaatccgtcgccaacgtaaacacggattccgtcaccgtatgtcaactaaaaacggacgtcgcgtgcttgctagccgccgtcgtaaaggacgtaaagtgttatcagct

SEQ ID NO: 7978 - protein, 44 aa, Streptococcus agalactiae; identical to SEQ ID NO: 3288

SEQ ID NO: 7979 - DNA, 1191 bp, Streptococcus agalactiae
  misc_feature 1186, 1187, 1188, 1189, 1190: n = A,T,C or G
atgaaaaaagaaagtatatctattaaagatatcttgtggtttattattccgtcgttatttggagtattattattaatgactccatttaaatataatggtatgacaacagtagctgtctctgtaatctctaagacaattaatcaatggattaacgctgtttttcctatacattatattattttactaatcatttttatttcatgtgtgttagcactttgttatcgtctgtttagacctagctttattgaaaaaaatgacttgctaaaagaaatttctgacattaccattttctggctgattattcgtttgatcggtttggcacttggtctgatgacggttttacatattggtcctgaaatggtatgggggaaagagacaggcggccttatcctttttgatttgattggtggtttgtttaccattttccttgctgcgggttttattcttccatttttgacagaatttggtctactggagtttgttggtgtcttcttaacccccattatgcgtccattctttcagctacctggtcggtcagcagttaattgtgtagcctcatttgtaggtgatggtactattggaattgctttgaccgataagcagtatgttgagggttattataccagtagagaagctgcaacgatttccactactttttcagcagtatcaatcactttttgtcttgttgttttgcagaatgttggcttaactgattattttggccatttttatctaacagtcatcattagcagtgttgtctgtgcatccattatcccttatatccctcccttatctcgtcaatcaaatagttattacactaaaccaaagaaagaaacatctgaggtaattccggatggttataacaagatagagtggggacttaagcttgccatcgataaatcaaaagcaaatggaaacatgaagacttttgtcaataatgcctctaagacagtacttagtttatggtttggcgttatgccaacaattatgactgtcggaacaatagctttgattatttcagtatcaacacctatttttaaaattttaggtacaccattccttccattccttgaacttttagggattccagaagcagatattgcgagtcaaaccatgattgttggtttttcagaatatggttgttccttcgataatggcgggagaattcacagtgagatgacaagcnnnnnt

SEQ ID NO: 7980 - protein, 397 aa, Streptococcus agalactiae
  VARIANT 396, 397: Xaa = Any Amino Acid
MKKESISIKDILWFIIPSLFGVLLLMTPFKYNGMTTVAVSVISKTINQWINAVFPIHYIILLIIFISCVLALCYRLFRPSFIEKNDLLKEISDITIFWLIIRLIGLALGLMTVLHIGPEMVWGKETGGLILFDLIGGLFTIFLAAGFILPFLTEFGLLEFVGVFLTPIMRPFFQLPGRSAVNCVASFVGDGTIGIALTDKQYVEGYYTSREAATISTTFSAVSITFCLVVLQNVGLTDYFGHFYLTVIISSVVCASIIPYIPPLSRQSNSYYTKPKKETSEVIPDGYNKIEWGLKLAIDKSKANGNMKTFVNNASKTVLSLWFGVMPTIMTVGTIALIISVSTPIFKILGTPFLPFLELLGIPEADIASQTMIVGFSEYGCSFDNGGRIHSEMTSXX

SEQ ID NO: 7981 - protein, 1723 aa, Streptococcus agalactiae
TTGGAAATTTATTACAACATAAGTTACCGGTCGCACCATTTGTAGAGTCAACGACCAATTGGATTACGAAAACTTTTTCTGGTTTATTTGACTTTATCCAGACAATCGGTAATGCATTGATGGATTGGATGACAAAAACATTACTATTCATTAATCCTTTACTTTTTATTGTACTAATTACAGTTGCTGTATTTTTCTTAGCTAAGAAAAAATGGCAATTACCGACATTTACTTTCATTGGTTTGCTATTTATCTATAACCAAGGGCTGTGGGAGCAGTTGATTAATACTTTTAACTTGGTTTTAGTAGCAAGTTTAATTTCTATTATTATTGGTGTACCACTAGGTATTTGGATGGCAAAAAGTGATAAAGTTAAACAAGTTGTTAATCCAATTCTTGACTTTATGCAAACTATGCCAGCATTCGTTTACCTTATTCCTGCAGTAGCCTTCTTTGGTATCGGTATGGTACCAGGTGTCTTTGCCTCTGTTGTATTTGCTTTGCCTCCAACAGTGCGCTTTACTAACTTGGCTATTCGTGAAATCCCACTTGAATTAATAGAAGCATCTGATTCATTTGGTTCAACAGCTAAGCAAAAATTATTCAAAGTTGAACTACCACTTGCTAAGAACACTATTATGGCAGGAATCAATCAAACTATGATGTTGGCTCTTTCTATGGTGGTTACAGGATCTATGATCGGTGCACCTGGACTTGGTCGTGAGGTGTTATCGGCGCTTCAACATGCTGATATTGGTACAGGATTTGTTAGTGGTCTATCGCTAGTTATTTTAGCAATCGTGTTAGACCGTGTTAGTCAATTCTTTAATTCCAAACCGGGTGAGAAGCAAGCTAAAACATCAAAAGTTAAAAAATGGGTAGGTTTAGGGGCCTTGGTTCTCTTCATTCTAGCAGCTCTTGGTCGCATTGTTGTCAATATGACTTCAGGAAATGAAGCCAAAGGTCAAAAAGTGAAAATAGCTTATGTCCAATGGGATTCAGAAGTTGCTTCAACCAACGTTATTGCTGAAGTTTTAAAATCTAAAGGATATGATGTTGAATTGACACCACTTGATAATGCGGTCATGTGGCAAACAGTCGCCAATGGGAATGCTGATTTTACAACAAGTGCTTGGTTGCCAAAGACCCACGGGCAATATTTTAATAAATACAAAAATAGTTTAGATGACTTAGGTCCTCACGTTGAGAACGTCAAAATAGGTTTAGTTGTTCCTAAATACATGAACGTAAATAGTATTGAAGAATTATCAAATCAAGCAGATAAACAAATTACAGGTATCGAACCAGGTGCAGGTATTATGAAGTCTGCTAAACAATCCCTTAAAGATTATCCAAACCTTTCAAGTTGGAAGTTGTTATCAGCATCAACAGGAGCTATGACAACAACCTTAGGGAAGGCTATCAAAAACAAAGATCAAGTAGTCATTACAGGTTGGTCACCTCACTGGATGTTTGCTAAGTATGATTTAAAATACCTTAAAGATCCTAAGAAATCATTTGGTGGTGAAGAACATATCAATACAATAGCACGCAAGAATTGAAAAAAGATATGCCAAAAGTATATAAAATTATCGATAAGTTCAAGTGGACTAAAGAAGATATGGAATCTATCATGTTAGATATGGATAAAGGTATGGAGCCTGCTAAAGCAGCTCAAAAATGGATTAAAAACCACAAAAAAGAAGTTTCAGAGTGGACTAAA

SEQ ID NO: 7982 - protein, 575 aa, Streptococcus agalactiae
MENLLQHKLPVAPFVESTTNWITKTFSGLFDFIQTIGNALMDWMTKTLLFINPLLFIVLITVAVFFLAKKKWQLPTFTFIGLLFIYNQGLWEQLINTFNLVLVASLISIIIGVPLGIWMAKSDKVKQVVNPILDFMQTMPAFVYLIPAVAFFGIGMVPGVFASVVFALPPTVRFTNLAIREIPLELIEASDSFGSTAKQKLFKVELPLAKNTIMAGINQTMMLALSMVVTGSMIGAPGLGREVLSALQHADIGTGFVSGLSLVILAIVLDRVSQFFNSKPGEKQAKTSKVKKWVGLGALVLFILAALGRIVVNMTSGNEAKGQKVKIAYVQWDSEVASTNVIAEVLKSKGYDVELTPLDNAVMWQTVANGNADFTTSAWLPKTHGQYFNKYKNSLDDLGPHVENVKIGLVVPKYMNVNSIEELSNQADKQITGIEPGAGIMKSAKQSLKDYPNLSSWKLLSASTGAMTTTLGKAIKNKDQVVITGWSPHWMFAKYDLKYLKDPKKSFGGEEHINTIARKNLKKDMPKVYKIIDKFKWTKEDMESIMLDMDKGMEPAKAAQKWIKNHKKEVSEWTK

SEQ ID NO: 7983 - protein, 303 aa, Streptococcus agalactiae
ATGTTAATGGCAACGAATCGTCGTCGCCAACTTCTGGGATCCCTAACTGCAGATGCTGCAATTGAAGCTCGTAAGAAAGGTTTGCCGCTTTCTGAAGTGATTGATAAAGATGTTGTAACGGTCTCAAAAGATACAGTTATTACAGATATCATGCCTTTAATTTATGATTCATCTGCTCCGATAGCCGTTACTGATGATAATGATAGACTCCTAGGGGTTATCATTAGAGGACGTGTGATCGAAGCACTTGCTAACGTTCAAGATGAAACAGTAGTAGAATCGCCAAAAGAAACGGTAGAAGCT

SEQ ID NO: 7984 - protein, 101 aa, Streptococcus agalactiae
MLMATNRRRQLLGSLTADAAIEARKKGLPLSEVIDKDVVTVSKDTVITDIMPLIYDSSAPIAVTDDNDRLLGVIIRGRVIEALANVQDETVVESPKETVEA

SEQ ID NO: 7985 - protein, 858 aa, Streptococcus agalactiae
ATGACAAATATTTTAGAAGTGAAGAATTTAACCAAAATTTTTGGGAAAAAGCAAAAAGCTGCTCTTGAAATGGTTAAGCAAGGAAAAAGTAAGACAGAAATTCTTGAAAAAACAGGAGCGACTGTAGGTGTCTATGATGCGAGTTTTGAAATAAAAGAAGGCGAAATTTTCGTTATCATGGGACTTTCTGGTTCAGGAAAATCAACTTTAGTTCGGATGTTAAACCGTTTGATTGACCCATCATCGGGAAATATCTATTTAGATGGTAAAGATATTGCAAAGATGAATGTAGAAGATTTACGTAACATTCGTCGTCACGATATCAACATGGTTTTCCAAAATTTTGGTCTTTTCCCACATCGTACAATTTTAGAAAATACAGAGTTTGGGTTAGAGATGCGTGGTGTTTCTAAGGAAGAACGTACAATGTTAGCTGAAAAAGCTTTGGACAATGCAGGTCTATTACCGTTTAAAGATCAATACCCCAGTCAATTATCAGGAGGAATGCAACAGCGTGTTGGTTTAGCACGTGCCCTTGCTAACAGCCCTAAAATCCTTCTGATGGATGAGGCCTTCTCAGCTTTAGACCCATTAATTCGTCGTGAAATGCAAGATGAGCTTCTTGATCTTCAAGACACGAATAAACAAACTATTATTTTTATCAGCCATGATTTGAATGAAGCGTTACGTATTGGTGATCGTATTGCTCTGATGAAAGATGGGGAAATCATGCAGATTGGTACAGGAGAAGAGATTTTGACTAATCCGGCTAATGATTTTGTTCGTGAGTTTGTTGAAGACGTTGATCGCTCAAGTGTTAACTGCTCAAAATATTATGATAAAACCTTACAACTGTTT

SEQ ID NO: 7986 - protein, 287 aa, Streptococcus agalactiae
  VARIANT 272: Xaa = Any Amino Acid
MTNILEVKNLTKIFGKKQKAALEMVKQGKSKTEILEKTGATVGVYDASFEIKEGEIFVIMGLSGSGKSTLVRMLNRLIDPSSGNIYLDGKDIAKMNVEDLRNIRRHDINMVFQNFGLFPHRTILENTEFGLEMRGVSKEERTMLAEKALDNAGLLPFKDQYPSQLSGGMQQRVGLARALANSPKILLMDEAFSALDPLIRREMQDELLDLQDTNKQTIIFISHDLNEALRIGDRIALMKDGEIMQIGTGEEILTNPANDFVREFVEDVDRSXVLTAQNIMIKPLQLF

SEQ ID NO: 7987 - protein, 2374 aa, Streptococcus agalactiae
ATGTCAGAATTTGATACAAAATCATATTTAGAAAAACTTGATGCATGGTGGAGAGCAGCTAATTATATTTCTGCAGCACAAATGTATCTAAAGGATAATCCTCTCTTGAGACGAGAGCTAGTTGAAAACGACTTAAAGGTTCATCCAATTGGTCACTGGGGCACTGTACCTGGACAAAACTTTATCTATGCTCACTTAAATCGCGCTATTAATAAATACGATTTAGACATGTTCTATATTGAAGGTCCAGGTCATGGTGGTCAAGTTATGGTATCTAATTCATATTTAGATGGTTCATATACTGAATTAAACCCAAATATTGAGCAAACAGAGGATGGCTTTAAGCAGTTATGTAAAATCTTCTCTTTCCCAGGTGGAATTGCATCCCATGCAGCACCAGAAACACCAGGGTCAATTCATGAAGGTGGTGAACTTGGTTACGCACTTTCTCATGCGACAGGTGCCATCCTAGACAATCCAGATGTTATTGCTGCGACTGTTATTGGTGATGGTGAAGGTGAAACAGGACCACTTATGGCTGGTTGGCTATCTAATACCTTTATCAATCCAGTAAATGATGGTGCTGTTCTACCAATCTTCTATTTAAATGGTGGTAAAATCCATAACCCAACTATCTTTGAACGTAAGACAGATGAAGAATTATCTCAGTTTTTTGAAGGATTAGGTTGGAAACCTATTTTTGCAGATGTTGTTGAACTCTCTGAGGATCATGCGGCTGCTCATGCTTTGTTTGCAGAAAAATTAGATCAAGCTATTCAAGAGATTAAAACCATTCAATCAGAAGCACGACAAAAACCAGCAGAAGAAGCTATCCAAGCAAAATTCCCTGTCTTGGTTGCACGTATTCCTAAGGGGTGGACTGGTCCAAAAGCTTGGGAAGGAACACCAATTGAAGGTGGCTTCCGCGCTCACCAAGTACCAATTCCAGTAGATGCCCACCATATGGAACATGTCGATTCTCTTTTGTCATGGCTTCAATCATACCGTCCAGAAGAATTATTTGATGAAAGTGGTAAAATCGTTGATGAGATTGCTGCTATTTCACCAAAAGGTGATCGTCGCATGTCCATGAATCCAATAACCAATGCTGGTATTGTTAAAGCAATGGATACAGCAGATTGGAAGAAATTTGCTCTTGATATTAATGTTCCAGGTCAAATTATGGCACAAGATATGATTGAATTTGGAAAATATGCAGCAGATTTGGTAGATGCTAATCCAGATAATTTCCGTATTTTTGGTCCAGATGAAACGAAATCAAATCGTCTTCAAGAAGTGTTTACACGTACTAGCCGTCAATGGCTTGGTCGTCGTAAACCAGATTATGACGAAGCTTTAAGTCCAGCTGGACGTGTTATTGATTCCCAATTGTCTGACATCAAGCAGAAGGTTTCTTAGAAGGTTATGTTTAACTGGTCGTCACGGCTTCTTTGCTTCATACGAATCATTCCTTCGCGTTGTAGATTCAATGGTAACACAACATTTCAAATGGTTACGTAAATCAAAAACACACACAACATGGCGTAAAAATTATCCAGCGCTTAACTTAATTGCAGCTTCAACTGTTTTCCAACAAGATCATAATGGTTACACTCACCAAGATCCAGGTATCTTAACTCACTTAGCTGAAAAAACACCTGAATACATTCGTGAATATTTACCAGCAGATACTAACTCACTTCTAGCTGTTATGGATAAAGCGTTTAAAGCTGAAGATAAAATTAATTTAATTGTGACATCTAAGCACCCTCGTCCACAATTTTACTCTATTGCTGAAGCAGAAGAGTTAGTGGCAGAAGGATATAAGGTGATTGACTGGGCTTCAAATGTGTCGCTTAATCAAGAGCCAGATGTTGTCTTTGCTGCGGCGGGAACAGAACCTAACTTAGAAGCTTTGGCAGCTATTAGTATTCTTCATAAGGCTTTCCCAGAACTTAAGATTAGATTTGTTAATGTATTAGACATCCTAAAACTTCGTCATCCTTCACAAGATGCTCGCGGTTTATCAGATGAAGAGTTTGACAAAGTCTTTACCACAGATAAACCTGTTATTTTTGCTTTCCATAGTTATGAAGATATGATTCGAGATATTTTCTTTAGTCGTCACAATCATAATTTGCATACGCATGGTTACCGTGAAAATGGTGATATCACAACACCATTTGATATGCGCGTGATGTCAGAATTGGACCGATTCCATCTGGCACAGGATGCAGCTCTTGCTTCTTTAGGAAATGAAGCACAAGCCTTCAGTGATGAAATGAATCAAATGGTTGCTTATCACAAAGACTATATTCGTGAACACGGAGACGATATTCCAGAAGTGCAAAATTGGAAATGGGAAAATATCAAG

SEQ ID NO: 7988 - protein, 792 aa, Streptococcus agalactiae
  VARIANT 466: Xaa = Any Amino Acid
MSEFDTKSYLEKLDAWWRAANYISAAQMYLKDNPLLRRELVENDLKVHPIGHWGTVPGQNFIYAHLNRAINKYDLDMFYIEGPGHGGQVMVSNSYLDGSYTELNPNIEQTEDGFKQLCKIFSFPGGIASHAAPETPGSIHEGGELGYALSHATGAILDNPDVIAATVIGDGEGETGPLMAGWLSNTFINPVNDGAVLPIFYLNGGKIHNPTIFERKTDEELSQFFEGLGWKPIFADVVELSEDHAAAHALFAEKLDQAIQEIKTIQSEARQKPAEEAIQAKFPVLVARIPKGWTGPKAWEGTPIEGGFRAHQVPIPVDAHHMEHVDSLLSWLQSYRPEELFDESGKIVDEIAAISPKGDRRMSMNPITNAGIVKAMDTADWKKFALDINVPGQIMAQDMIEFGKYAADLVDANPDNFRIFGPDETKSNRLQEVFTRTSRQWLGRRKPDYDEALSPAGRVIDSQLSXHQAEGFLEGYVLTGRHGFFASYESFLRVVDSMVTQHFKWLRKSKTHTTWRKNYPALNLIAASTVFQQDHNGYTHQDPGILTHLAEKTPEYIREYLPADTNSLLAVMDKAFKAEDKINLIVTSKHPRPQFYSIAEAEELVAEGYKVIDWASNVSLNQEPDVVFAAAGTEPNLEALAAISILHKAFPELKIRFVNVLDILKLRHPSQDARGLSDEEFDKVFTTDKPVIFAFHSYEDMIRDIFFSRHNHNLHTHGYRENGDITTPFDMRVMSELDRFHLAQDAALASLGNEAQAFSDEMNQMVAYHKDYIREHGDDIPEVQNWKWENIK

SEQ ID NO: 7989 - protein, 1089 aa, Streptococcus agalactiae
ATGCCTAACGTTAAAGATATTACTAGAGAATCATGGATTTTATCAACATTCCCAGAATGGGGAACATGGCTAAACGAAGAAATTGAAGAAGAAGTTGTTGCTGATGGCAACTTTGCAATGTGGTGGTTAGGAAACTGTGGTGTTTGGATTAAAACACCAGGTGGTGCTAATGTTGTTATGGACCTATGGTCAAACCGCGGTAAATCAACAAAAAAAGTAAAAGATATGGTTCGTGGACACCAAATGGCTAATATGGCAGGTGTTCGTAAACTCCAACCAAACTTACGCGCACAACCAATGGTTATTGATCCATTTGCTATTAATGAATTGGATTACTATCTTGTTTCACATTTCCACAGTGACCACATTGATATTAACACTGCGGCAGCCATTATTAATAATCCTAACTTAGACCATGTTAAATTTGTTGGGCCATATGAATGTGGTGAAATTTGGAAAAAATGGGGAGTTCCAGAAGAACGAATCATAGTGATTAAACCAGGTGAATCATTTGAGTTTAAAGACATCAAAGTTACTGCTGTTGAATCATTTGACCGTACTTGCTTGGTGACACTTCCAGTAGATGGTGCAGAAGAACATGATGGAGAACTTGCTGGTTTAGCCGTGACTGATGAAGAAATGGCTCGTAAAGCAGTTAACTATATTTTTGAAACACCAGGTGGAACAATCTACCATGGAGCTGACTCACATTTTTCAAATTATTTTGCTAAACATGGTAAAGACTACAAGATTGACGTAGCTATTAACAACTATGGTGATAACCCAGTTGGTATTCAGGATAAAATGACTTCAATCGATCTTCTTCGTATGGCAGAAAATCTCCGTGCCAAAGTCATTATTCCTGTACACTACGATATCTGGTCTAACTTCATGGCTTCTACAGACGAAATCTTACAATTGTGGAAAATGCGTAAAGAACGCCTTCAATATGACTTCCATCCATTTATTTGGGAAGTTGGAGGTAAATACACTTATCCACAAGATAAAGATAGAATTGAATACCATCACCCACGTGGTTTTGATGATTGCTTCGAACAAGAATCAAATATTCAATTTAAAGCACTTCTA

SEQ ID NO: 7990 - protein, 363 aa, Streptococcus agalactiae
MPNVKDITRESWILSTFPEWGTWLNEEIEEEVVADGNFAMWWLGNCGVWIKTPGGANVVMDLWSNRGKSTKKVKDMVRGHQMANMAGVRKLQPNLRAQPMVIDPFAINELDYYLVSHFHSDHIDINTAAAIINNPNLDHVKFVGPYECGEIWKKWGVPEERIIVIKPGESFEFKDIKVTAVESFDRTCLVTLPVDGAEEHDGELAGLAVTDEEMARKAVNYIFETPGGTIYHGADSHFSNYFAKHGKDYKIDVAINNYGDNPVGIQDKMTSIDLLRMAENLRAKVIIPVHYDIWSNFMASTDEILQLWKMRKERLQYDFHPFIWEVGGKYTYPQDKDRIEYHHPRGFDDCFEQESNIQFKALL

SEQ ID NO: 7991 - DNA, 1605 bp, Streptococcus agalactiae
atggcaattgccaacgcacttaatcagtctaggcgtaaagtgtattatcacttagagaagataaacgatgcactgcctagcgatgtgcctcagattgttagttatccacgtgtaggaatcttgctaaccgaaaaacaaaaagcagcctgtcgtcttttattagatgaagtaactgattatagttacgtcatgaaaagtagtgagaggttgcagctgtctttagtatctatcgtggtagctaaggaccgcataacgattgataggttgatgcaactaaacgatgtttctcgaaatactatcttaaacgatttaaacgaattaagaagtgagttagcagagaaagaatataatttacagttacaatcaacaaaatgtcgcggttattttttagatggtcacccattgtccattatccagtacttatataagctcttagatgatatctaccataatggaagtagtagttttatagacctttttaatcataaactgtctcaagcttttggtgccagcacatatttttctaaagaggttcttgattattttcaccattatctcttcatttctcaacgaagtctaggtaagaaaatcaacagtcaagatggtcagtttatgattcagattttgccttttatactaatggcttatcgtaagatgcgattaagtcctgaagtacagacctctcttaatagtgattttagcttggtttggcaacgtaaggaatatgagattgctaaagagttggctgatgagctggaagaaaattttcagttatcactggatgagattgaagtgggactagtggccatgcttatgcttagtttccgcaaggaccgtgacaatcatttagagagccaggattatgatgatatgcgagctactctaaccagttttttgaaagaattggaagaacgatatcaccttcactttgttcataaaaaggacttactaagacaacttctaactcactgcaaggcactcttatatcgtaaacgttatggtattttttctgttaatcctttaacagagcatattaaagacaaatatgaagaactttttgccataacctcgtcttctgtaaagcttttagagaaagcttggcaaatcaaattgaccgatgatgatgtagcatatctaacgattcatttaggaggggaacttcgtaatagtcaacaatctcctaataaacttaagttagttattgtatctgatgaaggaatagcgattcagaaacttcttttaaagcaatgtcaacgctacttaacaaacagtgatatagaagctgtttttacaaccgaacagtaccaaagtgtgagtgatcttatgcatgtagatatggttgtctctactagtgacgctttagaatctcgttttccgatgttagtagttcaccctgttttgacagatgatgatattattcgcttgattcgcttttcaaaaaaaggtaactgtacaaatagtaatcaatttaccaatgaacttgaaaaaacgattgctcaatatgtcaaggaagatagtgaacgctacgtgctgaaatctaagattgagaaacttattcatcaagaattgctccaagacgtccttccccttcaaagtacagtttgt

SEQ ID NO: 7992 - protein, 535 aa, Streptococcus agalactiae
MAIANALNQSRRKVYYHLEKINDALPSDVPQIVSYPRVGILLTEKQKAACRLLLDEVTDYSYVMKSSERLQLSLVSIVVAKDRITIDRLMQLNDVSRNTILNDLNELRSELAEKEYNLQLQSTKCRGYFLDGHPLSIIQYLYKLLDDIYHNGSSSFIDLFNHKLSQAFGASTYFSKEVLDYFHHYLFISQRSLGKKINSQDGQFMIQILPFILMAYRKMRLSPEVQTSLNSDFSLVWQRKEYEIAKELADELEENFQLSLDEIEVGLVAMLMLSFRKDRDNHLESQDYDDMRATLTSFLKELEERYHLHFVHKKDLLRQLLTHCKALLYRKRYGIFSVNPLTEHIKDKYEELFAITSSSVKLLEKAWQIKLTDDDVAYLTIHLGGELRNSQQSPNKLKLVIVSDEGIAIQKLLLKQCQRYLTNSDIEAVFTTEQYQSVSDLMHVDMVVSTSDALESRFPMLVVHPVLTDDDIIRLIRFSKKGNCTNSNQFTNELEKTIAQYVKEDSERYVLKSKIEKLIHQELLQDVLPLQSTVC

SEQ ID NO: 7993 - DNA, 759 bp, Streptococcus agalactiae
atgaaacaagaagatattattatcaatagtattgtattcaaaaaacagttagacaaaggttttacacaagttcagctcattaagttagtaaaggatttaggattttcacgatttgagatacgtcaagaattgcttcaagatccagatagagagctacccgctttaaaagcagaggctgacttttatgatatcaatctttactatagtgctaatgaagaccttatcaaaggagggaaagttaatccttatcttaataaaggccttaaagaagcatcacagttaggagctcctttcattaagctaaatgttggacaaaccagaaacttaagtaaagaagagttagaacctcttaaagagatattgaaaagccaaactattggtataaaggtggaaaataatcaagaccctaaagcagctacagtggagaattgccaatattttatgactctagtgaaagaattacaaataccaataagttttgtttttgatactgctaattgggcctttatcaaccaagatctataccaagcggtaaatagcttagcttgtgataccacctaccttcactgtaaaaattttttacaggtagctggaaagcctcacctctcgaagagcctcttcgaaggagagattgatctgactgatttgttaaagagtttctctaattgtgagtatctagctctagaataccccacagaattggaggtattaaaaagggatgttcaacgtttaatctctatcagcaatagtcaaaacttt

SEQ ID NO: 7994 - protein, 253 aa, Streptococcus agalactiae
MKQEDIIINSIVFKKQLDKGFTQVQLIKLVKDLGFSRFEIRQELLQDPDRELPALKAEADFYDINLYYSANEDLIKGGKVNPYLNKGLKEASQLGAPFIKLNVGQTRNLSKEELEPLKEILKSQTIGIKVENNQDPKAATVENCQYFMTLVKELQIPISFVFDTANWAFINQDLYQAVNSLACDTTYLHCKNFLQVAGKPHLSKSLFEGEIDLTDLLKSFSNCEYLALEYPTELEVLKRDVQRLISISNSQNF

SEQ ID NO: 7995 - DNA, 1515 bp, Streptococcus agalactiae
atgacttattaccttagtattgactacggcggtacaaataccaaggcgcttatttttgacaaattaggacaccaaatcgctgtttcgagttttgaaactttaaaaaatgagactcaatctggtcatcgtcaagtaaaccttgttaaaacgtggaatgctataacttctgctattagagaggttattcaaatctcaaaactcagccctgagcagattagtgcagtagcatgtattggacatgggaaaggtctttatctgctagataataagttggagccacttgaacaaggaattttgtctacagataatcgtgccaaagatttggcgcaatatttcgaatctaaacttgataatatttgggagttgactcggcaacatattttcccttcacaaagtccagttattttacgttggcttaaagattatcagcccgaaacctataaatcaataggggcggtcctttctgcaaaggactttattcggtataagcttacaggaaaagtacagcaagaatatggtgacgcttcaggtaatcattggataaatttccaaacaggaacttatgatccagctattttagatttttttggcattagagagatagaaaactcacttcctgaacttatagatagtgcagatttagttcctgggggaattagttctcaagcagcaaaagagactggtcttgtagaagggacccccgttgttggagggctctttgacatcgatgcttgtgctcttggatcaggtgttttagagtcagatacttttagtgttatttcgggaacttggaatattaatacatatccaagtttaaaaccagcaaagcaagatagtggtcttatgacttcctattttccagatcgtcgttatctcttagaggcaagtagccctacttctgcagggaatcttaattttatgttaaaaatgctcatgcatcaagaaattgataacgctaaatctagtggaggttctatctatgataatttagaagaatttctcactcatactgatgctacacatcatggacttattttctttccgtttctttacggtagtaacacatcacaagatgctagcgcttgcttttttgggctaacaactaaatcgacgaaatctcagatgatacgtgcggtatatgaaggtaatgcgtttgcacataagcagcatatcactgatttaataaaaagtaggggcagtgtgccaaaaataattcgtttctctggcggagctaccaactcaccagcatggatgcaaatgttttctgatatcttaaactttcctattgaaacagtagaaggcacagaattaggagggttaggaggagctattttagcacgtcatgctttagataagatttcgttaaaggaagcagtccaagatatggttcgtgtaaaagctatttataaacctcaattatccgaagtaaaggggtacaaaaaaaaatatcacgcttaccaaaaattattagaaacactggatcctatttggtcggaactcggtcatctgaataag

SEQ ID NO: 7996 - protein, 505 aa, Streptococcus agalactiae
MTYYLSIDYGGTNTKALIFDKLGHQIAVSSFETLKNETQSGHRQVNLVKTWNAITSAIREVIQISKLSPEQISAVACIGHGKGLYLLDNKLEPLEQGILSTDNRAKDLAQYFESKLDNIWELTRQHIFPSQSPVILRWLKDYQPETYKSIGAVLSAKDFIRYKLTGKVQQEYGDASGNHWINFQTGTYDPAILDFFGIREIENSLPELIDSADLVPGGISSQAAKETGLVEGTPVVGGLFDIDACALGSGVLESDTFSVISGTWNINTYPSLKPAKQDSGLMTSYFPDRRYLLEASSPTSAGNLNFMLKMLMHQEIDNAKSSGGSIYDNLEEFLTHTDATHHGLIFFPFLYGSNTSQDASACFFGLTTKSTKSQMIRAVYEGNAFAHKQHITDLIKSRGSVPKIIRFSGGATNSPAWMQMFSDILNFPIETVEGTELGGLGGAILARHALDKISLKEAVQDMVRVKAIYKPQLSEVKGYKKKYHAYQKLLETLDPIWSELGHLNK

SEQ ID NO: 7997 - DNA, 987 bp, Streptococcus agalactiae
atgaaaaaaattgatggacatgctcatattgttgatacaattgcaggatttaatggtaaaggacgtcttaatgcccttggaaacggttatgctatttgggatgatggtgatttaattaagctcatcccagacgaatacggtgacaaagcatttacagctgaagcttttttgaagtatatggatgctaatggtgtagataaagcagtcattttgcaaggtcatcttaatggttatcaaaattattatacgcatttagctattaaacgttatccagaacgttttacaggcgcattctctgttgatccatttgcagataacgcaatgcaaattgtaaaacgtcatgttgaagtccttggttttcgagctattaaatttgaaattagtcaaggagggggtatccatggataccgtggacaaaaaacgcctttccgtcttgatacagacccacatgtgagtcgtattttgacttatctgttagactatccaggatttgtagttacagttgattatggcaattgggatcaaattagtcaccaacctgatgctattgctaatttagctcgcctttatacgagtctcgattttgttgtttgtcacctctcttttccacatgttgagcattcaaatcgattgcgtgctgaacttaatatgtggaaaaacttcaacaatatctatactgatatttcagctattcaagatattgatgccccagatagttttccttttccaaaatcagaacaaaatgtacgtattgctaaagaagttcttggggctaagcgtatcatttggggaactgattctccatggtcagcgaccttcaatacttacgaagaattagctacttggctagagaatgttgatattttcagtcaagaggaactagaagatgttatgtacaataatgctgagcgtgtttactttaaagaagaacatgtaaaggctaacagagcaggtatagatgatacaaccaaagagctcaatctctat

SEQ ID NO: 7998 - protein, 329 aa, Streptococcus agalactiae; identical to SEQ ID NO: 3314

SEQ ID NO: 7999 - DNA, 1449 bp, Streptococcus agalactiae
atgctagaagctttacataaattctttgaagtctttggtgcagcaactgttgtacccgctatgatttttattgtcagcctttttctaaaggtcaatccaaggcgagctttctttagcgccttacgagctggtgttggactcacaggctttggttggattatatcagcttttgctcctatggtgactaagtatatccagcagatggttaaaactactggtctccatttaccaattgtagatattggttggcaggctggttctctcaccgccttttcttctgagattggcctctctttctttgtttttggcttgctaattgaattggggcttttcttgcttgggattacccgagtatttgtcccatctaatctttggaataactttggctatatgatttggggtacaatggcctatgcagcaacaggtaattttatattgtctttcgcatttatggtttttgtcttactctattcattagtgatgtcagaagtattggcagatcgatggtcggagtattacggtgttaaaaatgcaacgatcaactcgattcataatattgaaacccttattccagctcttattcttgatcctctttggaacctacttggtgtcaataaggtaaagttgaacccagaatcattaaagactaagttagggatatttggtgagccaatgacacttggttttatacttggtgtgattattggtgtattaggtagtttacgtaaccttgcaagtattgatacttggggaggtatacttggttttgcagttgctcttgcagcggttatgactatttttcctttgattacgggggtatttgctagtgcttttgctcctcttgctgaagcagttgaacgcaataagaaaaaagaaagtcaagctgagcaaggagcactggataaaaaacgttggtttattgcagttgatgacggtgttggttttggtgaaccagcaactattatcgcaggtctcattttagtaccaataatggttgttatttccttgattttacctggaaatgaagctttaccagtcgttgaccttattgctatcccttttatgattgaagctatgatagctgtgtcaaaaggaaatattcttaaagctattttgaatggaatcatatggttttcactaggtctttatgctgctagtgccctaggtccaatctacacagaagctgttaagcattttggaactgctttaccagcaggggtaactttgattatgagctttaatctcctagctcatcctttgacagctctagtcttctttgcttggatatctgggaacccactctatattggtgtgacagttgttatctatcttgctttcttgttcttgcttcgtactcatcgtgaatctatttacgcataccttaaaactatggctgataagaatagcggatatgaaggtagttgtgaaaaaatctttattgctgaagat

SEQ ID NO: 8000 - protein, 483 aa, Streptococcus agalactiae
MLEALHKFFEVFGAATVVPAMIFIVSLFLKVNPRRAFFSALRAGVGLTGFGWIISAFAPMVTKYIQQMVKTTGLHLPIVDIGWQAGSLTAFSSEIGLSFFVFGLLIELGLFLLGITRVFVPSNLWNNFGYMIWGTMAYAATGNFILSFAFMVFVLLYSLVMSEVLADRWSEYYGVKNATINSIHNIETLIPALILDPLWNLLGVNKVKLNPESLKTKLGIFGEPMTLGFILGVIIGVLGSLRNLASIDTWGGILGFAVALAAVMTIFPLITGVFASAFAPLAEAVERNKKKESQAEQGALDKKRWFIAVDDGVGFGEPATIIAGLILVPIMVVISLILPGNEALPVVDLIAIPFMIEAMIAVSKGNILKAILNGIIWFSLGLYAASALGPIYTEAVKHFGTALPAGVTLIMSFNLLAHPLTALVFFAWISGNPLYIGVTVVIYLAFLFLLRTHRESIYAYLKTMADKNSGYEGSCEKIFIAED

SEQ ID NO: 8001 - protein, 954 aa, Streptococcus agalactiae
ATGGACAAGAAAAAAATCTTAGTAACGGGTACTGTGCCTAAAGAAGGTCTAAGAAAGCTTATGGACCGATTTGATGTTACTTATTCAGAAGATCGCCCATTTTCACGTGACTATGTGTTAGAGCATTTATCTGAATATGACGGATGGTTACTCATGGGACAAAAAGGCGATAAAGAGATGATTGATGCAGGTGAAAACTTACAAATTATTTCTTTAAATGCGGTTGGTTTTGATCATGTAGATACTGCGTATGCTAAAGAAAAAGGAATTATAGTCTCTAATTCCCCTCAAGCAGTACGAGTTCCGACAGCGGAAATGACTTTTGCTTTAATTTTAGCTGCCAGTAAGCGCCTTGCATTTTATGATAGTATTGTAAGAAGTGGAGAGTGGATTGATCCGAGCGAACAACGTTATCAAGGTTTGACTTTGCAAGGTTCAACATTAGGTATTTACGGAATGGGACGCATCGGTTTGACAGTCGCAAATTTTGCTAAAGCATTTGGGATGACTGTTGTTTACAATGATGTTTATCGACTTCCTGAAGATAAGGAAAAAGAGCTTGGTGTAACCTATCTCGAATTTGATCAGCTTATTAAAACAGCTGATGTCATAACCATCCACGCCCCAGCATTACCATCAACAATCCACAAATTCAATAAAGATGTTTTTGCTAAGATGAAAAATCGAAGCTACTTAATCAACGCTGCTAGAGGCCCAATCGTTTCTGAAGAAGCACTTATTGAAGCACTGAAAGAAGGTGAAATCGCGGGTGCGGGATTAGATGTTTTTGAGAATGAACCACAGGTATCTGAAGGATTGAGAAGCCTTGATAATGTTATCATGAGTCCACATGCTGGGACAGGTACTATTGAGGGACGTAGAACTTTGGCTGAAGAAGCAGCTGACAACATCATTGCCTTCTTTGATGGCAAGCCACAAAATATTGTCAATAAA

SEQ ID NO: 8002 - protein, 318 aa, Streptococcus agalactiae
MDKKKILVTGTVPKEGLRKLMDRFDVTYSEDRPFSRDYVLEHLSEYDGWLLMGQKGDKEMIDAGENLQIISLNAVGFDHVDTAYAKEKGIIVSNSPQAVRVPTAEMTFALILAASKRLAFYDSIVRSGEWIDPSEQRYQGLTLQGSTLGIYGMGRIGLTVANFAKAFGMTVVYNDVYRLPEDKEKELGVTYLEFDQLIKTADVITIHAPALPSTIHKFNKDVFAKMKNRSYLINAARGPIVSEEALIEALKEGEIAGAGLDVFENEPQVSEGLRSLDNVIMSPHAGTGTIEGRRTLAEEAADNIIAFFDGKPQNIVNK

SEQ ID NO: 8003 - protein, 1017 aa, Streptococcus agalactiae
ATGAAGATTAATAAATTATTGTCAGACAGACTTGAAGCTTGTTATTCAGTTTGTCGTTTGCAAAATCAAGACTATGATTTTTTATTAGTAGCTTCAGAGGTTGACCAAGCCTGCTTTGCTTATGATTTGAATAGCGATTTAGCAAAAATTGTTGTTTGGGAAGATGTGGGAGGTACCATGAGTATTATTCCAATTCCCGGAACCATGGATTTTTTGGCAACCCAGAAATTTTACCCAGGGTTTAAGGCCAAAGATTGTCAGGTTGTTTATGCAAGTTTTCAAGGAGATCATTGGGACATTTGTAACGCATTTGATTTTCCGTATTTACATCGCTTTGATCTCATTAAAGGTAAAGAAAATCAACTTTACTTTATAGGTTGTACAATTGCTAACAGTAAAGCCCACACTGAGGATTGGAGTGATAAAGGCCGAATTTTTGTTGCTCGTTTTAATACTCAAAACCATACATTGGAAGGATTGCAACAATTGCCTCAAACTTTATTAAAAAATCATGGATACTATGCCATTCAGGATGAAGGATATTCATTGATTACTTCAGTAGAAGGGGTATTCAAACTCACTTATCCAGAATTTTCTACTACAGGCGACTGGCAATTAGAACGGCTTTTCGATGAGGAGACAAGCGATGTGGTGAAAGTGGATATTAATCAGGATGGCAAGGATGAGTATGTGATTATCCAAGGTTTTCATGGAGATCGTTTACGCATCTTCACTGAAGATTTCGGTCGAGAATTATTCCATTATCCAGAAAAAACACCATTTGGTCATGCTATTTGGAGTGGTCGTTTACTTAATCAGACTTGTTTTGTATTCGGGTGGCGATCAGAAAAAGCAGAATTAAGGCTTTTTCACTTTGTAGATGGGCACTTGGTTTCAGAATTAGTAGATGCAAAAGCAGCTTCTAGTAATGTCTTAGCTTTTGAAAAAGATGGAAAAGCTTATCTTTTCTCAGCCAATAACGGACGTGGCGAAGTTGCTCTTTATCAATTAGTAAAA

SEQ ID NO: 8004 - protein, 339 aa, Streptococcus agalactiae
MKINKLLSDRLEACYSVCRLQNQDYDFLLVASEVDQACFAYDLNSDLAKIVVWEDVGGTMSIIPIPGTMDFLATQKFYPGFKAKDCQVVYASFQGDHWDICNAFDFPYLHRFDLIKGKENQLYFIGCTIANSKAHTEDWSDKGRIFVARFNTQNHTLEGLQQLPQTLLKNHGYYAIQDEGYSLITSVEGVFKLTYPEFSTTGDWQLERLFDEETSDVVKVDINQDGKDEYVIIQGFHGDRLRIFTEDFGRELFHYPEKTPFGHAIWSGRLLNQTCFVFGWRSEKAELRLFHFVDGHLVSELVDAKAASSNVLAFEKDGKAYLFSANNGRGEVALYQLVK

SEQ ID NO: 8005 - protein, 981 aa, Streptococcus agalactiae
ATGTTTGAGAAGGTAACCATTAGTGATATTGCAAATTTAGTAGGTGTGTCAAAAGCTACAGTTTCCTATTATCTCAATGGGAACTATAAGAAAATGTCTCTGCAAACGAAAGAAAAAATACGTTTAGCTATTAAGGAGACTGGTTATCAACCAAGTAAGATTGCTCAAAGTTTAGTTACAAAAAATACCCGTACTATTGGGGTCGTTATTGCTGATATTACTAATCCCTTTATTTCGTCTGTGATGAAGGGAATACATGATACTTGTCAACAATTTGGTTACTCGGTTAACTTTACTAACTCGGATAATGATATTGACATTGAGTTGGAAAATTTAAACCGTTTAAATCAGCAAAACGTTTCAGGAATTATTTTAGATTCTGTAGATCCTAATCATTCATTTATAGAAACTTTGAGTAATGATCGTCTTGTCATGGTTGATAGACAAGCTAAAGATATTAAAGTAGATACTGTAGCATCCGACAATAAAGAATCGACTCAAATATTTCTTGAAAAAATGCAAGAAGCTGGGTATCATGACATCTATTTTGTCACTTATCCCATTGAAGGGATTTCAACCCGTGAGCTTCGTTACGAAGGTTTTAAAGAAGTGGTCAGTTCAAATCCTGATAAGTTGATTATTATCACTGAAGATGGTAGTACACAGAGAATTCTTGATATCATTGAACATTCAGAGCAAAAACCAGGGTTCTTAATGATGAACGGTCCAACTCTTTTGAATTTTATGAAAAAATTAAATCAATCAACGGTCAGCTACCCTGAGGATTATGGTCTTGGGAGTTATGAAGATTTAGAATGGATGCAGGTGCTTACACCAAACGTTTCCTGTATAAAACAGGATTCATATGGCATTGGTTGCCTGGCTGCCCAATGTTTAATTGAAAAAATTAGTCAAGGAAACGAACCAACTACTGCAAGGTTACTAGAAGTAAAAAATCAAATCGTTATTCGTCAATCTTTT

SEQ ID NO: 8006 - protein, 327 aa, Streptococcus agalactiae; identical to SEQ ID NO: 3324

SEQ ID NO: 8007 - protein, 645 aa, Streptococcus agalactiae
ATGAAATACTTTTTAGATACTGCCGATGTTTCTGAAATTCGTCGTCTTAATCGTTTAGGAATCGTTGATGGTGTTACTACCAATCCGACTATTATTTCACGTGAGGGGCGTGACTTTAAAGAAGTTATTAACGAAATTTGCCAAATCGTTGATGGCCCAGTTAGTGCAGAAGTGACAGGTTTAACTTGTGATGAAATGGTTACCGAAGCTAGAGAAATCGCTAAGTGGTCACCAAATGTTGTTGTTAAAATTCCAATGACTGAAGAAGGTTTAGCAGCAGTTTCACAATTATCAAAAGAAGGTATAAAGACAAATGTGACATTAATATTTACTGTGGCTCAAGGTCTTTCGGCAATGAAAGCTGGTGCAACATTTATTAGTCCTTTTGTGGGTCGTCTTGAAGATATTGGAACAGATGCTTATGCTTTGATTCGTGACCTTCGTCACATTATTGATTTTTATGGTTTCCAATCTGAGATTATTGCTGCTAGCATTCGTGGATTGGCGCATGTGGAGGGCGTCGCTAAATGCGGTGCGCACATTGCCACTATTCCAGATAAAACATTTGCATCACTATTTACTCACCCGCTTACTGATAAAGGGATTGAAACTTTCTTAAAAGATTGGGATAGTTTCAAGAAGAAG

SEQ ID NO: 8008 - protein, 215 aa, Streptococcus agalactiae; identical to SEQ ID NO: 3326

SEQ ID NO: 8009 - protein, 714 aa, Streptococcus agalactiae
ATGGCAAAATCATTGCAAGAAATGCGTGAACGTGTGTGTGAAGCTAATAAATCACTACCAGTTCATAGTTTAGTTAAATTTACTTGGGGTAACGTTTCTGAAGTTGACCGCGAAGCAGGATTGATTGTTATCAAACCTTCAGGAGTTGACTATGACCAATTGACACCTGAAAATATGGTTGTCACAGACTTAGAGGGAAATATAGTGGAGGGGGATTTGAATCCATCATCTGATCTTCCAACTCATGTTCAACTTTATAAAGCATGGCCAGAAGTCGGTGGTATTGTTCATACTCATTCAACAGAAGCAGTTGGTTGGGCACAAGCGGGTCGCGATATTCCATTTTATGGAACAACACATGCAGATTATTTTTATGGGCCAGTACCATGTGCTAGGTCACTTAGTGAAGATGAAGTTAACACTGCTTATGAAAAAGAAACAGGTAGCGTTATTATAGAGGAATTTGAACGTCGGGATTTAGATCCAATGGCTGTTCCTGGTATTGTTGTACGTAATCATGGACCATTTACTTGGGGGAAAGATCCAGCACAAGCAGTTTATCACTCAGTCGTTCTTGAAGAAGTTGCTAAGATGAATCGTTTCACTGAACAAATTAATCCACGTGTTGAACCAGCTCCAAAATATATTATGGATAAACACTATTTACGTAAGCATGGACCAAATGCTTATTATGGTCAAAAAGGACAAGAACAT

SEQ ID NO: 8010 - protein, 238 aa, Streptococcus agalactiae; identical to SEQ ID NO: 3328

SEQ ID NO: 8011 - protein, 861 aa, Streptococcus agalactiae
ATGACACGTCCAATAGGAATTTACGAGAAGGCAACACCAAAACATTTTAACTGGTTAGAACGCCTACAATTTGCTAAAGAATTGGGATTTGATTTTGTAGAATTATCCATTGATGAGTCAGATGAACGTTTGGCACGTTTGGAGTGGTCAAAAGAAGAACGACTTGAGTTGGTCAAAGCTATTTTTGAGACAGGAGTTCGTGTTCCAACAATTACATTTAGTGGTCATCGTCGTTTCCCAATGGGATCTAATAATCCTGAGAAAGAAGCGCGTGCGATGGATATGATGAAAAAATGTATCGTCTTTGCTCAAGATATTGGTATTCGTAATATTCAATTAGCAGGATATGATGTGTACTATGAAGAAAAATCTCCAGAGACACGTGCACGCTTTATTAAGAATCTTCGTCAAGCTTGTACTTGGGCCGAAGAAGCACAAGTTATTCTATCTATTGAGATTATGGATGATCCATTTATGAATTCCATTGAGAAATATTTGGCTGTGGAAAAAGAGATTGATTCTCCTTATCTCTTTGTCTACCCAGATACTGGAAATGTATCAGCATGGCATAATGATCTTTGGAGTGAATTTTATAATGGACATCGCTCAATTGCAGCGCTTCATATTAAAGATACTTATGCTGTTACCGAAACGTCTAAAGGTCAATTCCGTGATGTTCCATTTGGTCAAGGGTGTGTTGATTGGGAAGAAATGTTTGCTGTCATTAAGAAAACAAATTATAATGGTCCATTCTTGATTGAAATGTGGTCGGAGAACTGTGAGACTGTAGAGGAAACACGTGCAGCCATTAAAGAGGCGCAAGATTTTCTTTACCCATTAATGGAGAAAACAGGAGTGAAA

SEQ ID NO: 8012 - protein, 287 aa, Streptococcus agalactiae; identical to SEQ ID NO: 3330

SEQ ID NO: 8013 - protein, 663 aa, Streptococcus agalactiae
ATGACAAAACGTTTACCAAATTTACAAGTTGCACTTGACCACTCAGATTTACAAGGAGCTATCAAAGCTGCCGTATCAGTAGGACATGAAGTTGATGTTATTGAAGCTGGAACTGTTTGCCTTCTTCAAGTAGGTAGTGAATTAGTTGAGGTCCTTCGCAGTCTCTTCCCTGACAAAATAATTGTTGCTGATACAAAATGTGCTGATGCTGGTGGGACTGTTGCTAAAAATAATGCTGTTCGCGGTGCAGACTGGATGACTTGTATCTGTTGTGCTACTATTCCAACAATGGAAGCAGCCTTAAAAGCTATCAAAGAAGAACGCGGCGATCGTGGAGAAATTCAAATCGAACTATATGGTGATTGGACTTATGAGCAAGCGCAACAATGGTTGGATGCAGGTATTTCACAAGCCATTTATCACCAATCTCGTGATGCGCTTCTTGCTGGCGAAACATGGGGAGAGAAAGACCTTAATAAGGTTAAAAAATTGATTGATATGGGCTTCCGAGTTTCTGTAACTGGTGGTTTATCAACTGATACTCTTCAATTATTTGAAGGTGTTGATGTCTTTACTTTTATTGCGGGTCGTGGTATTACAGAGGCAGATGATCCAGCCGCAGCAGCACGTGCATTTAAGGATGAAATTAAACGTATTTGGGGG

SEQ ID NO: 8014 - protein, 221 aa, Streptococcus agalactiae; identical to SEQ ID NO: 3332

SEQ ID NO: 8015 - protein, 483 aa, Streptococcus agalactiae
ATGAATTTAAAACAAGCCTTTATCGAAAATGACTCAATTCGTCTTAAATTATCTGCAAGCGATTGGAAAGAAGCAATCAAATTATCAATTGATCCATTGATTGAAAGTGGTGCTGTTGATGCAGAATATTACGATGCCATTATTGAATCTACAGAGGAATTTGGTCCGTACTACATTCTTATGCCGGGTATGGCGATGCCTCATGCTCGTCCAGAAGCAGGCGTAAAACGTGATGCATTTTCATTAATTACATTAACAGAGCCAGTAGTTTTTCCAGATGGCAAAGAAGTCTCAGTATTGTTAGCACTTGCTGCAACAAGTTCAGCTATTCATACTTCTGTTGCTATCCCTCAAATTATTGCCCTTTTTGAATTGGAAAATTCAATTCAGCGCTTGACGGAATGCCAAGAAGCAAAAGAAGTCCTTGCAATGGTAGAGGAATCAAAAAACAGCCCATATTTAGAAGGTTTAGATTTAGAAAGC

SEQ ID NO: 8016 - protein, 161 aa, Streptococcus agalactiae; identical to SEQ ID NO: 3334

SEQ ID NO: 8017 - protein, 276 aa, Streptococcus agalactiae
ATGGTTAAAGTTCTTACAGCATGCGGAAACGGCATGGGATCATCAATGGTTATCAAAATGAAAGTCGAAAATGCGCTTCGTCAATTAGGCGTTAGCAACTTTGAGTCAGCATCTTGCTCAGTCGGAGAAGCAAAAGGTTTAGCTGCAAACTACGATATCGTGGTTGCTTCAAACCACCTTATCCATGAATTAGACGGACGTACAAAAGGTCATTTAGTAGGTCTTGATAACCTTATGGATGACAATGAAATAAAAACAAAACTACAAGAAATTTTG

SEQ ID NO: 8018 - protein, 92 aa, Streptococcus agalactiae; identical to SEQ ID NO: 3336

SEQ ID NO: 8019 - protein, 96 aa, Streptococcus agalactiae
GTGATTGTATGTCTCTTCTTCTTAGCTATTCCACAACTTCAATTTATGAAATCTAAAGATAAAGAAGCATACTATCGTGGTGATGCGCCTGCAGAA

SEQ ID NO: 8020 - protein, 32 aa, Streptococcus agalactiae
MIVCLFFLAIPQLQFMKSKDKEAYYRGDAPAE

SEQ ID NO: 8021 - protein, 274 aa, Streptococcus agalactiae
ATGGTTAAAGTTCTTACAGCATGCGGAAACGGCATGGGATCATCAATGGTTATCAAAATGAAAGTCGAAAATGCGCTTCGTCAATTAGGCGTTAGCAACTTTGAGTCAGCATCTTGCTCAGTCGGAGAAGCAAAAGGTTTAGCTGCAAACTACGATATCGTGGTTGCTTCAAACCACCTTATCCATGAATTAGACGGACGTACAAAAGGTCATTTAGTAGGTCTTGATACCTTATGGATGACAATGAAATAAAACAAAACTACCAGAAATTTTG

SEQ ID NO: 8022 - protein, 92 aa, Streptococcus agalactiae
  VARIANT 77, 84: Xaa = Any Amino Acid
MVKVLTACGNGMGSSMVIKMKVENALRQLGVSNFESASCSVGEAKGLAANYDIVVASNHLIHELDGRTKGHLVGLDXLMDDNEXKTKLPEIL

SEQ ID NO: 8023 - protein, 1437 aa, Streptococcus agalactiae
ATGGAAAACTTCCTAGCTCCCCTTAATTGGTTCTCGCAAAATATCTTGCAGAATCCAGCCTTCTTCGTAGGTCTATTGGTACTCATTGGGTATCTTTTATTGAAGAAACCACTTCATGATGTCTTTGCTGGTTTTATCAAAGCGACCGTTGGATATTTGATTTTGAACGTAGGTGCAGGAGGATTGGTTAATACATTCCGTCCAATCTTAGTTGCTCTTGCTAAAAAATTTAATTTAGAAGCTGCTGTTATTGACCCTTACTTTGGTTTAGCATCAGCAAATGCTAAGTTAGAAACAATGGGCTTTATCAGTGTTGCAACAACAGCACTCTTGATTGGTTTTGGGATTAACATTCTCTTGGTTGCTCTTCGTAAAGTAACTAAAGTCCGTACTCTTTTTATTACTGGTCATATCATGGTACAACAAGCTGCAACAATTTCAGTATTTGTACTGCTCTTGATTCCACAACTTCGTAATGGTTTTGGTGCATGGGCTGTTGGTATCATTTGTGGTCTATATTGGGCGGTAAGTTCTAATATGACCGTTGAAGCAACTCAACGCCTTACAGGTGGTGGCGGATTTGCCATCGGACACCAACAACAATTTGCAATTTGGTTTGTTGATAAAGTTGCGCCATTCTTCGGTAAAAAAGAAGAAAACCTTGATAACTTAAAATTACCAACATTCTTAAATATTTTCCATGATACAGTTGTTGCATCAGCAACATTGATGCTAGTTTTCTTTGGAGGAATCTTAGCTGTCCTTGGTCCAGACATTATGTCTAATGTTAAATTAATCGGACCTGGTGCATTTGTACCAACTAAGCAAGCTTTCTTCATGTACATCCTTCAAACATCATTGACATTCTCAGTTTACCTTTTCATTTTGATGCAAGGTGTACGCATGTTCGTTACAGAATTGACAAATGCCTTCCAAGGTATCTCAAACAAACTTCTTCCAGGATCATTCCCAGCAGTTGACGTTGCAGCTTCATATGGTTTTGGTTCTTCAAATGCAGTTCTTTCAGGATTTGCTTTTGGTTTGATTGGTCAATTAATTACAATCGCTCTACTTGTTGTCTTCAAAAATCCAATCTTGATTATCACAGGATTCGTTCCAGTATTCTTTGATAATGCGGCAATCGCTGTTTATGCAGATAAACGTGGTGGCTGGAAAGCAGCAGTAGCTCTATCATTTATCTCAGGTATTATTCAGGTGGCACTTGGTGCTGTTGCTGTAGGTCTTTTAGGACTTGCAGGTGGTTATCATGGAAATATCGACTTTGAATTCCCATGGTTAGCATTTGGTTACATCTTCAAGTATTTAGGTATCGCTGGTTACGTGATTGTATGTCTCTTCTTCTTAGCTATTCCACAACTTCAATTTATGAAATCTAAAGATAAAGAAGCATACTATCGTGGTGATGCGCCTGCAGAA

SEQ ID NO: 8024 - protein, 479 aa, Streptococcus agalactiae; identical to SEQ ID NO: 3338

SEQ ID NO: 8025 - protein, 615 aa, Streptococcus agalactiae
ATGCGTAAATTTTTCCAAGATGTTATTGTAGAGGTGGCTTATTATTTAGAGATTGCTTTGTCAGTTATTCTGGCAACAGCTATTATTTTTTTTAGTTTAGCACTCTTTCATGATTTGTTTAGCATGTTGTCTGTTGATCAAAATGTTGATAAGTTGTTCCAGACTTTCCTTGCTCGCGCCATGACAATAGCAGTCGGGATTGAGTTGATCAAAATGTTTTCAAAACCTTCCCCAGATACTTTAATTGAAGTGTTATTGTTTGCCTTAGCTCGTCAACTTGTAATTGAACATGGTAGTGTTTCAGATTACCTTATGGGGATTGCTTCAGTTGCTATTTTGTTTGCTGTTCGTAAATATCTTTTCACCCATTTTGATGGGTCAAGCAACATTGTTTTACGTGCTAATAACAAAGTCAAAAAAGCTAATATTTTAGCTAGGGTTCAACTACCTTGTCAACCCAATGAAACTTTAGGAGACTTACTTGTTCGTCATTTAAATGATGAGGAAAAGGACGTTGCTATTGGTTCAGTAGTCTATATTAATAACGTTGCATTGCGTGTTGATAGTATGCACGATGGTCTTGTGACGCGTGTAGAAATCATTAGGAGTCTACAT

SEQ ID NO: 8026 - protein, 205 aa, Streptococcus agalactiae; identical to SEQ ID NO: 3340

SEQ ID NO: 8027 - protein, 291 aa, Streptococcus agalactiae
ATGATTCTTATTAATTTGATAGCTCTACCTATTTGTTTCCTAGTAGAATTGTCAGCTGGTCTACTATTAAAATTAGAAATGCATAAGCAACATGGCTACTATCCTCTGGAACGCTTATTGATGACTGGTAATATTCTAACAGTTGTATCGCTAGTATTATTACATACTTTGATTCACAATATCAATTCACTTCTTTTTTTATCAATTACAGTAGTTTTATTGATTTCTGGGAAGTCCTTAAGTCTTATTAGTATCTATCTATTAAAAAGAAAAAGTAAACATCAAAAAGTC

SEQ ID NO: 8028 - protein, 97 aa, Streptococcus agalactiae
MILINLIALPICFLVELSAGLLLKLEMHKQHGYYPLERLLMTGNILTVVSLVLLHTLIHNINSLLFLSITVVLLISGKSLSLISIYLLKRKSKHQKV

SEQ ID NO: 8029 - protein, 1290 aa, Streptococcus agalactiae
ATGACTTCAGTTGTTGTAGTAGGTACCCAATGGGGTGACGAAGGTAAAGGTAAAATTACAGATTTTTTATCTGCTGACGCAGAAGTAATTGCACGTTATCAAGGTGGTGATAACGCTGGGCATACTATCGTTATTGATAACAAAAAATTTAAACTTCATTTAATTCCTTCAGGAATTTTCTTCAAAGAAAAAATTTCTGTCATTGGTAATGGTGTTGTCGTTAATCCGAAATCATTAGTTAAAGAGTTAGCTTATCTTCACGGAGAAGGTGTAACAACGGATAACCTTCGTATTTCAGACCGTGCGCATGTTATCTTGCCATACCACATCAAGCTTGACCAACTACAAGAAGATGCTAAAGGTGATAATAAAATTGGAACAACCATCAAAGGAATTGGGCCAGCTTACATGGACAAGGCTGCGCGTGTCGGTATCCGTATTGCTGACCTTCTTGATAGAGAAGTTTTTGCTGAGCGTTTGAAAATTAATTTAGCTGAGAAAAATCGTTTATTTGAAAAAATGTATGACAGTACACCTCTTGAATTTGATGATATTTTCGAAGAATATTATGAATATGGTCAACAAATTAAGCAATATGTGACTGATACATCCGTTATCTTAAATGATGCTCTTGATGCCGGTAAACGTGTTCTTTTTGAAGGAGCACAAGGAGTTATGCTCGACATTGATCAAGGAACATACCCATTTGTAACATCTTCCAATCCAGTAGCAGGTGGTGTCACAATTGGTTCGGGAGTTGGACCAAGTAAAATTAATAAAGTAGTAGGTGTATGTAAAGCTTACACTAGCCGTGTCGGTGATGGACCATTCCCAACAGAACTTTTTGATGAGGTTGGTGACCGTATTCGTGAGATTGGTAAAGAGTATGGTACAACGACTGGTCGTCCTCGTCGCGTTGGATGGTTTGATTCTGTTGTTATGCGTCACAGCCGTCGAGTATCAGGTATTACTAATCTCTCTCTGAATTCAATTGATGTTCTTTCAGGGCTTGATACGGTGAAAATTTGTGTGGCTTATGACCTTGATGGGAAACGTATTGACTATTATCCAGCAAGCCTTGAACAGCTAAAACGTTGTAAACCAATCTATGAAGAATTACCGGGCTGGTCTGAAGATATTACAGCTTGCCGTAGCTTAGATGATCTTCCAGAAAATGCACGTAATTACGTTCGCCGTGTTGGCGAATTGGTTGGTGTTCGTATTTCTACTTTCTCAGTAGGGCCTGGTCGTGAACAAACAAACATTCTTGAGTCTGTTTGGTCAAATATT

SEQ ID NO: 8030 - protein, 430 aa, Streptococcus agalactiae; identical to SEQ ID NO: 3342

SEQ ID NO: 8031 - protein, 1020 aa, Streptococcus agalactiae
ATGAATATCATTATTGGGACCAGTCTTTTAATACTTGTATTAGCGATTTTCACTTTATTTAATTATAAAGCACCCTACGGAACAAAAGCAATGGGAGCATTGGCATCTGCGGCTTGTGCATCCTTCCTTGTAGAAGCTTTTCAAGATTCTTTCTTTGGTAAAGTTTTGGGATTTCAATTTTTAAGTGAAGTGGGTGGTGCTAATGGTTCACTTTCTGGTGTAGCTGCAGCTATATTGGTTGCTATTGCTATTGGTGTAACCCCAGGATACGCAGTTTTAATTGGTTTATCTGTTTCTGGAACAGGTATTATTCCTGGTTTCCTTGCAGGATATTTAGTGGGATTTCTTGTTAAGTGGATGGAAAGAAATATTCCTGGTGGTTTAGATCTTATTTCAATTATTATTATTGGTGCACCATTAACACGTCTTGTGGCCAAACTGTTGACGCCGCTTATTAATAGCACTTTGCTCACCATTGGAGATATCTTAACATCAGGTGCTCATAGCAACCCTATTTTAATGGGGATTATACTTGGCGGGACAATTGTAGTAGTGGCGACAGCACCACTTTCTTCTATGGCATTGACAGCTATGCTAGGATTAACCGGAATGCCTATGGCTATAGGAGCCTTGTCTGTCTTTGGTTCGTCATTTATGAATGGTGTACTTTTCCATAAATTAAAACTTGGAAGTCGTAAAGATAATATAGCTTTTGCTGTTGAGCCTCTAACTCAAGCTGACGTGACTTCAGCTAACCCTATTCCAATCTATGTCACTAATTTTGTTGGTGGTGCAGCTTGTGGTATTTTAATTGCCTTGATGAAATTAGTTAATGATACTCCTGGAACAGCGACACCAATTGCAGGATTTGCTGTCATGTTTGCCTATAACCCAATGATAAAAGTACTAATAACCGCTCTAGGTTGTATTATCCTATCTTTACTAGCAGGCTATTTTGGAGGCATTGTTTTTAAAGATTATAAATTAGTTACAAAAGAAGAGCTACAGGCTAGAGATAAC

SEQ ID NO: 8032 - protein, 340 aa, Streptococcus agalactiae; identical to SEQ ID NO: 3344

SEQ ID NO: 8033 - protein, 672 aa, Streptococcus agalactiae
ATGGATAAAGAAAAATTAGACTATTGGAAAACGATAATAACGTTTCTCCATAATGTTTTAGGTGATAATTACGAAATTGTTTTGCATGTAGTAGATGAAAATGATATCTATATTGGTGAGTTGGTTAATAGTCACATTAGTGGACGAACCATAAGTTCACCTCTAACGACTTTCGCCCTTGATTTAATCAAGAATAAAGTTTATAAGGAAAAAGATTTTGTTACTAACTATAAGGCGATTGTCAGCCCTCTCAATAAAGAAGTTCGTGGATCTACTTTCTTCATCAAGAATGCTCAAAATGAACTTGAAGGGATGTTATGTATCAACCTTGATATTTCTGCATACCAAAATATTGCTTTGGATATTCTAGACTTAGTTAATTTAAATGTTAACAAAATACTACCTAAGTCCCCTCAAAAAATTTCTCTCCCTCAACAGGAGGAACCTGTAGAAGTTCTATCAGGCAATATTCAGGATATTATTAGTGAGATTGTTGATCCTAGTCTTTTAAATCAGAATATTCATTTAAGTCAAGAAGTTAAGGTAGAAATTGTTTCTAAACTTCACGAAAAAGGTGTATTCCAATTAAAAGGTGCCGTTTCAAAGGTCGCTGAAGTTCTCAACATCTCCGAACCAAGCGTCTATCGTTATCTTAAAAAAATTGAAACTCAT

SEQ ID NO: 8034 - protein, 224 aa, Streptococcus agalactiae; identical to SEQ ID NO: 3346

SEQ ID NO: 8035 - protein, 2250 aa, Streptococcus agalactiae
GTGATTATCGATCGACTGTTACAAAGAAGCCACTCTCATCTACCGATTCTACAAGCTACATTTGGCTTAGAGAGAGAAAGCCTTCGTATTCACCAACCCACTCAAAGGGTTGCTCAAACACCCCATCCCAAAACATTAGGGAGTCGTAACTATCATCCTTATATCCAAACGGATTATAGTGAACCTCAATTAGAACTCATTACACCTATTGCAAAGGATAGCCAAGAAGCCATTCGATTTTTGAAAGCTATAAGTGATGTTGCTGGACGCTCTATCAACCACGATGAATACTTATGGCCGCTTTCTATGCCACCCAAAGTGAGGGAAGAAGACATACAGATTGCCCAATTAGAGGATGCTTTTGAATATGATTATCGCAAATATTTGGAGAAGACTTATGGAAAACTAATACAATCCATCTCTGGAATTCACTATAATCTCGGTTTAGGTCAAGAGTTATTAACTTCTCTCTTTGAATTGAGTCAAGCAGATAATGCTATTGATTTTCAGAACCAGCTTTACATGAAATTGTCTCAAAATTTTTTACGTTACCGTTGGTTACTAACTTATCTATACGGAGCGAGCCCAGTAGCTGAAGAAGACTTTTTAGATCAGAAACTGAATAACCCTGTCCGGTCACTTAGAAATAGTCACTTAGGTTATGTGAATCATAAAGATATTCGTATTTCTTATACTAGCTTGAAGGATTATGTCAACGATCTAGAAAATGCTGTAAAAAGTGGGCAATTGATTGCTGAGAAAGAATTTTATTCACCTGTTCGTCTCCGTGGTAGTAAGGCCTGTCGTAATTATTTAGAAAAAGGAATTACATATTTAGAGTTTCGCACTTTTGATCTCAACCCATTTAGCCCAATCGGTATAACGCAGGAAACTGTTGATACTGTTCACCTTTTCTTATTGGCGCTTTTGTGGATAGATTCTAGTAGTCATATTGACCAAGATATCAAGGAAGCCAATAGATTAAATGACCTTATAGCACTTAGTCATCCATTAGAAAAATTACCTAATCAAGCACCAGTTTCTGACTTAGTGGATGCTATGCAATCTGTTATCCAACATTTTAACTTATCACCTTACTATCAAGACCTATTGGAATCTGTAAAAAGGCAAATTCAGTCACCTGAATTAACGGTAGCTGGTCAACTTTTAGAAATGATTGAAGGACTTTCCTTAGAAACATTTGGACAAAGACAAGGACAAATTTATCACGATTATGCTTGGGAAGCTCCCTACGCCTTAAAGGGATATGAAACGATGGAACTTTCTACCCAATTGCTACTATTTGACGTTATCCAAAAAGGAGTCAACTTCGAAGTGCTGGATGAACAAGATCAATTCCTAAAATTATGGCACAATAGTCATATTGAGTACGTTAAAAATGGTAATATGACCTCAAAAGATAACTATATTGTACCGCTCGCTATGGCTAACAAAGTTGTTACAAAAAAAATCCTAGATGAAAAGCATTTCCCAACTCCTTTTGGAGATGAATTTACTGACCGTAAAGAGGCACTTAACTATTTTTCACAAATCCAAGATAAACCAATCGTCGTTAAGCCAAAATCTACAAACTTTGGTTTAGGCATTTCTATTTTTAAAACATCAGCTAACTTAGCTTCTTATGAAAAAGCAATTGACATCGCTTTTACCGAAGATAGTGCTATTCTTGTGGAAGAATATATTGAGGGTACCGAATACCGTTTCTTCGTCCTTGAGGGGGACTGTATTGCTGTATTGCTTAGGGTAGCAGCTAATGTCGTTGGAGATGGTATTCATACTATTAGTCAGCTAGTTAAACTTAAAAACCAAAACCCTCTCAGAGGCTATGATCATCGCTCTCCTCTAGAAGTTATTGAGCTCGGAGAAGTAGAACAGTTAATGTTGGAACAACAAGGATACACTGTTAACAGTATCCCTCCAGAAGGAACAAAAATAGAACTTCGCCGTAATTCTAATATTTCCACTGGCGGTGACTCTATAGATGTAACAAATACAATGGATCCTACATATAAACAACTAGCAGCTGAGATGGCAGAGGCTATGGGGGCTTGGGTTTGTGGAGTTGATTTAATTATTCCTAATGCCACTCAAGCATACTCAAAAGATAAGAAAAATGCTACTTGCATTGAACTAAACTTTAACCCATTGATGTATATGCACACCTACTGTCAAGAGGGGCCTGGTCAATCTATTACACCTCGAATTTTGGCTAAACTGTTCCCAGAATTA

SEQ ID NO: 8036 - protein, 750 aa, Streptococcus agalactiae
MIIDRLLQRSHSHLPILQATFGLERESLRIHQPTQRVAQTPHPKTLGSRNYHPYIQTDYSEPQLELITPIAKDSQEAIRFLKAISDVAGRSINHDEYLWPLSMPPKVREEDIQIAQLEDAFEYDYRKYLEKTYGKLIQSISGIHYNLGLGQELLTSLFELSQADNAIDFQNQLYMKLSQNFLRYRWLLTYLYGASPVAEEDFLDQKLNNPVRSLRNSHLGYVNHKDIRISYTSLKDYVNDLENAVKSGQLIAEKEFYSPVRLRGSKACRNYLEKGITYLEFRTFDLNPFSPIGITQETVDTVHLFLLALLWIDSSSHIDQDIKEANRLNDLIALSHPLEKLPNQAPVSDLVDAMQSVIQHFNLSPYYQDLLESVKRQIQSPELTVAGQLLEMIEGLSLETFGQRQGQIYHDYAWEAPYALKGYETMELSTQLLLFDVIQKGVNFEVLDEQDQFLKLWHNSHIEYVKNGNMTSKDNYIVPLAMANKVVTKKILDEKHFPTPFGDEFTDRKEALNYFSQIQDKPIVVKPKSTNFGLGISIFKTSANLASYEKAIDIAFTEDSAILVEEYIEGTEYRFFVLEGDCIAVLLRVAANVVGDGIHTISQLVKLKNQNPLRGYDHRSPLEVIELGEVEQLMLEQQGYTVNSIPPEGTKIELRRNSNISTGGDSIDVTNTMDPTYKQLAAEMAEAMGAWVCGVDLIIPNATQAYSKDKKNATCIELNFNPLMYMHTYCQEGPGQSITPRILAKLFPEL

SEQ ID NO: 8037 - protein, 816 aa, Streptococcus agalactiae
ATGGTTAAAAAACGCTATTCCAAAAATTCTCATAATCTAATAACATTACTTGGTATTGTTGTTCTTGCTTCCCTGATTTCAGACTTTTGGAGTGAGGTGATTGCTACTCTGTTAATTATTGGTGGTGGTTATTGTGCCTATTACGTTTATGATAAAAAGCGTCTTAAACGTTTTACATCAAACCAACGTATTGAAGCTTTAAAATCCGATATTAAAGAGACTGACCAAGACATTAGACACTTGGAAATTTTAAAAAAAGACAATCGTTCTAAGGAATATATCAAATTAGCACATCAAATATTACCTCAATTGGACCTAATTCGTAATGAAGCAAACCAACTACAAAAAGCCATTGAGCCTAATATCTATAAACGTATCACCAAAAAAGCAAATACATTTAGTAATGAGATTAACGAACAACTAATAAAGCTACATGCCTCTCCAGAACTAGAACCTATTTCTGATCAGGAAGATGAAATGATACGCATTGCTCCGGAATTAAAACCGTTCTATCACAATATTCAAGATGACCACTTTGCTATCTTAAAAAAGATTGAAGAGGCAGATAACAAAGCTGAATTAGCAGCAATTCATCAAGCCAATATGAAACGTTTTACAGATGTTCTGGCTGGCTACATCAGAATCAAACAATCTCCTAAAAATTTTAACAATGCTAAGGAACGCCTAGAACAAGCATTACAAGCAATTAAAAAATTTAATTTAGATTTAGATGAAACGCTGCGCCAATTGAATGAAAGTGATATGAAAGATTTTGACGTTAGCCTAAGAATGATGCAAGACGAAAGGAACAGTAAA

SEQ ID NO: 8038 - protein, 272 aa, Streptococcus agalactiae; identical to SEQ ID NO: 3354

SEQ ID NO: 8039 - protein, 1254 aa, Streptococcus agalactiae
ATGAGCGATACCTTTAATTTTGATATTGACCAAATTGCAGACAATGCTATCACTAAAACAGATAAAACAACAGAAATTATTTCCAACCAGACAACAAGCCAAACTGGGCAAATTGCCTTTTTTGAAAAACTAACACCAGCACAAAAGTCTGCTATCTCTGAAAAAACACCAGCTTTGGTAGATACTTTTGTCGGCGATCAAAATGCGCTCCTTGATTTTGGACAATCCGCAGTAGAAGGCGTTAATACCACTGTTAATCATATCTTGTCTGAGCAGAAAAAAATTCAAATTCCTCAAGTTGATGATTTACTAAAAAATGCTAATCGCGAACTAAATGGATTTATTGCCAAATATAAAGATGCTACTCCGGCAGAATTAGAGAAAAAACCAAACTTGATTCAAAAATTATTCAAACAAAGCAAGACCTCGCTACAGGAATTTTATTTTGACTCACAAAACATCGAGCAAAAAATGGATATGATGGCAGCGAATGTTGTCAAACAAGAAGATACTTTGGCAAGAAATATCGTCTCTGCTGAAATGCTCATTGAAGATAATACTAAATCTATTGAAAATTTGGTTGGAGTTATTGCTTTTATTGAATCGAGTCAAGCCGAGGCTGCTAATCGTGCAAGCCACTTACAACAAGAAATTCTAGCATTAGATAGCCAAACGTCCGAGTATCAAATTAAAAGTAACCAATTAGCTCGAATGACTGAAGTTATCAATACCCTCGAACAGCAACATACTGAATATGTCAGCCGTCTCTACGTTGCATGGGCAACAACACCACAGATGCGAAACTTGGTCAAAGTATCGTCAGATATGCGTCAGAAACTTGGCATGTTACGTCGAAATACCATTCCAACAATGAAACTCTCAATCGCTCAGTTAGGCATGATGCAACAATCTGTCAAATCCGGTGTCACTGCTGATGCTATTGTCAACGCTAATAATGCAGCATTGCAGATGCTGGCTGAAACTAGTAAAGAAGCGATTCCGATGTTAGAGAAGACCGCACAAAGCCCCACTGTTTCTATTAAATCTGTCACTGCATTAGCTGAAAGCTTAGTGGCTCAAAATAATGGTATTATCGCTGCCATAGACAAAGGACGTAAGGAACGTGCCCAATTGGAATCTGCTGTTATTAAATCGGCTGAAACAATCAATGATTCTGTCAAAATTCGTGATAAAAAAATAGTTGAAGCCTTACTCAACGAAGGTAAATCTACCCAAGAAAAAGTTGATGAGTCT

SEQ ID NO: 8040 - protein, 418 aa, Streptococcus agalactiae
MSDTFNFDIDQIADNAITKTDKTTEIISNQTTSQTGQIAFFEKLTPAQKSAISEKTPALVDTFVGDQNALLDFGQSAVEGVNTTVNHILSEQKKIQIPQVDDLLKNANRELNGFIAKYKDATPAELEKKPNLIQKLFKQSKTSLQEFYFDSQNIEQKMDMMAANVVKQEDTLARNIVSAEMLIEDNTKSIENLVGVIAFIESSQAEAANRASHLQQEILALDSQTSEYQIKSNQLARMTEVINTLEQQHTEYVSRLYVAWATTPQMRNLVKVSSDMRQKLGMLRRNTIPTMKLSIAQLGMMQQSVKSGVTADAIVNANNAALQMLAETSKEAIPMLEKTAQSPTVSIKSVTALAESLVAQNNGIIAAIDKGRKERAQLESAVIKSAETINDSVKIRDKKIVEALLNEGKSTQEKVDES

SEQ ID NO: 8041 - protein, 873 aa, Streptococcus agalactiae
ATGGATAAAATTATAAAATCAATTTCAACTTCCGGTTCTTTCCGGGCTTATGTCCTTGATTGTACAGAAACTGTAAGAACAGCTCAAGAAAAACATCAGACACTTTCAAGTTCTACTGTAGCTCTTGGGAGAACATTAATTGCAAATCAAATTTTAGCAGCAAATCAAAAAGGAAATAGTAAAGTAACTGTCAAGGTTATTGGAGATAGCTCTTTTGGTCATATTATTTCTGTAGCTGATACTAAAGGAAATGTTAAAGGTTACATCCAAAATACGGGTGTTGATATCAAGAAAACAGCTACTGGAGAGGTCTTAGTTGGACCTTTCATGGGTAATGGACACTTTGTCGTTATTACCGATTACGCAACTGGGCAACCTTACACTTCAACAACTCCACTAATTACAGGAGAAATTGGAGAAGATTTTGCTTATTATTTAACCGAAAGTGAGCAAACACCTTCTGCCGTCGGTTTAAATGTCCTCTTAGATGACGAGGATAAGGTTAAAGTTGCAGGTGGATTCATGCTTCAGGTGCTCCCAGGTGCTTCTGACGAAGAAATTTCTCGCTATGAAAAACGCATTCAGGAGATGCCTTCTATTTCAAGTCTGCTAGAGTCTGAAAATCATATAGAATCTCTCCTTTCAGCTATTTACGGAGAAGACGACTACAAGCGCTTATCGGAAGACTCTTTAGCCTTCTACTGTGACTGTTCAAAAGAACGTTTTGAAGCCGCTCTATTGACTTTAGGAACTAAAGAATTGCAAGCCATGAAGGATGAAGATAAAGGTGTTGAAATTACTTGTCAAATTTGCAACCAGACTTACTATTTCACAGAAGAAGATTTGGAGAAGATAATTAATGACTCAATTAAA

SEQ ID NO: 8042 - protein, 291 aa, Streptococcus agalactiae
MDKIIKSISTSGSFRAYVLDCTETVRTAQEKHQTLSSSTVALGRTLIANQILAANQKGNSKVTVKVIGDSSFGHIISVADTKGNVKGYIQNTGVDIKKTATGEVLVGPFMGNGHFVVITDYATGQPYTSTTPLITGEIGEDFAYYLTESEQTPSAVGLNVLLDDEDKVKVAGGFMLQVLPGASDEEISRYEKRIQEMPSISSLLESENHIESLLSAIYGEDDYKRLSEDSLAFYCDCSKERFEAALLTLGTKELQAMKDEDKGVEITCQICNQTYYFTEEDLEKIINDSIK

SEQ ID NO: 8043 - protein, 975 aa, Streptococcus agalactiae
ATGACTCAATTAAATAGTTCATTTATGATTGGGAAGGTTGAAATTCCTCATCGTACCGTACTAGCACCGATGGCAGGTATTACCAATTCTGCTTTTCGTACTATCGCTAAAGAATTTGGTGCTGGTCTCGTTGTTATGGAAATGATTTCTGAGAAAGGGTTACTTTATAACAACGAAAAGACCTTACATATGCTCCATATCGATGAAAATGAACATCCTATGTCAATTCAACTATTTGGTGGCGATGCAGAAGGCTTAAAACGTGCAGCTGACTTTATCCAAAGTAATACGAAAGCAGATATCGTAGACATCAATATGGGATGTCCAGTTAACAAAGTTGTTAAAAACGAAGCTGGAGCTAAATGGTTACGTGACCCTGAAAAAATTTATCATATTGTTAAAGAGGTAACGTCTGTACTTGACATTCCATTAACAGTAAAAATGCGTACAGGATGGTCTGACTCATCTAATGCTATAGAAAATGCACTCGCTGCCGAATCTGCTGGTGTATCTGCACTTGCTATGCACGGTCGAACGCGTGAACAAATGTATACTGGCACGTGTGACCATGAAACACTTGGCAAGGTCGCTAAAGCTGTTACTAGTATTCCTTTTATTGCTAATGGTGACATTCGTACTGTTCACGATGCCAAATTTATGATTGAAGAGATTGGAGCTGACGCTATAATGGTTGGACGTGGTGCTCGTAGCAATCCTTACATCTTTACACAAATTAATCATTTCTTTGAAACAGGCGAAATCCTTCCTGACCTACCATTTGAGAAGATGTTAGATGTTGCCGAGGATCATCTCACTCGACTAGTTAATTTAAAAGGTGAAACTATTGCCGTTCGTGAATTTCGAGGGTTAGCACCTCATTATCTGCGTGGAAAATCAGGCGCAGCAAAAATTAGAGGAGCTGTTTCACGTGCAGAAACACTAGCAGAAGTTCAAGAACTTTTTGCAGGTTTACGC

SEQ ID NO: 8044 - protein, 325 aa, Streptococcus agalactiae; identical to SEQ ID NO: 3360

SEQ ID NO: 8045 - protein, 639 aa, Streptococcus agalactiae
ATGTTGATTGTTTTAGCTGGAACCATTGGAGCAGGTAAAAGCTCCCTTGCAGCTGCTCTAGGACAACACCTAGGGACAGATGTTTTCTATGAGGCGGTTGATAATAACCCAGTTTTAGATCTTTACTATCAAGATCCCCAAAAATATGCTTTTTTACTACAAATATTCTTTTTAAATAAACGATTCCAATCTATAAAAGAAGCCTATAAGGCTAACAACAATGTTTTGGATCGTTCTATTTTTGAAGATGAACTATTCCTCACTCTAAATTATAAGAATGGAAATGTGACTAAAACAGAGCTAGATATCTATAAAGAACTTCTTGCAAATATGTTGGAAGAATTAGAAGGTATGCCTAAGAAGAGACCTGATTTGCTAGTCTACATTGATGTTTCATTTGATAAAATGTTAGAACGTATTGACAAACGAGGACGCAGCTTTGAGCAAGTTGATTCTAACCCAGAGTTATACGACTACTACAAACAAGTCCATTCTGAATATCCAGAATGGTATGAAAATTACGACGTTTCACCTAAAATTCGGATCGATGGTAACAAACTTGATTTCGTCAAAAATCCAGAGGATCTTCAACACGTCCTTGACACTATTGATTCCGAATTGCAAAAACTTGATTTACTA

SEQ ID NO: 8046 - protein, 213 aa, Streptococcus agalactiae; identical to SEQ ID NO: 3362

SEQ ID NO: 8047 - protein, 489 aa, Streptococcus agalactiae
ATGATTATAAGACCTGTCCTACCCTCAGATGCTAAAGAATTACTTGCTATCTATGCTCCCTACGTTGCTGACACTACAATAACGTTTGAATACGATATTCCTAGTATATCGGAATTCACTAATCGTATCAAAAATATCAGCAAATCTTTCCCATATTTAGTTGCTGAAGAAAATGGGAAAATATTAGGTTATGCATATGCTTCAACTTACTACGCTAGAGCTGCCTATGACTGGACTTGCGAGCTTTCTATTTACCTTGATAAAGATGCACGTAGCAAAAAAATTGGTAGCCAACTATATGATACATTGGAGAAAGAATTAGTTAACCAAGGGTATGTTAATCTACTCGCTTGTATCAGTTTACCAAATGATATAAGCATTGCATTCCACAAAAAAAGAGGATTTAATCAAGTCGCACATTTCCCAAAAATCGGATTTAAATTTGAACAATGGCATGACATTGTGTGGTTACAAAAGCGATTGAAATCT

SEQ ID NO: 8048 - protein, 163 aa, Streptococcus agalactiae; identical to SEQ ID NO: 3364

SEQ ID NO: 8049 - protein, 2445 aa, Streptococcus agalactiae
ATGAGTCATTATTCCATAAAATTACAAGAAGTATTCAGATTGGCGCAATTTCAAGCAGCACGCTATGAAAGTCACTATTTAGAAAGCTGGCATCTTCTTTTAGCAATGGTTTTAGTTCATGATTCAGTAGCTGGTTTGACATTTGCTGAATATGAGTCTGAAGTTGCAATTGAAGAGTACGAAGCAGCAACAATTTTAGCTTTAGGTAGAGCACCGAAAGAAGAGATTACCAATTATCAATTTTTAGAGCAATCACCAGCTTTGAAAAAGATCTTAAAGTTAGCAGAAAATATTAGTATCGTAGTAGGAGCTGAAGATGTGGGTACTGAACATGTCTTGCTTGCTATGTTGGTTAATAAAGATTTATTAGCCACACGTATCTTAGAGTTAGTTGGCTTTAGAGGTCAAGACGATGGTGAATCAGTTCGTATGGTTGATTTACGTAAGGCTCTAGAACGTCATGCCGGTTTTACAAAAGATGATATCAAAGCAATTTATGAATTACGTAATCCTAAAAAAGCAAAGTCGGGTGCTTCTTTTTCTGATATGATGAAACCACCGAGTACTGCTGGTGATTTAGCTGATTTCACACGTGATTTATCACAGATGGCGGTTGATGGGGAAATTGAACCTGTTATTGGGCGTGATAAAGAAATTTCACGTATGGTCCAAGTCTTAAGTCGTAAAACAAAGAATAATCCTGTCTTAGTTGGAGATGCGGGTGTCGGTAAAACAGCTTTGGCGTACGGTCTAGCACAACGTATTGCTAATGGAAATATTCCTTATGAGCTTAGAGATATGCGTGTTCTAGAGTTAGATATGATGAGCGTTGTTGCTGGAACTCGTTTTCGTGGTGATTTTGAGGAACGTATGAATCAAATCATTGCAGATATTGAAGAAGACGGTCATATTATTCTTTTCATTGATGAACTGCATACTATTATGGGTTCTGGCTCTGGTATTGATAGCACACTTGATGCTGCTAATATTTTAAAACCAGCTTTGGCCCGAGGCACTTTACGCACTGTTGGAGCAACAACTCAAGAGGAATATCAAAAGCATATTGAAAAAGATGCTGCTTTATCTCGTCGCTTTGCAAAAGTTTTAGTAGAAGAACCAAATCTTGAAGACGCATATGAAATTCTACTTGGATTGAAGCCAGCGTATGAAGCCTTTCATAATGTTACTATTTCAGATGAAGCAGTTATGACTGCTGTAAAAGTGGCTCATCGTTATTTGACAAGTAAGAATTTACCAGACTCAGCTATAGACTTACTTGATGAAGCTTCTGCCACTGTGCAAATGATGATTAAGAAAAATGCTCCTTCGCTTTTAACAGAAGTTGACCAAGCTATTTTAGATGATGATATGAAATCTGCTTCTAAAGCTCTAAAAGCAAGTTATAAGGGTAAAAAGCGTAAGCCTATTGCCGTAACAGAAGATCATATTATGGCAACTCTCAGTCGTCTATCTGGTATTCCTGTTGAAAAATTGACACAAGCTGATAGTAAAAAATACCTCAATTTAGAAAAAGAATTGCATAAACGTGTTATCGGTCAAGATGATGCAGTTACTGCCATTAGTCGTGCTATCCGTCGCAATCAATCTGGCATTCGTACTGGTAAGCGTCCTATTGGTTCCTTTATGTTCTTGGGACCAACTGGTGTTGGTAAGACAGAGTTAGCAAAAGCCTTGGCAGAAGTGTTGTTTGATGATGAATCAGCCCTAATTCGTTTTGATATGTCGGAATATATGGAAAAATTCGCAGCTTCTCACCTGAATGGGGCACCTCCAGGTTATGTTGGTTATGATGAAGGAGGAGAGTTGACTGAAAAAGTACGCAATAAACCATATTCAGTTTTACTTTTTGATGAAGTTGAAAAAGCTCATCCAGATATTTTTAATGTATTATTACAAGTGCTTGATGATGGCGTTTTAACAGATAGTCGAGGACGAAAAGTTGATTTTTCAAATACTATAATCATTATGACTTCTAATTTAGGAGCAACTGCATTACGTGACGATAAAACAGTTGGTTTTGGAGCTAAGGATATCAGCCATGATTATACTGCTATGCAAAAACGTATTATGGAGGAGCTTAAAAAAGCTTATCGACCAGAGTTTATCAATCGTATTGATGAGAAAGTTGTATTCCATAGTCTCAGTCAAGATAATATGCGTGAAGTTGTGAAAATTATGGTTAAACCTTTAATTTTAGCGCTTAAAGATAAAGGTATGGATCTGAAATTCCAGCCTTCAGCCTTGAAACACTTGGCAGAGGATGGCTATGATATAGAAATGGGTGCTCGTCCACTGCGTAGAACTATTCAAACGCAAGTAGAGGATCATTTATCAGAACTACTATTGGCAAATCAAGTGAAAGAGGGGCAAGTAATTAAGATTGGCGTATCCAAAGGCAAATTGAAATTTGATATTGCAAAATCA

SEQ ID NO: 8050 - protein, 815 aa, Streptococcus agalactiae; identical to SEQ ID NO: 3366

SEQ ID NO: 8051 - protein, 462 aa, Streptococcus agalactiae
GTGGCCATAAAAAATACTTCCGATAATATTGAAGAATATATAAAATCATTATTAGAACAATCAGGAATTGCTGAAATAAAGCGTTCCAATTTAGCTGATACTTTTCAAGTTGTTCCTAGTCAGATTAATTATGTCATTAAGACACGGTTTACTGAAAGCCGTGGTTATGTGGTTGAGAGTAAACGAGGTGGTGGAGGTTACATCCGCATTGCTAAGGTTCATTTTTCTGATCAACACCAATTATTTGGAAATATGTTATCAACGATTGGCGAGCGTATCAGTGAACAAGTTTTTGATGATTTGATTCAATTATTATTCGATGAAGAGATAATTACAGAACGTGAAGGAAATTTGATTCTGGCGACATCAGGTGATGACGTCTTAGGAGAGCAAGCCTCTGTTATTAGAGCTCGTATGCTCCGTAAATTATTACAACGATTAGATAGAAAAGGATTCCATTTA

SEQ ID NO: 8052 - protein, 154 aa, Streptococcus agalactiae; identical to SEQ ID NO: 3368

SEQ ID NO: 8053 - protein, 459 aa, Streptococcus agalactiae
ATGAATTACATTATTACATTTTTGATTTCAATGATTCCCTTAGTGGAACTACGAGGAGCTGTGCCATTTGCAATCGCTAATGGAATACCTTTGTGGGAAGCGCTAGCTATCGGTGTTGTTGGAAACATGCTACCTGTACCTATCATCTTCTTCTTTGCTCGCAAAGTTCTAGAATGGGGAGCAGATAAACCTTATACTGGTAAGTTTTTCACATGGTGCCTTAAAAAAGGACATAGCGGTGGTCAAAAACTTGAAAAAGTAGCTGGAGAAAAAGGATTGTTTATTGCCTTGCTATTGTTTGTAGGCATTCCCTTACCCGGAACAGGAGCCTGGACTGGCACGCTTGCAGCTAGCCTCCTAGATTGGGAATTTAAACATAGTGTTATTGCTGTTATGCTAGGTGTTATACTAGCTGGATGCATCATGGGAACATTATCCATTATCGGCTTCAACCTATTC

SEQ ID NO: 8054 - protein, 153 aa, Streptococcus agalactiae
MNYIITFLISMIPLVELRGAVPFAIANGIPLWEALAIGVVGNMLPVPIIFFFARKVLEWGADKPYTGKFFTWCLKKGHSGGQKLEKVAGEKGLFIALLLFVGIPLPGTGAWTGTLAASLLDWEFKHSVIAVMLGVILAGCIMGTLSIIGFNLF

SEQ ID NO: 8055 - protein, 1038 aa, Streptococcus agalactiae
ATGGCAGAAATCACAGCTAAACTTGTAAAAGAATTGCGTGAAAAATCAGGTGCAGGCGTTATGGACGCTAAAAAAGCATTAGTAGAAACTGATGGTGACCTTGATAAAGCGATTGAATTACTTCGCGAAAAAGGTATGGCTAAAGCAGCTAAAAAAGCAGACCGTGTTGCTGCTGAAGGTTTAACAGGTGTTTATGTTGATGGTAACGTTGCAGCAGTTATTGAAGTTAACGCTGAGACTGACTTTGTTGCTAAAAACGACCAATTTGTAACATTAGTTAATGAAACTGCTAAAGTTATTGCAGAAGGACGTCCTTCAAACAATGAAGAAGCACTTGCTTTAACAATGCCTTCAGGTGAAACTTTAGAACAAGCATTTGTAACTGCAACTGCTACAATTGGTGAAAAAATTTCATTCCGTCGCTTCGCTTTAGTTGAAAAGACTGATGAGCAACATTTTGGTGCATACCAACATAATGGTGGACGTATCGGAGTAATTACTGTTGTTGAAGGTGGCGACGATGCACTTGCTAAACAAGTATCAATGCACGTTGCAGCTATGAAGCCAACTGTTCTTTCATATACTGAACTTGATGCACAATTTGTTCATGATGAATTAGCACAGTTGAACCACAAAATTGAGCAAGACAACGAGAGTCGTGCTATGGTTAACAAACCAGCTCTTCCATTCCTTAAATATGGATCAAAAGCTCAATTGACTGATGAAGTTATTGCCCAAGCAGAAGAAGACATCAAAGCAGAATTAGCTGCAGAAGGTAAACCAGAAAAAATCTGGGATAAAATCGTTCCAGGTAAAATGGATCGTTTCATGCTTGACAACACTAAAGTTGACCAAGAGTACACACTCCTTGCTCAAGTTTACATCATGGATGATAGCAAAACAGTTGAAGCTTATCTTGAGTCAGTAAATGCTAAAGCAGTTGCTTTCGTACGTTTTGAAGTTGGAGAAGGTATTGAGAAAGCTTCTAACGACTTTGAAGCAGAAGTTGCAGCTACAATGGCAGCAGCACTTGAAAAA

SEQ ID NO: 8056 - protein, 346 aa, Streptococcus agalactiae; identical to SEQ ID NO: 3372

SEQ ID NO: 8057 - protein, 768 aa, Streptococcus agalactiae
ATGGCAGTAATTTCAATGAAACAACTTCTTGAGGCTGGTGTTCACTTTGGTCACCAAACTCGTCGCTGGAACCCTAAGATGGCTAAGTACATCTTCACAGAACGTAATGGTATCCACGTTATCGACCTTCAACAAACTGTAAAATTAGCTGACCAAGCTTACGAATTTGTTCGTGATGCTGCAGCAAACGATGCAGTTATCTTGTTTGTTGGTACTAAGAAACAAGCAGCTGAAGCTGTTGCTGAAGAAGCTAAACGTGCTGGTCAATACTTCATTAACCACCGTTGGTTAGGTGGAACTCTTACTAACTGGGGAACTATCCAAAAACGTATTGCTCGTTTGAAAGAAATCAAACGTATGGAAGAAGAAGGAACTTTTGAACTTCTTCCTAAGAAAGAAGTTGCATTGTTAAACAAACAACGTGCACGTCTTGAAAAATTCTTGGGTGGTATCGAAGATATGCCACGCATCCCAGATGTAATGTATGTTGTTGACCCACATAAAGAGCAAATCGCTGTTAAAGAAGCTAAAAAACTTGGTATTCCAGTTGTAGCTATGGTTGACACTAACGCTGATCCAGATGATATCGATGTTATCATCCCAGCAAACGATGACGCTATTCGCGCCGTTAAATTAATTACTTCTAAATTAGCTGATGCAGTTATTGAAGGTCGTCAAGGTGAAGATGCTGACGTTGACTTCGCTCAAGAAGCACAAGCAGATTCAATTGAAGAAATCGTTGAAGTAGTTGAAGGATCAAACAACGAC

SEQ ID NO: 8058 - protein, 256 aa, Streptococcus agalactiae; identical to SEQ ID NO: 3374

SEQ ID NO: 8059 - protein, 543 aa, Streptococcus agalactiae
ATGACTGAAGTTATCAATACCCTCGAACAGCAACATACTGAATATGTCAGCCGTCTCTACGTTGCATGGGCAACAACACCACAGATGCGAAACTTGGTCAAAGTATCGTCAGATATGCGTCAGAAACTTGGCATGTTACGTCGAAATACCATTCCAACAATGAAACTCTCAATCGCTCAGTTAGGCATGATGCAACAATCTGTCAAATCCGGTGTCACTGCTGATGCTATTGTCAACGCTAATAATGCAGCATTGCAGATGCTGGCTGAAACTAGTAAAGAAGCGATTCCGATGTTAGAGAAGACCGCACAAAGCCCCACTGTTTCTATTAAATCTGTCACTGCATTAGCTGAAAGCTTAGTGGCTCAAAATAATGGTATTATCGCTGCCATAGACAAAGGACGTAAGGAACGTGCCCAATTGGAATCTGCTGTTATTAAATCGGCTGAAACAATCAATGATTCTGTCAAAATTCGTGATAAAAAAATAGTTGAAGCCTTACTCAACGAAGGTAAATCTACCCAAGAAAAAGTTGATGAGTCT

SEQ ID NO: 8060 - protein, 181 aa, Streptococcus agalactiae
MTEVINTLEQQHTEYVSRLYVAWATTPQMRNLVKVSSDMRQKLGMLRRNTIPTMKLSIAQLGMMQQSVKSGVTADAIVNANNAALQMLAETSKEAIPMLEKTAQSPTVSIKSVTALAESLVAQNNGIIAAIDKGRKERAQLESAVIKSAETINDSVKIRDKKIVEALLNEGKSTQEKVDES

SEQ ID NO: 8061 - protein, 558 aa, Streptococcus agalactiae
ATGTCATTAGTCGGAAAAGAAATTATTGAATTTTCAGCTCAAGCTTATCACGATGGAAAATTCATCACTGTTACAAATGAAGACGTTAAAGGAAAATGGGCAGTTTTTTGTTTCTACCCAGCAGACTTTTCATTTGTTTGCCCAACTGAACTTGGTGACCTTCAAGAGCAATACGAAACACTTAAATCTCTTGATGTAGAAGTTTATTCTGTCTCTACTGATACTCATTTTGTTCATAAAGCATGGCATGATGACTCAGATGTCGTTGGTACTATCACATATCCTATGATTGGTGACCCTTCACACCTTATTTCACAAGGTTTTGATGTCCTTGGACAAGATGGTCTAGCACAACGTGGTACATTTATCATTGATCCAGACGGTGTCATCCAAATGATGGAAATTAATGCTGATGGCATCGGACGTGATGCAAGTACTCTCATTGATAAAGTCCGTGCTGCTCAATACATCCGCCAACATACAGGTGAAGTTTGTCCAGCTAAATGGAAAGAAGGAGCTGAAACTTTAACTCCTAGTTTAGACCTTGTAGGTAAAATT

SEQ ID NO: 8062 - protein, 186 aa, Streptococcus agalactiae; identical to SEQ ID NO: 3376

SEQ ID NO: 8063 - protein, 1530 aa, Streptococcus agalactiae
ATGGTCTTAGATAAAGAAATCAAGGCTCAATTAGCGCAATATTTAGATTTGCTAGAATCTGATATTGTATTACAAGCTGATTTAGGAGATAACGATAATTCTCAAAAAGTAAAGGATTTTCTAGATGAAATTGTCGCTATGTCTGATCGCATCAGCCTTGAATCAACACATTTAAAACGTCAACCTAGTTTTGGAATTGCAAAAAAAGGGCATGAAAGTCGCGTTATTTTTTCAGGCTTGCCAATGGGGCATGAATTCACATCTTTCATTTTAGCTTTGTTGCAAGTCTCTGGTCGCGCACCAAAAGTTGATGAAGATATTATCAAACGAATTAAGGGGATTGAGAAAACTATCAATCTAGAAACTTATGTTTCATTAACTTGCCATAATTGTCCAGATGTCGTTCAAGCCTTTAATATAATGGCTGTTTTGAATCCGAATATCACTCATACTATGATTGAAGGAGGCATGTATCAAGACGAAGTCAAATCAAAAGGTATCATGTCTGTTCCTACTGTTTATAAGGACCAAGAAGAATTTACTTCTGGCCGTGCTACAATTGAACAGCTTTTAGAACAACTAGATGGACCTCTTGATGCTGAAGCATTTGCTGACAAAGGTGTCTATGATGTTCTAGTTATTGGTGGTGGTCCTGCAGGTAACAGTGCTGCAATTTATGCCGCCCGTAAAGGGTTAAAAACAGGTATTTTAGCAGAAACTTTTGGTGGACAAGTTATCGAAACAGTTGGTATTGAGAACATGATTGGTACACTGTACACAGAAGGCCCTAAATTAATGGCTCAAATTGAAGAGCATACCAAATCTTACGATATTGATATTATCAAGAGTCAATTAGCAACTGGCATTGAGAAAAAAGAATTAGTTGAGGTAACACTGGCTAACGGAGCTATTTTACAAGCTAAAACTGCTATCCTAGCTCTGGGTGCTAAGTGGCGAAATATCAACGTTCCTGGCGAGGAAGAATTCCGCAATAAAGGTGTTACTTACTGTCCACATTGTGATGGCCCTCTTTTCGAAGGAAAAGATGTTGCTGTTATAGGTGGTGGTAATTCAGGTATGGAAGCTGCTTTAGATCTAGCCGGTGTCACTAAACATGTTACAGTCCTAGAATTCTTACCTGAGCTCAAAGCAGACCAAGTACTGCAAGAACGAGCAGCTAAAACTGACAATTTAACTATTCTTAAGAATGTTGCTACTAAAGATATCGTTGGTGAAGATCATGTCACTGGTTTAAACTATACCGATCGTGATACAAACGAAGAAAAACACATTGATTTAGAAGGTGTTTTTGTACAAATTGGTCTTGTACCAAGTACATCTTGGCTCAAGGATAGCGGCATTGAACTCAATGAACGTCAAGAAATTGTCGTTGATAAATTTGGCTCAACAAATATCCCTGGTATTTTTGCTGCAGGTGACTGTACAGATGCTGCCTACAAGCAAATCATTATTTCCATGGGGTCTGGTGCCACAGCTGCCATTGGCGCATTTGATTATTTAATCAGACAA

SEQ ID NO: 8064 - protein, 510 aa, Streptococcus agalactiae; identical to SEQ ID NO: 3378

SEQ ID NO: 8065 - protein, 2067 aa, Streptococcus agalactiae
ATGGAAGAAACTATTCTAATAGTCAGCTTTCTCCTGTTTTTGATTTTATCTAATGTTATCAATAGGATATTTCCTAAATTACCATTACCATTTATCCAGTTGGTCTTTGGGATTCTCTCTGGCTTAGTTTTTCATAAGTCACAAGTCCATATCGATCCTGAGTTATTCCTTGCCTTTGTTATTGCTCCTTTGAACTTTAGGGAAGGTCAAGAAAGTGATATTGGTAGTTTTATAAAGTATCGGGCTATTATTCTTTACTTAATCTTACCAACGGTATTTTTAACAGCTATTGTCGTTGGTTATGTAGCAGGGCACCTTTTGCCAGTTAGTTTACCACTTGCGGCATGCTTTGCGCTTGGAGCAGCCTTAGGCCCAACAGATGCCGTTGCCTTTATATCGATTGCTAAGAGGTTTCAATTTCCTAAACGGGCAGAAAATATCCTCAAATTGGAAGGTCTTTTAAATGACGCTAGTGGTCTAGTTTCCTTCCAGTTTGCTTTAACAGCCCTTGTAACAGGTTATTTCTCCTTAGCAAAAGCTAGTCTCAAGTTAGCATTGGCCATAATGGGTGGTTTTTTAATTGGCTTGCTTTTTGCTTTTCTAATGAGGTTATGTCTCACTGTCCTAGAGAAATTTGATGCTGCTGATGTTACAGGGGCTCTACTTTTGGAATTAACCTTACCTTTTGTTGCTTATTTCGTTGCTGATTTGTTGGGATTTTCAGCTATTATTGCGGTGGTAGTGGCAGGAGTAATGCAAGCAAATCGTTTGAAAAAAGTGACTCTCTTTGATGCTCAAGTAGATCGCGTTACCTCTGTTATTTGGGAAACCTTAAATTTTATTTTAAATGGTTTAGTTTTCTTAATATTTGGAAGAGAACTGACACGTATCATTGGTCCTCTTTTAACAAGTAACGCTTATAGTAATTTTGATCTTATTAGTATTGTTGTTTTAGTTACTTGCACACTTTTTCTAGTTCGCTTTCTAGCAGTTTCTTGCTTTTATGCTTGGAGATCTTTCAAATACCATAAATCATTTAAAAAGTATTGGAGAGAGATTCAACTGTTGACTTTTTCAGGAGTTAAAGGAAGTGTTTCCATAGCAACAATACTCTTATTACCCAAGCACTCAGTCATAGGAGAGTTGGGGTATAGTTTGATTCTTTTCACTGTTGGTGCAGTAACGCTAATGAGTTTTTTAACGGGACTTTTAGTATTACCAAAGTTAGCGCCTCCCTTACAGGTGAAAGATGATTATTTAATACGTCTATCGATTTTAACAAAAGTATTATCTGTCTTAGAAGAAGATGGTAAGAGTTCTGAAAATCAAGCTTCATTTTATGCAGTTATAGATAATTATAATAGCCGTATTCGTCATCTCATTTTAGAACAAGAATCTAGTGACATTAAGAAGGACTTAGCTGAATTGCAACTGATGATGCTTAGTATAGAAAGCGATGGACTTGAAGCTGCTTATCGTTATGGCAATATTTCTATCAAAGAATATCGTATTTACCAACGTTATTTAAAATACTTAGAACGCCAAGTTAATCGTAGCTTTGTGTCAAATATCACTTATAGTTTAACGATTCTTATGCGTGTTATTCGTGGTATTGTTCATGAGTTTTTAACATTTGGACAAGGAATACGAAATCGGAAAAAACATTTCAAAAACAGGAAACGGTTGTTAGCAGAAGTCAATCGTCAGCACTTAACAGATTTGTACTTATCAAATAATGACCTCATTTTAGAAACGCTAGAAGATATGGAAGGTTATTATAATGCAACTTTGATAGATTTCTTACAAAATGAACGCATTCGAGACGCAGAATTAATTAAATCAGGTTTATTTGTAGAACGTGTCATTGCACGCATAACGCCAGATATTTTAAATGAAACCCTAAGAGGATATTACTTGGAACGCAGAACAATCTCTGAATTTGAAAGGGACGGTTTAATTAGTTCTAAAGAGTCTCAAATTTTAAGGGATAATGTCAATGAATTAGAAAGCTATTCATTAAGAGATAGTCAATCTTCTATACCTTATCAATTATTGGATTTAAAAAAA

SEQ ID NO: 8066 - protein, 689 aa, Streptococcus agalactiae
MEETILIVSFLLFLILSNVINRIFPKLPLPFIQLVFGILSGLVFHKSQVHIDPELFLAFVIAPLNFREGQESDIGSFIKYRAIILYLILPTVFLTAIVVGYVAGHLLPVSLPLAACFALGAALGPTDAVAFISIAKRFQFPKRAENILKLEGLLNDASGLVSFQFALTALVTGYFSLAKASLKLALAIMGGFLIGLLFAFLMRLCLTVLEKFDAADVTGALLLELTLPFVAYFVADLLGFSAIIAVVVAGVMQANRLKKVTLFDAQVDRVTSVIWETLNFILNGLVFLIFGRELTRIIGPLLTSNAYSNFDLISIVVLVTCTLFLVRFLAVSCFYAWRSFKYHKSFKKYWREIQLLTFSGVKGSVSIATILLLPKHSVIGELGYSLILFTVGAVTLMSFLTGLLVLPKLAPPLQVKDDYLIRLSILTKVLSVLEEDGKSSENQASFYAVIDNYNSRIRHLILEQESSDIKKDLAELQLMMLSIESDGLEAAYRYGNISIKEYRIYQRYLKYLERQVNRSFVSNITYSLTILMRVIRGIVHEFLTFGQGIRNRKKHFKNRKRLLAEVNRQHLTDLYLSNNDLILETLEDMEGYYNATLIDFLQNERIRDAELIKSGLFVERVIARITPDILNETLRGYYLERRTISEFERDGLISSKESQILRDNVNELESYSLRDSQSSIPYQLLDLKK

SEQ ID NO: 8067 - protein, 234 aa, Streptococcus agalactiae
ATGTCTCAATTATCTTTGGAAGAACAATTGAATCGACTAAAAGATAAATACCTTTCTTCTAAAAATCAAGAATTTTCAAATGTTCACTTAAGTAAAGTAAAGAAGAAAAAGAAGAAATTAATAATACTTGAAAAAGAAAGATGTCGCTGTCGATTGGAGAGAGAAGATACTAAAAAAATCGATGATAAAATTGAGAAATTGAAGAAAGAATTGATAGATGTTATGAAGGAGGAA

SEQ ID NO: 8068 - protein, 78 aa, Streptococcus agalactiae; identical to SEQ ID NO: 3386

SEQ ID NO: 8069 - protein, 951 aa, Streptococcus agalactiae
ATGAAAAAATTAACAAAAGGCAGCCACATTCGTGTTCTTAGTCCCTCTTCTTCCATTGAGCGTCTGGGTGGTTTTGAGGCTAACCTATTAGCCAAAGAAGTACTAGAAAAGCTGGGATTTCAAGTGTCATTCTCTAAGCACTATCTAGAAAATGATATCCTCTATTCTGCTTCGATTGCTAGCCGTGTAGAAGATTTACATGAAGCATTTGCCGACCCTTCTGTTGATGCCATATTAGCAACCATTGGCGGATTCAATTCCAACGAGCTTTTACCATATTTAGATTATGATTTAATCTCTAAGAATCCCAAAATAATTTGTGGTTACTCAGATTCAACGGCCTTCCTTAATGCTATTTTTGCCAAAGCAAAAATCCAAACTTACATGGGCCCTGCTTATTCTTCTTTCAAAATGAAGGAAGGTCAACCTTACCAAACACAAGCTTGGCTTACTGCCATGACAGAAAACCACTATGAACTTTGGCCTAGTGAAGAATGGTCTAGTGATCCCTGGTATGATCCCAGCAAACCACGCCAATTTTTCCCAACAGAATGGAAAATTTATAATCACGGAAAAGCTTCCGGTACGATTATCGGAGGTAATCTCTCTACGTTTGGCCTACTTCGAGGTACTCCTTATGCACCGAAAATTGAACGCTATGTCCTCTTGATTGAAGAGGCTGAGGAAAGTAATTTTTATGAATTTGACCGCAACCTTGCTGCAATTTTACAAGCTTATCCTCATCCACAAGCTATTCTTATGGGGCGCTTTCCTAAAGAATGCGGCATGACTCCACAAGTCTTTGAATATATCCTTTCAAAACATGCTATTTTCAAGGAAATTCCTGTTATTTATGATATGGATTTTGCGCACACCCAACCTCTTTTGACAGTGACTATTGGAGCTGAGCTAAGCGTTGACACTACTACATTATCTCTATCTATAAAAGAA

SEQ ID NO: 8070 - protein, 317 aa, Streptococcus agalactiae
MKKLTKGSHIRVLSPSSSIERLGGFEANLLAKEVLEKLGFQVSFSKHYLENDILYSASIASRVEDLHEAFADPSVDAILATIGGFNSNELLPYLDYDLISKNPKIICGYSDSTAFLNAIFAKAKIQTYMGPAYSSFKMKEGQPYQTQAWLTAMTENHYELWPSEEWSSDPWYDPSKPRQFFPTEWKIYNHGKASGTIIGGNLSTFGLLRGTPYAPKIERYVLLIEEAEESNFYEFDRNLAAILQAYPHPQAILMGRFPKECGMTPQVFEYILSKHAIFKEIPVIYDMDFAHTQPLLTVTIGAELSVDTTTLSLSIKE

SEQ ID NO: 8071 - protein, 1893 aa, Streptococcus agalactiae
ATGATAAAATATCAAGATGATTTTTACCAAGCGGTTAATGGGGAGTGGGCTAAGACAGCTGTTATTCCTGATGACAAACCAAGGACAGGTGGTTTTTCTGATCTTGCTGATGACATTGAAGCATTAATGCTGTCAACGACAGATAAGTGGCTGGCTGATGAAAATAAACCAAGTGATACGATTTTAAATCATTTTATTGCTTTTCATAAAATGACAGCTGATTATCAAAAACGTGAAGAGGTAGGAGTATCACCAGTATTACCATTAATTGAAGAATATAAAGGCCTACAATCTTTCTCTGAGTTTGCATCAAAAGTTGCAGAATATGAACTAGAGGGTAAACCAAATGAATTTCCATTTGGTGTGGCTCCTGACTTTATGAATGCTCAATTGAATGTACTTTGGGCTGAAGCGCCTGGGATTATTTTACCAGATACAACTTATTATAGTGAAGATAATGAAAAAGGAAAGGAACTCCTTGCTTTTTGGCGTAAAAGTCAAGAAGACCTACTGCCTTTGTTTGGCCTTTCAGAACAGGAAATTAAAGATATCTTGGATAAGGTTTTAGCATTGGATGCAAAATTGGCACAATATGTCTTATCTCGCGAAGAGAGTTCGGAATATGTTAAACTTTACCATCCTTATAACTGGGAAGATTTCACAAAATTAGCACCTGAACTTCCATTAGATGCTATTTTCCAAAAGATATTAGGACAAAAACCAGATAAAGTTATTGTTCCTGAAGAACGTTTCTGGACAGAATTTGCATCTGACTATTACTCAGAATCTAATTGGGAATTATTAAAGGCAGATCTTATTTTATCAGCTGCGAATGCCTATAATGCTTACTTAACTGATGATATTCGTATCAAATCGGGAGTTTACAGTCGAGCTTTATCAGGCACACCACAAGCAATGGATAAGAAAAAAGCAGCTTACTACCTTGCTTCAGGACCTTACAATCAAGCTCTAGGTTTGTGGTATGCAGGAGAAAAATTCTCTCCAGAAGCTAAAGCTGATGTTGAGCATAAGATTGCAACGATGATTGATGTCTATAAGTCACGCTTAGAAAAGGCGGATTGGCTTGCACAGTCAACGCGAGAAAAAGCTATTATGAAACTTAATGTTATCACACCACATATTGGATACCCTGAGAAACTACCAGAGACTTATACTAAAAAAATCATTGATCCTAAACTATCGCTTGTCGAAAATGCTACTAATTTAGACAAAATTTCAATAGCCTATGGTTGGAGTAAATGGAATAAACCAGTTGATAGAAGTGAATGGCATATGCCTGCCCACATGGTCAATGCGTATTATGATCCACAACAAAACCAAATTGTCTTCCCAGCAGCCATTTTACAAGAACCATTTTATGCTTTAGAGCAAAGTTCATCAGCAAATTATGGGGGAATTGGTGCAGTGATTGCACATGAAATATCACACGCTTTTGACACTAATGGAGCTTCATTTGATGAACATGGAAGTTTGAATAATTGGTGGACTGATGAAGATTTTGAAGCTTTCAAAAAACTTACAGATAAAGTAGTTGAGCAGTTTGATGGACTGGAATCTTATGGCGCAAAAGTCAATGGTAAACTAACAGTATCAGAAAATGTTGCAGATTTAGGTGGAGTTGCTTGTGCTTTAGAAGCTGCGCAGCGTGAGTCAGATTTTTCAGCGAGGGATTTCTTTATTAACTTTGCGACAATTTGGCGTATGAAGGCACGTGATGAGTATATGCAAATGTTAGCTAGTGTAGATGTTCACGCCCCAGCACAATGGCGAACTAATATTACAGTAACGAATTTTGAAGAATTCCATAAAGAGTTTGATGTTAAAGATGGTGATAACATGTGGCGTCCAGTTGAAAAACGTGTTATTATTTGG

SEQ ID NO: 8072 - protein, 631 aa, Streptococcus agalactiae; identical to SEQ ID NO: 3390

SEQ ID NO: 8073 - protein, 981 aa, Streptococcus agalactiae
ATGATTGAAAAATATTATAATTGGGCAACGCTTGGAACCGGCGTTATTGCCAACGAATTAGCCCAAGCACTAGAAGCACGTGGACAAAAATTATATTCTGTAGCTAATAGAACTTACGACAAAGGACTTGAATTTGCTACCAAATATGGTATCCAAAAAGTTTATGATCACATAGATCAAGTATTTGAAGACCCTGAAGTGGATATCATTTATATCTCTACTCCCCACAATACTCACATCTCATTTTTACGAAAGGCTTTAGCAAATGGTAAGCACGTTCTTTGCGAAAAATCTATTACTTTAAACAGCACTGAACTTAAAGAAGCCATAGATTTAGCCGAAACTAACCATGTTGTCTTAGCTGAAGCCATGACTATTTTTCATATGCCAATTTATCGCCAATTAAAAACATTAGTTGATAGTGGAAAATTAGGACCGTTAAAAATGATTCAAATGAATTTCGGAAGTTATAAAGAATATGATATGACTAACCGTTTTTTCAGTCGTGACCTAGCAGGCGGTGCTTTGCTGGACATTGGTGTTTATGCACTTTCTTGTATTCGCTGGTTTATGTCAGAAGCACCTCACAACATTACCTCTCAAGTTACATTTGCACCAACAGGAGTTGATGAACAAGTTGGTATCCTACTAACCAATCCTGCAAATGAGATGGCGACTGTCAGCCTTAGTTTACATGCAAAACAACCTAAACGAGCAACTATCGCTTACGATAAAGGCTACATTGAACTTTTTGAATATCCGCGAGGACAAAAGGCAGTTATTACTTATACTGAGGATGGGCATCAAGATATTCTCGAAGCTGGCAAAACTGAAAATGCCCTCCAATATGAGGTAGCTGATATGGAAGAAGCCGTTTCAGGAAAAACTAACCACATGTACTTAAACTATACCAAAGACGTTATGGATATCATGACACAGCTACGTCAAGAATGGGGATTTACCTACCCAGAAGAAGAAAAA

SEQ ID NO: 8074 - protein, 327 aa, Streptococcus agalactiae; identical to SEQ ID NO: 3392

SEQ ID NO: 8075 - protein, 1074 aa, Streptococcus agalactiae
ATGATATCTTATTATAGAGATAAGGGCTTACCATCACCCCAAGTTGAATTATTGTTTTCAATTCCTTCGATGGCTATTATCTTCATCTTGCTTATCACACCTTGGTTAAGTAAAAAACTTTCTGAGAAACATATGATTATCTTTGGGCTATTGCTAACAGCATTAGGGGGAGGATTGCCGGTTGTCAGTCAGAACTACCTTTTAGTATTTGTATCGCGTCTTTTATTGGGGAGTGGTATTGGTTTTATTAATGCTAGGGCCATTAGTGTGATTAGTGAATATTATCAAGGCAAAGAAAGAAGAAAACTCTTAGGATTAAGGGGGTCCTTTGAAGTTTTAGGAAATGCTGGTTTGACAGCTTTAGTTGGGCTGTTGTTGACTTTTGGTTGGTCCAAATCATTTATGATTTATTTTTTAGCTTTACCAATCTTAGTTCTATATCTTGTTTTTGCGCCTAAGAAAGTGGTGAAAGATACAAATGACAAGATTAAAACTAAAGGTCAAAAAATCCCTAAAGCTGATTTAACTTATATTGTCGCCTTAGCTATTTTAGCAGGATTTGTCATAACTATAAATACTGGGATTAATCTTAGGATACCTCTGCTAGTAGTAGAATTTGGTTTGGGTACGCCAGCTCAAGCTAGTCTTGTTCTTAGTGCGATGATGCTTATGGGAATAATAGCAGGTATGAGTTTTGGTCAGTTGATAGCTATGTTTCATAAACAATTAATTCCAATCTGCCTCGTCTTATTTTCTTTAACATTGCTTGGAGTTGGATTGCCTTCTAATCTAATGGTACTAACAATTAGTGCGATGGCATCAGGTTTCCTTTACAGCCTGATGGTCACTGCTGTGTTTAGCCTAGTAGCAGACCGTGTTGAATATTCGTTGGTTGGTTCTGCAACGACATTAGTTTTAGTATTTTGTAATATTGGTGGAGCTAGTGCGGCTATTCTTCTGTCTTGTTTTGATCATTTACTAGGACAAATAAATGCAGTTTTCTATGTTTATGCTATTTTAAGTTTAGCAGTTGGTATGATTTATTTCTTTAAACGCCTATTTTTTAAGAAAATG

SEQ ID NO: 8076 - protein, 358 aa, Streptococcus agalactiae
MISYYRDKGLPSPQVELLFSIPSMAIIFILLITPWLSKKLSEKHMIIFGLLLTALGGGLPVVSQNYLLVFVSRLLLGSGIGFINARAISVISEYYQGKERRKLLGLRGSFEVLGNAGLTALVGLLLTFGWSKSFMIYFLALPILVLYLVFAPKKVVKDTNDKIKTKGQKIPKADLTYIVALAILAGFVITINTGINLRIPLLVVEFGLGTPAQASLVLSAMMLMGIIAGMSFGQLIAMFHKQLIPICLVLFSLTLLGVGLPSNLMVLTISAMASGFLYSLMVTAVFSLVADRVEYSLVGSATTLVLVFCNIGGASAAILLSCFDHLLGQINAVFYVYAILSLAVGMIYFFKRLFFKKM

SEQ ID NO: 8077 - protein, 177 aa, Streptococcus agalactiae
ATGTCATATATTTCTAGTTTAATATTGATTATACTTTATTTATCTAAAAAAAGACATCAGAAAGAGGTATTGTCACTTGAAAATCTTTATGGAGAAGCTAAGTTTACTCTCTTTATCACTTATCTTGCTATCAACTTTTTCGACATCACCAGCCCTACCACAAATGATATCTTATTA

SEQ ID NO: 8078 - protein, 59 aa, Streptococcus agalactiae
MSYISSLILIILYLSKKRHQKEVLSLENLYGEAKFTLFITYLAINFFDITSPTTNDILL

SEQ ID NO: 8079 - protein, 642 aa, Streptococcus agalactiae
ATGGATATAGAAAACTACTGCCAAGACTACTGTTTGGAGACTATCTTTCCAAAACATTATTTCAAGGATTTACAAGTAATCACCCTAACTGCCGGCCAATCCGTCTGTAAACAGGGAGAACAATTAGAATACTTGCACTACATCGTCAAGGGACGTTTTAAAATTGTACGTCGACTCTTTAACGGCAAAGAACATATTTTAGATATTAAAACAAAACCAACACTGATTGGTGATATTGAACTTTTGACTAATAGACAAATTGTATCATCTGTTATTGCCTTAGAGGATCTTACAGTCATTCAATTATCACTTAAAGGACGGAAAGAGAAACTGTTAACAGACGCAACTTTCCTCCTAAAACTTAGTCAAGAGCTAGCTCAGGCTTTTCATGATCAAAACATCAAAGCGTCTACTAATCTAGGGTATACCGTCAAAGAGTTACTTGCAAGTCATATTTTAGCAATTGAAGAACAAGGTTACTTTCAACTTGAGTTAAGTAGTTTAGCTGATTCGTTTGGCGTCAGTTATCGTCATTTATTAAGAGTTATCCACGATATGGTCAAAGAAGGCCTTATCCAAAAAGAAAAACCAAAATACTTTATCAAAAATCGTTTCGCACTAGAATCATTAAATATTCAGCCA

SEQ ID NO: 8080 - protein, 214 aa, Streptococcus agalactiae; identical to SEQ ID NO: 3396

SEQ ID NO: 8081 - protein, 612 aa, Streptococcus agalactiae
ATGTCTGCTATTGATAAATTAGTAAAAGCTAGTCATTTAATTGACATGAATGACATTATCCGTGAAGGCAATCCAACCCTTCGCAAAGTGGCTGAAGAAGTCACATTCCCACTTTCTGAGAAAGAAGAAATTCTCGGAGAAAAAATGATGCAATTTTTAAAACACTCTCAAGATCCAATTATGGCTGAGAAGCTAGGCTTACGTGGTGGTGTTGGTTTAGCCGCACCACAATTAGACATCTCAAAACGCATCATTGCCGTCCTTGTTCCAAACGTTGAGGATGCTCAAGGAAATCCACCTAAAGAAGCTTATAGCCTCCAAGAAGTAATGTACAACCCTAAAGTTGTATCGCATTCTGTTCAAGATGCTGCTTTATCTGACGGGGAGGGATGCCTATCAGTAGATCGTGAAGTACCTGGCTATGTCGTCCGCCACGCGCGTGTAACTATTGAATATTTCGACAAAACTGGTGAAAAACATCGACTCAAATTAAAAGGTTACAACTCTATTGTTGTTCAACATGAAATTGACCACATTGATGGTATTATGTTTTACGACCGTATCAATGAGAAAAATCCTTTCGCTGTCAAAGAAGGCTTACTTATTTTAGAA

SEQ ID NO: 8082 - protein, 204 aa, Streptococcus agalactiae; identical to SEQ ID NO: 3398

SEQ ID NO: 8083 - protein, 999 aa, Streptococcus agalactiae
ATGTCTAAAAAAATGACCATTAATGACATCGCTCAATTATCAAAAACTTCCAAAACAACGGTTTCTTTTTTCTTGAATCAAAAATTTGAAAAAATGTCGGATGAGACGAGGCAACGTATTCAAGAGGTGATTGATGAAACAGGTTATAGACCAAGTACGATAGCAAGAAGTCTAAATTCTAAAAAAACAAAACTACTAGGTGTCTTAATTGGAGATATAACAAACACATTTTCAAATCAAATTGTAAAAGGAATTGAGCACATCACCAAACAAAAAGGCTATCAAATTATTGTGGGTAATAGTAATTACGATGCCAAAAGTGAAGAAGATTATATTGAAAATATGTTAAATTTAGGTGTTGATGGTTTCATTATTCAGCCTACATCAAATTTTCGAAAGTATTCTCGTATTTTAAAAGAAAAAAAGAAACCAATGGTATTTTTTGATAGTCAACTTTATGAACATAAGACGAGTTGGGTTAAGGCTAATAACTATGATGCTGTTTATGATATGACACAGGAGTGTCTAAATCGAGGGTATAAAAAGTTTATTATGATTACTGGTGATACGAGCTTGCTTAGTACACGTATTGAGAGAGCTTCGGGATTCATGGATGCTTTAAAGGACAATGGTTTCGGTTATGACACTTTGGTGATTGAAGATGATGATCATTCAAAAAGTGATATAGAAGACTTTCTAAAAGCGGTAGTTCCAGATAAGGAGGAGACATTAGTATTTGCACCAAATTGTTGGGCTTTACCAATGGTTTTTACTGCCATGAAGAATCTCAATTTTGATATGCCACGAGTTGGTTTAGTTGGGTTTGACAATATTGAATGGACAGACTTTTCATCTCCTAAAGTGTCAACAATTGTCCAGCCGGCTTATGAAGAAGGTGAACAAGTAGCACAGATTTTGATTAATCGTATTGAAGGAGATGACTCCGTCGATAACCAACAGATTGTAGATTGCCAGATGTTTTGGAAAGAGTCGACTTTT

SEQ ID NO: 8084 - protein, 333 aa, Streptococcus agalactiae
MSKKMTINDIAQLSKTSKTTVSFFLNQKFEKMSDETRQRIQEVIDETGYRPSTIARSLNSKKTKLLGVLIGDITNTFSNQIVKGIEHITKQKGYQIIVGNSNYDAKSEEDYIENMLNLGVDGFIIQPTSNFRKYSRILKEKKKPMVFFDSQLYEHKTSWVKANNYDAVYDMTQECLNRGYKKFIMITGDTSLLSTRIERASGFMDALKDNGFGYDTLVIEDDDHSKSDIEDFLKAVVPDKEETLVFAPNCWALPMVFTAMKNLNFDMPRVGLVGFDNIEWTDFSSPKVSTIVQPAYEEGEQVAQILINRIEGDDSVDNQQIVDCQMFWKESTF

SEQ ID NO: 8085 - protein, 1902 aa, Streptococcus agalactiae
ATGAAAGATCGCTTATATAATAAATTCAAGGATTTTGATAGGGAATTTTGTCAAAAGTATATTAAAACATACCAATCTAATGCCTATCAAGAAATGAAAGCCTCTGTTAATTTGATGATGAGGAACACTTTTGTATTTAATGATAATTGGGATATGGAACCTTGTTCTAAAGCATATTGTCTTGATCCTTTGGAGTGGGATAAGCCAGTAACAGATGATCCAGAATGGTTGTATATGCTAAATCGTCAAACTTATCTTTTTAAATTCCTGGTGGTCTACATTGTTGAAGGCGATAAGTCTTACCTTAGACAAATGAAATATTTTATGTACCATTGGATTGATTGTCAATTTACACTAAAGCCAGAAGGGGCGGTAAGTCGTACTATTGACACTGGGATACGTTGCATGTCATGGCTCAAAGTTTTGATTTTTTTAGATTATTTTGGATTAATAACAGAAACTAAAAAAATTAAACTATTAACTAGTTTACGGGAGCAGATAACTTATATGAGGGACTATTATCGTGAAAAAGATAGTCTAAGTAACTGGGGAATTTTACAAACAACAGCAATATTGGCGTGTTTATACTATTATGAAGATGAATTAAATCTACCTGAAATTCAGAGTTTTGCTGAAGAAGAATTATTACTTCAAATCAAGCTTCAAATTTTAGATGACGGGAGCCAGTATGAACAATCAATTATGTATCATGTAGAAGTCTTGAAGTCCTTAATGGAACTAGTTATCCTTGCGCCTAAATATTATCTACCATTAGAAGAAACTATTGAAAAAATGGTTACCTATCTAATTGCTATGACTGGTCCGGATTATTGTCAACTAGCTATAGGGGACAGTGATGTGACCGATACTCGTGATATTCTAACTTTGGCAACACTTGTGTTGAAATCTTCTAAAACAAAATCATTTTCTTTTGATAATGTTAATTTAGAAACTTTACTTTTGTTTGGGAAGCCATCAATTTATCTTTTTGAAGAAATACCGCGTGCGACAATAGGAGAGTCTGCTTATCTTTTTCCAGATTCTGGTCATGTGTGTTTACGTGATGATAGGCGTTATATATTTTTTAAGAACGGTCCATTTGGTAGCGCTCATACTCATAGTGATAATAATAGTGTTTGTCTCTATGATAAAAAGAAACCTATTTTCATTGATGCAGGAAGATATACTTACAAAGAAGAACAACTAAGGTATGATTTTAAACGTTCGACTAGTCATTCAACATGTACCCTTGATGGGCAACCCTTAGAAATGATCAAGGACTCTTGGACATACAATTCTTATCCAAAATGTGACTATTGTCAGTTGACTTCAAAGGATAGGTACCATTTAGTCGAAGGACAACTACATGTCCAAAGAGCTTCTGATATCTATTACCATAAGCGATGGTTGTTAACTTTACCGCAGGCCATTACCTTAGTTATTGATAAGGTGAGTTGTCCAGGAGAGCATGTCTTAACAAATCAATATATTTTAGATGATCAGGTCATTTATGAAAATGGGTTTGTTAATGACTTGAAATTAGTAAGTCCTACGACCTTTAATCTAGAAGATTGCCTTATTTCTAAGCGGTATAATCAATTGACAGAAAGTCATAAATTAGTTAAGAAAATAAAATTTGTTGATGAGGTGATGGATTATACCTTGATAGTTGATCGGAACTGTCAGGTGAAATGTGTTCCTTTAGTGCAAACGAACAGTCATAAGGAACTAAGTAATAGCATTGCATTTGATATTAGGTCTCAAGACTTTCATTATTTAATTGGAGTGCTTATGGATGATATTATCTTTGGGGATAAACTCTATTTGATGCAAGGGATAAAATGCAAAGGAAAAGTCATTGTATATGATAAAAATAATGGCAAAATGAGTCGTTTAAAAAAT

SEQ ID NO: 8086 - protein, 634 aa, Streptococcus agalactiae
MKDRLYNKFKDFDREFCQKYIKTYQSNAYQEMKASVNLMMRNTFVFNDNWDMEPCSKAYCLDPLEWDKPVTDDPEWLYMLNRQTYLFKFLVVYIVEGDKSYLRQMKYFMYHWIDCQFTLKPEGAVSRTIDTGIRCMSWLKVLIFLDYFGLITETKKIKLLTSLREQITYMRDYYREKDSLSNWGILQTTAILACLYYYEDELNLPEIQSFAEEELLLQIKLQILDDGSQYEQSIMYHVEVLKSLMELVILAPKYYLPLEETIEKMVTYLIAMTGPDYCQLAIGDSDVTDTRDILTLATLVLKSSKTKSFSFDNVNLETLLLFGKPSIYLFEEIPRATIGESAYLFPDSGHVCLRDDRRYIFFKNGPFGSAHTHSDNNSVCLYDKKKPIFIDAGRYTYKEEQLRYDFKRSTSHSTCTLDGQPLEMIKDSWTYNSYPKCDYCQLTSKDRYHLVEGQLHVQRASDIYYHKRWLLTLPQAITLVIDKVSCPGEHVLTNQYILDDQVIYENGFVNDLKLVSPTTFNLEDCLISKRYNQLTESHKLVKKIKFVDEVMDYTLIVDRNCQVKCVPLVQTNSHKELSNSIAFDIRSQDFHYLIGVLMDDIIFGDKLYLMQGIKCKGKVIVYDKNNGKMSRLKN

SEQ ID NO: 8087 - protein, 813 aa, Streptococcus agalactiae
ATGACTGGATCTAAAAAATTAGCAAAAAGTGATTACACTAAAACAGCTTTACGTGCCTTTTATTTACAAAATGGCTTTAATTACAGTAACTATCAAGGTCTTGGTTATGCTAATGTCATATATCCAGCTCTCAAAAAATATTATGGAGATGACAAAAAAGCTTTAGCGGGAGCTCTAGAAGAAAATGTGGAGTTTTACAATACAAACCCTCATTTCTTACCTTTTGTAACTAGCTTACATTTAGCAATGCTTGATAATGAGCGGCCAGAAGAAGAAATTCGCGGTATTAAGATGGCGCTTATGGGGCCTCTTGCAGGTATCGGTGATTCTTTATCACAATTTTGCTTAGCACCCTTGTTCTCAACGATTGCAGCCTCTTTAGCGACAGATGGTTTGGTGATGGGACCGATTCTGTTCTTTGTGGCTATGAATACTATTTTAACGGGAATTAAATTAGTTACTGGCATGTATGGTTATCGTCTTGGGACCAGTTTTATTGATAAATTGAGTGAACAAATGTCAGTTATCTCACGGGCAGCTAATATCGTTGGTGTAACGGTCATCTCAAGTTTAGCTGCAACACAAGTTAAGCTTACAATCCCTTACACTTTTGCTCCAGAAAAAGTAACTAGTACAACGCAAAAGATTGTTACTGTCCAAGGTATGCTTGATAAAATTGCACCAGCTCTACTTCCAGCACTCTACACTTTCCTTATGTTTTACCTTATTAAAAATAAAAAATGGACAACTTATAAGTTAGTTATCCTTACAGTTATTATTGGTATCCTTGGTAGCTGGTTAGGTATTTTAGCT

SEQ ID NO: 8088 - protein, 271 aa, Streptococcus agalactiae; identical to SEQ ID NO: 3404

SEQ ID NO: 8089 - protein, 864 aa, Streptococcus agalactiae
ATGGATATTAGTATTCTTCAGGCTGTCTTAATTGGACTGTGGACGGCTTTCTGTTTTAGTGGCATGTTGCTTGGCCTCTATACAAATCGTTGTATCGTTCTCTCTCTAGGCGTTGGTGTTATTTTAGGAGATATTCAAACAGCTTTGGCAGTTGGAGCAATATCTGAACTGGCTTACATGGGATTTGGTGTGGGAGCGGGAGGGACAGTTCCTCCAAACCCAATCGGTCCTGGGATTTTTGGAACTTTGATGGCTATTACAACAGCTGGAACTAAAGGAAAAATCACACCGGAAGCTGCTCTTGCATTATCAACCCCAATTGCAGTTGGTATTCAATTTCTTCAAACAGCAACTTATACTGCTTTTGCAGGGGCGCCTGAAACAGCTAAAAAAGCTTTGCAAGCAGGTAATTTCCGAGGATTTAAAATTGCAGCAAATGGTACAATTTGGGCATTCGCTGGATTGGGATTTGGTTTAGGAGTACTGGGTGCTCTTTCAACGCAAACTTTGACAGATTTATTTGCTCTCATTCCCCCTGTTTTGCTTAATGGTCTAACCTTAGCTGGGAAAATGCTTCCTGCAATTGGTTTTGCGATGATTCTCTCTGTAATGGCTAAAAAAGAACTCATTCCTTATATCCTACTTGGATATGTTCTAGCTGTTTATTTTGGTTTGCCAGTTCTAACTCCAACAGCAAATGGAGACGGAGTTTTAACATCAGTGGCTACTAACAGTGTGCTTGGGGTTCCAACTATCGGGGTAGCTATAATTGCAACAATATTTGCTTTGCTTGATATTTTCAGAAAACCAGCTGCACCTACTAAAGAAACTAAGACAGAAGGAGACAACCAAGATGACTGGATC

SEQ ID NO: 8090 - protein, 288 aa, Streptococcus agalactiae; identical to SEQ ID NO: 3406

SEQ ID NO: 8091 - protein, 492 aa, Streptococcus agalactiae
ATGGCAGCAGGACCAAATATTGTAATGACACGTGTTGATGAGCGTCTTATTCATGGACAAGGACAACTTTGGGTGAAATTTTTAAGTTGTAATACTGTTATTGTGGCAAATGATGATGTCTCCAAAGATCATCTTCAACAAACGTTAATGAAGACGGTGGTGCCAGAATCAATAGCATTGCGATTTTTTGATATTCAAAAAGTTATTGATATTATTCACAAGGCCAACCCAGCACAGACGATTTTTATAATTGTTAAAGATTTGAAAGATGTCTATAGACTTGTAGCAGGGGGCGTCCCAATTAAAGAGATTAATATTGGAAATATTCATAATGGAGAAGGTAAAGAGCAGGTAAGTCGCTCTATCTTCTTAGGGATGAAGGATAAAGAGATAATTAGAAAATTAAACCAAGAATATCACATTGCATTTAATACTAAAACAACTCCAACAGGTAACGATGGTGCTGTGGAAGTTAATATTTTAGATTATATT

SEQ ID NO: 8092 - protein, 164 aa, Streptococcus agalactiae; identical to SEQ ID NO: 3408

SEQ ID NO: 8093 - protein, 1193 aa, Streptococcus agalactiae
ATGATGAAAATAAAACCGGTCAAGGTTGAGTCAATTGAAAATCCAAAGCGTTTTTTAAACAGTAGATTATTAACTAAGATTGAAGTTGAGGAAGCGATTGAAAAAGCCTTGAAGCAACTTTATATTAATATTGATTACTTTGGTGAAGAGTATCCAACGCCTGCAACATTCAATAATATTTATAAAGTTATGGATAACACAGAATGGACAAATGGTTTTTGGACAGGGTGCTTGTGGTTAGCTTATGAGTATAATCAGGATAAAAAGTTAAAAAACATAGCCCACAAAAATGTATTGTCATTTCTAAATCGTATTAATAATCGTATAGCATTAGATCACCACGACTTAGGATTTCTTTACACACCATCTTGTACAGCAGAATATCGTATCAATGGTGATGTTAAAGCTTTAGAAGCCACTATAAAAGCTGCAGATAAATTGATGGAGCGCTATCAAGAAAAAGGTGGATTTATTCAGGCTTGGGGAGAACTCGGGTATAAGGAACACTATCGCTTAATTATCGATTGCTTACTTAATATCCAACTCTTATTTTTTGCTTATGAACAGACAGGTGATGAAAAGTATAGACAAGTTGCGGTGAATCACTTCTACGCTTCAGCTAACAATGTGGTGCGTGATGATTCTTCTGCTTTTCATACTTTTTATTTCGACCCAGAAACTGGAGAACCGTTAAAAGGTGTCACACGACAGGGTTATAGTGATGAGTCATCTTGGGCAGAGGGCAAGCATGGGGCATCTACGGTATTCCGCTTAGTTACCGGAAAATGAAAGATTATCAGCAGATTATCCTTTTTAAAGGTATGACAAACTATTTTCTAAATCGTTTACCTGAAGACAAGGTATCCTATTGGGACCTTATTTTTACGGATGGCTCGGGCCAGCCTAGAGATACATCCGCAACAGCAACGGCTGTGTGTGGAATTCATGAGATGCTTAAATATTTACCAGAAGTAGATCCTGATAAAGAGACATACAAATATGCTATGCATACAATGCTTCGTAGTCTGATTGAACAGTATAGTAATAATGAACTTATAGCAGGACGTCCTCTTCTATTGCACGGTGTGTATTCGTGGCATTCAGGTAAAGGAGTAGATGAAGGTAATATTTGGGGAGATTATTATTACTTAGAAGCCTTAATAAGATTCTATAAAGACTGGGAACTTTATTGG

SEQ ID NO: 8094 - protein, 398 aa, Streptococcus agalactiae; identical to SEQ ID NO: 3410

SEQ ID NO: 8095 - protein, 162 aa, Streptococcus agalactiae
TTGAACCTTTCAATGTTAATGGAAGCTGTTTTATCTAGAACGATGTTTGAACATGTAGATGATCTTGTTGATAAAGTTATAACATCATCTCATGAAGGAATTGTTGATTTTTCTACTTGCCTTGCTACACAAACTGCAGAAGCAACTTTTGAGGGAGGCATT

SEQ ID NO: 8096 - protein, 54 aa, Streptococcus agalactiae
MNLSMLMEAVLSRTMFEHVDDLVDKVITSSHEGIVDFSTCLATQTAEATFEGGI

SEQ ID NO: 8097 - protein, 570 aa, Streptococcus agalactiae
ATGGTGGACAAAATTTCTCAAGATGTTGGGGTAATTGATATTCTAGTTAACAACGCAGGTATTATAAAACGCACCCCTATGCTAGAGATGAGCGCTGCAGATTTTCGACAAGTTATTGATATTGATTTGAATGCTCCCTTTATCGTATCAAAAGCGGTATTACCTGGAATGATCCAAAAAGGACATGGTAAAATCATCAATATTTGCTCCATGATGAGTGAGCTTGGACGCGAAACAGTTGCTGCCTATGCTGCTGCCAAAGGGGGACTTAAAATGTTAACCAAGAACATCGCTTCTGAATACGGTTCTGCTAACATCCAATGTAACGGTATCGGGCCCGGCTATATTGCCACACCACAAACAGCTCCCCTTCGTGAACGTCAAGATGATGGTTCACGTCATCCATTCGACCAATTTATCATCGCTAAAACACCTGCCGCTCGCTGGGGTGAGGCAGAAGATTTAGGTGCACCAGCTATCTTCCTTGCTAGTGATGCATCAAACTTTATCAATGGTCACATACTCTATGTAGATGGCGGTATTTTAGCTTACATCGGTAAACAACCTCAA

SEQ ID NO: 8098 - protein, 190 aa, Streptococcus agalactiae
MVDKISQDVGVIDILVNNAGIIKRTPMLEMSAADFRQVIDIDLNAPFIVSKAVLPGMIQKGHGKIINICSMMSELGRETVAAYAAAKGGLKMLTKNIASEYGSANIQCNGIGPGYIATPQTAPLRERQDDGSRHPFDQFIIAKTPAARWGEAEDLGAPAIFLASDASNFINGHILYVDGGILAYIGKQPQ

SEQ ID NO: 8099 - protein, 636 aa, Streptococcus agalactiae
ATGAAAATTGCATTAATCAACGAAAATAGCCAAGCAAGTAAAAATACTATTATCTACAAAGAATTGAAAGCGGTTTCTGATGAAAAAGGATTTGAAGTTTTCAACTACGGAATGTATGGCAAAGAAGAAGAAAGCCAGCTAACTTATGTACAAAATGGTTTACTGACTGCTATTTTACTTAATAGCGGTGCTGCAGATTTTGTTATTACAGGCTGTGGGACAGGAATTGGAGCGATGCTTGCTTGTAATAGTTTTCCTGGCGTAGTCTGTGGATTCGCTGCTGATCCTGTCGACGCTTACTTATTCTCTCAAGTAAACGGAGGAAATGCTCTTTCCCTTCCTTTTGCTAAAGGATTTGGTTGGGGAGCTGAATTGAATCTGAGGTATTTATTTGAACGTCTTTTCGAAGATGAAAAAGGAGGGGGATACCCTAAAGAGAGGGCTGTACCTGAGCAACGCAATGCACGTATCCTTAGCGAAATAAAACAGATTACTTACAGAGATTTACTCTCTGTTTTAAAAGAAATTGATCAAGATTTCTTAAAGGAAACTATTTCTGGGGAGCATTTCCAAGAATATTTCTTCGCTAATTGCCAAAATCAAAATATAGCAGACTACTTGAAATCTGTCTTAGAC

SEQ ID NO: 8100 - protein, 212 aa, Streptococcus agalactiae; identical to SEQ ID NO: 3416

SEQ ID NO: 8101 - protein, 1005 aa, Streptococcus agalactiae
ATGTCTAAGATTCTTTTTTTCGGTGAACCTCTCATTCGCATCACTCCAAAAGAAAATGACTATTTTGCAGATAGTATCTCAACTAAACTATTCTATGGTGGCTCTGAAGTTAATACCGCAAGAGCTCTACAAGGCTTTGGGCAAGATACTAAACTCCTCTCAGCCTTACCCAATAATCCCATAGGTAATAGTTTTCTTCAATTTTTAAAAGCACAGGGTATTGATACTCATTCTATTCAGTGGGTTGGAGAACGTGTTGGGTTATATTTTTTAGAAGATTCCTTTGCTTGCAGAAAAGGTGAGGTGGTCTACGACCGCGATCATAGTAGTTTACATGACTTTAGGATAAATCAAATTGATTTCGATCAATTATTTGAAGGAGTTTCTCTCTTTCATTTTAGTGGTATTACACTATCATTGGATGAGTCTATCCAAGAGATAACACTGCTTCTTTTAAAAGAAGCTAAAAAAAGAGAGATAACAATCTCCTTAGATCTCAATTTTCGCAGTAAACTAATTTCTCCTAAAAATGCCAAAATCCTTTTTTCTCAGTTCGCTACCTTTGCGGATATTTGTTTTGGTATTGAACCTCTTATGGTTGACTCACAGGACACTACCTTCTTCAATCGCGATGAAGCTACAATAGAGGACGTCAAAGAACGAATGATTTCGCTTATAAATCACTTTGACTTTCAAGTCATTTTCCATACTAAACGTCTACAGGATGAATGGGGACGAAACCACTACCAAGCTTACATAGCAAATCGTAAACAAGAGTTTGTCACTTCAAAAGAAATCACCACAGCTGTAAACCAGAGAATTGGAAGCGGAGATGCTTTTGTGGCGGGAGCGCTATATCAACTACTTCAGCACTCAGACAGCAAGACAGTCATTGATTTCGCTGTCGCTAGTGCATCTTTAAAATGTGCTTTGGAAGGGGACAATATGTTTGAGACCGTTACCGCAGTTAACAAAGTACTAAATCAATCGAAAGACATTATTCGT

SEQ ID NO: 8102 - protein, 335 aa, Streptococcus agalactiae; identical to SEQ ID NO: 3418

SEQ ID NO: 8103 - protein, 635 aa, Streptococcus agalactiae
ATGATAAAATCAAAGATTTTGTTGCAATTAATGCAAGGAAAAATAGTTGCTGTCATTCGTGGAAATAGCCAAGAAGAAGCTTTTCAAGCTGCTCAAGCATGCATAAAAGGTGGTATTTCTGCTATCGAAATCGCCTATACTAATAGCAAAGCTAGCCAAGTCATTGAACAACTAGTCACACAATATACTAACCAAGAACAAGTTGTCGTTGGGGCAGGAACTGTTCTAGACTCAGAAACTGCCCGAATGGCTATTTTAGCAGGAGCAAAGTTTATTGTATCTCCCGCATTTAATCTACAGACTGCTAAACTATGTAATCGTTATGCTATTCCTTATTTACCAGGTTGCATGACCTTATCAGAGGTAACAACAGCACTTGAAGCCGGTTGCGAAATAATTAAAATATTCCCAGGAGGTACTCTAGGAACATCTTTCATCTCATCACTAAAGGCACCTTTACCTCAAGTACAAATTATGGTGACTGGTGGGGTAAATCTCACAAATGCCAAAGACTGGTTTCTATCTGGAGTAACAGCCATTGGTATTGGTGGAGAGTTCAATAAACTAGCAGCTTTGGGGGAATTTGATAAAATCACAGAAATGGCTAACAATACAAAATACAGCTAAATCTGAAT

SEQ ID NO: 8104 - protein, 212 aa, Streptococcus agalactiae; identical to SEQ ID NO: 3420

SEQ ID NO: 8105 - protein, 1497 aa, Streptococcus agalactiae
TTGATGAATAAAAAACATAAATTACTTAAAAATATAGAGGAATTTAAGACGATAACCCAAAAAAGGCTAACTGAGAGAGGAAAGTTCCCATATGATACCGTTCATTCTACGTTTGAAATTAAGGATGAAAACTTTATCATGGAAAGATTGAAATCATCAGGGTTATCTATGGGTAAACCAGTTGATTATATGGGCGTAAATGGTATCCCTATTTACACTAAAACATTATCTATAGATAATAAGTTTGCCTTTGAAAATAATTCAAAAGATTCTTCATATTCTTCAAACATTAATATTAGTGAAGATAAAATAAAAGAAAATGACCAAAAAATTCTAGATTTAATAGTTAAATCTGGAGCTAATAATCAAAACTTAACAGATGAAGAAAAAGTAATTGCTTTCACTAAATATATAGGTGAAATAACTAATTATGACAATGAAGCTTACAGAGCTAGAAATGTCGACACAGAATATTACAGAGCTTCAGATTTATTTTCTGTAACAGAAAGAAAACTTGCTATGTGCGTTGGCTATAGTGTAACAGCCGCTAGGGCATTTAATATTATGGGGATACCTAGTTATGTCGTTTCTGGTAAAAGTCCTCAAGGAATATCTCATGCAGCTGTGAGAGCGTATTATAATAGAAGTTGGCATATCATAGATATCACAGCCAGTACATATTGGAAAAATGGTAATTACAAAACAACGTATTCCGATTTTATTAAAGAATACTGTATAGATGGTTATGACGTTTATGATCCCGCAAAAACAAATAATAGATTTAAAGTTAAGTATATGGAATCAAATGAAGCGTTTGAAAATTGGATACATAATAATGGAAGCAAATCTATGTTATTTATTAATGAATCTGCAGCTCTAAAAGATAAAAAACCAAAAGATGATTTTGTACCAGTAACAGAAAAAGAAAAAAACGAGCTGATAGATAAGTATAAAAAATTATTGTCACAGATTCCTGAAAACACACAAAATCCAGGAGAAAAAAACATAAGAGATTATTTGAAAAATGAATATGAAGAAATATTAAAGAAAGATAATTTATTTGAGCATGAACATGCAGAATTTAAAGAAAGTCTAAATTTAAATGAATCATTCTACCTACAATTAAAGAAAGAAGAAATGAAACCGAGTGATAATCTCAAAAAAGAAGAAAAACCAAGAGAAAATTCAGTAAAAGAGAGGGAGACTCCAGCTGAAAACAATGATTTTGTTTCAGTAACAGAAAAAAACAACTTGATTGATAAATATAAAGAATTATTATCAAAAATCCCAGAGAATACACAAAATCCTGGGGAAAAGAATATACGAAATTATCTAGAGAAAGAATATGAAGAACTACTACAAAAAGATAAATTATTCAAGCATGAGTACACAGAGTTTACAAAAAGTCTAAATTTGAATGAAACATTCTATTCACAATTAAAAGAAGGAGAAATGAAACTAAGTGAAAATCCCGAAAAAGGAGAAACGAACACGAAT

SEQ ID NO: 8106 - protein, 499 aa, Streptococcus agalactiae
MMNKKHKLLKNIEEFKTITQKRLTERGKFPYDTVHSTFEIKDENFIMERLKSSGLSMGKPVDYMGVNGIPIYTKTLSIDNKFAFENNSKDSSYSSNINISEDKIKENDQKILDLIVKSGANNQNLTDEEKVIAFTKYIGEITNYDNEAYRARNVDTEYYRASDLFSVTERKLAMCVGYSVTAARAFNIMGIPSYVVSGKSPQGISHAAVRAYYNRSWHIIDITASTYWKNGNYKTTYSDFIKEYCIDGYDVYDPAKTNNRFKVKYMESNEAFENWIHNNGSKSMLFINESAALKDKKPKDDFVPVTEKEKNELIDKYKKLLSQIPENTQNPGEKNIRDYLKNEYEEILKKDNLFEHEHAEFKESLNLNESFYLQLKKEEMKPSDNLKKEEKPRENSVKERETPAENNDFVSVTEKNNLIDKYKELLSKIPENTQNPGEKNIRNYLEKEYEELLQKDKLFKHEYTEFTKSLNLNETFYSQLKEGEMKLSENPEKGETNTN

SEQ ID NO: 8107 - protein, 612 aa, Streptococcus agalactiae
ATGTCATTTTTGGAAGAATTAAAAAACCGTCGCTCTATTTACGCTCTTGGTCGCAATACAGAAGTTTCTGATGAGAAAATAGTAGAGATTATTAAAGAGGCAGTTCGCCAATCCCCATCTGCTTTTAATAGTCAAACTTCCCGTGTTGTCATTTTATTGAATGATGAAGTTACTAAGTTCTGGGATGAATTGGTTGCTAATGATTTGGTAGAAACAATGAAAGTACAAGGTGCTCCAGAGACAGCTATTGCTGGAACTAAGGAAAAATTAGCTAGTTTTGGAGCTTCAAAGGGAACAGTACTCTTCTTTGAAGATCAAGATGTTGTCAAATCTCTTCAAGAACAATTCGTTCTTTATGCGGATAACTTTCCAGTTTGGTCTGAGCAATCAACAGGTATTGCCTCAGTAAATACTTGGACAGCCCTTTCTGCAGAACTTGGACTTGGTGGTAATTTACAACATTACAATCCAGTTATTGATGCATCAGTACAAGCTGTTTATGGTGTTCCAGCTAGTTGGAAACTTCGTGGACAACTAAATTTTGGTTCAATCGAAGCTGAAACAGGAGAAAAAGAATTCATGAATGATGATGACCGCTTTAAAGTCATCGGA

SEQ ID NO: 8108 - protein, 204 aa, Streptococcus agalactiae; identical to SEQ ID NO: 3426

SEQ ID NO: 8109 - protein, 423 aa, Streptococcus agalactiae
ATGGGAAACTTTAAAAATTCAGCGGTTAAATCTATGGTTGTCATGCGAAAAGCATTTAGAACAATAGACGGAAAAGTCTCAGAATCATTTAAAGAATTTGAATTAACACCAACTCAGTTTGCAGTTTTGGATGTTCTCTATGCTAAAGGCACAATGAAAATTGGAGAATTGATTGAAAATATGCTTGCTACATCAGGTAATATGACTGTTGTTATTAAAAATATGGAAAAAAAGGGATGGGTATTACGCCATTCTTGTCCGAATGATAAGAGAGCCTTTTTGGTGAGTTTAACAACTGAAGGAGAAGAAGTGATAAAAAAAGCTCTACCAGAGCATATTAAACGTGTAGAAGATGCTTTTTCAGTCTTAACAGAAACAGAGCAAGAAGACTTGATTAACCTTTTAAAAAAATTTAAAACCTTG

SEQ ID NO: 8110 - protein, 141 aa, Streptococcus agalactiae; identical to SEQ ID NO: 3428

SEQ ID NO: 8111 - protein, 1737 aa, Streptococcus agalactiae
ATGTTGGTGCAACGTTCTAATGAACGTGGTTATCTAGTAGGATCACGTGGGTCTGTTGGGTCGAGTTTTGTAGCGACCATGATAGGAATTACTGAAGTTAATCCAATGCCACCTCATTATGTTTGCCCAAATTGTCAGCATTCTGAATTTATCACAGATGGTTCTTGTGGTTCAGGCTATGATTTACCAAATAAAAATTGTCCTAAATGTGGTACTTTGTACAAGAAAGATGGACAGGATATTCCGTTTGAAACTTTCTTAGGATTTGATGGAGATAAGGTTCCTGATATTGATCTGAATTTCTCTGGAGATGATCAACCTTCTGCTCACTTAGACGTTCGTGATATCTTTGGAGAAGAATATGCTTTTCGTGCAGGAACGGTAGGTACCGTAGCTGAAAAAACTGCCTTTGGTTTTGTCAAAGGTTACGAACGAGATTACAATAAATTTTATAACGATGCAGAGGTCGAACGGTTAGCGACTGGTGCTGCGGGAGTTAAACGTTCTACAGGTCAACACCCCGGTGGTATTGTTGTTATTCCTAACTATATGGATGTTTATGATTTTACTCCGGTTCAATATCCAGCAGATGATATGACAGCTGCTTGGCAGACAACTCACTTCAATTTCCATGATATTGATGAGAATGTCTTGAAGTTAGATATTCTAGGACATGATGATCCTACTATGATTCGTAAACTTCAGGATTTATCAGGAATTGATCCATCAAATATCCTTCCAGATGATCCAGACGTTATGAAGTTATTTTCTGGTACGGAAGTTTTAGGAGTGACAGAAGAGCAAATTGGAACTCCTACAGGAATGCTTGGTATTCCAGAGTTTGGTACGAACTTTGTTCGTGGTATGGTGAACGAAACCCATCCAACCACATTTGCAGAATTGTTGCAACTGTCAGGGCTATCACATGGTACGGATGTTTGGTTAGGTAATGCTCAAGACTTAATCAAGGAAGGTATTGCTACCTTATCAACTGTTATTGGTTGTCGTGATGACATCATGGTTTATTTAATGCACGCTGGCCTACAACCAAAGATGGCCTTTACAATCATGGAGCGCGTGCGTAAGGGGTTATGGTTGAAAATTTCAGAAGATGAGCGTAATGGTTATATCCAAGCAATGCGTGATAATAATGTCCCGGATTGGTATATTGAATCGTGTGGAAAAATCAAGTATATGTTCCCTAAAGCCCATGCAGCAGCCTATGTTTTAATGGCATTACGTGTGGCGTACTTTAAAGTACATTATCCAATATTTTATTATTGTGCTTATTTTTCTATTCGCGCCAAAGCTTTTGAATTACGCACAATGAGTGCTGGACTTGATGCCGTTAAGGCGCGCATGAAGGATATCACTGAGAAGCGTCAGCGTAATGAGGCGACGAATGTCGAAAATGATCTTTTTACGACATTAGAGTTGGTTAATGAAATGCTTGAGCGTGGCTTTAAATTTGGGAAATTAGATCTTTATCGTAGCCATGCGACTGACTTTATTATTGAAGAGGATACGCTAATCCCTCCATTTGTTGCTATGGAAGGCTTGGGAGAAAACGTTGCAAAACAGATAGTTCGGGCACGTGAAGATGGTGAATTTTTATCAAAAACAGAGCTTCGTAAACGAGGAGGAGTCTCAAGTACCTTAGTTGAAAAATTTGATGAGATGGGTATTTTGGGAAATTTACCAGAAGACAATCAGTTGAGTCTTTTTGATGATTTCTTC

SEQ ID NO: 8112 - protein, 579 aa, Streptococcus agalactiae
MLVQRSNERGYLVGSRGSVGSSFVATMIGITEVNPMPPHYVCPNCQHSEFITDGSCGSGYDLPNKNCPKCGTLYKKDGQDIPFETFLGFDGDKVPDIDLNFSGDDQPSAHLDVRDIFGEEYAFRAGTVGTVAEKTAFGFVKGYERDYNKFYNDAEVERLATGAAGVKRSTGQHPGGIVVIPNYMDVYDFTPVQYPADDMTAAWQTTHFNFHDIDENVLKLDILGHDDPTMIRKLQDLSGIDPSNILPDDPDVMKLFSGTEVLGVTEEQIGTPTGMLGIPEFGTNFVRGMVNETHPTTFAELLQLSGLSHGTDVWLGNAQDLIKEGIATLSTVIGCRDDIMVYLMHAGLQPKMAFTIMERVRKGLWLKISEDERNGYIQAMRDNNVPDWYIESCGKIKYMFPKAHAAAYVLMALRVAYFKVHYPIFYYCAYFSIRAKAFELRTMSAGLDAVKARMKDITEKRQRNEATNVENDLFTTLELVNEMLERGFKFGKLDLYRSHATDFIIEEDTLIPPFVAMEGLGENVAKQIVRAREDGEFLSKTELRKRGGVSSTLVEKFDEMGILGNLPEDNQLSLFDDFF

SEQ ID NO: 8113 - protein, 3106 aa, Streptococcus agalactiae
ATGTCAGAATTGTTCAAGAAACTTATGGATCAGATTGAAATGCCGCTTGAAATTAAGAATTCAAGTGTTTTTTCGTCTGCTGATATTATCGAGGTAAAGGTTCATTCTCTATCACGCTTATGGGAATTTCATTTTTCATTTCCAGAATTATTGCCAATTGAGGTGTATCGTGAATTACAAACTCGTTTAGTGAATAGTTTTGAAAAAGCAGATATAAAGGCTACTTTTGATATAAGAGCAGAAACTATTGATTTTTCTGATGATCTGCTACAGGATTATTATCAACAAGCTTTTTGTGAACCCTTGTGTAATAGTGCAAGTTTTAAGAGTTCTTTTTCACAATTAAAAGTTCATTACAATGGCAGTCAGATGATTATTTCAGCACCTCAATTTGTCAATAATAATCATTTTCGTCAGAATCATTTGCCGCGTTTGGAACAACAGTTTTCATTGTTTGGATTTGGTAAACTTGCTATTGATATGGTTTCTGATGAACAAATGACGCAAGACTTAAAATCATCATTTGAAACTAATCGCGAGCAATTGCTTGAAAAAGCTAACCAAGAAGCTATGCAAGCCTTGGAAGCACAAAAATCACTAGAAGATTCAGCGCCTCCATCAGAAGAAGTGACCCCAACTCAAAATTATGATTTCAAAGAGCGTATCAAACAACGTCAAGCTGGCTTTGAAAAAGCAGAGATTACACCCATGATTGAGGTGACAACAGAAGAAAATCGTATCGTTTTTGAAGGAATGGTTTTTAGTGTTGAACGAAAAACAACCCGCACTGGACGTCATATCATTAATTTTAAGATGACTGATTATACCTCAAGTTTTGCTATGCAAAAGTGGGCTAAAGATGATGAAGAATTGAAGAAGTACGATATGATTTCTAAAGGTTCGTGGTTGCGAGTCAGAGGGAATATTGAGAACAATAACTTTACTAAATCTTTGACAATGAATGTTCAAGATATCAAAGAGATTGTGCATCATGAACGTAAAGACTTAATGCCAGCAGATCAAAAACGTGTGGAATTTCATGCTCATACCAATATGTCAACGATGGATGCTTTACCAACTGTCGAGAGCCTCATTGATACTGCAGCTAAGTGGGGACACCCAGCTATTGCAATTACTGACCATGCCAATGTTCAAAGTTTTCCGCATGGCTACCACAGAGCAAAAAAAGCAGGTATAAAAGCAATTTTTGGATTAGAGGCAAATATTGTTGAAGATAAAGTGCCTATTTCCTACAACGAAGTTGATATGAATTTGCACGAAGCAACTTATGTTGTATTTGATGTGGAAACTACAGGTCTTTCTGCAGCTAATAATGACCTAATTCAGATTGCAGCATCAAAAATGTTCAAGGGTAATATTATTGAGCAATTTGATGAGTTTATTGACCCAGGTCATCCTCTTTCTGCCTTTACAACTGAATTGACAGGTATTACGGATAATCATGTCAGAGGTTCAAAACCTATTTTACAAGTCCTTCAGGAATTTCAGAATTTTTGTCAAGGTACGGTTTTAGTTGCGCATAATGCAACCTTTGACGTTGGTTTTATGAATGCGAATTATGAACGTCATAATCTGCCTTTGATCACACAGCCGGTCATTGATACCTTAGAATTTGCAAGAAATCTTTATCCTGAATATAAGCGTCATGGTTTGGGGCCTCTAACCAAACGTTTCCAAGTTGCTTTGGAACATCATCATATGGCCAACTACGATGCTGAAGCAACGGGTCGCTTACTCTTTATTTTCTTAAAAGAGGCGCGGGAAAATCGTGATGTGACTAATTTGATGGAGCTCAATACTAAATTGGTAGCTGAAGACTCTTACAAAAAGGCACGCATAAAGCATGCAACCATTTATGTCCAAAATCAGGTTGGACTTAAAAATATATTTAAGTTAGTTAGCCTTTCAAATGTTAAATATTTTGAAGGGGTGGCAAGAATTCCTAGGTCAGTTTTAGATGCTCACAGAGAAGGTCTCTTGCTAGGTACTGCCTGTTCTGATGGAGAAGTTTTTGATGCCTTGTTATCAAATGGAATTGATGCAGCAGTGACCCTAGCTAAATATTATGATTTTATTGAAGTCATGCCACCTGCTATTTATCGCCCCTTGGTAGTACGTGATTTAATTAAAGATGAGGTGGGGATTCAACAAATTATTAGAGACCTAATAGAGGTCGGTCGGCGTTTAGATAAGCCTGTTTTAGCTACGGGAAATGTTCATTATATTGAGCCTGAAGATGAGATTTACCGTGAGATTATTGTTCGTAGTCTTGGACAAGGTGCCATGATTAATAGGACTATAGGTCGTGGGGAGGATGCTCAGCCAGCGCCTTTGCCAAAAGCACATTTCCGCACAACAAATGAGATGTTAGATGAATTTGCCTTTCTTGGTAAAGATTTAGCCTATGAGATCGTTGTAACCAATACGAATACTTTTGCAGATCGATTTGAAGACGTTGAAGTTGTAAAAGGGGATCTCTATACTCCGTTTGTTGATCGTGCTGAAGAACGAGTTGCTGAATTAACTTATGCTAAAGCATTCGAAATATATGGTAATCCTCTTCCTGATATTATTGATTTACGTATCGAAAAAGAGTTAGCATCTATACTTGGTAATGGATTTGCCGTTATCTATCTTGCTTCGCAAATGTTGGTGCAACGTTCTAATGAACGTGGTTATCTAGTAGGATCACGTGGGTCTGTTGGGTCGAGTTTTGTAGCGACCATGATAGGAATTACTGAAGTTAATCCAATGCCACCTCATTATGTTTGCCCAAATTGTCAGCATTCTGAATTTATCACAGATGGTTCTTGTGGTTCAGGCTATGATTTACCAAATAAAAATTGTCCTAAATGTGGTACTTTGTACAAGAAAGATGGACAGGATATTCCGTTTGAAACTTTCTTAGGATTTGATGGAGATAAGGTTCCTGATATTGATCTGAATTTCTCTGGAGATGATCAACCTTCTGCTCACTTAGACGTTCGTGATATCTTTGGAGAAGAATATGCTTTTCGTGCAGGAACGGTAGGTACCGTAGCTGAAAAACTGCCTTTGGTTTTGTCAGGTTACGAACGAGATACAA

SEQ ID NO: 8114 - protein, 1036 aa, Streptococcus agalactiae
  VARIANT 1035: Xaa = Any Amino Acid
MSELFKKLMDQIEMPLEIKNSSVFSSADIIEVKVHSLSRLWEFHFSFPELLPIEVYRELQTRLVNSFEKADIKATFDIRAETIDFSDDLLQDYYQQAFCEPLCNSASFKSSFSQLKVHYNGSQMIISAPQFVNNNHFRQNHLPRLEQQFSLFGFGKLAIDMVSDEQMTQDLKSSFETNREQLLEKANQEAMQALEAQKSLEDSAPPSEEVTPTQNYDFKERIKQRQAGFEKAEITPMIEVTTEENRIVFEGMVFSVERKTTRTGRHIINFKMTDYTSSFAMQKWAKDDEELKKYDMISKGSWLRVRGNIENNNFTKSLTMNVQDIKEIVHHERKDLMPADQKRVEFHAHTNMSTMDALPTVESLIDTAAKWGHPAIAITDHANVQSFPHGYHRAKKAGIKAIFGLEANIVEDKVPISYNEVDMNLHEATYVVFDVETTGLSAANNDLIQIAASKMFKGNIIEQFDEFIDPGHPLSAFTTELTGITDNHVRGSKPILQVLQEFQNFCQGTVLVAHNATFDVGFMNANYERHNLPLITQPVIDTLEFARNLYPEYKRHGLGPLTKRFQVALEHHHMANYDAEATGRLLFIFLKEARENRDVTNLMELNTKLVAEDSYKKARIKHATIYVQNQVGLKNIFKLVSLSNVKYFEGVARIPRSVLDAHREGLLLGTACSDGEVFDALLSNGIDAAVTLAKYYDFIEVMPPAIYRPLVVRDLIKDEVGIQQIIRDLIEVGRRLDKPVLATGNVHYIEPEDEIYREIIVRSLGQGAMINRTIGRGEDAQPAPLPKAHFRTTNEMLDEFAFLGKDLAYEIVVTNTNTFADRFEDVEVVKGDLYTPFVDRAEERVAELTYAKAFEIYGNPLPDIIDLRIEKELASILGNGFAVIYLASQMLVQRSNERGYLVGSRGSVGSSFVATMIGITEVNPMPPHYVCPNCQHSEFITDGSCGSGYDLPNKNCPKCGTLYKKDGQDIPFETFLGFDGDKVPDIDLNFSGDDQPSAHLDVRDIFGEEYAFRAGTVGTVAEKLPLVLSRLRTRXQ

SEQ ID NO: 8115 - protein, 582 aa, Streptococcus agalactiae
ATGAAAAGTCGAAAAAAAGATAAATTGGTATTGAGGTTAACAACAACACTATTGGTTTTTGGTTTGGGTGGGGTTTGGTTTTATAATTATAAAAATGATAATGTCGAACCGACAGTCACTAGTGCATCGGATCAAACGACGACTTTTATTCAAACGATTTCTCCAACAGCTATTGAAATTTCTAAGACCTATGATTTGTATGCGTCAGTCTTATTAGCACAAGCTATTTTGGAATCATCCAGTGGACAATCAGATTTGTCTAAGGCTCCTAATTATAACCTCTTTGGCATCAAAGGAGAATATAAAGGTAAATCTGTCCAAATGCCTACTTTAGAAGATGATGGGAAAGGCAATATGACTCAAATCCAAGCTCCTTTTCGCGCCTATCCAAATTATTCTGCTTCACTATATGATTATGCTGAGTTAGTATCTAGTCAAAAGTATGCATCTGTTTGGAAATCAAATACCTCTTCTTATAAGGATGCTACTGCAGCTCTAACAGGTCTTTATGCGACAGATACTGCTTATGCTAGTAAATTAAACCAAATTATTGAAACCTACAGTCTAGATGCTTATGATAAA

SEQ ID NO: 8116 - protein, 194 aa, Streptococcus agalactiae; identical to SEQ ID NO: 3432

SEQ ID NO: 8117 - protein, 1851 aa, Streptococcus agalactiae
ATGAAACAAAGTAAAATGCTTATTCCAACACTTCGCGAAATGCCAAGTGATGCTCAGGTTATCAGCCATGCTCTTATGGTTCGTGCAGGATATGTCCGCCAAGTTTCGGCTGGAATCTATGCTTATTTGCCTCTAGCTAACCGTACTATTGAAAAATTTAAAACAATTATGCGTCAAGAATTTGAGAAGATTGGTGCAGTTGAAATGTTAGCTCCAGCTCTTCTTACAGCAGATTTATGGCGTGAATCTGGGCGCTACGAAACATATGGTGAAGACCTTTATAAATTAAAGAATCGTGATCAATCGGATTTTATCTTAGGACCAACTCATGAAGAGACTTTCACAACTCTTGTTCGTGATGCAGTAAAATCTTATAAGCAATTACCACTAAACCTTTATCAAATTCAGTCTAAATATCGTGATGAGAAGCGTCCTCGTAATGGACTTCTTCGAACACGTGAATTTATCATGAAAGATGGATACAGCTTCCACAAAGATTATGAAGACCTTGATGTCACTTACGAAGATTACCGTAAAGCATATGAAGCCATCTTCACACGTGCTGGACTTGACTTTAAAGGCATTATAGGTGACGGAGGTGCTATGGGAGGTAAAGATAGCCAAGAATTTATGGCAGTAACTCCCAATCGTACAGATTTAAATCGTTGGTTAGTCCTTGATAAAACTATTCCTTCTATTGATGATATTCCAGAGGATGTTTTAGAAGAAATTAAGGTAGAACTCTCGGCTTGGCTAGTTTCTGGTGAGGACACTATTGCATACTCTACTGAATCAAGCTATGCTGCTAACCTTGAGATGGCAACGAATGAGTACAAACCATCTACTAAGGCTGCTACCTTTGAAGAAGTAACAAAAGTAGAAACTCCTAACTGCAAATCAATTGATGAGGTAGCTGGATTTTTATCAATTGATGAAAATCAAACTATCAAGACACTATTGTTTATTGCTGATGAACAGCCCGTGGTTGCTTTACTAGTTGGTAACGATCAAGTCAATGATGTGAAGTTAAAAAATTATTTAGCGGCTGATTTCTTAGAGCCTGCAAGTGAAGAGCAAGCAAAAGAGATTTTTGGTGCAGGTTTTGGTTCTCTTGGGCCAGTTAACCTACCTGACTCTGTTAAAATTATTGCTGATCGTAAAGTTCAAGACCTTGCTAATGCTGTGTCTGGTGCTAACCAAGATGGTTATCATTTTACTGGAGTTAATCCAGAACGTGATTTCACAGCTGAATACGTTGATATTCGTGAAGTAAAAGAAGGGGAGATTTCTCCAGACGGTAAAGGTACTCTGAAATTTGCTCGTGGTATTGAAATTGGACATATCTTTAAACTAGGTACCCGTTATTCAGATAGTATGGGAGCGAACATCCTTGATGAAAATGGCCGCTCAAATCCTATTGTTATGGGGTGTTATGGTATTGGTGTTAGTCGTATTCTCTCAGCTGTCATTGAACAACATGCCCGACTTTTTGTGAATAAGACACCAAAAGGAGCTTATCGCTTTGCTTGGGGGATTAATTTCCCAGAAGAATTAGCCCCATTTGATGTACATTTGATTACTGTCAATGTCAAAGATCAAGAGTCACAAGACCTTACTGAGAAAATTGAAGCTGATTTGATGCTTAAAGGTTATGAAGTCCTGACAGACGATCGTAATGAACGTGTTGGTTCTAAATTCTCAGACAGTGACTTAATTGGACTTCCAATTCGAGTAACTGTTGGGAAGAAAGCTTCTGAAGGTATCGTTGAAGTGAAAATTAAAGCAAGTGGTGATACGATTGAGGTTCACGCTGATAACTTAATTGAAACTTTAGAGATTCTAACAAAAAAA

SEQ ID NO: 8118 - protein, 617 aa, Streptococcus agalactiae; identical to SEQ ID NO: 3434

SEQ ID NO: 8119 - protein, 1257 aa, Streptococcus agalactiae
ATGCTAGGAATTTTAACCTTTATTATTATTTTTGGTGTCATTGTAGTTGTTCACGAATTTGGGCATTTCTATTTTGCAAAGAAATCAGGAATTCTTGTTCGTGAATTTGCTATTGGTATGGGTCCAAAAATCTTTTCTCACATTGATAAAGAAGGAACAACCTATACTATTCGTATATTACCGCTAGGTGGTTATGTCCGTATGGCTGGTTGGGGTGATGATAAGACTGAAATTAAGACAGGGACGCCGGCTAGCCTTACTTTAAATAAAGAAGGCATTGTAACTCGTATTAATTTATCAGGAAAACAATTAGACAATACTTCTTTACCAATCAATGTAACAGCTTATGATTTAGAAGATAAACTAACTATCACAGGATTGGTCTTAAGTGAGACAAAAACCTATAGTGTTGATCACGATGCTACTATCATTGAGGAGGATGGTACTGAAATTCGTATTGCTCCCTTAGATATGCAGTATCAGAATGCTTCTGTATGGGGGCGCTTAATTACCAATTTTGCAGGTCCGATGAATAATTTTATTTTAGGTCTTGTAGTCTTTATTGCACTTGCTTTTATTCAAGGAGGTGTTCAAGACTTATCAACCAATCAGGTCCGTGTATCAGAAAATGGTCCTGCCGCTAGTGCAGGTTTAAAAAATAATGATCGTATTTTACAAATAGGGTCGCACAAAGTTTCTAACTGGGAACAGTTGACAGCAGCAGTAGAAAAGTCAACTAGGCATTTAGAAAAAAAACAAAAACTTGCCCTTAAGATTAAGAGCAAAGAGGTGGTGAAAACGATCAACGTTAAGCCACAGAAAGTTGATAAATCCTACATCATCGGCATTATGCCAGCTTTAAAGACAAGCTTTAAAGACAAACTTTTAGGTGGATTAAAACTAGCATGGGAAAGTTTCTTTAGAATTTTAAATGAATTAAAGAAACTTATTGCTCATTTTAGTATTAATAAATTGGGAGGTCCAGTAGCTCTCTATCAGGCTAGTAGCCAAGCTGCTAAAAATGGTTTCGTCACAGTTCTCAACTTAATGGGATTAATCTCTATCAACTTAGGTATTATGAATCTCATCCCTATACCAGCCCTTGACGGGGGTAAGATAGTGATGAATATTTTAGAAGCCATTCGTCGCAAACCACTTAAACAAGAAACAGAAACTTATATTACGCTCGCTGGGGTAGCAGTTATGTTAGTATTAATGATTGCTGTGACCTGGAACGATATCATGCGAGCTTTCTTC

SEQ ID NO: 8120 - protein, 419 aa, Streptococcus agalactiae; identical to SEQ ID NO: 3436

SEQ ID NO: 8121 - protein, 792 aa, Streptococcus agalactiae
ATGAAAGAACGTGTTATTTGGGGAGCTGTCGCGCTTGCCATATTTATCCCTTTTTTAGTAATGGGTGGTTTGCCTTTCCAATTTTTAGTTGGACTTTTAGCTATGATTGGTGTTTCTGAATTACTTCGTATGCGTCGTTTAGAAATATTTTCCTTTGAAGGTGCATTAGCTATGATAGGAGCCTTTGTTTTAACAGTTCCTTTAGATAGTTATTTGTCCTTTTTACCAGTTGACGCTAGTTTATCAGCATACGGTATTGTTATTTTTATGATTTTGGCAGGTACTGTTTTGAACAGTAATTCTTACAGTTTTGAAGATGCTGCCTTTCCAATTGCGTCTAGTTTTTATGTGGGTATTGGCTTTCAAAATCTAGTCAGTGCTCGTATGGCTGGAATAGATAAGGTGTTGTTAGCTTTATTTATTGTCTGGGCGACTGATATCGGTGCTTATATGATTGGTCGTCAATTTGGACAACGCAAACTACTACCCTCAGTGTCTCCAAATAAAACAATTGAAGGGAGTCTAGGAGGGATTGCTTCAGCCATTGTGGTAGCTTTCTTTTTTATGCTTTTTGATAAGACCGTCTATGCGCCTCATAGCTTCCTAGTCATGTTAGTTTTAGTGGCTATCTTTAGCATTTTTGGTCAATTTGGAGATTTAGTTGAAAGTAGTATTAAACGTCATTTTGGTGTTAAAGATTCGGGTAAATTGATTCCGGGTCATGGGGGGATTTTGGATCGCTTTGATAGTATGATTTTTGTTTTCCCAATCATGCACTTCTTTGGCTTATTC

SEQ ID NO: 8122 - protein, 264 aa, Streptococcus agalactiae; identical to SEQ ID NO: 3438

SEQ ID NO: 8123 - protein, 630 aa, Streptococcus agalactiae
ATGGGACATAAGGCGGGGATGGATGCTCTTCAAGAAGTTACAATAGCAGCTTCAGGATTAGGTGTTAAAGTACTAACTGTCTATGCCTTTTCTACAGAAAATTGGTCACGTCCAGATGATGAAGTTAAGTTTATTATGAACCTTCCGGTTGAATTTTTTGATAAATATGTACCAGAGTTAGATAAAAATAATGTACGTGTACAGGTCATCGGAGATACTCATAAATTACCTAAGGCAACATACGATGCAATGCAACGCGCTTGTTTGAGGACAAAACATAATTCGGGGCTCGTCTTGAATTTTGCGCTAAATTATGGCGGACGTTCAGAAATCACTAATGCCATTAAGGAAATTGCTCAGGATGTTTTGGAAGCTAAGTTGAATCCTGACGATATTACAGAGGATTTAGTAGCAAATCATTTAATGACAAATAGCTTACCCTATCTTTATAGAGACCCTGATTTGATTATCCGAACTAGTGGAGAGTTACGCTTGAGTAACTTTTTACCTTGGCAATCAGCTTATAGTGAATTTTACTTTACTCCCGTTTTATGGCCAGATTTTAAAAAAGACGAACTACATAAGGCCATTGTGGATTATAATCAACGCCATCGTCGATTTGGTAGTGTA

SEQ ID NO: 8124 - protein, 210 aa, Streptococcus agalactiae
MGHKAGMDALQEVTIAASGLGVKVLTVYAFSTENWSRPDDEVKFIMNLPVEFFDKYVPELDKNNVRVQVIGDTHKLPKATYDAMQRACLRTKHNSGLVLNFALNYGGRSEITNAIKEIAQDVLEAKLNPDDITEDLVANHLMTNSLPYLYRDPDLIIRTSGELRLSNFLPWQSAYSEFYFTPVLWPDFKKDELHKAIVDYNQRHRRFGSV

SEQ ID NO: 8125 - protein, 95 aa, Streptococcus agalactiae
ATGAGCTTACCTATTATTATGCTTGTTGTTATGGTTGGTATGATGTTCTTCATGCAACGTCAGCAAAAGAAACAAGCACAAGAACGTCAAAAACA

SEQ ID NO: 8126 - protein, 32 aa, Streptococcus agalactiae
MSLPIIMLVVMVGMMFFMQRQQKKQAQERQKQ

SEQ ID NO: 8127 - protein, 342 aa, Streptococcus agalactiae
ATGTATTCTTTTGAAGAACTTTTGGCAACCATGACTTTGATAACGGCTGCCGAAATTGAAGATAAAATTGATTCAAATCAAGATTTTGTACTGTTCATTGGTCGTATTTCTTGTCCATTTTGTCACCTCTTTGTTCCTAAAATTGTAGAAGTAGCTGATGAAGATGAATTTGAATTATTCCATTTAGATAGTGAAGATTTTGATCATTGGACTGCAAATAAAGAATTTCGAAATAAATATGACATTCCTACAGTGCCAGGTTTGATGGTTGTTAAAAACGGAACTATCAAGGTGAAGTGCGATTCAAAAATGACAAAAGAAGAAATCCGTGAATTTATTGGC

SEQ ID NO: 8128 - protein, 114 aa, Streptococcus agalactiae
MYSFEELLATMTLITAAEIEDKIDSNQDFVLFIGRISCPFCHLFVPKIVEVADEDEFELFHLDSEDFDHWTANKEFRNKYDIPTVPGLMVVKNGTIKVKCDSKMTKEEIREFIG

SEQ ID NO: 8129 - protein, 1158 aa, Streptococcus agalactiae
ATGAGTGAAAATTTAGGTCAATTAGCTATCAACCAAGCTAGAGAAAATGGTGGAAAATTAGAAGTAATTTCAAAAGTTAAGGTGGAAGATAAGAGGGATCTTAGTATTGCCTATACCCCAGGGGTGGCGTCAGTATCATCAGCTATTGCAGAGGATGTGGAGCTTGCATATGAGTTGACGACTAAAAAAAATACAGTAGCCGTAGTGAGTGATGGTTCAGCTGTTCTTGGATTAGGAGATATTGGTCCTGAGGCAGCAATGCCAGTCATGGAAGGTAAAGCAGCACTCTTTAAACGTTTTGCAAATGTAGATGCTGTGCCAATTGTGTTGAAAACAAATGATACAGAGGAAATTATTTCTATAGTAAAAGCTATTTCGCCGACTTTTGGAGGGATTATTTAGAGGATATTTCAGCACCACGTTTTCGAAATTGAACAACGCCTAATTGAAGAATGTGATATACCAGTTTTCCATGATGACCAACATGGTACAGCAATCGTAGTATTAGCGGCTTTGTTTAACAGTTTGAAGCTAGTTAAAAAAGACATTGAAGACATCAGAGTAGTTGTTAATGGTGGAGGTTCAGCGGGCTTATCTATAACAAGGAAGCTTCTATCAGCAGGAGCAAAACATGTAACGGTAGTTGATCGATTTGGCATTATTAACGATAAAGATCGGGAGTCATTAGCCCCTCATCACAAAGCGATTGCAAAATTGACTAATAGAGAATTCCAATCTGGATCCTTAGAAGATGCTTTGGAGAATGCCGATGTTTTTATAGGTGTTTCTGCTCCGGAAGCATTACATGCAGAATGGATTTCCAAGATGGCTGATAAACCTATTGTATTTGCAATGGCGAATCCTATTCCAGAAATTTATCCAGATCAAGCCTTAAAAGCCGGAGCTTACATAGTTGGAACTGGTCGTAGTGATTTTCCAAATCAAATTAATAATGTTTTAGCATTTCCGGGTATTTTCAGAGGAGCATTAGATGCTAGAGCAAAAACGATAACTGTTGAAATGCAAATTGCGGCAGCGAGAGGCATAGCTAGTTTAATACCGGAGGAAGAATTAAGCACAACTCACATCATTCCAAATGCTTTTCAAAATGATGTGGCCGATGTAGTTGCTAAAAGCGTCAGTAATGCTGTACAAAAA

SEQ ID NO: 8130 - protein, 387 aa, Streptococcus agalactiae; identical to SEQ ID NO: 3444

SEQ ID NO: 8131 - protein, 1335 aa, Streptococcus agalactiae
ATGGCAGACGTGAAGGTAGTGAATAATGAGGATTCTAGAGGTCAAAAGCAAGACTTAAAGGCTAAACTATTTCATATTAAGATAGGGTCAGTTCCCCTACCAGTATATGTTTGTTTAGCATTATTGATTCTTCTAGCAGGCTTTTTACAAAAATTGCCAGTCAATATGCTAGGAGGATTTGCAGTTATCTTAACAATGGGGTGGTTCTTAGGGACTATCGGAGCTAGCATTCCTGGTTTTAAAAACTTCGGTGGCCCAGCTATTTTATCTTTATTAGTACCATCTATTTTGGTGTTTTTCAACCTCATTAATAAAAATGTTTTAGAATCAACAAATATGTTGATGAAGCAAGCTAACTTTCTTTATTTTTATATTGCTTGTTTAGTGTCCGGTAGTATTTTAGGGATGAATCGGAAAATGTTGATTCAGGGATTGCTAAGAATGATTTTCCCCATGTTATTAGGAATGGTTTGTGCGATGATGGTAGGGACATTTGTCGGTGTTATTTTAGGCTTAGAGTGGCGACACACTTTGTTTTATATCGTAACACCCGTTTTAGCTGGTGGTATTGGTGAAGGTATTTTACCATTATCGTTAGGCTATAGTTCAATTACCGGTGTAGCTAGTGAACAACTAGTTGCTCAACTCATCCCAGCCACTATTATTGGTAATTTCTTTGCCATTTTATGTACTGCACTATTGAATCGTTTGGGAGAAAAGAAACCACACTTGTCTGGTCAAGGGCAATTAGTAAGGTTAAATAAAGGAGAGGACATGTCAGATATTATTGCTGATCATTCTGGCCCAATTGACGTTAAGAAAATGGGTGGAGGTGTTTTAACAGCATGTAGTCTCTTTATTTTTGGACATTTGTTGCAGCAATTAACTGGATTTCCTGGTCCCGTATTAATGATTGTTGCAGCAGCTATTTTGAAATATATTAATGTTATTCCTAGAGAAACACAAAATGGAGCTAAGCAACTTTATAAATTTATTTCTGGTAATTTTACATTTCCTCTAATGGCAGGTCTAGGATTGCTTTATATCCCGTTAAAAGATGTTGTGGCAACGCTTAGCATACAATATTTCATAGTTGTTATTAGTGTTGTATTTACAGTTATTTCTGTTGGATTCTTTGTATCGCGATTCCTTAATATGAATCCTGTTGAAGCAGGTATTATTTCAGCTTGTCAAAGTGGTATGGGAGGAACAGGAGATGTTGCCATTTTAAGTACAGCAGACCGAATGAACTTGATGCCATTTGCTCAAGTTGCTACGCGTTTAGGAGGAGCTATTACTGTTATCACAATGACAGCCATTTTACGCATGTTATTC

SEQ ID NO: 8132 - protein, 445 aa, Streptococcus agalactiae; identical to SEQ ID NO: 3446

SEQ ID NO: 8133 - protein, 1524 aa, Streptococcus agalactiae
ATGAAAAAAAAACTATCTCTTTGGGCATTTCTATCATTGATTTTAGTCACTATGACCATTTGTATATTTTCTATTTTTTATTATGTCACTATACATCAGTCCTATCGTATGGTAAGGGTACAGGAAGAAAAAATCTTAAAAAATACTGGTTATGCTTTATCGAGAAATCCACAAGTTATACAAACACTCAAAGATAATCACTATGATCAAAGTCTCCAAAAACAAATGTTATTCCTTAGCAAAAAATCAAATTTAGACTATATTGTCCTTATAAATTTAAAAGGGATCCGTTTTACCCACCCTGACTCCACTAAGATTGGTAAACCATTTCAAGGGGGTGATGAACAAGCTGTTTTTAAGGGAAAAGCTATTATGTCTACTGCAGAAGGTTCTTTAGGAAAATCTTTACGATACTTAATTCCAGTATATGATCACCAAAAACAGGTTGGGGCAATTGCAGTTGGCTTAAAATTAACGACACTTGGAGACTTATCTCAAAGTAGCATAAAAGAGTTTAGTAAGCCTCTCTTGATTAGTATTTTGATTAGCTTAGTCGTCACAAGTATAATTTCTTATGGCTTAAAAAAACAACTTCACAACCTCCATCCAAGTGATATTTTTCAACATTTAGAAGAGCGCAATGCAACACTGGACCAAATTCAAGCCGCTGTATTTGTTATTGACCAGAGGCATATCATCAAAAGAAATAATCCTGCAGCTAGTTTATTATTCAAAAAAGAGGGGCAACGAGACCTATTTTCAGGTAAATTATTAGAATCTTTAATTCCTCAACTCAAGCAGGATCATTTTTCAAAAAAAACTGAACAAGTATTACATTTTCAAGGACAAGACTATTTACTATCTATCTCGCCAATTACGGTTAAAACACAAAATAGAGGCTATGTTGTCTTCTTAAGGAATGTTACTGAAACACTTTTCACTTTGGATCAATTAGCACACACTACAGCTTATGCTTCTGCGCTACAGGCCCAAACACATCAATTTATGAATCAACTTCATGTTATTTATGGACTTGCAGACATTGAATACTACGACGAGTTGAAAATTTATTTAAAAGAATTATTGGAGCCACAAAATGAATTTTTAGCACGCTTATCAATGTTAGTTAGAGAGCCTCGACTGGCTAGTTTCATTATTGGCGAAAGAGAAAAATTCGCAGAAAAACACATCAATCTATCCACAGAAATTTTAGTAGAAATCCCTACCAAGTCAACTGTTGAGGATGTTAATAACTATCTCTTGCTCCACAGATATATTAATACGAAGATACTCACGCTATTAAATTCAACGACTTTAGTTTCTTTACGTTTAAATTATCAAAATAACCTCATTGAAACAGATTATCAATGGGAGAATGAGAAGTGGTTACTCAATGACTACCATCAGTATTTCAACGACGCTTATTTTCAACAGTTACTTGTAGATTCAAGAGCTACTTATAAGATCTCTTTAAAACAAAATAAGGTTATTATAAGAACAAATATTATCTACTCAGAAGGGCCT

SEQ ID NO: 8134 - protein, 508 aa, Streptococcus agalactiae; identical to SEQ ID NO: 3448

SEQ ID NO: 8135 - protein, 687 aa, Streptococcus agalactiae
ATGGACGTATTAATTATCGAAGATGATCCTATGGTGGAATTTATCCACCGCAATTACCTTGAAAAACTCAATTATTTTCAAAACATCTATTCAACTGCTAGTCAAACACAAGCTATTGCTTATCTTAATGACATTAAAATCCAACTTGTTCTTTTAGATATTCATATTAAAGAAGGCAATGGTCTAGAATTATTAAAGTTATTACGCAATCAACACCAAAATACCGAAGTCATTGTTATTTCAGCAGCCAACGAGGCGCACACTGTCAAAGAAGCATTTCATTTAGGTATTGTAGATTACCTGATAAAACCATTTACATTTGAACGCTTTGAGTCTAGTATTGAAAAATTCCTAAATCATTATCATACATTTGAAGCTGATAAAATCTATCAAGACAACATCGATCACTTTCAAAAAATAGATTCTGGATGGCTAGAGGGAGAGGTTAAACTTGATGAGAAAGGGCTCTCTGAAATTACCTATCAGCATATTCTTGATGCCATTCAAGAGTTAGAGCAGCCTTTCACTATCCAAGAGTTAGCAAAATGCAGTCAATTTTCTCATGTCTCTGTTAGGAAATATATTGCCTATATGGAAGAAAAAGGCCTTCTGACAAGTCAGCAAATTTATACTAAGGTCGGTCGTCCTTACAAAGTTTATAAGCTTATAAAAAAAAACTTAGGCCTG

SEQ ID NO: 8136 - protein, 229 aa, Streptococcus agalactiae; identical to SEQ ID NO: 3450

SEQ ID NO: 8137 - protein, 991 aa, Streptococcus agalactiae
ATGGCAGTTCTGATTTTAGGTGGCGCCGGCTACATTGCTCGCATATGGTGATCAGTTAATCACACAAGGAAAAGAGAAAGTTATTGTTGTTGATAACTTGGTAACAGGTCATCGTCAAGCGGTGCATTCAGATGCGATTTTTTATGAAGGAGATTTATCCGATAAAACGTTTATGCGTCAAGTTTTTAGGGAAAATCCTGATGTAGATGCTGTTATCCATTTTGCGGCATTTTCACTAGTTGCTGAGTCAATGGAAAATCCTTTAAAATATTTTGATAATAACACTGCTGGAATGATAAAACTTTTAGAAGTAATGAATGAATGTGATATCAAAAATATTGTCTTTTCATCAACAGCTGCAACATATGGTATTCCAGAACAAGTTCCTATTTTAGAAACAGCTCCTCAAAATCCTATTAATCCTTATGGCGAAAGTAAGCTTATGATGGAAACAATTATGAAATGGGCTGATCAAGCCTACGGTATTAAGTTTGTCGCTCTACGTTACTTCAACGTTGCTGGAGATAAACCGGATGGCTCAATTGGGGAAGATCATAAACCAGAAACACATTTGTTACCAATCATTCTTCAAGTTGCTCAAGGAGTACGTGACAAAATAATGATTTTTGGAGATGATTACAATACTCCAGATGGAACTAATGTTCGAGATTATGTGCATCCATTTGATTTGGCAGATGCTCATATATTAGCAGTTGATTACCTTCGCCAAGGGAATGAATCAAACGTGTTTAATCTCGGATCTTCGACAGGTTTTTCTAACCTTCAGATGTTAGAGGCAGCTCGTCGTATTACTGGGAAAGAAATTCCTGCTCAAAAGGCAGCTCGTCGTCCAGGAGATCCAGATACGCTTATTGCTTCCTCAGAGAAAGCTCGTCAAATCCTTGGGTGGGAGCCTAAATTTGATAATATTGATAAAATTATTTCATCGGCATGGGCATGGCATTCTAGTCATCCAAATGGCTACGAAGAT

SEQ ID NO: 8138 - protein, 331 aa, Streptococcus agalactiae
  VARIANT 17: Xaa = Any Amino Acid
MAVLILGGAGYIGSHMXDQLITQGKEKVIVVDNLVTGHRQAVHSDAIFYEGDLSDKTFMRQVFRENPDVDAVIHFAAFSLVAESMENPLKYFDNNTAGMIKLLEVMNECDIKNIVFSSTAATYGIPEQVPILETAPQNPINPYGESKLMMETIMKWADQAYGIKFVALRYFNVAGDKPDGSIGEDHKPETHLLPIILQVAQGVRDKIMIFGDDYNTPDGTNVRDYVHPFDLADAHILAVDYLRQGNESNVFNLGSSTGFSNLQMLEAARRITGKEIPAQKAARRPGDPDTLIASSEKARQILGWEPKFDNIDKIISSAWAWHSSHPNGYED

SEQ ID NO: 8139 - protein, 1605 aa, Streptococcus agalactiae
ATGAAGAAACACTGGTGGCATAAAGCTACGATTTATCAAATTTACCCACGTTCATTTATGGATTCAGATGGTGATGGTGTGGGGGACATTAAAGGGATTACTAGCAAACTAGACTACCTTGAAAAATTAGGGATTACTGCTATCTGGTTATCACCTGTTTATCAAAGTCCAATGGATGACAATGGTTATGATATTTCAGATTATCAAGCCATTGCAGATATTTTTGGTGATATGAATGATATGGACCAACTGTTACAAGAGGCAAATCAACGCGGGATTAAAATCATCATGGATTTGGTAGTGAATCATACCTCTGATGAACATGCTTGGTTCGTAGAAGCGCGAGAAAACCCTAATAGTCCTGAACGTGATTTTTATATTTGGCGAGATGAACCTAACGATTTGACTTCTATTTTTAGTGGCTCAGCTTGGGAATATGATAAAGTATCAGGTCAATATTATTTGCACCTTTTTAGCAAACGTCAGCCAGATCTCAACTGGGAGAATGAAGCTTTACGTCATAAAATTTATGATATGATGAATTTCTGGATTGATAAGGGTATTGGTGGTTTCCGTATGGATGTCATTGATTTAATTGGGAAAATTCCAGATAAGGGCATTACTGGTAATGGACCAAAACTTCATGATTATCTTAAAGAAATGAACAGAGCTAGTTTTGGAAAGCATGACTTATTGACGGTGGGTGAAACTTGGGGAGCAACGCCAGACATTGCAAAACAATACTCAAATCCCGATAATGAAGAATTATCTATGGTCTTTCAATTTGAACATGTAGGTCTTCAACATAAACCTGACGCTCCTAAGTGGGATTACAGTGACGGATTAGATGTTCCAGCATTGAAAGATATTTTTACAAAATGGCAAACACAATTGGAGCTTGGCCAAGGTTGGAATTCTTTATTCTGGAATAATCATGACCTTCCTCGAGTGCTCTCGATCTGGGGAAATGATAGTGATAACAGAAAACAATCTGCCAAGGCTCTAGCAATCCTACTACATTTGATGCGTGGAACGCCTTATATCTATCAAGGTGAAGAAATTGGTATGACTAATTATCCATTTGAGTGTTTAGCAGATGTAGATGATATTGAATCCCTTAACTATGCTAAAGAAGCCATGGATAATGGGGTATCTGAAGCAACAATTTTAGATAGTATTCGTAAAGTCGGTCGTGATAATGCTCGTACTCCAATGCAGTGGAGTCAAGAACATCAAGCTGGTTTTACTAAAGGTACCCCATGGCTAGCAGTCAATCCCAATTATCAGGAAATTAATGTGGAGGCAGCGTTAAATGATACGGAAAGTATTTTTTATACTTATCAAAAATTAGTTGCTTTACGTAAAGAACACGACTGGTTAGTTGATGCTGATTTTAAACTTTTGGAAACAGCAGATAAGGTATTTGCTTATGTTCGTCAAACAGATAAAGAACGTTATTTAATAGTTGCGAACTTATCCGATCAAAACCAATCTTTTGAATTTCCAGAAGCTGTTAAAGAAACTATTATTTCAAATACAGAGGTTCAAGAAGTACTATCAAGTAACACTCTCAAGCCGTGGGATGCCTTCTGCATAGAGCTATTC

SEQ ID NO: 8140 - protein, 535 aa, Streptococcus agalactiae; identical to SEQ ID NO: 3458

SEQ ID NO: 8141 - protein, 1131 aa, Streptococcus agalactiae
ATGGTAGAATTAAATTTAAATCATATTTACAAAAAATATCCAAGTGCATCGCATTATTCTGTTGAAGACTTTGACTTGGATATTAAAGACAAAGAATTTATTGTTTTTGTTGGACCATCAGGTTGTGGGAAATCAACAACACTTCGTATGATCGCAGGTCTTGAAGATATTAGTGAAGGTGAGCTCAAGATTGATGGCGAAGTTGTCAATGACAAATCACCTAAAGATCGTGATATTGCTATGGTTTTCCAAAACTATGCTCTTTATCCACATATGACTGTTTACGATAATATGGCTTTTGGGCTCAAATTGCGTAAATTCTCAAAACAAGAAATTGATAAGCGCGTTCGTGAAGCAGCAGCTAATATTGGCCTTACTGAATTCTTAGAGCGCAAACCTGCGGATTTGTCAGGTGGACAACGCCAACGTGTTGCTATGGGACGTGCTATTGTGCGTGATGCCAAAGTGTTCTTAATGGATGAGCCTTTATCTAACTTAGATGCTAAATTACGTGTTTCAATGCGTGCTGAAATTGCAAAAATTCATCAACGTATTGGTTCAACAACTATTTATGTTACCCACGACCAAACAGAAGCGATGACTTTGGCAGACCGTATTGTCATTATGTCAGCTACTAAGAACCCTGATGGTGATGGTACAATTGGTAAAATTGAGCAAGTTGGTTCACCACAAGAACTCTATAATCTTCCTGCCAATAAATTTGTTGCGGGATTCATTGGTAGCCCATCTATGAACTTCTTCAAAGTTAAAGTTGAAAATGGTATGATTATTAGTGAAGATGGTCTTCGAATCGCTATCCCTGAAGGTCAAGAAAAACTTTTAGAATCACGAGGCTATAAAGGAAAAGAATTGATTTTTGGTATTCGTCCAGAAGACATTTCAAGCAATCTTCTTGTCCAAGATACTTATCCAAATGCCAATGTTGAAGCAGAAGTTTTAGTTTCTGAATTACTCGGTAGCGAAACTATGCTTTATGTTAAGTTAGGTCAAACAGAATTTGCTTCTCGTGTTGAAGCGCGTGACTTCCATAATCCAGGAGAAAAAGTTAACCTAACGTTTAATGTTGCTAAGGGGCATTTCTTTGATGCAGATACTGAACAAGCTATTCGT

SEQ ID NO: 8142 - protein, 377 aa, Streptococcus agalactiae; identical to SEQ ID NO: 3460

SEQ ID NO: 8143 - protein, 849 aa, Streptococcus agalactiae
ATGGATTTTAAGGAACTGTTTCCAGAAGTTATTACTAAACAGGAAGTTAAACAGAGTGAGGATTATATCATCGTTGAGCAAGATGGTCATGTCCTCCACTTTCCAAAATCTTCGCTAACTAAGCGTGAACTATACTTATTACAAATGACACCAAGCCTGGAAGATGCGAGTTCAGTGGATTCTCAGAATCCTTGGTACCGCTATCTAGTTGAAGGTCGTGGAAGGTTGCCCCAATCTCATTCGGCAGTCCAATTTATTTTTATTGAGCATCAATTTACCTTATCAGAAGAACTTAAGGATTTCTTGTCGCCTTTAGTAATAAACGTAGAAACAATTATGACAATTAATCAAACCCAAAGTGTCATGATTTTAAATCAGGATAATTTCTTTAATGCTACGGAATTACTAACAGATATTTTACCAACGATTGAAAATGACTTTAACACGCGTTTAAGGTGCTATTTTGGAAATAGTTGGACGCATCTACAAGCAGTGGACTGGAAAGAATTATATGAAGAAGAATATAAACTTTTTACGCTTTTTCTTAGTCACAAGGCCGAACAACATTACTGTCGATTTCCAAAGATGGCTTTATGGGCTTTGGCAAATCAATCGCCCATGCCTTCTATTAAAGCAAAATGTTTACAACATATCCTTGATACGAGTGATACTTCGGCTATAATAAAAGCCCTGTGGCAAGAGCAAGGAAATCTTGCTAAAACGGCTAAGGCACTTTTCATTCATCGGAATTCATTGCAATATAAATTAGATAAATTTACCCAATCTTCGGGACTTAATTTAAAAATATTAGATGATTTAGCCTATGCCTATTTGATTTCGATGGATACC

SEQ ID NO: 8144 - protein, 283 aa, Streptococcus agalactiae; identical to SEQ ID NO: 3462

SEQ ID NO: 8145 - protein, 894 aa, Streptococcus agalactiae
ATGGCTATTACGATACAAAATCATGAGTTGCAAGTGACATTAAAAGCGTTAGGTGCAACAATGACTTCTATTACAGATAGTCAAGGCGTTGAGTACCTTTGGCAAGGGGACGCCACTTATTGGGGTGGGCAAGCTCCTATTTTATTTCCTATATGCGGAAGTGTTCGAAATGATTGCGTCATTTACAGACCAGCTCAAGCTCCACATTTTACGGGTATCATACCAAGGCATGGCTTTGTACGTCACAAAACATTCGACTATGATTACATATCGGATTCTTCTGTTCGTTTTACAATTAAAAGTAGTAAAGAAATGTTGATAAATTATCCTTATCGTTTTAGTTTAGAAATAACTTACACCTTAAGAAATAAAAGCATTGCCATTACATATATTGTCAAAAACTTAGAATCAGAAAAAAATATGCCATATGCTATCGGAGCTCACCCAGGCTTTAATTGCCCTTTGTTTGAAAAGGAAGTATTTAGTGATTACTATCTAGAGTTTGAACAGTTTGAAACTTGCACAATTCCTGAGTCGTTTCCGGATACAGGCTTGTTAGATTTACAAGCTAGACATCCTTTTTTAGAAAATCAAAAACAATTATCTCTTAATCATGCTTTATTTGAAAAAGATGCTATTACTTTAGACCAACTACGATCTAAGACGGTTTACTTAAAATCTAGAAATCATGCAAAAGGAATCCAACTTGACTTTGATGATTTTGAGAATCTTATTCTTTGGACAAGTAACAATGGTGGTCCTTTTTTGGCTTTGGAACCCTGGAGTTCTTTGTCAACTTCTATTGAAGAGTCTGATATTTTAGAAGATAAACAAAATATCGTACGGCTTAATCCAAAGCAGTCGAAACAGCATTCTATTCGGATCACTATTTTA

SEQ ID NO: 8146 - protein, 298 aa, Streptococcus agalactiae; identical to SEQ ID NO: 3464

SEQ ID NO: 8147 - protein, 974 aa, Streptococcus agalactiae
ATGGGATTAACAGAACAAAAACAAAAACATATGGAACAATTGAGTGATAAAAATGGTATTATTTCGGCCTTGGCTTTTGACCAACGTGGAGCATTGAAGCGATTAATGGCAAAATATCAATCTGAGGAGCCCACTGTTTCTCAAATAGAAGCACTTAAAGTTTTGGTAGCTGAAGAATTAACCCCTTACGCTTCATCAATGTTGTTAGATCCAGAATATGGGTTGCCAGCTACGAAAGTTTTAGATGACAATGCCGGTCTTTTACTTGCGTACGAAAAAACGGGTTATGATACCAGTAGTACCAAGCGACTCCCAGACTGTTTAGACATTTGGTCTGCGAAACGCATTAAAGAAGAGGGAGCAGACGCAGTTAAGTTCTTACTTTATTATGATGTTGATAGTTCGGATGAAGTAAACGAAGAAAAAGAAGCTTATATTGAACGGATTGGTTCTGAATGTGTTGCAGAAGACATTCCTTTTTTCCTTGAAATTTGTCATATGATGAAAAGATTACGGATAGCTCAGGTATTGAGTATGCCAAAATTAAGCCACGTAAGGTTATTGAAGCTATGAAAGTTTTTTCAAATCCTCGATTTAATATTGATGTCTTGAAGGTGGAAGTGCCTGTCAATATGGACTATGTAGAAGGTTTTGCGCAAGGAGAGACTGCTTATAATAAAGCGACAGCTGCGGCATATTTTAGAGAACAAGATCAGGCGACACTACTCCCCTACATTTTTTTGAGTGCAGGAGTTCCTGCTCAGCTTTTTCAAGAGACTCTTGTGTTTGCTAAAGAAGCTGGTGCTAAATTTAACGGTGTCCTTTGTGGTAGAGCAACTTGGGCTGGAAGTGTTAAAGAGTATGTTGAAAAAGGAGAAGCTGGTGCACGTCAATGGTTACGTACAATAGGTTTTCAAAATATTGATGAACTAAATAAAATTTTGCAAAAAACAGCAACTTCTTGGAAGGAAAGA

SEQ ID NO: 8148 - protein, 325 aa, Streptococcus agalactiae; identical to SEQ ID NO: 3466

SEQ ID NO: 8149 - protein, 930 aa, Streptococcus agalactiae
ATGATTTTAACAGTAACTTTGAACCCTTCTATTGATATTTCGTACTGCTTAGAAAACTTTAACATGGATACTGTAAATCGAGTTACCGACGTCTCCAAAACACCTGGGGGTAAGGGGTTAAATGTGACTCGTGTTCTTTCTCAACTTGGCGATAATGTAGTGGCAACTGGTCTATTAGGGGGGGATTTTGGAGATTTCATCCGAAGTGGCTTAGATGCATTGGAAATCAGACACCAATTTTTAAGTATTGGTGGAGAAACACGTCATTGTATTGCAGTTTTACATGAGGGTCAGCAGACTGAAATTCTAGAAAAAGGTCCACATATTACTAAAGATGAAGCAGACGCCTTTTTGAATCATCTAAAACTTATCTTTGATGCTGCAACTATCATAACAGTATCAGGAAGTTTACCAAAGGGACTCCCCTCAGATTATTATGCTAGGTTAATCTCCCTAGCGAATCACTTTAATAAGAAAGTTGTTTTAGACTGTTCAGGAGAAGCATTACGTTCGGTTTTAAAATCTAGTGCTAAGCCGACCGTCATTAAACCTAACCTTGAAGAATTAACACAATTAATTGGAAAACCAATTAGCTATAGTTTAGACGAATTAAAATCTACCTTACAGCAAGATCTTTTTAGAGGAATTGATTGGGTTATTGTTTCTTTAGGTGCTAGGGGAGCTTTTGCTAAACATGGGAATCACTACTATCAAGTGACGATTCCAAAAATAGAAGTTATTAATCCAGTTGGTTCAGGGGATGCAACGGTTGCAGGAATCGCGTCTGCTTTGGAACATCAACTAGATGATACAAATTTGCTTAAGAGAGCTAATGTCTTGGGTATGCTTAATGCACAAGAAACATTAACAGGGCATATCAATCTGACCTACTATCAAGAATTAATCAGTCAAATCCAAGTGAAAGAGGTA

SEQ ID NO: 8150 - protein, 310 aa, Streptococcus agalactiae
MILTVTLNPSIDISYCLENFNMDTVNRVTDVSKTPGGKGLNVTRVLSQLGDNVVATGLLGGDFGDFIRSGLDALEIRHQFLSIGGETRHCIAVLHEGQQTEILEKGPHITKDEADAFLNHLKLIFDAATIITVSGSLPKGLPSDYYARLISLANHFNKKVVLDCSGEALRSVLKSSAKPTVIKPNLEELTQLIGKPISYSLDELKSTLQQDLFRGIDWVIVSLGARGAFAKHGNHYYQVTIPKIEVINPVGSGDATVAGIASALEHQLDDTNLLKRANVLGMLNAQETLTGHINLTYYQELISQIQVKEV

SEQ ID NO: 8151 - protein, 512 aa, Streptococcus agalactiae
ATGAAAATTGCGGTCGGTTGTGATCATATTGTAACTTATGACAAAATTGCAGTTGTGGATTATTTAAAAACAAAAGGGTATGAGGTTATTGATTGTGGAACTTATGATAATATCCGTACTCACTATCCTATTTATGGTAAGAAAGTAGGAGAAGCTGTCGCTAGTGGAAAAGCCGACTTAGGTGTATGTATTTGTGGAACTGGAGTGGTATTAATAATGCTGTTAATAAAGTTCCAGGAATTCGCTCAGCTCTGGTACGTGATTTGACATCAGCTATCTATGCTAAAGAAGAATTAAATGCTAACGTTATCGGATTTGGTGGGAAAATTACTGGTGGGCTGTTAATGACAGATATCATCGAGGCGTTTATAAGAGCTAAATATAAACCAACAAAAGAAAACAAAGTATTAATTGAAAAGATAGCCGAGGTTGAGACTCATAATGCCCATCAAGAAGAGAATGACTTTTTCACAGAGTTCTTAGATAAATGGAATCGTGGTGAATATCACGAC

SEQ ID NO: 8152 - protein, 171 aa, Streptococcus agalactiae
  VARIANT 69: Xaa = Any Amino Acid
MKIAVGCDHIVTYDKIAVVDYLKTKGYEVIDCGTYDNIRTHYPIYGKKVGEAVASGKADLGVCICGTGXGINNAVNKVPGIRSALVRDLTSAIYAKEELNANVIGFGGKITGGLLMTDIIEAFIRAKYKPTKENKVLIEKIAEVETHNAHQEENDFFTEFLDKWNRGEYHD

SEQ ID NO: 8153 - protein, 423 aa, Streptococcus agalactiae
ATGACAATTATTATTGGGGCGGATGCGCATGGTGTTGAACTTAAGGAAGTGATTAGACAACACCTTACAAGTTTAGGTAAGGAAATTATTGATTTAACGGATACTAGCAAAGATTTCGTTGATAATACCTTAGCAATCGTTGCTAAAGTGAATCAAAAAGAAGATAACTTAGGAATAATGGTTGATGCTTACGGTGTTGGTCCTTTTATGGTAGCCACTAAGGTTAAGGGGATGATTGCAGCAGAAGTTTCAGATGAACGCTCAGCTTATATGACTAGAGCTCATAATAACGCTAGGATGATTACTTTAGGTTCAGAGATTGTTGGTCCAGGAGTTGCTAAACATATAGTAGAGGGTTTTGTTGATGGGACTTACGATGCAGGTCGTCATCAAATTCGGGTCGATATGTTGAATAAAATGTGC

SEQ ID NO: 8154 - protein, 141 aa, Streptococcus agalactiae
MTIIIGADAHGVELKEVIRQHLTSLGKEIIDLTDTSKDFVDNTLAIVAKVNQKEDNLGIMVDAYGVGPFMVATKVKGMIAAEVSDERSAYMTRAHNNARMITLGSEIVGPGVAKHIVEGFVDGTYDAGRHQIRVDMLNKMC

SEQ ID NO: 8155 - protein, 2377 aa, Streptococcus agalactiae
ATGCTAGGTTTTATCTTATTATGTGGATTTTTGCATCCTAGTACAATTTATAGTGAGGAAATAAAATCTGATATAAACTCTTTTATATCAATAGATGATGAAAAAACTACTGTTCCCATATTTGACTCTACTTTAGATAAGCTTACTAATTCAATAGAGGAGAGGCAGTTAGAATTAGATTCTGATACATCGGACAGTTTAATAGTAGATGATCAAAAAGATAAAGATATGGTAATAGTCTTAGGTGATTCTGACAGTCAAGAAAAATTGTCACCTCCTCTAAAATCGGAAATAGCGACAGAAGAAAATCGTAAACAGGCAAATTTAGCAGAACTAAATGCAACTCAACCTAATAATAGAACTACCTATATTATACCCGAAAGCAGTCATTCCATTGCAGAACAACAGAGATTCCTGATAGAATCAAAGGGTTATTCGGTTGCATTACTTAATAGCGATGAATTTAGAAAGACAGCGAGAGAGGATAGAGGTTTTGAAAGGGATAAGTTGAGGTCTTTGGATATCATTCCTAAGGGAGATTTATCGACAAGTAATGTCATAGGTAATACGGACATTGCTAGTCAGATATCGTTGGGCTTTAAAAAGAATGCGATACAGGAACACCATCTTACTAAAACATTCTCTCAAAAGGATGGAAAGTTATCGTCTGTTATAGAGGGGATGCTTGCTATTGGCAAAGAGAAAGTAGAGAAGGAAATAAAATATAGTGGTAATTTATGGCAAAAATTAAAAGCTAAGGCACACTGCCTTGTTTGCTGTGTTGATAATTTGAATTTTGAAGATATAAAATCTTATTTTCAATATTATTGTCATCTAAACCATCAGCTCAAATTACCTAAAGGTGCTATACTTTCTGCTAAAACAGAAGTATATAGGGGAGGAGATTTTGGGAGAAAAAATAAAGATAATGTGTTTGGTTACCGTATCCCCTCATTATTAAAAACGGAAAAAGGAACTTTACTTGTGGGAGCTGATGAAAGAATTGAGCAAGCTTGTGATTGGGGAAACATAGGAATGGTTATTCGCCGTAGTGAGGATGATGGTGTCACTTGGGGAAAAAGAGAAACTATTGTCAATCTCCGTAATAACCCTAGAGTTCCGCTAGTTACTAGTGGTGACTATAGTGGCTCACCTATTAATATGGATATGGCATTAGTTCAAGATACTAGCTCTAAGACGAAACGTATTTTTTCAATATATGATATGTTTCCAGAAGGAAGAGGCGTTATTAGTATTGCTAACACACCTGAAAAAGAATATACCCAAATCGGAGGACAGTCTTATCTTAATTTATATAATAATGGAAAGAAATCGAAGGTTTTTACTATCCGTGACAAAGGTATTGTATATAATTTTAAAGGGAAAAAGACTGATTATCATGTTATAACAGAAACTACTAAAAGTGACCATTCAAATCTAGGGGATATTTATAAGGGAAAACAGCTACTTGGAAATATATATTTTACAAAACATAAAACGTCACCATTTCGTTTAGCAAAATCAAGCTATGTGTGGATGTCATATAGCGATGATGATGGTAGGACATGGTCATCACCTAGAGATATAACAGCAAGTCTTCGTCAGAAAGGCATGAAATTTTTAGGAATAGGACCTGGAAAAGGTATAGTTTTAAAATGGGGGCCACACGCTGGTCGTATTATTATTCCTGCCTATTCTACGAATTGGAAATCTCATCTAAGAGGTTCACAATCTTCACGCCTAATTTATTCAGACGACCATGGAAAAACGTGGCATACTGGAAAAGCAGTCAATGATAACCGTATACTTTCTAATGGTGAAAAAATTCACTCCTTAACAATGGATAATAAAAAAGAACAAAATACAGAATCCGTACCCGTTCAATGAAAAATGGGGACATTAAGTTATTTATGAGGATCTAACTGGTAACCTAGAAGTAGCCACAAGTAAAGACGGCGGGGAGACTTGGCAAAACCATGTTAAACGATATAAGGAAGTTCATGATGCTTACGTCCAATTATCAGCTATTCGCTTTGAGCATGACAAAAAAGAGTATATTTTATTAGTGAATGCTAATGGGCCAGGTAAGAAGCGTCAAGATGGATATGCACGTCTAGCGCAAGTTAATCGAAATGGTAGTTTTAAGTGGTTATATCACCATCACATTCAAGATGGTTCGTTTGCTTACAACTCTGTTCAACAACTTAATAATGATAAATTTGGTGTCCTTTATGAACATAGAGAAAAACATCAAAATAGTTTTACTTTAAATTACAAAGTTTTTAATTGGAGTTTTCTTAGTCAAAATACAGAGAAGCAAGGCACTTTATGGGAGAAAATGGCAGCAAATTGGCATGTTTTGTTTAAATTTTATTTA

SEQ ID NO: 8156 - protein, 793 aa, Streptococcus agalactiae
  VARIANT 640: Xaa = Any Amino Acid
MLGFILLCGFLHPSTIYSEEIKSDINSFISIDDEKTTVPIFDSTLDKLTNSIEERQLELDSDTSDSLIVDDQKDKDMVIVLGDSDSQEKLSPPLKSEIATEENRKQANLAELNATQPNNRTTYIIPESSHSIAEQQRFLIESKGYSVALLNSDEFRKTAREDRGFERDKLRSLDIIPKGDLSTSNVIGNTDIASQISLGFKKNAIQEHHLTKTFSQKDGKLSSVIEGMLAIGKEKVEKEIKYSGNLWQKLKAKAHCLVCCVDNLNFEDIKSYFQYYCHLNHQLKLPKGAILSAKTEVYRGGDFGRKNKDNVFGYRIPSLLKTEKGTLLVGADERIEQACDWGNIGMVIRRSEDDGVTWGKRETIVNLRNNPRVPLVTSGDYSGSPINMDMALVQDTSSKTKRIFSIYDMFPEGRGVISIANTPEKEYTQIGGQSYLNLYNNGKKSKVFTIRDKGIVYNFKGKKTDYHVITETTKSDHSNLGDIYKGKQLLGNIYFTKHKTSPFRLAKSSYVWMSYSDDDGRTWSSPRDITASLRQKGMKFLGIGPGKGIVLKWGPHAGRIIIPAYSTNWKSHLRGSQSSRLIYSDDHGKTWHTGKAVNDNRILSNGEKIHSLTMDNKKEQNTESVPVQLKNGDIKLFMRXLTGNLEVATSKDGGETWQNHVKRYKEVHDAYVQLSAIRFEHDKKEYILLVNANGPGKKRQDGYARLAQVNRNGSFKWLYHHHIQDGSFAYNSVQQLNNDKFGVLYEHREKHQNSFTLNYKVFNWSFLSQNTEKQGTLWEKMAANWHVLFKFYL

SEQ ID NO: 8157 - protein, 672 aa, Streptococcus agalactiae
GTGTTCTCATTTGCAGCATTAGGTGGCTGGTTTTCTCTCGGTTTTACAGCAGGTGCTTGTTTAGAGTTGTTCTCTTTGATTGGTTCTTGGTTCATTGCTGCAGTAGAACCACTTTCTCAAGGAATTACTAATTTTGCTAATGGTAAAATGCATGGTCGTCGTTTCAATATTGGTTTGGACTGGCCATTTATTGCCGGACGTGCAGAGATTTGGGCATGTGCTAACATTCTTGCACCGATTATGCTAGTAGAAGCTATTTTACTCTCTAAAGTTGGTAATGGTATTCTACCGCTTGCTGGTATTATCGCAATGGGCGTAACCCCTGCTTTACTGGTTGTTACACGTGGCCGTTTAATTCGTATGATTACCTTTGGAACATTGCTATTACCGCTATTTCTTTTATCAGGAACAATGATTGCCCCATTTGCAACTGAATTAGCTAAAAAGGTAGGCGCATTCCCAGCTGGGGCGCGAGCAGGTTCACTTATCACTCACTCTACACTAGAAGGCCCTATGGAGAAAATCTTTGGTTACGTTATTGGTAAAGCGACAACAGGTCAATTATCAGCGATTATAACATTAATTATTTTTGCGACAGCTTATCTTGGTTTGTTTATGTGGTATGCTAAACAAATGAAACGCCGTAATGCAGAATATGCAGCTAATCAAAAA

SEQ ID NO: 8158 - protein, 224 aa, Streptococcus agalactiae
MFSFAALGGWFSLGFTAGACLELFSLIGSWFIAAVEPLSQGITNFANGKMHGRRFNIGLDWPFIAGRAEIWACANILAPIMLVEAILLSKVGNGILPLAGIIAMGVTPALLVVTRGRLIRMITFGTLLLPLFLLSGTMIAPFATELAKKVGAFPAGARAGSLITHSTLEGPMEKIFGYVIGKATTGQLSAIITLIIFATAYLGLFMWYAKQMKRRNAEYAANQK

SEQ ID NO: 8159 - protein, 134 aa, Streptococcus agalactiae
TTGGGGACAGGTCCAACTTCTCCCATGACTTCAACGCATATGAATTATATGATGAACCCCATTATTATGGTTTTGATAAGCTTTTTGATAAAGTTTTTCCAGGGCTAGATAAATATGACTTTGACGCGGCTAAA

SEQ ID NO: 8160 - protein, 45 aa, Streptococcus agalactiae
MGTGPTSPMTSTHMNYMMNPIIMVLDKLFDKVFPGLDKYDFDAAK

SEQ ID NO: 8161 - protein, 473 aa, Streptococcus agalactiae
ATGCAGGTATTTTTAAATATTGTCAATAAATTCTTTGATCCAATTATCCATATGGGTTCGGGAGTTGTGATGCTAATTGTCATGACAGGTTTAGCCATGATATTTGGAGTGAAGTTTTCTAAAGCACTTGAAGGTGGTATTAAGTTAGCTATTGCTCTTACGGGTATTGGTGCTATTATTGGTATTTTAACTGGTGCTTTTTCTGAATCACTTCAAGCTTTTGTTAAAAATACAGGAATCAATCTAAGCATTATTGACGTTGGTTGGGCTCCATTAGCAACTATTACATGGGGATCACCATATACGCTTTACTTCTTATTAATCATGCTTATTGTCAATATTGTTATGATGTTATGAAAAAAACGGATACCTTAGATGTTGATATTTTTGATATTTGGCATTTATCTATCACAGGCTTTTAATTATGTGGTATGCTAAAAAAAAATCTACCAACACTTATCTGTCATTTCATG

SEQ ID NO: 8162 - protein, 160 aa, Streptococcus agalactiae
  VARIANT 117: Xaa = Any Amino Acid
MQVFLNIVNKFFDPIIHMGSGVVMLIVMTGLAMIFGVKFSKALEGGIKLAIALTGIGAIIGILTGAFSESLQAFVKNTGINLSIIDVGWAPLATITWGSPYTLYFLLIMLIVNIVMXVMKKTDTLDVDIFDIWHLSITGLLIMWYAKKIIYQHFICHIAL

SEQ ID NO: 8163 - protein, 303 aa, Streptococcus agalactiae
ATGATCAAAATATTAGCAGCTTGTGGTGCAGGCGTAAACTCAAGTCATCAAATTAAAGATGCTATCGAGACACAATTAGGAGATAGAGGTTACAATGTACATTGTGATGCTGTTATGGTTAAGGATATCACTGAGGAAATGGTCAACAAATATGATATCTTTACTCCTATTGCTAAAACTGATTTAGGTTTTAATGTACCAATTCCAGTTGTAGAAGCAGGACCTATTCTTTATCGCATACCAGTTATGAGCGAACCGGTCTTTACTGCTTTAGAACAAGTTATCAAAGAACACAATCTATCA

SEQ ID NO: 8164 - protein, 101 aa, Streptococcus agalactiae; identical to SEQ ID NO: 3482

SEQ ID NO: 8165 - protein, 462 aa, Streptococcus agalactiae
GTGACTCAAGATATTTTATTTATTGATGCCCATTCTCAGGAAGAATTATTTGACTTAGTATCAAAAGCATTGATAAAACAACACTATGTTAGTCCTAACTACCGACAGGCAGTAAAAGAAAGGGAGAGAGAGTTTCCAACGGGGTTAAAAATTGATTTAAAAGATGGGACTCCTATTCAATATGTTGCTATTCCACACACTGAAACGCAGTATTGTCTAGTAGATAGAATCTTTTATGTCAAAAATAGTCAGCCAATTACTTTCAAACATATGATTAATCCAGAAGAGGAGTGTAGGGTTCAGGATTTTTTCTTCATCATTAATAGTAGGAATAGTAACCAAAGTGATATTTTATCTAATTTGATTACCTTCTTTATTACAAAAGGAAACCTAGATCGGCTACATGAGCTTGGCGACAATAAAGAAAAAATTAATCATTATTTAATAGAAAAAGGAGTGTTT

SEQ ID NO: 8166 - protein, 154 aa, Streptococcus agalactiae; identical to SEQ ID NO: 3484

SEQ ID NO: 8167 - protein, 774 aa, Streptococcus agalactiae
ATGTTAAAGCGAGAAAGATTACAAAAAATAATAGAAAAAGTCAATATAAATGGCATTGTCACTGTTAATGAAATCATGGAAGAACTTGATGTATCAGACATGACTGTTAGGCGTGACTTGGATGAATTAGATAAAGCAGGACTGTTAATACGCATCCATGGTGGTGCACAAAAAGTAAATGCATCACCAACTCCACAAAATTATGAAAAATCAAACACTGAAAAATACGATATTCAAACAAATGAAAAATTAGAAATTGCCCAATTTGCAAAACAATTCATCAATGATGGTGAAACAATCTTTATTGGGCCTGGAACAACCTTAGAGAAATTAGCCACGCAATTACTTGATTTTAAAATTAGGGTAGTAACCAATAGCCTTCCTGTTTTCAATATTCTGAATCAAAGTTCAACACTTGACCTTATCCTTGTAGGGGGAGAGTACAGAGAAATTACTGGTGCTTTTGTCGGTTCTGTTACTATTAACTCTATTAAATCACTTAATTTTTCAAAAGCTTTCGTTAGTAGTAATGGTGTTTTTGAAAAGTCTATCGCTACTTACGACGAGGGAGAAGGTGAAATTCAGCGCATTGCTCTTAATAATTCCTTTGAAAAATTCCTTTTAGTTGATAGCCAAAAATTTGGTAAATATGATTTTTATACTTTTTATCAATTAGACGATATTGATTTTGTATTAACAGATCATAATATTGATAATGTTGTTAAGGAGCAATACAGTAGCTTCACCAAAATTTTAACTAATAACAATTACATG

SEQ ID NO: 8168 - protein, 258 aa, Streptococcus agalactiae
MLKRERLQKIIEKVNINGIVTVNEIMEELDVSDMTVRRDLDELDKAGLLIRIHGGAQKVNASPTPQNYEKSNTEKYDIQTNEKLEIAQFAKQFINDGETIFIGPGTTLEKLATQLLDFKIRVVTNSLPVFNILNQSSTLDLILVGGEYREITGAFVGSVTINSIKSLNFSKAFVSSNGVFEKSIATYDEGEGEIQRIALNNSFEKFLLVDSQKFGKYDFYTFYQLDDIDFVLTDHNIDNVVKEQYSSFTKILTNNNYM

SEQ ID NO: 8169 - protein, 1137 aa, Streptococcus agalactiae
ATGACACATGAGCATTGGGTACCAAAGAAAGATTTATCAGAGTCGGAATTAAAAGCAGCTCAAGAATTTCTTTCAGGAAAATCTGAAGCAAATCAAGACAAACCAAAAACAGGTAAAACAGCTCAAGAAATCTATGAGGCAATTGAACCAAAAGCAATTGTTAAATCTGAAGATTTATTATTTGGAATTGCACAAGCGACAGACTATAAGAATGGTACATTTGTAATTCCTCATAAAGATCATTACCATTATGTGGAATTAAAATGGTTTGATGAAGAAAAAGATCTTTTAGCTGATTCAGATAAGACATATTCTTTAGAAGACTATTTAGCTACGGCTAAATATTACATGATGCACCCAGAAAAACGTCCTAAAGTTGAAGGATGGGGTAAAGATGCTGAAATTTATAAGGAAAAGGACTCTAATAAAGCAGATAAACCAAGTCCTGCACCAACTGATAATAAATCAACATCAAATTCTAGTGACAAAAACTTAAGTGCTGCAGAAGTATTCAAACAAGCAAAACCAGAAAAAATTGTACCGCTTGATAAAATTGCTGCTCACATGGCATATGCAGTTGGATTTGAAGATGATCAATTGATTGTTCCTCATCATGATCATTATCATAATGTTCCTATGGCATGGTTTGACAAGGGTGGTTTATGGAAAGCACCAGAAGGCTATACATTACAACAACTCTTCTCAACAATTAAATACTACATGGAACATCCTAATGAATTACCAAAAGAAAAAGGTTGGGGACACGACAGTGATCATAACAAAGGCTCAAATAAAGACAATAAAGCCAAAAATTATGCTCCAGATGAAGAACCTGAAGATTCAGGGAAAGTAACTCACAACTATGGTTTTTATGATGTTAATAAAGGTTCAGACGAAGAAGAACCAGAAAAACAAGAAGATGAATCAGAGCTAGATGAATATGAACTAGGAATGGCACAAAACGCTAAGAAATATGGTATGGATAGACAATCTTTTGAAAAGCAACTCATCCAATTATCAAATAAATATAGTGTAAGTTTTGAAAGCTTTAATTATATTAATGGTAGTCAAGTTCAAGTTACTAAAAAAGATGGCTCTAAAGTGCTTGTTGATATTAAAACACTAACAGAAGTGAAA

SEQ ID NO: 8170 - protein, 379 aa, Streptococcus agalactiae
MTHEHWVPKKDLSESELKAAQEFLSGKSEANQDKPKTGKTAQEIYEAIEPKAIVKSEDLLFGIAQATDYKNGTFVIPHKDHYHYVELKWFDEEKDLLADSDKTYSLEDYLATAKYYMMHPEKRPKVEGWGKDAEIYKEKDSNKADKPSPAPTDNKSTSNSSDKNLSAAEVFKQAKPEKIVPLDKIAAHMAYAVGFEDDQLIVPHHDHYHNVPMAWFDKGGLWKAPEGYTLQQLFSTIKYYMEHPNELPKEKGWGHDSDHNKGSNKDNKAKNYAPDEEPEDSGKVTHNYGFYDVNKGSDEEEPEKQEDESELDEYELGMAQNAKKYGMDRQSFEKQLIQLSNKYSVSFESFNYINGSQVQVTKKDGSKVLVDIKTLTEVK

SEQ ID NO: 8171 - protein, 1443 aa, Streptococcus agalactiae
ATGAATCGTAAAAAAACAGTTATTATTAGTGCTTTATCAGTAGCTCTATTTGGTACTGGTGTAGGTGCTTACCAATTAGGTAGCTATAATGCCCAAAAATCAGACAATAGTGTTTCTTATGTGAAAACAGATAAATCTGATAGCAAAGCACAAGCAACAGCTGTAAATAAAACGCCCGACCAAATCAGTAAAGAAGAAGGCATATCTGCAGAACAAATCGTTGTTAAAATTACTGACGACGGTTATGTGACTTCTCATGGAGACCATTACCATTATTACAATGGGAAAGTGCCATATGATGCCATCATTAGTGAAGAATTGATTATGAAAGACCCTAGCTATGTCTTTAATAAAGCTGATGTCATTAATGAAGTCAAAGATGGTTATATTATCAAAGTTAACGGTAAGTATTACCTCTATCTTAAAGAAGGTAGCAAACGAACAAATGTTCGTACAAAGGAACAAATCCAAAAGCAACGCGAAGAATGGTCTAAGGGTGGTTCTAAGGGAGAATCAGGAAAGCATAGTAGTGCAAAAACTCAAGCTTTATCAGCCAGCGTACGTGAAGCGAAAGCTAGCGGTCGCTATACTACAGATGATGGTTATGTTTTTAGTCCAACAGATGTCATTGATGACATGGGAGATGCCTTTTTAGTACCACATGGCGATCATTTCCATTATATCCCGAAAGCTGATTTATCTCCATCAGAGTTATCAGCCGCACAGGCATATTGGAACCGCAAGACTGGCCGATCAGGTAATAGCTCAAAACCATCAAATTCAAGTTCATACATTCATGCAAGTGCACCAAGCGGTAATGTATCAACAGGAAGACATGCTAATGCCCCTATTTCTATTCCAAGAGTCACTCACGCAAATCACTGGTCAAAACCAGCTGGTAATCATGCTACGGCACCAAAACACCATGCACCTACAACCAAACCAATCAACAAAGATTCTGCTTTAGACAAAATGTTGAAACGTTTATATGCTCAACCGTTATATGCTCGTCACGTAGAAAGTGATGGTTTGGTTTATGACCCAGCACAAGTTAATGCTTTCACAGCAATCGGTGTTTCTATTCCGCACGGTAATCATTTCCACTTTATTCACTATAAGGATATGTCTCCATTAGAGTTAGAAGCAACAAGGATGGTGGCAGAGCATAGAGGACATCATATTGATGCATTAGGGAAAAAAGATTCTACAGAGAAACCAAAGCATATTTCTCATGAACCTAATAAGGAACCTCACACAGAGGAAGAACACCATGCAGTAACACCGAAAGACCAACGTAAAGGCAAACCAAATAGCCAGATTGTCTACAGTGCTCAAGAAATTGAAGAGGCAAAAAAGCTGGTAAATACACAACATCTGATGGTTACATTTTTGATGCCAAAGATATTAAAAAAGATACAGGTACAGGTTATGTCATTCCACATA

SEQ ID NO: 8172 - protein, 481 aa, Streptococcus agalactiae; identical to SEQ ID NO: 3490

SEQ ID NO: 8173 - protein, 921 aa, Streptococcus agalactiae
ATGAAAAGGATACGGAAAAGCCTTATTTTTGTTCTCGGAGTAGTTACCCTAATTTGCTTATGTGCTTGTACTAAACAAAGCCAGCAAAAAAATGGCTTGTCAGTAGTGACTAGCTTTTATCCAGTATATTCCATTACAAAAGCAGTTTCTGGTGATTTGAATGATATTAAAATGATTCGATCACAGTCAGGTATTCATGGTTTTGAACCCTCATCAAGTGATGTTGCTGCCATTTATGATGCTGATCTATTTCTTTATCATTCGCACACACTAGAAGCTTGGGCGAGACGTTTGGAACCTAGTTTGCATCACTCTAAAGTATCTGTAATTGAAGCTTCAAAAGGTATGACTTTGGATAAAGTTCATGGCTTAGAAGATGTAGAGGCAGAAAAAGGAGTAGATGAGTCAACCTTGTATGACCCTCACACTTGGAATGACCCTGTAAAAGTATCTGAGGAAGCACAACTCATCGCTACACAATTAGCTAAAAAGGATCCTAAAAACGCTAAGGTTTATCAAAAAAATGCTGATCAATTTAGTGACAAGGCAATGGCTATTGCAGAGAAGTATAAGCCAAAATTTAAAGCTGCAAAGTCTAAATACTTTGTGACTTCACATACAGCATTCTCATACTTAGCTAAGCGATACGGATTGACTCAGTTAGGTATTGCAGGTGTCTCAACCGAGCAAGAACCTAGTGCTAAAAAATTAGCCGAAATTCAGGAGTTTGTGAAAACATATAAGGTTAAGACTATTTTTGTTGAAGAAGGAGTCTCACCTAAATTAGCTCAAGCAGTAGCTTCAGCTACTCGAGTTAAAATTGCAAGTTTAAGTCCTTTAGAAGCAGTTCCCAAAAACAATAAAGATTACTTAGAAAATTTGGAAACTAATCTTAAGGTACTTGTCAAATCGTTAAATCAA

SEQ ID NO: 8174 - protein, 307 aa, Streptococcus agalactiae; identical to SEQ ID NO: 3492

SEQ ID NO: 8175 - protein, 896 aa, Streptococcus agalactiae
TTGGAGGGATTTTTACTGAATGAACAAACTTGGTTACAGCATTTAAAAGAAAAACGCTTGGCTTATGGACTATCTCAAAACCGTTTAGCTGTTGCGACTGGTATTACAAGGCAGTATCTAAGCGATATTGAAACAGGAAAAGTCAAGCCATCAGAGGATTTACAGCAGTCCCTTTGGGAAGCTCTGGAACGCTTCAATCCCGACGCTCCCCTTGAAATGCTGTTTGATTATGTAAGAATTCGCTTTCCGACAACAGACGTACAGCAGGTGGTCGAAAACATCTTACAACTGAAACTGTCCTATTTTCTTCATGAGGACTATGGTTTCTATTCTTATTCAGAGCATTATGCTTTAGGCGACATATTCGTCCTTTGCTCCCATGAACTGGACAAAGGAGTTCTGGTGGAATTGAAAGGTCGTGGGTGCAGACAATTTGAAAGCTATCTTCTGGCACAACAAAGAAGCTGGTATGAGTTCTTTATGGACGTTTTGGTGGCTGGCGGTGTGATGAAACGCCTTGACCTTGCCATTAACGATAAGACAGGGATTTTAAATATCCCTGTACTCACTGAAAAGTGCCAACAGGAAGAATGTATCTCCGTCTTCCGCAGTTTTAAAAGCTATCGCAGTGGCGAACTGGTACGCAAAGAGGAAAAGGAATGTATGGGAAACACCCTCTATATCGGTTCATTACAAAGTGAAGTTTATTTCTGTATCTATGAAAAGGACTACGAGCAGTACAAGAAAAATGATATTCCCATTGAAGACGCAGAAGTAAAAAACCGTTTTGAGATTCGATTGAAAAATGAGCGTGCCTATTATGCAGTCCGTGATTTACTCGTCTATGACAATCCAGAGCATACCGCCTTTAAAATTATCAATCGGATATCCGTTTT

SEQ ID NO: 8176 - protein, 299 aa, Streptococcus agalactiae
  VARIANT 296: Xaa = Any Amino Acid
MEGFLLNEQTWLQHLKEKRLAYGLSQNRLAVATGITRQYLSDIETGKVKPSEDLQQSLWEALERFNPDAPLEMLFDYVRIRFPTTDVQQVVENILQLKLSYFLHEDYGFYSYSEHYALGDIFVLCSHELDKGVLVELKGRGCRQFESYLLAQQRSWYEFFMDVLVAGGVMKRLDLAINDKTGILNIPVLTEKCQQEECISVFRSFKSYRSGELVRKEEKECMGNTLYIGSLQSEVYFCIYEKDYEQYKKNDIPIEDAEVKNRFEIRLKNERAYYAVRDLLVYDNPEHTAFKIINRXIRF

SEQ ID NO: 8177 - protein, 1383 aa, Streptococcus agalactiae
ATGAAACAGCGTGGTAAAAGGATTCGCCCATCTGGTAAAGATTTAGTCTTTCATTTTACGATAGCGTCACTCCTGCCTGTTTTCCTGCTGGTTGTCGGACTGTTTCATGTGAAGACAATCCAGCAGATCAACTGGCAGGATTTTAACCTATCACAAGCAGATAAGATTGACATTCCCTATTTAATTATCAGTTTCAGTGTCGCAATTCTTATCTGCTTGCTGGTAGCGTTTGTATTCAAACGGGTTCGCTATGATACGGTTAAACAACTTTACCACCGTCAAAAACTGGCAAAGATGATACTTGAAAACAAGTGGTATGAATCTGAACAGGTCAAAACAGAGGGTTTCTTTAAAGATAGTGCTGGTCGTACAAAGGAAAAGATAACCTACTTCCCTAAAATGTATTATCGACTTAAAAATGGCTTGATACAGATACGGGTGGAAATCACGCTGGGAAAATATCAAGACCAACTCTTACACTTGGAAAAGAAATTAGAGAGTGGCTTGTACTGTGAGCTGACGGATAAAGAGTTAAAGGATTCCTATGTGGAATATACTTTGCTCTATGACACCATAGCCAGTCGTATTTCTATTGATGAAGTAGAAGCTAAAGATGGTAAACTTCGCTTAATGAAAAACGTATGGTGGGAATATGATAAGCTCCCTCATATGTTGATTGCTGGTGGTACAGGTGGCGGTAAAACTTACTTTATACTGACACTGATTGAAGCCTTGCTTCATACAGATTCAAAACTGTATATTCTTGACCCGAAAAATGCTGATCTTGCGGACTTAGGTTCTGTGATGGCAAATGTCTACTATAGAAAAGAAGACTTGCTTTCTTGCATTGAAACATTCTATGAAGAAATGATGAAACGTAGTGAGGAAATGAAGCAGATGAAGAACTATAAGACTGGCAAAAATTATGCTTACTTAGGTCTCCCGGCACACTTCTTAATCTTTGATGAATACGTCGCTTTCATGGAAATGCTGGGAACAAAAGAAAACACCGCAGTTATGAATAAGCTGAAACAGATTGTCATGTTAGGTCGTCAAGCTGGCTTCTTTCTAATACTGGCTTGTCAACGTCCAGACGCAAAATATTTAGGCGACGGAATCCGTGATCAGTTTAATTTCAGAGTGGCTTTAGGTCGTATGTCTGAAATGGGCTATGGCATGATGTTTGGCAGTGACGTACAAAAGGATTTCTTCTTAAAGCGAATCAAAGGTCGTGGCTATGTTGATGTAGGAACAAGTGTCATATCAGAGTTTTATACTCCCCTTGTACCAAAAGGATATGATTTCTTGGAGGAAATTAAAAAGTTATCCAACAGCAGACAGTCCACGCAGGCGACGTGCGAAGCGGAAGTCGCAGGTGTGGAC

SEQ ID NO: 8178 - protein, 461 aa, Streptococcus agalactiae
MKQRGKRIRPSGKDLVFHFTIASLLPVFLLVVGLFHVKTIQQINWQDFNLSQADKIDIPYLIISFSVAILICLLVAFVFKRVRYDTVKQLYHRQKLAKMILENKWYESEQVKTEGFFKDSAGRTKEKITYFPKMYYRLKNGLIQIRVEITLGKYQDQLLHLEKKLESGLYCELTDKELKDSYVEYTLLYDTIASRISIDEVEAKDGKLRLMKNVWWEYDKLPHMLIAGGTGGGKTYFILTLIEALLHTDSKLYILDPKNADLADLGSVMANVYYRKEDLLSCIETFYEEMMKRSEEMKQMKNYKTGKNYAYLGLPAHFLIFDEYVAFMEMLGTKENTAVMNKLKQIVMLGRQAGFFLILACQRPDAKYLGDGIRDQFNFRVALGRMSEMGYGMMFGSDVQKDFFLKRIKGRGYVDVGTSVISEFYTPLVPKGYDFLEEIKKLSNSRQSTQATCEAEVAGVD

SEQ ID NO: 8179 - protein, 384 aa, Streptococcus agalactiae
ATGATGAGATTAGCAAATGGCATTGTATTAGATAAAGACACGACTTTTGGAGAATTGAAATTCTCTGCTCTACGTCGTGAAGTGAGAATCCAAAATGAAGACGGGTCGGTTTCAGATGAAATCAAGGAACGTACCTATGACTTAAAATCCAAAGGACAAGGACGCATGATTCAAGTAAGTATTCCTGCCAGCGTGCCTTTGAAAGAGTTTGATTATAACGCACGGGTGGAACTTATCAATCCCATTGCGGACACCGTTGCTACTGCCACCTATCAAGGAGCAGATGTTGACTGGTATATCAAGGCAGACGATATTGTGCTGACAAAGGATTCTAGTTCATTCAAAGCTCAACCACAAGCAAAGAAAGAACCGACACAAGACAAA

SEQ ID NO: 8180 - protein, 128 aa, Streptococcus agalactiae
MMRLANGIVLDKDTTFGELKFSALRREVRIQNEDGSVSDEIKERTYDLKSKGQGRMIQVSIPASVPLKEFDYNARVELINPIADTVATATYQGADVDWYIKADDIVLTKDSSSFKAQPQAKKEPTQDK

SEQ ID NO: 8181 - protein, 312 aa, Streptococcus agalactiae
ATGGAACTTAAATTTGTGATTCCCAACATGGAAAAAACATTCGGCAATTTAGAATTTGCTGGCGAGGATAAAGTCGTTCAGCGAAGAATCAACGGACGGCTAACTGTCTTATCAAGAAGCTATAATCTCTATTCTGATGTTCAAAGAGCAGATGATATTGTGGTGGTGCTTCCTGCTGAAGCTGGCGAAAAACATTTCGGCTTTGAGGAACGTGTGAAGTTAGTCAATCCACGTATTACCGCAGAGGGCTACAAAATCGGCACTCGTGGTTTTACAAATTACCTTTTACATGCTGACGACATGATAAAAGAA

SEQ ID NO: 8182 - protein, 104 aa, Streptococcus agalactiae
MELKFVIPNMEKTFGNLEFAGEDKVVQRRINGRLTVLSRSYNLYSDVQRADDIVVVLPAEAGEKHFGFEERVKLVNPRITAEGYKIGTRGFTNYLLHADDMIKE

SEQ ID NO: 8183 - protein, 2400 aa, Streptococcus agalactiae
ATGTCAAAACATTATTTTTCAAAAAGCGTATTCGCTTTAACTGTCTTAACAGCTACAGCAACAAGTGGTTTAGCTGTTCAAGCAGAAGACATTGTTACAACACCAAGTTCAACCTCTACAAAGGTTGAATCAACTACCCCCACTAGCACAATTGCAGAGGAAAAGTCAAACGTTACTTCTACTCCAACTGCAATAACTGATGCTTCAACAGCCACAAGCACAAATACCACTACCAATAACCAAAATCCACAGCCTGTTGCCACAGAAGCCACAACTAGTGATCTCAAACCTATTGAAGGTGAAAAAGTTGACCTTCGCATCATGTCAACCACAGACCTACACACCAATTTAGTTAACTATGATTATTATCAAGATAAAGAATCTCAAAAAATAGGGTTAGCAAAAACTGCTGTCCTTATTGAAGAAGCAAAAAAAGAAAATCCTAATACCGTCTTAGTTGATAACGGAGATGTCATTCAAGGGACACCTTTAGGAACTTATAAAGCAATCGTTAAACCTGTCGCAGAAAATGAAGAACATCCTATGTACCAAGCCATGAATGCTCTTGGTTATGATGCATCAACACTAGGTAATCATGAGTTTAATTACGGTTTAGATTACCTCAAAAAAATCATTGCTACAGCCAACCTTCCAATCCTCAACGCAAATGTTTTGGATTTCAAAACACATCAACCAGTTTTTAAAACTTATGACATCATTACTAAAACCTTCAAAGATTCAACAGGAAGAGCTGTTGCACTAAATATTGGGATTACAGGAATTGTACCTCCTCAAATCTTAAACTGGGACAAGGCTAACCTAGAGGGAAAGGTTATTGTCAAAGATTCAGTTAAAGCAATCGAAGAAATCGTTCCTACTATGCGTGCTAAAGGAGCAGATGTCATTCTCGTTTTATCACACTCTGGCATTGGAGATGATCGATATGAAGAAGGTGAAGAAAACGTTGGCTATCAAATTGCCAGCATCAAGGGAGTGGATGCCGTTGTTACGGGACACTCACACGCTGAATTTCCATCAGGTAACGGTACTGGCTTCTATGAAAAATACACTGGAGTTGATGGTATCAATGGAAAAATAAATGGAACACCTGTTACAATGGCAGGCAAGTACGGGGATCATCTTGGTATTATTGATTTAGGACTTAGTTATACTAATGGAAAATGGCAAGTCTCCGAAAGTAGTGCTAAAATCCGTAAAATTGATATGAACTCAACAACTGCTGACGAGCGTATCATTGCATTGGCTAAGGAAGCACACGATGGCACTATCAACTATGTTCGCCAACAAGTAGGTACAACAACTGCGCCAATTACAAGTTACTTTGCACTAGTTAAAGATGACCCTTCAGTTCAAATTGTTAACAACGCTCAACGTTGGTACGTTGCAAATGAATTGAAAGGAACACCTGAGGCAAATTTACCACTTCTATCTGCTGCAGCACCATTTAAAGCTGGAACACGCGGCGATGCTACCGCATATACTGATATTCCAGCTGGACCTGTTGCAATTAAAAACGTAGCTGATCTTTACCTTTATGATAATGTTACTGCACTTTTAAAAGTGACCGGAGCAGACTTACGTGAATGGTTAGAAATGTCCGCTGGTCAATTTAACCAAATTGACCCTAACAATAAAGCACCACAAAATATTATCAATACCGAATATCGTACCTATAATTTTGACGTTATTGACGGCTTGACTTATAAATTTGATATTACACAACCTAATAAATACAATAAAGATGGAAAAGTTGTTAATAGTCAAGCTAGTCGAGTACGCGATTTAATGTACAATGGTAAGCCTGTTGCAGACAAACAAGAGTTTATGATTGTGACCAATAACTACCGTGCTAGTGGTACCTTCCCTGGGGCTAAAAATGCCACAATGAACCGTTTGCTGAACTTAGAAAATCGCCAAACTATTATCAACTATATTATTTCAGAGAAAACCATCAATCCTACAGCTGATAATAACTGGGGCTTCACAGAGTCTATTAAAGACCTTGATTTACGATTCCAAACAGCCGATAAAGCTAAAAATCTTGTTACTAATAGCAAGGATATTCAGTATATCGCTAGTTCTACCAAAGATGAAGGATTTGGTGATTATCGATTTGTCTATACTGAACAAGAAAAAGTAGACCTTACTGAGCCATCACATCAAGAAAAGTTAAGCCAAATAGAAAAACAAAAAATTCACCACATGGTTGCAACTGCTTATACAAAAGCAAAAGCTTCTCCAAATATTACAGGCACTGTCTATACACAACAGAAAGAAAAAACATTACCTAAAACTGGACAAGAAAAACAATCTTATCTGGCTTTCTTTGGTGTCGCAATACTTGGACTCGTGGGAAGTTTACTTAAAAAGAAACAAATA

SEQ ID NO: 8184 - protein, 800 aa, Streptococcus agalactiae; identical to SEQ ID NO: 3500

SEQ ID NO: 8185 - protein, 453 aa, Streptococcus agalactiae
ATGCCTAAATTAACCCTAGTCTATATCAGTCTTAGCGGCAATACTCAAAGCTTTGTCAAACGTCTTAGTGAACAACTGTCAACTTGGCATAACTGTCAGGTTTCGACTATTAATATCAAGGAACAAAATCATCAAACCTTTCCTGTTGACCAACCTTTCGTAGCACTATTACCCACTTACCTTGAGGGAGGAAATGGCATTGACAATGGCGATCAAGAAATTCTTACCATTCCACTTGGTGATTTTATAGCTGCACACAATAATGTCAAAAATTGTATCGGAATTGTTGGCTCTGGAAATAGAAATTTTAACAATCAGTACTGTTTAACTGCAAAACAATACTCTGAACGGTTTGGATTTCCTATGTTAGGAGACTTTGAATTGCGAGGAACTTCTAGCGACGTTGAACGTATCGCAAATATTATCGTTGAAACATTATCGAACTTTAAAGCC

SEQ ID NO: 8186 - protein, 151 aa, Streptococcus agalactiae; identical to SEQ ID NO: 3502

SEQ ID NO: 8187 - protein, 1035 aa, Streptococcus agalactiae
ATGGAAACAACATTAAACTACATTAAAACCCTGACATCAATCCCTTCACCAACAGGGTTTACCCAAACAATCATGACCTATATCATCAAAGAATTGGAAGCGTTTGGCTACTCACCAATTCGCACAAACAAGGGAGGCGTCATGGTTTCTCTAAAAGGAAAAAATGATACTAAACATCGCATGATAACTGCTCACCTTGATACACTTGGTGCTATGGTTAGGGCCATCAAACCAGATGGTCGGTTAAAAATTGACCTTATTGGTGGATATACATACAATGCCATTGAAGGAGAAAACTGTACTATACACCTCTCAAAAAATGGTAAAGAAATTTCTGGAACTGCTCTTATTCATCAAACTAGTGTCCATGTTTACAAAGACGCTGGAACTGCTGAACGTAATCAAACAAATATGGAAATTCGTTTAGATGAGAAAGTAACAACTGCTGACGAAACACGTGCTTTAGGCATCCAGGTCGGTGATTTCATTTCATTTGATCCGCGTACAATCATAACAGACAGCGGCTTTATTAAATCACGTTACCTAGATGACAAGGTATCCGCTGGTATCCTAATGGAACTTCTTTCTGTTTACAAGAAAGAAGACATTCAACTTCCTTATACTACTCATTTCTACTTTAGTGCCTTTGAAGAGCTAGGACATGGAGCAAATTCAAGCATCCCAAATGAAACTGTAGAATATCTAGCAGTTGATATGGGAGCTATGGGAGACGATCAAGAAACTGACGAATATACTGTCTCTATCTGTGTTAAAGATGCTTCTGGTCCTTATCATTATGAATTACGTCAACATCTTGTTTCTCTAGCTGAAAACAATAATATTCCTTATAAACTTGATATTTATCCTTATTATGGTAGTGACGCCTCCGCTGCCATGCGTGCTGGTGCGGAAGTTAAACACGCGCTACTTGGTGCAGGTATTGAATCTAGTCATTCTTATGAACGTACCCATATCGATTCTATTCAAGCAACTGAACTCTTAGTGGATGCCTATCTCAAAAGCAATATGGTGGAC

SEQ ID NO: 8188 - protein, 345 aa, Streptococcus agalactiae; identical to SEQ ID NO: 3504

SEQ ID NO: 8189 - protein, 495 aa, Streptococcus agalactiae
ATGGTAGCCACGCTCATTATTATCAGGGGAAATTCAGCTAGCGGAAAGTCTACAATAGCTAAGCAACTTCAAGCCGAATTAGGGGAAAATACCCTTCTCTTATCTCAGGATTACCTTCGTAGAGAGATGTTAGGAACTAAGGATGGTGAAAATACTACTACCATTCCCCTTTTGATCAATTTACTAAATTATGGTTACCATAACTGTTCCTACATCATCCTTGAAGGCATACTTCGTTCTGATTGGTATACGCCTGTTTGGAAACATATTTTAAAACATAACCCCAACAATACTTATGCTTATTACTATGATTTAAGCTTTCAAGAAACTGTTAAAAGACATTCAACTCGACTTAAATCTTTAGAATTTGGAGAAGATTCTCTTGCAAGATGGTGGCTTGAGAAAGATTTCTTAAAAGAGATACCTGAAAAAATATTAACAAAAGCTATGAGTTTAGAGGATGTCAAAAAACTTATAATGACCGACGTTTTACCT

SEQ ID NO: 8190 - protein, 165 aa, Streptococcus agalactiae; identical to SEQ ID NO: 3506

SEQ ID NO: 8191 - protein, 1035 aa, Streptococcus agalactiae
ATGAAAGAAAAACAGTCGAAAAGGCTTATTTATATACTACTGGTTGTTTCCATTATTTTTATAAGTGTTTTTACATACAGTATTAGCCAGCCTTCTAAACTACTTCCACCAAAAGAATTAGTTATTCTAAGTCCAAATAGTCAAGCCATTTTAACAGGAACGATTCCAGCTTTTGAGGAAAAATACGGTATAAAAGTTAAGCTTATTCAAGGTGGGACAGGGCAACTAATAGATAGATTAAGTAAGGAGGGTAAGCAGTTGAAGGCGGATATTTTCTTTGGAGGAAATTATACGCAATTTGAAAGTCATAAGGCATTGTTTGAGTCTTACGTATCAAAGAATGTTCATACTGTTATTCCAGACTATATCCATCCAAGTGATACGGCGACACCTTATACTATAAATGGGAGTGTCTTGATTGTAAATAACGAATTAGCTAAGGGACTTACCATCAAGAGTTATGAAGATTTATTACAGCCTTCCTTAAAAGGTAAAATTGCCTTTGCAGATCCGAATACTTCCTCTAGTGCTTTCTCACAACTCACTAATATACTCTTGGCCAAGGGTGGTTACACCAATCCAAAAGCGTGGAACTATGTTAAAAAGCTACAACATAATATTAATGCTATCAAATCTTCTAGCTCTTCAGAAGTTTATCAATCAGTTGCAGAAGGAAAAATGATTGTGGGGCTGACTTACGAAGACCCTAGTGTCAATTTGCAAAAAAGTGGTGCCAATGTTTCTATTGTATATCCGACAGAAGGGACAGTTTTTGTCCCATCTTCGGTTGCAATTATAAAGAATGCTCCTTCTATGAAAGAAGCAAAGTTATTTATTAATTTTATGCTTTCTTTAGATGTTCAAAATGCCTTTGGGCAGTCAACGAGTAACCGACCTATTCGTAAAGATGCCCAAACGAGTAATGGCATGAAAGCTTTAAAGGATATTGCTACTCTTAAAGAAGATTATCGCTATGTCACTAAGCATAAGGGCCAAATCCTTAAAACCTATAATCGTATTCGTAGAAATGCTGAT

SEQ ID NO: 8192 - protein, 345 aa, Streptococcus agalactiae; identical to SEQ ID NO: 3508

SEQ ID NO: 8193 - protein, 771 aa, Streptococcus agalactiae
ATGTATAGATTACTTATCGTTGAGGATGAGCACCTTATTCGTAAGTGGTTACGCTATGCTATTGATTATCAATCATTGAATATTTTAGTGGTTGGTGAAGCAAAAGATGGTAAAGAAGGAGCTCAATTAATTCAGGAAGAGCAGCCAGACATTGTTTTAAGTGATATTAATATGCCAATTATGACAGCATTCGATATGTTTGAGGCAACCAAAGGACAATCTTATGCCAAAATTATTTTATCTGGCTATGCTGATTTTCCAAATGCGCAATCAGCTATTCACTATGGCGTTCTTGAATTTTTAACAAAACCACTAGAAAAGCAAGCTTTGATTGATTGTTTAAAAACAATTATGGCTAGAATTGAGGAACATAAGGAGAAGCACCTACAAGAGCATACAGAATTGTATTTACCTCTACCACAAGCTAATGACCAAGTTCCTGAAGTTATTAAAGATATGCTAGCATGGATTCATAGCCATTTTCATGGGAAAATTGTGATTAGCCAGTTAGCTCACGATTTAGGTTACAGTGAAAGTTATCTTTACACAGTCACTAAAAAGCACCTTCATATAACTTTGAGTGATTATATAAATCAATATCGTATTAATCAAGCCATTCAGTTGATGTTTAGAGAACCAGACCTAATGGTTTACCAAATTGCAGAAGCTGTTGGTATTTATGATTATCGTTATTTTGATAGGGTTTTTAAAAAGTACTTGGGTCAGACAGTAAAAGCGTTTAAGGAAGAACATATTTTTAAACAAATGGAT

SEQ ID NO: 8194 - protein, 257 aa, Streptococcus agalactiae; identical to SEQ ID NO: 3510

SEQ ID NO: 8195 - protein, 1647 aa, Streptococcus agalactiae
ATGAGAGGATATAGAATGGAAGAACGCTTTAAGAAACGACTACAAGATGATATCTCTAAACATTTTTCCCGCCAGTCTTTAATTTTATCCTTGTTATTGATTGCACTTTTCGTCCTTTTTTCTTTAGCGCCTCAACAGATAGGTCTTTATAAAGATGTTAATTCAGTTTCCTATAGTTATAAGCAATTGATTCAAAAACATGATACCTTATTAGATGACTTAGGTAAAAATAGTTTGAAACCATTTGTCTCAGGACACTTAGGAAGTGCTGATTTGAGTAAGCAATATTATCATTTAAGGAATCATTTACAAAGTCAAACAGAACTTTTAGTATTCTCACCTAATCAAGAACTTTTGTTTGCTAGTAATTCACATTTAGGTAATTTTTTTAGTAAGTCTATTTACATTAGTGAAGTTTTAGATAAGGCTAAAATAAATCAAAGGCTACTAAAAATTATTGTGGATAGTGAGGGAGGGCATTACCTTGCACTCATTAAGCCAATTATAGTTAATAAAAAAGTTTCAGGTTATGCCTTTTTATTGATGAATGGGAAAGACTTTTTACTTCCAACGAAGGCTATTAACTCAGACTTGATTATTGCCGATCAGCTAAATAATAGCTTTACTTTTACTAATCGTGATTTTATCTCCTCTAGTTTAGATAAGGTAGATAGTCAATTCTTAACTAGATATTTTAGTTTTCACGATCATCGAGCTTTTGTTGTTAGGAAAGTAGCTCTGCAAGACAATATCCTACTTTACATGTATCGTCCCCTGATACCAGTAACTCTGGTCGTCCTTTTTTCTCTAGTATCATCAGTTATTATTTTTGTGATTTTACGACAAAAATCTAGAGTTCTAGCCGATCGCATCGCAGTAAAAAATTCTAGCGCCATAAATCAAATGGTGCTAGATATGGATGCCATTTCCCGCCAAGAAAAATCTAGTATTGAGCTTGATAGTCAAGATGAATTTCAATATCTATCTGTGCAAATCAATCAGATGGTTTCACAGTTAAAAGATTTACATGAGAAAACTCTTGATTTGGAAACACAAAAGTTGTTGTTTGAAAAGAGGATGTTAGAAGCTCAGTTTAATCCTCACTTCCTTTATAATACCCTTGAGACAATTTTAATAACCAGTCACTATGATTCACAATTAACAGAAAGAATCGTTATACAACTAACAAAATTATTGCGCTATAGCCTTAGTGGTAGCACAGAAGCAGCTGTGCTTAAGGATGATTTAGCAATCATTGAATCCTACCTTTTGATTAATCAAGTGAGATTTGAAGAATTAACTTACACTATTTCAGTATCTCCTGAACTTGAACACATGCGTGTACCAAAACTTTTCTTGTTACCGCTAATTGAGAATGCTATTAAATATGGCTTAAAAGAACGTCATGATGTAGCAATAAACATAGATATTTGGCAAGATAGTGATGGAATTTGGTTTACTGTTTCAAATAATGGATCAGGTATTAGTTTGGCTAGGCAACAAGCCATACGTACAATGTTAAGATCAACTCACTCGCATCATGGGCTTATTAATTCTTATAGACGATTACAATATCAATTTTCAACAGTATTGTTAGAGTTTACGAAGACAGATGATGCTTTTCGAGTTAGCTATATAGTAAAGGAG

SEQ ID NO: 8196 - protein, 549 aa, Streptococcus agalactiae
MRGYRMEERFKKRLQDDISKHFSRQSLILSLLLIALFVLFSLAPQQIGLYKDVNSVSYSYKQLIQKHDTLLDDLGKNSLKPFVSGHLGSADLSKQYYHLRNHLQSQTELLVFSPNQELLFASNSHLGNFFSKSIYISEVLDKAKINQRLLKIIVDSEGGHYLALIKPIIVNKKVSGYAFLLMNGKDFLLPTKAINSDLIIADQLNNSFTFTNRDFISSSLDKVDSQFLTRYFSFHDHRAFVVRKVALQDNILLYMYRPLIPVTLVVLFSLVSSVIIFVILRQKSRVLADRIAVKNSSAINQMVLDMDAISRQEKSSIELDSQDEFQYLSVQINQMVSQLKDLHEKTLDLETQKLLFEKRMLEAQFNPHFLYNTLETILITSHYDSQLTERIVIQLTKLLRYSLSGSTEAAVLKDDLAIIESYLLINQVRFEELTYTISVSPELEHMRVPKLFLLPLIENAIKYGLKERHDVAINIDIWQDSDGIWFTVSNNGSGISLARQQAIRTMLRSTHSHHGLINSYRRLQYQFSTVLLEFTKTDDAFRVSYIVKE

SEQ ID NO: 8197 - protein, 825 aa, Streptococcus agalactiae
ATGAAATCACAGGATAATTTGACTAAAGAAGACCGTAAAATGCTTCGCTCAGTCTTCTGGCGCTCATGGACGATGAATGCCAGTCGTACTGGGGCAACACAATACCACGCAGTAGGAGTTATTTATACTTTACTACCAGTCATCAATCGTTTTTATAAGACTGATAAGGATAAAGCAGAGGCACTGGTCCGTCATACAACATGGTTTAATGCCACCATGCACATTAATAATTTTATTATGGGTCTTGTTGCATCTATGGAAAAGAAAAACAGTGAAGATCCTGATTTTGACGCTAGTGCTATCACCGCAGTTAAGGCTTCTTTGATGGGACCTATATCTGGTGTTGGTGATTCATTCTTTTGGGGAATTCTAAGGGTTATTGCGGCAGGTATCGGTATCTCCTTAGCAAGTACAGGCTCAGCCATGGGAGCTGTTGTCTTTCTACTCTTGTATAACATTCCAGCTTTTCTGATTCATTATTATAGTCTCTATGGAGGTTACTCTGTAGGTGCAGGGTTTATCAAAAAATTGTATGAATCAGGTGGTATTAAAATTGTTACTAAGACTTCAAGTATGCTTGGTTTAATGATGGTAGGCTCAATGACTGCTTCAAATGTTAAATTCAAGACAATCTTAACGGTAGCAGCTAAAGGAGCTAAGGAAGCAGCTTCCATACAAAGTTACCTTGACCAATTATTTGTTGGCGTAGTGCCACTGTTGGTAACGATATTAGCCTTCTGGCTTCTACGTAAAAAAGTCAATATCAACTGGATCATGTTTGGTATTATGGTGTTAGGTATTGTACTTGGTCTCTTAGGTATTTGC

SEQ ID NO: 8198 - protein, 275 aa, Streptococcus agalactiae; identical to SEQ ID NO: 3514

SEQ ID NO: 8199 - protein, 807 aa, Streptococcus agalactiae
ATGATAATGCCAGCGACGATGGCAGCTTTAGCTGTATTGATTTGTTTTGGGGGAAATTACTTAACAGGTCAAAGTATGATGGAGAGACCACTTGTAGTTGGTCTTGTAACAGGAATGCTACTAGGTGATATTAAGGTTGGTATCCTAATGGGAGCCTCCCTAGAAGCGCTATTTTTGGGAAACGTTAATATTGGGGGTGTTATTGCCGCAGAGCCAGTAACAGCAACAGCGATGGCAACAACTTTTACCATTATTTCAAACATTGATCAAAAAGCAGCAATGACTCTAGCTGTTCCGATTGGAATGTTGGCAGCATTTGTTGTTATGTTTTTGAAAAACGTCTTCATGAATATCTTTGCACCGATGGTGGATAAAGCTGCAGCCGCAAACCATCAAGGTAAACTTGTGATGCTTCACTATGGTACATGGATTATTTACTATCTCATTATCGCTTCTATTTCTTTCATTGGTATTTTAGTAGGTAGTGGGCCTGTTAATAGTTTTGTCCATCATATTCCTCAAAACCTGATGAATGGTTTGAGTGCGGCGGGAGGCCTCCTTCCAGCTGTTGGTTTTGCCATGCTGATGAAATTATTATGGACAAATAAATTAGCTGTTTTTTACTTGCTTGGTTTTGTTTTAACAGCTTATTTAAAATTACCAGCGGTTGCAGTTGCTGCCCTAGGAGCAGTTATTTGCGTCATTAGTTCACAACGTGATATAGAATTAGACGCAATTACTAGAGGTGCGATCAGTAAACAGACAACCTTTGACTCTAAAGAATCAGAAGAGGAGGACTTCTTCGCA

SEQ ID NO: 8200 - protein, 269 aa, Streptococcus agalactiae; identical to SEQ ID NO: 3516

SEQ ID NO: 8201 - protein, 489 aa, Streptococcus agalactiae
ATGATTACTCAAATTCGTGTTGACGACCGTTTGATTCACGGGCAAGTGGCAGTTGTATGGACTAAAGAATTAAATGCACCACTTTTAGTGGTGGCTAATGATGAAGCTGCAAAAAATGAAATCACACAGATGACTCTTAAAATGGCTGTGCCTAATGGCATGAAATTATTAATCCGTTCAGTTGAAGAATCAATAGCTCTATTTAAAGATCCACGTGCAACTGACAAGCGCATTTTTGTGATTGTCAATTCTGTTAAAGATGCCTGTACAATTGCTAAAAATATAACCGATTTAGAAGCAGTAAACGTCGCTAATGTAGGACGCTTTGATAAGTCTGATCCAGCTACAAAAGTCAAACTAACATCAAGTCTCTTATTAAATACAGAAGAGTTGGAAGCCGCAAAAGAATTAGCCAGCTTACCAGATTTAGACGTCTTTAACCAAGTATTGCCTTCAAATACTAAGGTTAACTTGAGTCAGTTAGTCAAA

SEQ ID NO: 8202 - protein, 163 aa, Streptococcus agalactiae; identical to SEQ ID NO: 3518

SEQ ID NO: 8203 - protein, 423 aa, Streptococcus agalactiae
ATGAAGCGGAAATTCCTAATCGGCAGTCACGGAAAACTTGCGAGTGGGTTGCAGAGTTCTATTGATATTCTGACAGGCAAGGGACAAGAGATTCAGACAATAGATGCTTACATTGATGATAGTGACTATACTAAGTCTATTGTAGAATTTATTGATGAGATTGCACCAGATGAACAGGGGCTTATTTTTACAGATTTGTTAGGTGGCAGCGTTAATCAGAAAATGGCGACTGCTGTAATGAATAGTGGGAAAAATAATATTTTTTTAATAACGAACAGCAATTTAGCGACCTTGTTGTCATTACTATTTTTGAAACCTGAAGAGGAATTAACTAAAGAAGAAATTGTAACCGTTATCAATGAATCTCAAGTGCAGCTGGTAGATCTTAGCTTTAAAGCGGGTTCAGAAGATGACTTTTTCGAT

SEQ ID NO: 8204 - protein, 141 aa, Streptococcus agalactiae; identical to SEQ ID NO: 3520

SEQ ID NO: 8205 - protein, 1050 aa, Streptococcus agalactiae
ATGAAGAGAAGTCAGTGCGTGGATAATAAGCAGCATAATACATCAATGATTAGTTTGCTACAATACCTTTTTTCCATACTGGTCATTTTAGTTCATAGTGGGAGGTTATTTAGTCAGGATGTCATTCATTTTACCTTTAAAAGTTTCCTAGGTCGGATGGCTGTTCCTTATTTTTTGATTTGTACTGCTTTCTTTTTGAGAGGTCGTATACAGCAAGGTTTGTGTAATCACTCCTACTTTCGTAAACTGATTAAAAAGTATAGCATGTGGACTATCATTTATTTGCCTTATGGTTATTTCTTTTTTGAATCTCTAAATATAGCGAAGATCTATTTGTTGCCGGGGTTTATTGTGGCATTTTTGTATTTAGGTATGTCACATACCCTTTGGTACATCCCTGCTGTTATTCTAGGTTGGGTCATTATTCAAGGATTATTGAAGTATGTAGGAACTAGGGGGACATTTATCACAGTTGTTGTACTCTATTGTATTGGAGCAGTAGAGACCTATTCTGTCTTTATACAGTCAACAAAATTTTATCCCCTGATGTCCACTTATATGTCAATTTTTCAGACAACACGAAACGGATTATTTTACACTCCAGTTTATCTTCTAGCAGGATATTTACTCTATGATTATTTTAATACTGACCTATTTACCAAATCGCGTGGTCTTAAGTATATTCTCTTCCTTTTACTTCTAGCTTTAGAGAATGTTCTTATTTATTTTAATCAAGGGTTGGATAAAAATTTCTTCTTATTAGCTCCTTTATGTGCAGTATTCTTATTTAACTGGAGTATACGTACATCACTGTTTAAGGAATATCGTTTAAGTCCTTTAAAACAGTTGAGTGTCTATTATTTCTTCCTTCCCCCTCTTTTTATTGGCATAGTGTCTTACTGTTTAAAATCAACTTCCTTAGTTGCACACCATCAAGGAAAAGTGATTTTTGTGGTGACCTTGGCATTAACACATGCTTGTGCTCTACTCATAATAAAGGTTGTTAATAAGATACCCTATCAAAAAATTATTCCATTATCTCTTTCGAAA

SEQ ID NO: 8206 - protein, 350 aa, Streptococcus agalactiae; identical to SEQ ID NO: 3522

SEQ ID NO: 8207 - protein, 180 aa, Streptococcus agalactiae
ATGATACCAATCTCTTCAGAAGAATATCTCAATTATCCCAAAAAGTCATTGAAACGCCTTAAATGGTATCTGATAATTATTGTTAATACCTTATCAACCATATTAGGAAATAAAAAAGCTGATTTCGCAAAAGAAAATCAGCTTAGAATAATTTCTTGTTCAGATAACCAGTGGGAACTA

SEQ ID NO: 8208 - protein, 60 aa, Streptococcus agalactiae
MIPISSEEYLNYPKKSLKRLKWYLIIIVNTLSTILGNKKADFAKENQLRIISCSDNQWEL

SEQ ID NO: 8209 - protein, 1152 aa, Streptococcus agalactiae
ATGATATCAATTTTTCCTTTTGAATTAAAAAAACTTCTACAACGTAAGGCAGCATTTGGGGCTTTTATTATCTTCCTTCTTGCTATTTTTGGTCTATTTTACCAGCATTTTTTTGTTGGGCAAATTAGTGGCTATTCTGCAGATAAAATACATGGTCGAGAAGCGGTTGCCATTAATCGTAGAATAGCTGAAAAATATTCAGGGGATTTATCTGAAGAACGAGTAACAAATATTATTAAAAACTATGTTAATCCGCCAGCAGGACGCCCCCCTATATTTGATGTTTTTAGTTATTATGTGGCAGACACTTTTGATCGTGATTTTTTAATTTACTATAACCAATTGAAAGATGATAAAACAATTGATTTTAATAAAATAAATATTAAAGATCAAAAACAGTTGGGTTCTGCGCTACCACTAAAACAACTAAAGCTAGGTAACTTTGCTCCTTGGAATCAACTTTTCGAAGTAAGTAATAGTACTTATATTTTAATTGTCTTATTTACTCTATTCTTATCAGCTCCTCTTTTTTCAGGAGATAGGGCTAAGAAGATTAATCCTATACTACTGACGACTCGGTATGGACGTGGTCAGTTGACCTGGGCTAAGTTAGCTAGTACAATGACCATCGGTATTTCCACATTTATCCTAGCATATGCCCTCATTCTGACGGTATTTGCAGATTATTTTGGTTTTAGTGGTTGGGAGACAAGCGTTCAACTGAATTTATACTGGACATCACCTTTGGCTAATATTATGGGATTTCCTGTACCTATGACAATATCAACTGCTTTTGTTCATATTATTGTCTTACAATTTGTTGGACTCCTTTTTATAGCCAGTCTTAATTTCTTTATATCAAGTATCACAAATTCGCCATTAACATCTTTTGCTGTTTCAACGCTTGCCTTTTTTGCTCCTAGCTTTTTAATGGCTATGTTTAATAAAGGTGTGATAAACAAGTTATTAACTATTTTCTCAGTATCAACGACAGACACTTCAGCTTCACTTTTAAAATTATCACGTAATGGTAGTCATGGCTTTTTCTTTGATAGTTTTTCTGCTAATGAAATCTGTCTGATTAGTCTACGTATGTTAATTGCAGTGTTATTGATAGCCTATACCTATCGTTTAATGCGACGAAGAAGTTTA

SEQ ID NO: 8210 - protein, 384 aa, Streptococcus agalactiae
MISIFPFELKKLLQRKAAFGAFIIFLLAIFGLFYQHFFVGQISGYSADKIHGREAVAINRRIAEKYSGDLSEERVTNIIKNYVNPPAGRPPIFDVFSYYVADTFDRDFLIYYNQLKDDKTIDFNKINIKDQKQLGSALPLKQLKLGNFAPWNQLFEVSNSTYILIVLFTLFLSAPLFSGDRAKKINPILLTTRYGRGQLTWAKLASTMTIGISTFILAYALILTVFADYFGFSGWETSVQLNLYWTSPLANIMGFPVPMTISTAFVHIIVLQFVGLLFIASLNFFISSITNSPLTSFAVSTLAFFAPSFLMAMFNKGVINKLLTIFSVSTTDTSASLLKLSRNGSHGFFFDSFSANEICLISLRMLIAVLLIAYTYRLMRRRSL

SEQ ID NO: 8211 - protein, 846 aa, Streptococcus agalactiae
ATGTTATTACAGCTAGATAATATCACTAAAAGCTACGGAAAAAAAATAGTACTTAACCAGATTTCCTACCAGTTTACTCCTGGTTTGTATGGACTCTTAGGAGCAAATGGTACTGGCAAAACAACCTTATTAAATTTGATGAGCCACTTTACATTCGCAGATAGTGGGAATATTTATTGGAATGGACAGGAGCAGTCGGAAGAATTTTATCGTCACATTGGTTTTTTACCGCAACATTTTCGCTATTATGATCAATTTACTGGCATTGCTTTCTTAAATTATATCGCTACCTTAAAAGGTGTTGATAAAAAGAAAGCTAAACAAGAAATTCCTAGATTACTAGAGCTTGTTGGTTTAGGCGATGTAGGTAAAAAGAAGATTTCATCATACTCCGGTGGTATGAAGCAACGTTTAGGCATTGCTCAAGCACTTATCAATGATCCTGAAATACTCATTCTGGATGAACCAACTGTTGGACTTGATCCCAAGGAACGGGTTAAATTTCGCCATATTTTGAGTCAGTTATCCACCAATAAAATTATCATTTTATCAACGCATATTGTGTCGGATGTGGAAGCTGTTGCCAAAGAAATTATAGTATTAAAAAATGGTAAATTTATCGAACATGGCAACACCGCACAGCTGTTGAAAACTATTGAGGGAAAAGTGTGGGAAATAACGACTGAACCAGGTTTATCTCAGATACCCAATATTGCTATTGTTAATGAAAAAGTCTTTTCAGATAGTCGGGTATTTCGTGTAGTGAGTGATATTTGTCCGAGTGATTCGGCACAGTTGGTTGTTCCGACTCTAGAAGATTTCTACATCTATCATTTTAGAGGGGAG

SEQ ID NO: 8212 - protein, 282 aa, Streptococcus agalactiae
MLLQLDNITKSYGKKIVLNQISYQFTPGLYGLLGANGTGKTTLLNLMSHFTFADSGNIYWNGQEQSEEFYRHIGFLPQHFRYYDQFTGIAFLNYIATLKGVDKKKAKQEIPRLLELVGLGDVGKKKISSYSGGMKQRLGIAQALINDPEILILDEPTVGLDPKERVKFRHILSQLSTNKIIILSTHIVSDVEAVAKEIIVLKNGKFIEHGNTAQLLKTIEGKVWEITTEPGLSQIPNIAIVNEKVFSDSRVFRVVSDICPSDSAQLVVPTLEDFYIYHFRGE

SEQ ID NO: 8213 - protein, 288 aa, Streptococcus agalactiae
ATGATAGATTATAGCCACCATATTGAAGTTTCTTTAGAGACAGATGAACCTAAGATAGCCATGTCTTATTTTACATTAAACCATAAGCAAATTTTTATCATAGAAAATTCGATAGTCGAGGAAAGAATAGATGCTTCACGTTTGTTTGGTTATGGAGCAAGTAGCAAGGGAGAAGATAGAGGGTTAGGCCTTTATAATGTCATGAAAGTTATTGACCGTTATCCCAATGCATCTATTAGTACAAATAGTGAACAACATACTTTCCGTCAGGGCTTAGAAATAATCTTT

SEQ ID NO: 8214 - protein, 96 aa, Streptococcus agalactiae; identical to SEQ ID NO: 3528

SEQ ID NO: 8215 - protein, 750 aa, Streptococcus agalactiae
GTGAATATTTTTATACTTGAGGATGATTTTGTTCAACAAGCCCATTTTGAAAAAATCATTAAAGAGATTAGAGTACAGTACAATCTGCATTTCAAAACAGTAGAAACGTTTGCTAAACCAGTTCAATTATTGGAATCAATTTATGAAATAGGTTTACATAATTTATTTTTCTTAGATATTGAAATAAAAAATGATGAGCAGATGGGCTTAGAGGTAGCAAAACAAATTAGACAAGTTGATCCATATGCTCAGATTGTTTTTGTTACAACTCATTCAGAATTAATGCCTTTAACCTTTCGTTATCAGGTATCAGCTTTAGACTATATCGATAAAGGACTTTCACAGGAAGAGTTTAGCCAAAGGATTGAGGAAGTATTGTTGTACGTAGATGGCATTTGCAATAAGCCCTTAGTGGAAAATTCATTCTACTTTAAGTCGCGTTACAGCCAGGTACAATTACCTTTTAACGATCTTCTTTATATAGAAACATCCTCAAGATCACATAGAGTTGTCCTTTATACTGAAAAAGATAGAATGGAATTCACAGCCACTTTGGGGGATATTTTAAAACAAGAACCTAGGCTCTTTCAATGTCATCGCTCTTTTTTAGTAAATCCCTTAAATATTTTTAAAGTGGATAGGATAGATAGATTAGTTTACTTCCAAAATGGAACGACTTGTCTGGTTTCACGCAATAAAGTGAGAGATATAGTATCTATAGTGGATAAATATCAAAAGGATAGAAAAAGA

SEQ ID NO: 8216 - protein, 250 aa, Streptococcus agalactiae; identical to SEQ ID NO: 3530

SEQ ID NO: 8217 - protein, 828 aa, Streptococcus agalactiae
ATGAAAGGATACTCTATGGCAAAATGCTTAACGTTAAATACTCATTCATGGATGGAAGTAAATGCTCTAAAGAAATTATTTGATTTAGCAGAGCATATCTTCCGTGAAAAATATGATATCATCTGCCTACAAGAGGTGAACCAGAGCATATCTTCCCCTCTTGCTAAGAGTAGTCCAAATTATCATCCGATTGAAGGTACACCAGCTCTTCATCAAGATAACTTTGCCTTGCAATTAGTGCATTACCTAAATCTTCAAGGTCTACACTATCATTGGACATGGGCTTATAATCATATTGGTTATAGTAAGTACCATGAAGGGGTAGCGATACTTTCTCTGAAACCATTAAAGCCAGAGGATATTTTAGTTTCAGCTGTAGACGATGAGACTGATTATCATACTCGTCGTGCTCTGGTAGCTGAGACCACTCTGAATGACAAAGTCGTTACAGTAGTTAGCCTCCATTTATCATGGTTTGAGAAAGGATTTGCGGAGGAGTGGAAACGACTAGAAACTACCCTACTTGAGGTAGAAACTCCACTTTTACTCATGGGTGACTTTAATAATCCTACTGGAAATCAGGGTTATGAACTTGTTCTTAATAGTCCATTAGCATTAAAGGATAGCCACCAAATAGCCAATCATGTATTTGGGGACCATACTATTATGGCTGATATTGATGGTTGGGAAGGGAATAAAAAGGCTCTTAAAGTTGACCATATTTTTACTAGCGAAGACCTTTCAATCAGTTCAAGTCAAGTAGTTTTTGAAGGTGGTGAAGCACCTGTCGTTAGTGATCATTACGGCTTGGAAATTACCATGGATTTC

SEQ ID NO: 8218 - protein, 276 aa, Streptococcus agalactiae
MKGYSMAKCLTLNTHSWMEVNALKKLFDLAEHIFREKYDIICLQEVNQSISSPLAKSSPNYHPIEGTPALHQDNFALQLVHYLNLQGLHYHWTWAYNHIGYSKYHEGVAILSLKPLKPEDILVSAVDDETDYHTRRALVAETTLNDKVVTVVSLHLSWFEKGFAEEWKRLETTLLEVETPLLLMGDFNNPTGNQGYELVLNSPLALKDSHQIANHVFGDHTIMADIDGWEGNKKALKVDHIFTSEDLSISSSQVVFEGGEAPVVSDHYGLEITMDF

SEQ ID NO: 8219 - protein, 2181 aa, Streptococcus agalactiae
ATGAAAAATAATGTCAAACAGCTCTTTAGTTTTGAATTTTGGCAGAAGTTTGGGAAGGCTTTGATGGTTGTTATTGCTGTTATGCCAGCAGCAGGATTGATGGTTAGTATTGGTAACTCCATTAGTCTATTGGATCCATCAAATGTTTTATTAGGGCGCATAGCTAATGTTATTGCTCAAATTGGTTGGGGAGTTATTGGTAACTTACACATCTTATTTGCATTGGCTATTGGTGGTAGCTGGGCTAAAGAACGTGCCGGTGGTGCTTTTGCGGCTGGCTTATCCTTTATTCTTATTAACCTTATTACAGGGAACTTTTTTGGTGTTAAAACAGATATGTTAGCAGACAGTAAAGCAACTGTTCAAACGGTATTTGGTGCAACCATCAGAGTTTCAGATTACTTTGTTAACGTTCTTGGGCAACCTGCTCTTAATATGGGTGTATTTGTCGGTATTATTTCAGGTTTCGTTGGTGCAACTGCCTTTAATAAATATTATAACTATCGTAAATTACCAGATGCTTTAACTTTTTTCAATGGAAAACGTTTTGTTCCATTTGTTGTTATTTATCGTTCAGTCATTGTTGCATTAATTTTATCAGTATTTTGGCCGGTTGTTCAATCAGGTATCAATGGCTTTGGTAAATGGATTGCAAGTTCACAAGACAGTGCTCCAATATTAGCACCATTTGTCTACGGTACGTTAGAGCGTTTATTGCTCCCATTTGGTTTACACCATATGTTAACTATTCCAATGAACTACACGCAACTAGGTGGCACATACACTGTCCTTACAGGTGCAACTAAAGGAGCACAGGTGTTGGGACAAGATCCACTGTGGTTAGCATGGGTTGGTGATTTAATTAACTTAAAAGGCTCAAATTCAAGTCAATACCATCACTTATTGACAAGTGTCACTCCAGCACGTTTTAAAGTGGGGCAAATGATTGGTGCTTCAGGTATTTTGATGGGATTATCTTATGCTATGTATCGTAACGTTGATAAAGATAAAAAATTGAAATACAAGTCAATGTTTATTTCAGCAGCAGCGGCTACTTTCTTGACAGGTGTTACTGAGCCAATTGAGTACATGTTCATGTTTGCAGCAATGCCACTCTACCTTGTATATGCTGTCGTTCAAGGATGTGCGTTTGCTATGGCAGATATTGTTAACCTCCGCGTTCATTCATTTGGTAATATAGAATTTTTAACACGTGTTCCTATGGGCATAAAAGCGGGCCTTGGTGGTGATATTTTCAACTTTGTTTGGGTGACACTTCTTTTTGCAGTATTGATGTACTTTATTGCAAACTTTATGATTAAAAAATTCAATTTAGCAACAGCAGGACGTAATGGTAATTATGATAACGAAGAGGTTGATAATGCTCCTTCAACAGCTTCTGGTTCTGCTGATGCAAATTCTCAAGTTGTACAAGTTATTAATTTACTTGGTGGTCGTGATAACATTGAAGATGTAGATGCATGTATGACTCGTCTTCGTGTCACAGTTAAAGATGGAAATAGCGTGGGTTCTGAAGCAGCTTGGAAAAAAGCTGGTGCAATGGGATTGGTGTTAAAAGGTAATGGCGTTCAAGCTATTTACGGACCTAAAGCAGATGTCCTTAAATCAGACATTCAAGATTTGCTAGATTCAGGTACAGTTATTCCAATAGTTGATTTAGAAACAGGTCAACCTGTAGCAGCAGCCCCAGTTACAACTTATAAAGGAATAACAGAAGAAATTGTTTCGGTGGCTAATGGTCAAGTAGAAGCATTGGATGTTGTTAAAGACCCTGTCTTTTCTCAAAAAATGATGGGTGATGGCTTTGCTGTGGAACCAACTGATGGCAATATTTATGTTCCAGTTTCAGGTACAGTTACTAGTGTCTTTCCAACAAAACATGCTTTTGGTTTATTAACAGAAAGTGGCCTAGAAGTTTTAGTACATATCGGTCTAGATACAGTAGCTCTTGATGGTCAACCATTTGAGGTTAAAATTTCTAGTGGTCAAAAAGTGGTAGCAGGCGATCTTGCTGTAGTAGCAGATTTGGAAGCTATCAAAGCAGCTGGTAAAGAGACAAGTGTGATTATCGTCTTTACAAATGTTTCAGATATAAAAACTGTTAAACTTGAAAAATCAGGTCCACAAATAGCTAAAACAGTTGTGGCAAAAGTCGAACTG

SEQ ID NO: 8220 - protein, 727 aa, Streptococcus agalactiae; identical to SEQ ID NO: 3534

SEQ ID NO: 8221 - protein, 1653 aa, Streptococcus agalactiae
ATGACTAAAAAAATTTTCCGTACAACTTTATCTGCTAGTTTGGGAATTGTTTTAGTTACAATTTTGATGATTATGGGATTTCTCTATAATTACTTCAATCACATTCAGCGAGAACAGTTGAGAACACAAACGGCACTGGCGTCACAAGGAATTTCCTTTGAAGGTAAAGATTATTTTGAAAATCTTAAAACTTCAAATGTGCGTATTACTTGGGTAGATAATAAGGGACAAGTGCTTTATGATACCCAATCAGATGCAAAACATATGAAAAATCACGCCAATCGTCAAGAAATTAAAGAAGCTATCAAGAGTGGTTATGGTGAGAGCACGAGGTGGTCAGCGACACTTACTGAGAAGTCTATCTATGCTGCGCAACGTTTAAATAATGGAACGATAGTTCGTTTATCAGTTGCGCAACAAACTATTTTTTATCTTCTCCTTGGTATGATAAGTCCCTTAGCAATTATCATCTTACTTGCTATTATTTTATCTGTATTAATTGCACGATATATAGCAAAAAAAGTATCAGAGCCTTTAAACAATATTGACTTAGATCATCCTTTATCAAATGATAGTTACGAGGAGATAACACCATTATTAAGGCGTCTTGATAGCCATCAGGCTAAGATTCAACATCAAAAACTGTTATTACAAAAGCGTCAAAAAGAATTTGATACCATTATTTCTAAAATTAAGGAAGGAATGATTCTTTTAGATGATCAAGCAAGAATCGTTAGTATCAACGCAGAAGCTTTAAAGTTATTCCAAATTAATGATGATTGGCATGGGCGCTTTATGATGGAAGTTAGCCGAGATTTAACTCTCAAAGACTTAATCGATCAAGGACTAAAAGGGAAAAAGAAAGAGGCTAATATTGGCATTGAAAATAATCATTACCGCGTCTTGGTAAGACCAACTACAGATAACAACCGAGTAACAGGATTGGTTGTTCTACTGTTTGATGTGACTGATCAACTCCAAATGGAACAACTTCAACGTGAATTTACTGCCAATGTCTCTCATGAATTGAAAACCCCGCTTCATGTTATTTCTGGTTACTCAGAACTGTTAGCTAATCAAATGGTTCCAAACGAAGAAGTCCCACAATTTGCAGCTAAAATTCATAAAGAATCTGAACGATTAGTTAAATTGGTTGAGGATATTATCAACCTTTCTCACCTTGATGAACAAGAAAAATTACCGCAAGAGACAGTAAATCTGTATGACTTAACACAAAAAGTTTTAGAAGGTTTACAAGCTAAAGCAGATAAGAAGCACATACAAATCAATTTTAATGGAGAAGAAGCTATTTTGCGAGGGAATCCAGTTTTATTGAATTCCTTGGTGTACAACTTGTGTGACAATGCTATCACCTATAACCATGAGAAAGGTCAAGTAAATGTGACTTTGAAAAATTCACCTGATACAATTACCTTAGAAGTTAGTGATACGGGACTAGGCATTGCAGAGAAGGACAAAAAACGTATTTTCGAACGTTTCTATCGCGTCGATAAAAGTCGCTCAAAAATAGTTGGGGGGACTGGTTTAGGTTTGTCTATTGTAAAGAGTGCTTTAGATTTTCACAATGGTAGTATAAAAGTGGACAGCCATTTGGGGCAGGGAACAACAATGACCGTTTTACTTCACAAACAA

SEQ ID NO: 8222 - protein, 551 aa, Streptococcus agalactiae
MTKKIFRTTLSASLGIVLVTILMIMGFLYNYFNHIQREQLRTQTALASQGISFEGKDYFENLKTSNVRITWVDNKGQVLYDTQSDAKHMKNHANRQEIKEAIKSGYGESTRWSATLTEKSIYAAQRLNNGTIVRLSVAQQTIFYLLLGMISPLAIIILLAIILSVLIARYIAKKVSEPLNNIDLDHPLSNDSYEEITPLLRRLDSHQAKIQHQKLLLQKRQKEFDTIISKIKEGMILLDDQARIVSINAEALKLFQINDDWHGRFMMEVSRDLTLKDLIDQGLKGKKKEANIGIENNHYRVLVRPTTDNNRVTGLVVLLFDVTDQLQMEQLQREFTANVSHELKTPLHVISGYSELLANQMVPNEEVPQFAAKIHKESERLVKLVEDIINLSHLDEQEKLPQETVNLYDLTQKVLEGLQAKADKKHIQINFNGEEAILRGNPVLLNSLVYNLCDNAITYNHEKGQVNVTLKNSPDTITLEVSDTGLGIAEKDKKRIFERFYRVDKSRSKIVGGTGLGLSIVKSALDFHNGSIKVDSHLGQGTTMTVLLHKQ

SEQ ID NO: 8223 - protein, 675 aa, Streptococcus agalactiae
ATGATATATTGTGTTGAAGATGATGCTGATATTCGCGAAATGATGCTCTATACTTTGCAAATGGCAGGTTTTAAAGCTCAAGGATTTTCGAGTTCAGAGCTTTTTTGGGAAGCTATTCAGGAGAAAGTTCCAGACTTGATTTTGCTTGATATTATGTTGCCGGGAGATGATGGTTTGACTATTTTAGAGCGTTTAAGGAGAAAACATCAAACGGAAATGATACCAGTAATCATGACAACTGCTAAAGGTAGTGAGTATGATAAAGTTAAAGGGTTAGATCTTGGAGCAGATGATTATCTCGTCAAACCTTTTGGGATGATGGAAATGATTTCACGAATAAAAGCAGTCTTGAGACGTAGCCGCCAAGTAGATTCAAAAGCTCATATTATCATTGGAAATTTAGAGATTGATCCGACTAATTATTGGGTCAAAAGGGGAACGGAAAAAATCCACTTAACCCTAAAGGAATTTGAGTTATTAGTATTATTCTTCCGTAATCCCAATAGAGTCTTTACAAGGCAAGAACTTCTGGATAAGGTTTGGGGAGAACAATTTTTAGGAGAAACTAGAACTGTGGATGTTCACATTGGGACACTGCGAACAAAACTTGGTGAGGATGGCTATTTGATTGCTACAGTAAGGGGAGTTGGATACCGTTTGGAGGAAAGACATGAC

SEQ ID NO: 8224 - protein, 225 aa, Streptococcus agalactiae; identical to SEQ ID NO: 3538

SEQ ID NO: 8225 - protein, 654 aa, Streptococcus agalactiae
ATGATTCGTTCACGATTTGCAAGTCAACTTAATGACCTTAATAAAGAAATTATTTTTATGGGGGCATTGTGTGAGGACATCATTGGGAAGTCCTTAGGTGCTCTAACAAATAGTAATGACGTTTACCTTGACGATATTTCTGAAACTTATCACAAGATTGAACAAATGGAACGGGATATTGAGGAGAGATGTTTAAAACTTTTACTCCGTCAGCAACCAGTTGCCAAGGATTTACGCCGTATTTCTTCTGCATTAAAAATGGTTTATGATATGAAACGTATTGGTGCTCAAGCTTATGAAATTGCGGAAATTGTTAGTTTAGGTCATATTATCCAAGGTGCAGGTTCTGAAAGGGATCAACTTAACAGCATGTCTAATAATGTCATTAGTATGCTGACTAAGAGTATAGATGCTTTTATTTATGACAATGAAGAACAAGCGCATCAAGTAATTGAACAAGATAGGACAGTTAACCAGGAATTTGATACAATAAAGAAACAGTTAGTGTTATATTTTTCGGTACAGGATGTTGATGGTGAATATCCCATAGATGTTTTAATGATCGCCAAGTACCTAGAGCGTATTGGTGATCATACAGTAAATATTGCTAAGTGGGTGCTTTTCTCAATAACAGGTAACCTAGATGGAGAAGCG

SEQ ID NO: 8226 - protein, 218 aa, Streptococcus agalactiae; identical to SEQ ID NO: 3540

SEQ ID NO: 8227 - protein, 747 aa, Streptococcus agalactiae
GTGAGTAAATTAGTAATTAATAATTTAGATTTGTATTATGGAGAATTTCACGCTCTGAAGGATGTTAATTTAGACATTGAAGAAAAAGAAATCACAGCCTTTATTGGACCTTCTGGGTGCGGAAAGTCTACTCTCTTGAAAAGTATTAACCGTATGAATGATTTGGTCAAAAATTGCAAAATCACAGGGGATATTACTTTAGAAGGCGAGGATGTCTATAGACAATTGGATATTAACCAATTGCGTAAAAAGGTTGGAATGGTGTTTCAAAAACCTAATCCGTTTCCAATGAGCATTTATGATAATGTTGCTTTTGGTCCAAGAACGCACGGTATTCATTCCAAAGCAGAGTTAGATGATATCGTTGAACGTTCCCTTAAACAGGCGGCTCTATGGGATGAGGTTAAAGATCGTCTTCACAAATCTGCTCTGGGTATGTCTGGCGGACAGCAGCAACGTTTGTGTATTGCGCGTGCTCTTGCTATTGAGCCTGATGTTTTACTTATGGATGAACCCACAAGTGCCTTGGATCCTATTTCAACAGCAAAAATTGAAGAATTGGTTATCCAACTGAAGAAGAACTACACTATTGTTATAGTGACACATAATATGCAACAAGCTGTTCGTATTTCTGATAAAACAGCATTCTTTCTGATGGGAGAAGTGGTTGAATATAACAAAACGAGCCAACTCTTTTCATTGCCACAAGATGAGCGTACAGAAAACTACATTACAGGGAGATTCGGA

SEQ ID NO: 8228 - protein, 249 aa, Streptococcus agalactiae; identical to SEQ ID NO: 3542

SEQ ID NO: 8229 - protein, 876 aa, Streptococcus agalactiae
ATGGAAAATATTAACCAAAGAACGTCAAAACAATATTTAGCATCTTTAAAAAAAGATCCCCTTTCCTTCTTTCTTTTTGCTATTGTCTATTTGGGAGCAATTCTAAGTTTTGCTACAATTGCATTTGTTGTTATTTATATTTTAGTTAAGGGGCTTCCTCATGTGAATACTGGCTTGTTTGCATGGACTTATAATACTCAGAACGTTTCACTATTACCAGCTTTCATTAACACTATCTTTATCATCGCCTTAACTTTATTATTTGCAGTTCCACTTGGTATTGGTGGATCAATTTATCTAACGGAATATGCTAGACGTGATAATCCTTATCTCAAAATTATCCGTGTTGCAACCGAGACATTGGCAGGGATACCTTCAATTATTTATGGTTTGTTTGGTGCATTATTTTTTGTAAAATACACACACTTAGGCTTATCTTTGATATCGGGTTCTCTGACTTTGAGCATCATGATTTTACCTTTGATTATGAGGACAACTGAAGAAGCTTTACTATCTGTTCCGGATTCTTATCGAGAAGGAGCCTTTGCGCTTGGTGCTGGTAAATTGAGAACCATATTTAAAATCGTATTACCTAGTGCTATGTCTGGTATTTTTGCTGGTATTATTTTAGCGGTAGGACGTATCATTGGTGAGTCAGCAGCACTTATTTTCACAGCTGGAACAGTTGCAAAAGTAGCACATTCGGTATTTAGTTCATCTCGTACTTTAGCAGTACATATGTATGCTATTTCGGGTGAGGGCTTATATGTTGACCAAACTTATGCGACTGCGGTCATCTTATTGCTTTTAGTTATTATTGTCAATTTTGTATCTGGACTAGTAGCCAAACGATTAGGAAGTGAGTCGAACAGTGAG

SEQ ID NO: 8230 - protein, 292 aa, Streptococcus agalactiae; identical to SEQ ID NO: 3544

SEQ ID NO: 8231 - protein, 843 aa, Streptococcus agalactiae
ATGAAACAAACAAAAGAAGGTCTTATGCAAGCTGTGTTTTTCATCACGGCTTGCGTCAGTGTTATATCAGCTATTTTAATTTGCCTCTTTCTCTTCTCTAGTGGTCTTCCAGCTATTACGAAAATCGGCTGGGGAAATTTTATATTTGGTAAAGTCTGGCATCCTAGTAATAATATTTTTGGCATCTTTCCAATGATTGTAGGTTCCTTATATGTTACAGCGGGAGCTTTACTTTTAGGAGGACCGATAGGTATCCTTACTGCTGTTTTTATGGCTTATTTCTGCCCAGAAAATATTTATAAGCCTTTAAAGTCAGCTATCAATTTAATGGCGGGAATCCCTTCAGTTGTTTATGGTTTCTTTGGACTCGTTGTTATTGTCCCTATGATAAGGCAATATATTGGTGGCTTTGGTATGGGAGTCTTAGCAGCTTCAATTTTGCTAGGAATTATGATTTTACCAACAATTGTTAGCATTTCAGAATCTTCTTTAAGAGCTGTTCCAGAGAGCTATTATGAAGGCGGTATTGCCCTTGGTGCCTCTCATGAACGAAGTGTCTTCTTTGCTGTTTTACCAGCTGCTAAACGTGGCATTTTAGCATCGGTTGTTTTGGGAATTGGACGTGCTATTGGTGAAACAATGGCTGTCATCATGGTAGCGGGTAATCAAGCTGTCTTGCCTCAATCGCTGACATCAGGCGTTAGAACTCTAACCACTAACATTGTTATGGAAATGGGCTATTCTTCTGGTTTGCATCGTCAAGCCTTAATTGGTACAGCTGTGGTACTCTTTATCTTTATATTAATGATTAATATCAGTTTTTCAGCATTACAGAAAGAGGAA

SEQ ID NO: 8232 - protein, 281 aa, Streptococcus agalactiae; identical to SEQ ID NO: 3546

SEQ ID NO: 8233 - protein, 879 aa, Streptococcus agalactiae
ATGAAAAAACACAAAATGCTATCTCTTTTGGCGGTATCTGGTCTTATGGGAATTGGCATCCTAGCAGGATGCTCAAATGATTCATCATCTTCATCTAAAGGGACAATTAACATTGTTTCTAGAGAGGAAGGGTCTGGAACTCGTGGAGCTTTCATAGAGTTATTTGGGATCGAGTCAAAAAATAAAAAGGGCGAAAAAGTAGACCATACTTCTGATGCAGCAACTGTTACCAATTCAACTTCAGTTATGCTAACCACTGTCTCTAAAGACCCGTCAGCTATTGGTTATTCTTCACTAGGTTCATTAAATAGTAGCGTTAAAGTGCTTAAAATTGATGGCAAAAATGCGACTGTAAAAGATATTAAATCAGGAAGCTATAAGATTTCTCGTCCTTTCAATATTGTAACAAAAGAAGGTAAGGAAAAAGAAGCAACAAAAGATTTTATTGATTATATCTTAAGCAAAGATGGGCAAGCAGTCGTTGAGAAAAATGGCTATATTCCACTTGACAATGCTAAAGCATATCAAGCAAAAGTGTCATCTGGTAAAGTTGTTATAGCAGGTTCAAGTTCAGTAACGCCGGTTATGGAAAAGATTAAAGAAGCCTATCATAAAGTAAATGCAAAAGTAGATGTTGAAATTCAACAAAGTGATTCTTCAACTGGGATTACAAGCGCAATTGATGGATCAGCAGATATAGGTATGGCATCACGTGAATTGGATAAGACAGAGTCATCCAAAGGGGTCAAAGCTACTGTTATTGCAACAGATGGTATTGCAGTAGTTGTTAATAAGAAAAATAAAGTTAATGATCTATCAACAAAACAAGTAAAAGACATTTTTACTGGAAAGACAACGTCTTGGTCTGACTTATCAAAG

SEQ ID NO: 8234 - protein, 293 aa, Streptococcus agalactiae; identical to SEQ ID NO: 3548

SEQ ID NO: 8235 - protein, 585 aa, Streptococcus agalactiae
ATGATTATTGCTATTCAAGGTGGTATGGCTGTAGGGAAAACCACAGCTTTGAAAATCATTGAGAATGTTTACCCCAAAATCGCTATTAGTTTTGAGGATATTTCTCCAGTAGTTGATAAGATTAATAAACATCAGCTTGATAACAATAAATTAGACGATTATTGTGAAATTCAACAACTATTTATTCAGCATGAGCGAGATAGATACGAACTTGTTAGAGATAATGAAATAGTGTTAATGGATTATGGAGCTGAGGAAATTGCTTTTTATACACAATACTTTCCAAAGGTGGCGGGTTATAGTTGGACTTTACCTTCTAATTTGTTACTAGAGGTAAATAGGCTAAAGGAATGTTTTGCTGATTATATTATTTTTCTAGATGCAGATGAGACGGTCCTATACCAACGTCAAAAAAATGATTTTAATAGACAGCGTCATTTTTTCAAATGGTATACTCATCACCTGCTGCCTGCTAAAAAACATTATTTAGACACATTTTCCAATGTTATTCATATTAATACAAATCATTTAAATGCTGAGGAAGTGGCTGAAAAAATCATTGACATCATTCGTAAGTTAACTCTA

SEQ ID NO: 8236 - protein, 195 aa, Streptococcus agalactiae; identical to SEQ ID NO: 3550

SEQ ID NO: 8237 - protein, 738 aa, Streptococcus agalactiae
ATGCAACAGTATTTTGTAAATGGCGAAGCAGGTGCCTATGTGACCATCGAGGACAAGGATACCATCAAGCACATGTTCAATGTCATGCGATTGACAGAAGATGACCAAGTGGTCTTGGTTTTTGATGATGCCATCAAGCGTCTGGCAAAGGTGGTGGACAGCTCTGCTCATCGCTTCCAAATTCTAGAAGAGCTAGACAACAATGTTGAAATGCCAGTTCAAGTGACCATTGCCTCAGGTTTTCCCAAGGGAGACAAGTTGGATTTTGTGACGCAAAAGGCAACAGAATTGGGTGCTGCGGCTATCTGGGGATTCCCAGCTGACTGGTCAGTCGTCAAGTGGGACGGCAAGAAACTAGCTAAAAAAGAAGATAAGCTGGCAAAAATTGCTCTGGGCGCAGCGGAGCAGAGCAAGCGTAATCGTCTTCCTCAGGTTCGTTTATTTGAGAAGAAGGCTGATTTTCAAGCGGAGCTTGCAGGCTTTGATAAGATTTTTATCGCCTATGAAGAGTCTGCCAAGGAGGGTGAATTGTCAGCGCTAGCCCAGAACTTGCAGACTGTAAAAGCAGGTGACAAGCTCCTCTTCATCTTTGGACCAGAAGGGGGCATTTCTCCAAAAGAAATCGCAGCTTTTGAAGAGGTTGGAGCTATCAAGGTGGGCTTGGGGCCACGCATCATGCGCACAGAAACAGCGCCGCTCTATGCTCTAAGTGTTATTAGTTACTCAGCGGAGTTATTA

SEQ ID NO: 8238 - protein, 246 aa, Streptococcus agalactiae; identical to SEQ ID NO: 3554

SEQ ID NO: 8239 - protein, 951 aa, Streptococcus agalactiae
ATGAACACATGGAATGAACTAACGGTTCACGTGAATCGTGAGGCAGAGGAAGCTGTCTCGAATTTATTGATTGAAACTGGCAGTCAGGGGGTTGCCATTAGCGATTCGGCTGACTACCTTGGACAGGAGGATCGTTTCGGTGAGCTTTATCCTGAGGTGGAGCAGTCTGATATGATTGCTATTACTGCTTATTATCCTGATACGCTTGATATTGAGGCGGTTAAGGCTGATTTGGCTGATCGTTTAGCTAATTTTGAAGGCTTTGGTCTTGCGACGGGTAGCGTCAACCTTGACAGTCAGGAATTGGTCGAAGAGGACTGGGCTGATAACTGGAAGAAGTACTATGAGCCAGCTCGCATTACCCATGATTTGACCATCGTGCCGTCATGGACGGACTACGAGGCTAAGGCTGGTGAGAAGATTATCAAGATGGATCCTGGTATGGCTTTTGGGACTGGGACTCACCCAACGACTAAGATGAGTCTTTTTGCCTTGGAGCAAGTGCTTCGTGGTGGTGAGACGGTTATCGATGTGGGGACTGGTTCTGGCGTTTTGTCTATTGCTAGCTCTCTCTTGGGTGCCAAGGACATCTATGCCTATGATTTGGATGATGTTGCAGTGCGCGTGGCTCAGGAAAATATCGATATGAACCCTGGCACTGAAAATATTCATGTGGCTGCTGGTGATCTGCTCAAAGGTGTCCAGCAAGAGGTAGATGTTATTGTTGCCAATATTTTGGCGGATATTTTGATCCATCTGACAGACGACGCCTACCGTTTGGTCAAGGATGAGGGCTATCTCATCATGTCTGGTATCATTTCTGAGAAGTGGGACATGGTGCGTGAGAGTGCTGAAAAAGCTGGTTTCTTCCTTGAGACTCACATGGTTCAAGGTGAGTGGAATGCCTGCGTTTTCAAAAAGACAGATGATATTTCAGGAGTGATTGGCGGC

SEQ ID NO: 8240 - protein, 317 aa, Streptococcus agalactiae; identical to SEQ ID NO: 3556

SEQ ID NO: 8241 - protein, 306 aa, Streptococcus agalactiae
ATGGGGTATTTTACAGTATTTTGGCAGAAAGATGGAAATGGTAAAAATATTCCTTTTTATGAACAAGATGAAGTGGAAGATTTGATTATTGTCATTAAAGATGGTAGGTGGAAAGGTTTGTTCATCATTCCCAAAGAGGTTGCAGTGAGTAAGGGTATTCTTTCATCTGCTAACTCTCAAGGAAAGATGGCTATGCGATTTTACCCTCCTTGGTGTAGCGATTTAAATAGAACAGCTTTGGTGACACAGCGATGGCAGTTGAACTATTTTATTGATTTAAGTAGAAATAATGAAGGAGTTACTACA

SEQ ID NO: 8242 - protein, 102 aa, Streptococcus agalactiae; identical to SEQ ID NO: 3562

SEQ ID NO: 8243 - protein, 714 aa, Streptococcus agalactiae
ATGAAAACAGTTAAAGAAGTCAGTATCTTAAGCGGTGTAAGTGTGCGCACCTTGCATCACTATGATAAAATCGGTTTATTCCCACCTACCGCCCTATCCGAAGCAGGCTATCGACTTTATGACGATGAAGCATTGATTCGCCTGCAAGAAATTTTGCTATTTCGTGAGTTGGAATTCCCTCTCAAAGATATCAAATACCTGCTTGAGCAAGCAAAAGAGGAAAGGCAAGACTTATTAGCCCAACAAATCAAATTGCTTGAATGGAAAAGATCGCACCTTGAGCAGGTTATCACCCATGCGAAACGATTACAAGAAAAAGGAGATGATTATATGAATTTCGATGTTTATAATAAAACAGAATTAGAACAATTACAAGCTGAAGCAAAAGAAAAGTGGGGACAAACAGCAGCCTACAAAGAATTTGCTCAAAAACATGCTTCAGATGACTTTGCACAAATTAGCCAAGAAATGGCAAAAATAATGGTACAATTTGGGCAATTAAAGACACAAAATGTATCTGATGAATCTGTTCAAATGTGTGTGAAACGGCTACAAGACTATATCTCTCAGCATTTTTACACCTGTACCAATGAAATCCTTGCTGGACTAGGACAAATGTATCAATCAGATGACCGGTTTAGTCAATCAATTGACAAAGCTGGTGGAGCAGGAACAAGTGAATTTGTCAGCCAAGCTATTGCTTACTATTGCCAA

SEQ ID NO: 8244 - protein, 238 aa, Streptococcus agalactiae; identical to SEQ ID NO: 3564

SEQ ID NO: 8245 - protein, 468 aa, Streptococcus agalactiae
ATGATTACTTTACAAAAGGCGGAAGCTAGTGATTTAGAGAAGATTATTGCCATTCAGAGAGCTAGCTTTAAGGCAGTCTATGAGAAATACCACGATCAATACGATCCCTATGTGGAAGAAGTTGAGCAGATTCGATGGAAACTAGTGGAGCGACCAGATTGTTTCTATCATTTTGTCCTTGTTGATGAGACAATTGTTGGTTTTCTTAGATTGGTTATCAAAGACGAGGAGAAGCGTGCTTGGCTTGGTACGGCGGCTATTCTTCCCCAATATCAAGGGCAGGGCTACGGCTCAGCAGCGATGGCTTTATTAGAGAAAACCTATCCTAAGCTTACAAAGTGGGATTTATGTACGATTGCGCAAGAAAAACTAATGGTCAGTTTTTATGAAAAATGTGGTTATCATTCAACCCATACCGAACCTGAGCAAGAAGGAATGGATATGGTCTATATGACAAAGAAGATAGAA

SEQ ID NO: 8246 - protein, 156 aa, Streptococcus agalactiae; identical to SEQ ID NO: 3568

SEQ ID NO: 8247 - protein, 456 aa, Streptococcus agalactiae
ATGGATATTTTTGATGAGTTATTTGATTTCTCAGGTGCAAAGATCGCTCTTTTCTGCGAGGGAAAGATTTTGACCAGCCTAAGAGATGATTTTCCAGATTTGCCCTATGCAGGCTTTTGGGACTTACCAGGCGGTGGTCGTGAGGACAATGAAACACCTTTGGAATGTCTTTTTCGTGAAGTTGATGAAGAATTAAGTCTGACCTTAACTCGAAACCATATTGATTGGGTCAAGACTTATAGGGGTATGTTGAAGCCTGATAAATTATCAGTTTTTATGGTTGGACATATCAGTCAGAAAGAGTACGATAGCATTGTTCTAGGCGATGAAGGACAAGACTACAAACTCATGTCCATTGACGAATTTTTAAGCCATAAAAAGGTCATTCCTCAGTTGCAGGAGAGGTTGAGAGATTATTTGGAGGTGGAAGATGATTACTTTACAAAAGGCGGAAGC

SEQ ID NO: 8248 - protein, 152 aa, Streptococcus agalactiae; identical to SEQ ID NO: 3570

SEQ ID NO: 8249 - protein, 141 aa, Streptococcus agalactiae
ATGGATTTGCTAAAATGTGGATATACATTGGATGATATAGAAACAGCCAGACCAGAGGATATGGAACGTTATTATGCCCCTGAACAAATCAGAAAATATGGAGCTTTAGGAATAGAATTGAGGTTATTGCATGGATATTTT

SEQ ID NO: 8250 - protein, 47 aa, Streptococcus agalactiae; identical to SEQ ID NO: 3572

SEQ ID NO: 8251 - protein, 468 aa, Streptococcus agalactiae
ATGGCTAAATTTGGATTTTTATCGGTACTAGAAGAAGAATTGGATAAGCATTTACAGTATGACTTTGCCATGGATTGGGATAAGAAAAATCATACTGTAGAAGTCACTTTTATATTAGAAGCACAAAACAGCTCTGCTATTGAAACCGTGGACGACCAGGGGGAGACGAGTAGCGAGGACATCGTTTTTGAGGACTATGTACTCTTTTACAACCCTGTCAAGTCTCGCTTTGATGCTGAGGACTATCTGGTGACTATCCCCTATGAGCCTAAGAAGGGCTTGTCGCGTGAGTTTCTGGCTTATTTTGCGGAGACTCTCAACGAGGTTGCCACTGAAGGGTTGAGCGACCTCATGGACTTCCTCACCGATGACAGTATCGAAGAGTTCGGTCTTTCTTGGGATACGGATGCTTTTGAAAATGGCAGAGCAGAACTGAAAGAGACAGAGTTTTACCCTTATCCGAGATAT

SEQ ID NO: 8252 - protein, 156 aa, Streptococcus agalactiae; identical to SEQ ID NO: 3574

SEQ ID NO: 8253 - protein, 489 aa, Streptococcus agalactiae
ATGATTATCAGACCTATGCAGGACTGCGACCGTGAGGCAGTTCTGACCTTACAAAATACTGGCTGGACTGCTCTTACCTCTCCTGTCTATGACCGCAAGTGGACTGAGAGTGATTTGGAGAAGAATCTGGCAAATGGCATGTCCTTCTTTGTCGCTGAGGTCGATGATAAGATCGCTGGCGTCTTGGACTTTGGTCCCTACTATCCTTTCCCAGCTGGCAAGCATGTTGCCACTTTCGGCATTCTCATCGCTGAACCCTACCAAGGTCAGGGACTGGGTAAAGCTCTCTTGAAAGCTCTGCTAACTGAGGCTAAAGCTCAAGGTTACATCAAGATTGCCATGCATGTCATGGGCAATAACAGCAGAGCCATTTCCCTCTATCAAAAATACGGGTTTACCGAAGAGGCTCGAATCACTAAAGCCTTTTTCATTGAAAATCATTATGTTGATGCTTTAATTTTCGCAAAAGATTTGGAGAATAATCATGGC

SEQ ID NO: 8254 - protein, 163 aa, Streptococcus agalactiae; identical to SEQ ID NO: 3580

SEQ ID NO: 8255 - protein, 1266 aa, Streptococcus agalactiae
ATGGCTGACAATCTTGCTCTACGTATGCGTCCTCGCAATATTAATGAAGTTATCGGGCAGCAACATCTCGTTGGTAATGGCAAAATTATTGATCGAATGGTTGCAGCTAATATGTTATCTTCCATGATCCTATATGGCCCACCAGGTATTGGGAAGACTTCTATTGCTTCTGCTATTGCTGGTACTACTAAATATGCCTTTCGTACTTTTAATGCCACTGTTGATAGTAAAAAACGTCTTCAAGAAATTGCAGAAGAAGCTAAATTTTCTGGTGGCTTAGTTTTATTACTTGACGAGATTCATAGACTTGACAAGACAAAACAAGATTTTCTTTTACCTCTACTTGAGAATGGCAATATTATTATGATTGGAGCAACAACTGAAAATCCTTTCTTTTCAGTAACTCCTGCCATTAGAAGTAGGGTACAAATTTTTGAGTTAGAACCTCTTTCTAACGAGGATATTAAAAAAGCCATTCAGCTAGCAATTTCCGATAAAGAACGGGGATTTCCTTTTTTAGTGACAATTGATGATGAGGCGCTAGATTTTATTGTTACCGCCACAAATGGAGACCTACGATCTGCTTATAATTCCTTGGATCTAGCAGTCATGTCTACTTCTCCTAATGAAGATGGTAGCCGTCATATTAGTCTAGAGACAATGGAAAATAGTCTGCAGCGTAGTTATATTACAATGGATAAAAACGGAGATGGGCATTATGATATCCTATCAGCCTTACAAAAATCAATTAGAGGTTCTGATGTCAATGCCAGCCTGCACTATGCCGCTCGTTTAGTAGAAGCCGGAGATTTACCTAGTTTAGCAAGACGTTTGACCATTATTGCTTATGAAGATATCGGCTTAGCTAACCCCGAAGCACAAATACATACTGTGACTGCATTGGAAGCTGCCCAACGCATTGGTTTTCCAGAAGCTCGTATTCTTATTGCTAACATTGTTGTGGATTTAGCTCTATCACCTAAATCAAATTCAGCCTATTTGGCTATGGATGCAGCTTTAGCTGATTTACGTCGTTCAGGAAATTTACCTATTCCACGTCACCTAAGAGATGGACATTACAGCGGTAGTAAAACCTTGGGCAATGCAAGGGATTACAAGTACCCTCACGCCTATCCTGAAAAATGGGTTAAACAACAATACTTACCAGATAAACTAGTAGGACATAATTACTTTGAAGCCAATGAAACTGGTAAATACGAACGCGCACTTGGTTCAAATAAAGAGCGCATTGATAAGCTCTCAGAC

SEQ ID NO: 8256 - protein, 422 aa, Streptococcus agalactiae
MADNLALRMRPRNINEVIGQQHLVGNGKIIDRMVAANMLSSMILYGPPGIGKTSIASAIAGTTKYAFRTFNATVDSKKRLQEIAEEAKFSGGLVLLLDEIHRLDKTKQDFLLPLLENGNIIMIGATTENPFFSVTPAIRSRVQIFELEPLSNEDIKKAIQLAISDKERGFPFLVTIDDEALDFIVTATNGDLRSAYNSLDLAVMSTSPNEDGSRHISLETMENSLQRSYITMDKNGDGHYDILSALQKSIRGSDVNASLHYAARLVEAGDLPSLARRLTIIAYEDIGLANPEAQIHTVTALEAAQRIGFPEARILIANIVVDLALSPKSNSAYLAMDAALADLRRSGNLPIPRHLRDGHYSGSKTLGNARDYKYPHAYPEKWVKQQYLPDKLVGHNYFEANETGKYERALGSNKERIDKLSD

SEQ ID NO: 8257 - protein, 1119 aa, Streptococcus agalactiae
ATGGCAACATATAGACAAAGAGGTAAAAAGAAATTATGGGATTATAGAATATTCAATGAAAAAAGTGAGTTAGTTGCTTCTGGTTCAGGTTTTAAGACAAAGCGTGAAGCTATGAATGAAGCTATGAGGATAGAGCAACAAAAGTTATTAGTAAATTCTATATCTTCTGATATAACATTGTATGATTTGTGGTTTGAATGGTACAGTTTAATTATAAAGCCTAGCAATCTAGCAGAGACTACAAAGAACAAATATTTTACAAGAGGTTCTGTTATTCGTAAACTTTTTGGAAATCAGAAAGTAAATAAAATAAAGCATAGTGCGTATCAGAGGAAATTAAATACGTACGCTGAAAAATACACTAAAAACCATGTTAGAAGGTTAAATTCAGATATAAAAAAAGCTATCCAATTTGCTAAAAGAGATGGTGTCTTATTATCTGATTTTACTGATGGAGTTGTCATAGCTGGTAGGAAATTTGTTAAGGATGCAGATGATAAATATCTACATAGTATTTCTGATTACAAGAAAGTGATATCTTATTTAGAAAACAATTTGGATTATTCAAATAGTATTGTTTATTATTTATTACTGGTGCTATTTAAAACAGGTTTACGAGTGGGGGAAGCTTTAGCTTTAACTTGGGATGATGTTAATTTTGAAGATCTAGAAATCAAGACGTATAGAAGATTTAGTGGGGATAAGGGAACTTTTAGTCCACCTAAAACAAAAACCTCAATTCGTACTATTCCTATTAGTCAATCTTTGGCATTAACCTTAAGACGTTTGAAGGATGATCAGCAAGTTATGTTGAAAAACTTAAAAATTGTAAATATTAATAATCAAATATTTTATGACTATAGGTACGGTGTGTCGTCAAATAGTGCCATTAATAAAAGTTTGAGAAATGTATTACATTTATTAAATATTGATTCAAAAATGACTGCAATAGGTGCGAGACATACCTATGGAAGTTATTTATTGGCTAAGGGTGTTGATATTTGGGTAGTTGCAAGATTAATGGGTCATAAGGATATTACACAGTTACTTGAAACTTATGGTCACGTCTTGACAGAAGTAATAAATAAGGAATATGAAACGGTCAGAAGTTTAGTATCT

SEQ ID NO: 8258 - protein, 373 aa, Streptococcus agalactiae
MATYRQRGKKKLWDYRIFNEKSELVASGSGFKTKREAMNEAMRIEQQKLLVNSISSDITLYDLWFEWYSLIIKPSNLAETTKNKYFTRGSVIRKLFGNQKVNKIKHSAYQRKLNTYAEKYTKNHVRRLNSDIKKAIQFAKRDGVLLSDFTDGVVIAGRKFVKDADDKYLHSISDYKKVISYLENNLDYSNSIVYYLLLVLFKTGLRVGEALALTWDDVNFEDLEIKTYRRFSGDKGTFSPPKTKTSIRTIPISQSLALTLRRLKDDQQVMLKNLKIVNINNQIFYDYRYGVSSNSAINKSLRNVLHLLNIDSKMTAIGARHTYGSYLLAKGVDIWVVARLMGHKDITQLLETYGHVLTEVINKEYETVRSLVS

SEQ ID NO: 8259 - protein, 324 aa, Streptococcus agalactiae
ATGCAACAGGTTTTTAATGTGAGTGTTCCTGTACCAGATGATGTTGTTATTATTTCAAAAGAAGAATATTTAAATTTGTTAAGTGATAATGAACAAGGCAAGTGGTGGGATATTGATAACTTACAAGAGTTATTGGGAATTGGAAGGTCAAAATTGATTAATGATATTTTGTTAAATCCAGATATAAAAAAAGAAGTAGATTTATCAATTAATCCAAATGGTTTTATTGTTTATCCGAAAGGTAAAGGTAGTCGATATAAAATATTAGCAACAAAAGCTAGAAAATATTTTGAAGATAATTTTGGTTCTATTTTATTAAATAGT

SEQ ID NO: 8260 - protein, 108 aa, Streptococcus agalactiae; identical to SEQ ID NO: 3586

SEQ ID NO: 8261 - protein, 630 aa, Streptococcus agalactiae
ATGATAGGGGATTATTCAGTAATGGATTGGGCTACTTTAGGTGGTGTTGTAGGAATTATTTTTACAAATGTGGGAGTTTTGATTTCAAACTCTAGGGATAATAAAGCTATTCAACGAGAACTTGAGCTTTTAGAAGAAGGTCAAGAGAAATTGGTAGACGAATTTTCCAAAATTTCGACAAATCAATATGATAAATATGTTCTGATACAAAGCAATTTATCAAACAATATTGAAAAGAATAAACAAGAATTAGTTCAAAAAAACTCATATGTTAAAGAAGATACTAAATATATCCGTGATGAAATGCTTATTGAGAAAAAGTCAAGGGAAGAAGTTTATAATCATGTGAAAAATGGAGATAAACTTATTGAAAAAATGGCTTTTGCTAATGAATTAATTTTGAAGTTTGGTGAAGTAAGCAGAGAAAATCAAATGTTAGGCTTAAAAGTTAATTCTTTAGAGGAAAAAATAGTCGATTTATCAAATCAACCTAAAAATGATGAAATATCAAAATTACGTAAATCAATTTCAAGTTTTGAAAGGGAATTATCTAGGTTTGAGGATGGCGGTTATAGCGAAGCAGAAGAAATAAAAAGTACTTTAAGAAGAATATTAAATGATCTTGAAGGA

SEQ ID NO: 8262 - protein, 210 aa, Streptococcus agalactiae
MIGDYSVMDWATLGGVVGIIFTNVGVLISNSRDNKAIQRELELLEEGQEKLVDEFSKISTNQYDKYVLIQSNLSNNIEKNKQELVQKNSYVKEDTKYIRDEMLIEKKSREEVYNHVKNGDKLIEKMAFANELILKFGEVSRENQMLGLKVNSLEEKIVDLSNQPKNDEISKLRKSISSFERELSRFEDGGYSEAEEIKSTLRRILNDLEG

SEQ ID NO: 8263 - protein, 540 aa, Streptococcus agalactiae
GTGTTGAACTATAAGTATATTACTCTAAATGATAGTTATGAGTTAAATGTTTGGTTAGATTTTGTATTACGAGATTTAAAAAAGGAAAAAAAGTATTCTAAATTTAGATTTATAATAAAAAAATTGTCTATTAAAAATTCAAGAACTACATTTCAAGAAATCGAAAGTGTTCGTAAAGAATTAATGGGACTATCAGAACTTGATTTGAAGCATTTAAGAATGATAATTGAAAATAGAGAGACAACAGGGATTGGTTTAGAATTCAAAGCATTTTTACAAAAGATATTTAATTATTTTGGTGTGATTGTAGTAGGTTTAATTCCAGTAATATTAGGTTATAATTCAATAGAGAGAGTTGTAACTTCTTGGTTAAATGCCAAAACTTTTAAATCTAGTATTTTATTAATTGTATGGATATTTGTTTTATATATTTATTATGTAGGTTTTAAAGAATTCTTTTTGCATGATTCTAAAAAAAGAGAAGTTAGAAAGTATTTGTTATTTTTGATAAATGATATTTTATTAGATATGGAGAAACAT

SEQ ID NO: 8264 - protein, 180 aa, Streptococcus agalactiae
MLNYKYITLNDSYELNVWLDFVLRDLKKEKKYSKFRFIIKKLSIKNSRTTFQEIESVRKELMGLSELDLKHLRMIIENRETTGIGLEFKAFLQKIFNYFGVIVVGLIPVILGYNSIERVVTSWLNAKTFKSSILLIVWIFVLYIYYVGFKEFFLHDSKKREVRKYLLFLINDILLDMEKH

SEQ ID NO: 8265 - protein, 159 aa, Streptococcus agalactiae
TTGTTAATTCATTTTATTATGATACCAGTTATGAAGATTACATTGACAATAATATTTATTGTGTTTATTGCCATTTTTGGATTTGCTGGAGCAGTTTGGATTGGTTTTAAAGATAATATAAAAAAGTATTTAACCTTTTTCAAAAAGAAAAGTGAAAAA

SEQ ID NO: 8266 - protein, 53 aa, Streptococcus agalactiae
MLIHFIMIPVMKITLTIIFIVFIAIFGFAGAVWIGFKDNIKKYLTFFKKKSEK

SEQ ID NO: 8267 - protein, 1314 aa, Streptococcus agalactiae
ATGAAACAGCAAAAATTAACTGATACTGCATGGCAAAATCTTATAGAGAAGTATAATATTTTAACAGCTATTGAGAATGAAGGATACTTTAAAATTTCTTCGAATGAAATAAAAGAATTTAGAGAACCTCGACTGATGGCTAAATTTGATAGTTCTAAATATTTACCTGATGTTTTTAAAAATAATAAGTTAAACATTTTGCCTATTAGTAGGTCTAAATATATACTAGGACGATTTAAATTATATGAAAATTTTCCAGACCTGAAAAATTTCAATACTAAGTTACCACAAATAGATTTACCAGAATTGGAAACAATTGATATCGAGAAAATTACTTCGGAAGCTAATGCGATAAATGTATTACAGCTTTCTGGGATATTGGAAGATTTTTTAGAATTGCCAGAAAGTGAAAAGCTTTATCCAACATTCAATAGTAGAATGGGTTCTGGTATATTTGATTTTTATGTTGATACTTTTGATGAATCTAGACAATTTATTTCAGTTGAAAATGCACAGATAGAAATTGATGGCGGTTTTGAGTCTGAAAATTTTGTTATAATTGTTGAAGCAAAAAATGTAATACATACAGATTTTCATGTTCGACAGTTATATTATCCTTATAGAAAATGGACATCCTTAGTTAATAAACCAATTAGGTTAGTATTTTCTATTTATTCAAACATGATTTTTAGATTATTGGAATATGAATTTGAAGATTTAAATAATTATTCTTCAATAAGATTTATTAAAGAAAAATACTATAGTTTAGAAGATACAACAATAACAATTGATGACCTTAAAGAAGTTTTTTATTCTACTGAGTGTGTTTATTTAGATAAATATGGAAAATCAAGAGATGATGTTCCATCTGTACAAGCAGATAGTTTTGAAAGAGTAATTTCTTTACTTGAAAATATGTATCAGAATGAGATGTCAAAAGAAGATATTCAAGAGTTGATGCACTTTTCAGAAAGACAGGTGGGATATTATTTTAATGCAGGTAGATACTTAGAAATATTTTGTAAAAAGAAAAACAATGAAAAGCGAATAGTTTATACACTGACTGAAATAGGAAATAAGATATATTTATCTCATTACAAAAAAAGGCAATTATTGTTAGTAAGACAGATTTTTAAACATAAAATTTTTAGAACTTTATTTGAGCAGGTACTTGTGAACGGAGAATTGCCAGAACTAGACTATATTACTGATTTGGAGTTAGAATATGAAATGGTTAATAGTAGGTCTACAGCGGAACGAAGGGCTAGATCAATAAGAGCTTGGATAAGCTGGATATTTAATTTGACCAAATTA

SEQ ID NO: 8268 - protein, 438 aa, Streptococcus agalactiae
MKQQKLTDTAWQNLIEKYNILTAIENEGYFKISSNEIKEFREPRLMAKFDSSKYLPDVFKNNKLNILPISRSKYILGRFKLYENFPDLKNFNTKLPQIDLPELETIDIEKITSEANAINVLQLSGILEDFLELPESEKLYPTFNSRMGSGIFDFYVDTFDESRQFISVENAQIEIDGGFESENFVIIVEAKNVIHTDFHVRQLYYPYRKWTSLVNKPIRLVFSIYSNMIFRLLEYEFEDLNNYSSIRFIKEKYYSLEDTTITIDDLKEVFYSTECVYLDKYGKSRDDVPSVQADSFERVISLLENMYQNEMSKEDIQELMHFSERQVGYYFNAGRYLEIFCKKKNNEKRIVYTLTEIGNKIYLSHYKKRQLLLVRQIFKHKIFRTLFEQVLVNGELPELDYITDLELEYEMVNSRSTAERRARSIRAWISWIFNLTKL

SEQ ID NO: 8269 - protein, 867 aa, Streptococcus agalactiae
ATGCAAAAAGAAGAATCTTACAAAAAGAATATATTAGTTTCACCAGTTGTTAAGTGGGTAGGTGGCAAAAGACAACTGTTACCTGAAATAAAGAAATATATTCCGTCAAAAATTTCAACATATGTCGAGCCATTTTTAGGGGGAGGAGCAGTATTATTTGAGTTACAACCTAAAAAAGCCATAGTGAATGATTTTAATTCGGAGCTGATTAATGTTTATCAAGTAATTAAGGATAATCCAGAGGAATTAATATTTTCCTTGGAAAATCATAAACAGCTAAATAATGAAGATTACTATTATAAAATAAGAGGATTAGATCGTACAGAAGGATTTGATGATTTAACAAATGTTGAAAAAGCATCAAGAATTCTTTATTTAAATAAAACTTGCTATAATGGTTTGTTTAGAGTAAATCGATCTGGTCAGTTTAATACGCCTTATGGTAAATATAAGAACCCTAATATTGTAAATGAGGTTACAATTCGAGCAATGTCTAAGTACTTGAATAAAAACAGTATTAAATTAATGAATGGTGATTATAAAGAAGCTCTTAAAAATTTAAGAAAAGGAGCTTTTGTTTATTTTGATCCACCTTATTTACCAATTTCGTCGTCATCTTCATTTACAGGATATACAGAGAATGGTTTTGATATTGATAAACAGATAGAATTACGTGATGAGTGTAAAAAATTAGCAAAACGAGGTATAAATTTTTTATTATCAAATTCCTATAGTTCAGAGATACTTGATTTATACTCAGATAAATCTTTATTTGAAATTGAAGTTGTGAAAGCTACAAGAAATGTAAATAGTGTTTCTGAAAAGCGTGGTGAGATTAATGAAGTGTTAATAACTAATGTAAAACAA

SEQ ID NO: 8270 - protein, 289 aa, Streptococcus agalactiae
MQKEESYKKNILVSPVVKWVGGKRQLLPEIKKYIPSKISTYVEPFLGGGAVLFELQPKKAIVNDFNSELINVYQVIKDNPEELIFSLENHKQLNNEDYYYKIRGLDRTEGFDDLTNVEKASRILYLNKTCYNGLFRVNRSGQFNTPYGKYKNPNIVNEVTIRAMSKYLNKNSIKLMNGDYKEALKNLRKGAFVYFDPPYLPISSSSSFTGYTENGFDIDKQIELRDECKKLAKRGINFLLSNSYSSEILDLYSDKSLFEIEVVKATRNVNSVSEKRGEINEVLITNVKQ

SEQ ID NO: 8271 - protein, 777 aa, Streptococcus agalactiae
ATGTCAAAAGTAAAAGTTTTAAGTTTAATTACTGTTTCAGGACTATTTTTAATGGCTGGTAATTTATCAGCAAGTGCAGATGTTGTAACTAGTGGAGGTGATACTATAATGCTATCAGGGGTAGATGCAGGTGTATCTGATTCTATAACGCCACCACCATCAAATATAAATCCAGTAACAGATACTATAGAACCAAGTGCGCCAACACCAAGTACAGATCCAATAACAGATACTATAGAACCAAGTGCGCCAACACCAAGTACAGATCCAATAACAGATACCACAGCACCAAGTGCACCAACACCAAGTACAGATCAAACAACAGGTACGACAGATTCAAGTACGTCAGCACCAAGTACAGATCAAACAACAGATACGACAGATTCAAGTACGTCAGCACCAAGTACAGAAGCAGAAAAACCAGCACCTAGTAAAGAACCAGATGCGCCTAAGCCTATTACAAAACCTATTGTTGATGTTCCAATTTCAACAGTTACAGGAGATACAGTAATTGGCACTGAAAATGGAAAAGTGATTGTTCAAAGTGCATCTGGAACAATACTAAAGGATGCCAAAGAGGTTGGTGGTGAGGTACAAAAAGACGGTACTGTAGCAATTAAAAAATCAGATGGAAAAATAGAAGTATTGCCAAACACTGGTGAGGGTAAGACTATCTTTACAATAGTAGGTCTCTTGTTAATTGCTGGAGCAGTTTGGATTGGTTTTAAAGATAATATAAAAAAGTATTTAACCTTTTTCAAAAAGAAAAGTGAAAAA

SEQ ID NO: 8272 - protein, 259 aa, Streptococcus agalactiae
MSKVKVLSLITVSGLFLMAGNLSASADVVTSGGDTIMLSGVDAGVSDSITPPPSNINPVTDTIEPSAPTPSTDPITDTIEPSAPTPSTDPITDTTAPSAPTPSTDQTTGTTDSSTSAPSTDQTTDTTDSSTSAPSTEAEKPAPSKEPDAPKPITKPIVDVPISTVTGDTVIGTENGKVIVQSASGTILKDAKEVGGEVQKDGTVAIKKSDGKIEVLPNTGEGKTIFTIVGLLLIAGAVWIGFKDNIKKYLTFFKKKSEK

SEQ ID NO: 8273 - protein, 546 aa, Streptococcus agalactiae
ATGAAACGTAGAAAAATAGTTTTATTTTTAATGGTGTTAGTGATGGCTTTTATAGTTTATAAAGTTATTCAAAAAGATAATCCAGTGATTAAAACAAGTGGTAATCATACAAAAGTTGAACGAGTTGAACCGAAACATAAGGTTAAGTCTTATGATTCAACTAAAGAAACAAAATCTACTTTGGAAGCTAGTGATCGTCAAGTATCTGATAAGGAAAAGGAGAAGGTTAAAAGATCTATAACTGTACCTATTGATTACCTTGTAAAAATCCCAACACAATCAGATATTAAGGGTGATTATCAAAATAAATTATCCATTACAAATCCTACAGTTGCCCAAACTGTAAAAACCATGTTGATGGCTGGTTATCATTTTGATTTGGAAAGTTTACAAGTATATGAGTCAGATGCGAGTAATGTTTATCAGTTTACTATTAATTTAGTAACAGATAAAAGAGACAAATTAAGTTTAGCTGGTAATTATGTATTAGGTACAGACCAATTTGAGATTGCGAGTGTACATGGTACACCTGTAAATGTAGTATTT

SEQ ID NO: 8274 - protein, 182 aa, Streptococcus agalactiae
MKRRKIVLFLMVLVMAFIVYKVIQKDNPVIKTSGNHTKVERVEPKHKVKSYDSTKETKSTLEASDRQVSDKEKEKVKRSITVPIDYLVKIPTQSDIKGDYQNKLSITNPTVAQTVKTMLMAGYHFDLESLQVYESDASNVYQFTINLVTDKRDKLSLAGNYVLGTDQFEIASVHGTPVNVVF

SEQ ID NO: 8275 - protein, 1371 aa, Streptococcus agalactiae
TTGGGAATACTGATTGTATTTCCTTTTTTATTGGTTTTATTGTTGACTGCTTCGTCAAGTTCTCAACAAGATTGTCAAATTACACCAGATGTATCTTCACAAGTTGAAACCTCAAGTGAGAATGCTTCCAATAGTGATTGGACAAAAAAGGGAACAGTTGCAAATCAAACAGCAGAGAAGGTATTCAATGCTTGGGTAAGTAAAGGCTTATCTGGTGCGAGTGCATCAGGGATTGTTGGTTGGGTTAATTCAGAAGGTGGATTTGCTATGATAGGTCGAGCAGAAGGGCATTATGGTAATGATTTAAAAACAAATTCAATTGCCTTTAATGTGAGACCTACTGGGTTATCTTACTATACGACTGAAGCTGGAGGTGGTATTTATCAAATCACACCTTTCACAAAGTATGCCCCATTAGGCGATCCCAAATGGGAAGATGCAGATGCCATGAATGCCTTTGTTATGAAATCCATTAAATCAGGAGACTGGAATAAAGCAATGGATTTATCAGGTGGAAATCATTCTTTTGAAGAGATGGCACAGATGACTGATCCCAAGCAGGCCACTTTAGTTTGGAATGCTTACGAACGAGGAAATACTGCATATATTAATAAAGCTCAAAAGACTGCGGATGGGCAAAAAGCCTATGAAATATTTAATGGTTCAAAATATAAATTTGATGCAGAAAAATTTTCTAAAAGTTTTGGTGGTGGTTCAAAAACGTCCTCGTCTGGTAAGAGCGATATAATTTCTGATTCTACAGTTTTATCTCTTTGTGATTCAGCTAGTAATGCGGTACAGGGCTTATTTGGTAAAGATAAGTCAGGGAAAGTTAAATACACTTCTTATAATGCATGGAAACCAGATCAATTACCAAGTGATTTGAAAAAGTATGCAATAGATCCTAAGTCAGTTGGTTTATTTTATCGAACGTCTAGTGGATGGAATGCGATAGCTTCTACTGGTGGTCAATGTACAGATCTTTCAGCAAGTTTGATGTATGGTTTATGGCTTAAAGGCGGAATGCATCCAACGCAAAGAATGGGAAATGGTAATATGGTTGTTTCTAATTGGGTATCTGCATTCGGTGGACGCTCTGAAAATACTCCATCTTCTGGAGCTGTTTTTTCAAGTTCAGGTACTTCTAGTGCTGGGCATACTGGAGTGGTTAGTCATGTATTTGAAAATGGCGATATGTTAATAGTAGAGCAAAATTATTCAACTTATTCTGGAGATAATAGAGGATTTGGACCATATTCATGGAATTATCGTTATGTTTCTACTTTAGAATTAAAAAAAGAGCATTATAGTTTTTATAATCCCTCTAAAGCTGGTTATAAATTGTCTGATAAAGTGAAAACGGTAGGTAGT

SEQ ID NO: 8276 - protein, 457 aa, Streptococcus agalactiae
MGILIVFPFLLVLLLTASSSSQQDCQITPDVSSQVETSSENASNSDWTKKGTVANQTAEKVFNAWVSKGLSGASASGIVGWVNSEGGFAMIGRAEGHYGNDLKTNSIAFNVRPTGLSYYTTEAGGGIYQITPFTKYAPLGDPKWEDADAMNAFVMKSIKSGDWNKAMDLSGGNHSFEEMAQMTDPKQATLVWNAYERGNTAYINKAQKTADGQKAYEIFNGSKYKFDAEKFSKSFGGGSKTSSSGKSDIISDSTVLSLCDSASNAVQGLFGKDKSGKVKYTSYNAWKPDQLPSDLKKYAIDPKSVGLFYRTSSGWNAIASTGGQCTDLSASLMYGLWLKGGMHPTQRMGNGNMVVSNWVSAFGGRSENTPSSGAVFSSSGTSSAGHTGVVSHVFENGDMLIVEQNYSTYSGDNRGFGPYSWNYRYVSTLELKKEHYSFYNPSKAGYKLSDKVKTVGS

SEQ ID NO: 8277 - protein, 1998 aa, Streptococcus agalactiae
ATGGACAAAATAGATGATGGTTTGATTGCTTCGACCTTTGCGAAGGTAAAAGATGTGGATATATTTGCGTTAAAGGCTTATATGGAGATAACTCACGGAGCTGAGACTGGAGCTCAAAGCATTTTGTTAGATGTTTTTGTTAATTTTCCCTTTTTCCTACTTAACTTGATTGTTGGTTTATTTTCTGTTATTCTACGCTTTTTTGAAAATTTCAGTTTGTATGATACCTATAAACAAACAGTTTATCATTCGTCTCAAAAATTATGGGAAAATCTATCAGGTAATGGGTCTTATACAAGCTCCTTGCTTTATTTATTGGTTGCGATTTCAGCTTTTTCAATATTTATTTCATATCTTTTTTCAAAAGGAGATTTTTCTAAACGTTTGATCCACTTGTTCGTGGTTATCATTTTAGGTATGGGTTACTTTGGTACGATTCAATCAACATCAGGTGGTATTTATATTTTAGATACCGTTCATCAACTAGCTGGTTCGTTTTCAGATGCGGTAACTAATTTATCACTGGATAATCCATCAGGTGGTAAAACAAAGATCACACAAAAATCATCAGTAGCTGATAATTATGTGATGAAAACTTCTTATACGGCTTATTTGTTTGTCAATACTGGTCAGTTAAATGGTAAGTTTCACAATAATCAAACAGGTAAAGAAGAAAAGTTTGATAACGAACAAGTTTTAGGTAAGTACGATAAATCAGGTAAATTTATCACTCCAAAACAAAAGGATATATTGAATTATACTGATAATTTGGGAGATAAGGCAACCGAAGGGGAGGAAAAAAATAGATGGCTTTCTGCAGTAAATGATTATCTTTGGATAAAATCAGGCTATGTTATCTTAAAGATTTTTGAAGCGGTTATACTCGCAGTTCCATTAATACTCATTCAGTTAATTGCTTTTATGGCAGATGTTTTAGTGATTATATTAATGTTTATTTTTCCATTAGCTTTATTAGTTTCATTTTTACCTAGAATGCAAGATATCATTTTCAATGTTTTGAAAGTCATGTTTGGGGCTGTTTCCTTTCCTGCCTTAGCTGGTTTTTTAACTTTGATAATCTTCTATACTCAAACTTTAATAGCCACCTTTGTTAAGAAAAAATTTACAGATGGTTCCCTGCTTAGTGGTAGTAATTTTAAAGGTCAGGCAATACTGTTTATGTTGCTAATAACAGTTTTCGTCCAAGGTTGTGTGTTTTGGGGAATTTGGAAATATAAAGAAACTTTCTTAAGACTGATTATAGGGTCTAGAGCTTCTCAAGTTATTAATCAATCTGCAGATAGAATAAATGAAAAAGCAAATGATTTGGGTATTACTCCAAAATCCATTTATGAGAGGGCACACGATATGTCAAGCCTTGCCATGATGGGAGCTGGCTATGGTGTTGGTACAATGATGAATGCACAAGATAATTGGAATGCTTTCAAAGAAAGACAACAAGCTAATTTAGATGATGGTCAGTCTAAAACTAATGATGCTGATAAGTATGATGAAGCTAATGCGGATGATACTGTTATTTCTAAAGAGGCTGAGCTGACTAATGAAGGTGAATATCAATCAGAGTTACCTAAAGAAGCAAGTAAAAGGATTGAACAATTGGGAAAGGAATCTTCTTATGAGCTATCGTTTATATCAGAAGGTAATTCAACAGAGGAAATTTTAAAAAATGTTAAGTCGGATAATCACACGTTTCAAGAAGGAGATGGAGATACTTCATTAACAAATCAGGATATGATAACAAATGATATAGAAAATCATTCAAATAACTATACTTCACCATTAAAACAGCGAAAGCTTAATAAGCTAGAGGGTGAATTAAGTCAATTTAATAGTGATGTATCCATGACAAAAAATCATGGTAAAAATGCTTTTGAAAAGGGATTTAATGCCAGTAAAACTAAGGAAGTTAGAAAGCAACATAATCTTGAACGACAGTCAAAAGTTTTGGAAGAACTAGAAAAGCTGAGAGAAGGTAAG

SEQ ID NO: 8278 - protein, 666 aa, Streptococcus agalactiae
MDKIDDGLIASTFAKVKDVDIFALKAYMEITHGAETGAQSILLDVFVNFPFFLLNLIVGLFSVILRFFENFSLYDTYKQTVYHSSQKLWENLSGNGSYTSSLLYLLVAISAFSIFISYLFSKGDFSKRLIHLFVVIILGMGYFGTIQSTSGGIYILDTVHQLAGSFSDAVTNLSLDNPSGGKTKITQKSSVADNYVMKTSYTAYLFVNTGQLNGKFHNNQTGKEEKFDNEQVLGKYDKSGKFITPKQKDILNYTDNLGDKATEGEEKNRWLSAVNDYLWIKSGYVILKIFEAVILAVPLILIQLIAFMADVLVIILMFIFPLALLVSFLPRMQDIIFNVLKVMFGAVSFPALAGFLTLIIFYTQTLIATFVKKKFTDGSLLSGSNFKGQAILFMLLITVFVQGCVFWGIWKYKETFLRLIIGSRASQVINQSADRINEKANDLGITPKSIYERAHDMSSLAMMGAGYGVGTMMNAQDNWNAFKERQQANLDDGQSKTNDADKYDEANADDTVISKEAELTNEGEYQSELPKEASKRIEQLGKESSYELSFISEGNSTEEILKNVKSDNHTFQEGDGDTSLTNQDMITNDIENHSNNYTSPLKQRKLNKLEGELSQFNSDVSMTKNHGKNAFEKGFNASKTKEVRKQHNLERQSKVLEELEKLREGK

SEQ ID NO: 8279 - protein, 2499 aa, Streptococcus agalactiae
ATGGTAAAAAAATTGGAATATCCGATTGATAGAATACATCAAAATTTAGCTTTACGAAAAGATAAAGTTGTTGTCGCATACTATCGCATTCCAAATACACCAATCACTATTACAGATAGTGATAAAAAAGATAGTCATAAAGCGAAGGTAGCACAGGTTATCAAAAAATTAGCTAAATATAAAAATTTTGATATTTCATTAATACCAAAAGATTATCTTCTTGGTGAAAAAATGTCGGATTTTGAAGCGGATCTAGCAGATGATGTTAAAGAATTAGGGTTAGAAACACTCGATTTTACAGTTGATACGTTAACACATGAAATGGAGATACCGTATCAGTTTGATTGGTTAATTGGAGTTGATCTTGGTAAAGGGCAATACAATGCTAATATAAAAGAATTTATTTATAATCAGTTTGAATCTATCGCATCAAACTTCGCTTCTTTAGCTGGTTATGAGGTAGAAGTAGATGAAGATTGGTATAAAGAACATTCAGAAGAAGAATTACTTGTCTATAGTTTATTGTCTACCCTGAAAGCCAAAAGATTAACGGATGTTGATTTATTTTATTATCAACGGATGCAATTTTTAAGATATGTTCCTCATACTAAAAGTGAGGTTATAGCTAATCGGAATATGTTAAATGTGACAGATACGTTGATTAAATCACTAGAAGGTGGTTTTTTAAAATTGAAGAGTGCTTATGGGAGTTCATTTGTATCCGTTCTTCCAGTAGGTCGGTTCTCTACCATATTTAATGGCTTTCATCTTGGTGAACTAGTTCAAAGAATGAGTTTTCCGGTTGAATTAAGATTTCAAGCGGAATTTATAGATAAGACAAAATTGGGTGGCACTATGGGGCGCTCAAATACACGCTATGATCAAATCATGAAAGAAGCTTATAACACAAATACGGTTCAACAAGATGATATCTTGATGGGAGCATATTCGCTTAAGGATCTTATGAAAAAAGTTGGAAATAAGGAAGAAATCATAGAGTATGGTTGTTATTTGGTAGTTGCTGGTTCTAGTTTAAATCAACTAAAACAACGTAGATATGCCATTTTAAGTTACTTTGATGATATGAAAGTCAATGTTTATGAAGCCAGTCATGATACACCATATTTATTTCAAGCGTTACTTTATGGTCAAGATTTACAAAAAACAACTCGTAAGTGGAATCATTTAGTAACTGCTCGAGGTTTTTCGGAGTTGATGCTTTTTACAAATACCCAATCAGGTAACAGGATTGGTTGGTATATTGGACGAGTAGATAATCGTTTAACTGCTTGGGATTCTATTGACGAAGCTATTATGGGATCTAAAAATCTTGTCTTATTTAATGCGACAGTCGCGAATAAAGAAGATGTTGCTGGTAAGGTTACTAAAAATCCTCACGTGATTATAACTGGGGCGACAGGTCAAGGGAAATCATACTTAGCACAGATGATCTTTTTACATACTGCTCAACAAAATGTTCGTGTCCTTTATATTGACCCTAAACGAGAACTACGGCAACACTATTTAAAAGTTGTTTCTGATCCAGAGTATGCACGTAAGTTTCCTCTACGTAAGAAGCAAATTGAGGAAACGAATTTTGTCACTCTTGATAGTTCTGTCAAAGAAAATCATGGTGTATTAGATCCTATTGTTATTCTTGATAAGGAAGGTGCTTCATCAACGGCTAAAAATATGTTGCTTTATTTGTTGAAAAATGCGACAGAAATTAAATTAGATCAAACAACAGCTTTAACAGAAGCAATTAGTCAAGTCATTGCAAAACGTGAAGCTGGTGAAGTCGTTGGTTTTAATCAGGTGATAGAGGCACTTATTGATTCTGAAAGTGATGAAGTTCAGTCAGTTGGTCGTTATTTTAAAGCTATTATTCAGAATTCTATTTTAGAGTTGGCATTTTCAGATGGTGATGTTGCTGGTCTTTCTTACGAAGAACGTGTGACAGTTTTAGAAGTTGCGGATTTATCACTGCCTAAGGACGGTTCAGATCATATATCTGATCATGAAAGTAATTCGATTGCTTTAATGTTTGCTTTAGGTGCGTTTTGTAAGCATTTTGGTGAGCGTAGTGATGATGAAACAGTTGAAATTTTTGATGAGGCTTGGGTTCTCATGCAGTCATCAGAAGGAAAAGCTGTTATTAAATCTATGCGCCGTGTTGGTCGCTCTAAGTATAATGTGTTGATGCTAGTGTCTCAATCTGTTCATGATGCAGAAAACGATGATGATACGACCGGCTTTGGGACAATTTTTTCATTTTATGAAAAATCGGAACGTGAAGATATCTTAAAACATGTAGGGTTAGAGGTGACACCTAAGAATTTAGAGTGGATTGATAATATGATTTCTGGGCAATGTCTCTACTATGATGTTTATGGCAATTTGAATATGATTTCGATACATAACATTCATCCAGATATTGATCCATTGTTAAAACCAATGAAGAAAACAGTTTCTAGCCACCTTGAAAATAAATATGCTTCG

SEQ ID NO: 8280 - protein, 833 aa, Streptococcus agalactiae
MVKKLEYPIDRIHQNLALRKDKVVVAYYRIPNTPITITDSDKKDSHKAKVAQVIKKLAKYKNFDISLIPKDYLLGEKMSDFEADLADDVKELGLETLDFTVDTLTHEMEIPYQFDWLIGVDLGKGQYNANIKEFIYNQFESIASNFASLAGYEVEVDEDWYKEHSEEELLVYSLLSTLKAKRLTDVDLFYYQRMQFLRYVPHTKSEVIANRNMLNVTDTLIKSLEGGFLKLKSAYGSSFVSVLPVGRFSTIFNGFHLGELVQRMSFPVELRFQAEFIDKTKLGGTMGRSNTRYDQIMKEAYNTNTVQQDDILMGAYSLKDLMKKVGNKEEIIEYGCYLVVAGSSLNQLKQRRYAILSYFDDMKVNVYEASHDTPYLFQALLYGQDLQKTTRKWNHLVTARGFSELMLFTNTQSGNRIGWYIGRVDNRLTAWDSIDEAIMGSKNLVLFNATVANKEDVAGKVTKNPHVIITGATGQGKSYLAQMIFLHTAQQNVRVLYIDPKRELRQHYLKVVSDPEYARKFPLRKKQIEETNFVTLDSSVKENHGVLDPIVILDKEGASSTAKNMLLYLLKNATEIKLDQTTALTEAISQVIAKREAGEVVGFNQVIEALIDSESDEVQSVGRYFKAIIQNSILELAFSDGDVAGLSYEERVTVLEVADLSLPKDGSDHISDHESNSIALMFALGAFCKHFGERSDDETVEIFDEAWVLMQSSEGKAVIKSMRRVGRSKYNVLMLVSQSVHDAENDDDTTGFGTIFSFYEKSEREDILKHVGLEVTPKNLEWIDNMISGQCLYYDVYGNLNMISIHNIHPDIDPLLKPMKKTVSSHLENKYAS

SEQ ID NO: 8281 - protein, 408 aa, Streptococcus agalactiae
ATGGAAGAAGAAAAATATTTTGATTACAGCAGGGGCTTGAATGCTCCTTACTGGATTCAGGAAGTTAAAACGGCAAAAGGCAAAGTGATTTGGTATTTTTCTACACCTATGCAGTTATCATTTTTTATTGTTTTCTTTATCATCTTAGTGTTGATGCTGACGGTATGTTCTCCATTAATGCAGGTGTTAAATGCTTTAACGCATTCCGTTTCAATGCTCTTGTATTGGTTTGTTCCAAGCAAGTTAGCGAAATTTTATGTAGAATATGAACCGCAAGGAAAAAAGATGCATATCTTTTTGTGGGATTATCTGGTTTATCTCAAAGATTTTGGGTTAAATAAAAAAGGGATTTATCAAGGAGAACGTGTTGACATTGTAGAGGAAATAGTTTTTGAGAAGACGAAAATA

SEQ ID NO: 8282 - protein, 136 aa, Streptococcus agalactiae
MEEEKYFDYSRGLNAPYWIQEVKTAKGKVIWYFSTPMQLSFFIVFFIILVLMLTVCSPLMQVLNALTHSVSMLLYWFVPSKLAKFYVEYEPQGKKMHIFLWDYLVYLKDFGLNKKGIYQGERVDIVEEIVFEKTKI

SEQ ID NO: 8283 - protein, 264 aa, Streptococcus agalactiae
ATGAATTTAGTAAAAGTGAATAGTGTTATTTTAGCAGGTGGTCCCAACGTTTCAGGACTAAAGCAATTTTTTCAAGGTGATGGGATTTACCTCATTAGTGTAATTGCTGTCTTTATAATTATTAAGAATTGGAAAGAAGCTAATTGGTTAAAAGTTTTCTCAACCTTAGCTATTTATGCGATTATTGTATCAATGCTTAAAGGTCAACAGATTCTATCTTTTTTGGGTGGAATGCTTCGCTGGTTTGGTGTTGAGACGGGGTTA

SEQ ID NO: 8284 - protein, 88 aa, Streptococcus agalactiae; identical to SEQ ID NO: 3606

SEQ ID NO: 8285 - protein, 951 aa, Streptococcus agalactiae
ATGATTGATATACAAAAAATAAAAAAGTTTCTATTGAGATATACAAAGAAAGAAGAGGGAGGTAAACAGCCTAAGACAAAAGAAGTAAAGCAAAGGACAGCCAATTTTATTGTCTATGGTATCTTAGGTTTGTTATTTATTGTAGGATTTTTTGGATCATTGAGGGCAATTGGCTTATCTAATCAGGTACAACATTTAAAAGAAACAGTTATTGCTGTAGAAAAAAAGTCAAAACATAAGAAAACTGACGATTCATTAGATATATCTAGAATTCAGTATTACATGAATAATTTTGTCTACTACTATATCAACTATTCACAAGATACTGCAGATCAAAGAAAAACAGAATTAGAAAATTATTATTCTTTCTCAACTGCCAGTATGACAGATGATGTTAGAAAGTCTAGGACTTTGCAGACACAACGTTTAATAAGTGTTGAAAAAGAAAAAGATTACTATATAGCTTTGATGCGTATTGGTTATGAAGTTGATAAAAAATCATATCAGATGAACTTGGCTGTTCCTTTTCAGATGCAAAGAGGATTGCTTGCAATCGTTAGTCAACCTTATACTGTGGCAGAAGATTTGTATTTAGGTAAATCTAAAGCATTTGAGAAGAAAACATTAGATCAAGTCAAGGAACTATCGAAAGAACAAGTAAGTTCTATTCAAAAGTTTTTACCAGTTTTCTTTAATAAATATGCCTTAAGTAACAAGACAGACTTGAAACTGTTAATGAAAACTCCAGAACTGATGGGGAAAGGATTTAAAGTTAGTGAGCTAGATCTTAATAATGCGATTTATTATCAAGAAAAAAAGCATCAAGTCGTGCAATTATCAGTAACTTTTGAAGATCTTGTAACAGGTGGCACACGATCAGAAAACTTTACATTATATTTATCTAAAGCAGACAATGGTTGGTATGTTGAAGAGATGTATCATTATTTTAAA

SEQ ID NO: 8286 - protein, 317 aa, Streptococcus agalactiae
MIDIQKIKKFLLRYTKKEEGGKQPKTKEVKQRTANFIVYGILGLLFIVGFFGSLRAIGLSNQVQHLKETVIAVEKKSKHKKTDDSLDISRIQYYMNNFVYYYINYSQDTADQRKTELENYYSFSTASMTDDVRKSRTLQTQRLISVEKEKDYYIALMRIGYEVDKKSYQMNLAVPFQMQRGLLAIVSQPYTVAEDLYLGKSKAFEKKTLDQVKELSKEQVSSIQKFLPVFFNKYALSNKTDLKLLMKTPELMGKGFKVSELDLNNAIYYQEKKHQVVQLSVTFEDLVTGGTRSENFTLYLSKADNGWYVEEMYHYFK

SEQ ID NO: 8287 - protein, 252 aa, Streptococcus agalactiae
ATGTTTAATTTTACTGAAGAAGCATGGAAAGATTATGTTTCTTGGCAACAGGAAGATAAAAAAATCTTGAAACGAATTAATCGTTTGATAGAAGATATTAAAAGAGACCCATTTGAAGGCATTGGAAAACCAGAACCTTTAAAATACCATTATTCAGGGGCTTGGTCTCGAAGAATTACAGAAGAACATAGGTTGATTTATATGATAGAAGATGGAGAAATCTATTTTTTATCTTTTAGAGATCATTATAAG

SEQ ID NO: 8288 - protein, 84 aa, Streptococcus agalactiae
MFNFTEEAWKDYVSWQQEDKKILKRINRLIEDIKRDPFEGIGKPEPLKYHYSGAWSRRITEEHRLIYMIEDGEIYFLSFRDHYK

SEQ ID NO: 8289 - protein, 264 aa, Streptococcus agalactiae
ATGGAGGCTATTGTTTATTCACATTTTAGAAATAATTTAAAAGATTATATGAAGAAGGTCAATGATGAATTTGAGCCTTTGATTGTAGTTAATAAAAATCCTGATGAAAATATAGTGGTTTTATCTCAAGATAGCTGGGAAAGTTTACAAGAAACGATTCGTTTGATGGAAAATGATTATCTATCACATAAGGTTATTAATGGTATATCACAAGTTAAAGAGAAGCAAGTCACTAAACATGGTTTAATTGAGGTAGAAGATGTT

SEQ ID NO: 8290 - protein, 88 aa, Streptococcus agalactiae
MEAIVYSHFRNNLKDYMKKVNDEFEPLIVVNKNPDENIVVLSQDSWESLQETIRLMENDYLSHKVINGISQVKEKQVTKHGLIEVEDV

SEQ ID NO: 8291 - protein, 471 aa, Streptococcus agalactiae
ATGATTGCAATTATAAGGACTCGTGAAAAAGGTAGAAGTCAATTTTTATGTGAGTTAGACATCATGCAGTTTACGGAAAATCAAGTAAGAAACCGTATGATAGAAAAAGGCATTAAGGATGATGCCTTTTTTATTTGTGGTTTTTCTGATTGGAATGTTGATAGGATTATGTCACTTACAGAAGTCTATCTTTTAAAAAGATGTATTGAAGGACTTTATGATGGTGATGACTATATTGTTCAATATCTTTTGAAAAAAGGTTTATCAGTTCATTCAATAGTGACAAAATATTATATATTTTTGTCAAATAATGAAAATAAAGTAATGAAATATATCTTAAGGAAAGTTGAATTTGATTCTTTAATTGATTTTTGGCAACGGTCAGTAACTTGGGTAAATGCTTTAAATGCTTATATTGAAGAAGGAATAGTATTAAACACCTCAAAAGGTTTTTACGTGTTAAAAACAGAA

SEQ ID NO: 8292 - protein, 157 aa, Streptococcus agalactiae
MIAIIRTREKGRSQFLCELDIMQFTENQVRNRMIEKGIKDDAFFICGFSDWNVDRIMSLTEVYLLKRCIEGLYDGDDYIVQYLLKKGLSVHSIVTKYYIFLSNNENKVMKYILRKVEFDSLIDFWQRSVTWVNALNAYIEEGIVLNTSKGFYVLKTE

SEQ ID NO: 8293 - protein, 482 aa, Streptococcus agalactiae
ATGGATGTTAGTGCAATTGTTAGAGATATAAAAACTGGTAGAGCTACGTTAGTTTGTTTTCCTGTGGAAATGAGTGAGCTTAAGTTAGCTTTGGGGCTTCGTGAAGAAGATGATTTAGAGTATATTATTGCAGATTCGGATTGTCAGTTACTAAAAGAACATGATTCTATTGAGATGATTAATCAATTTGTTGAACTGGTAGAGAATGTTGATAGTGAACTTGTTAAAGCAGTGCATCAGGTAATAGGTTATACTGCCTCAGACTTTGTGGATTATGATTTTAATTTTGGTGATTGTTGTTTACTGTCTGATGTCACAACTAGACGAGAACTAGGTGAATATTATTTCGATGAATTAGGCGTACAAGGAGTTGGTAAAGAGGCTCTGGAGATGTATTTTGATCATGAAGCTTATGGTCGAGATATTGACTTAGAAAGCCAAGGTTTTTTCAGACTACGGATATGTCGAAATATCAGGGTAAG

SEQ ID NO: 8294 - protein, 161 aa, Streptococcus agalactiae
MDVSAIVRDIKTGRATLVCFPVEMSELKLALGLREEDDLEYIIADSDCQLLKEHDSIEMINQFVELVENVDSELVKAVHQVIGYTASDFVDYDFNFGDCCLLSDVTTRRELGEYYFDELGVQGVGKEALEMYFDHEAYGRDIDLESQGVFQTTDMSKYQGK

SEQ ID NO: 8295 - protein, 270 aa, Streptococcus agalactiae
ATGTCAAATACACGTTCAGAAGCAGATAAAAAGTTGTTAGTGGTTACTCAGGAGCTTTCAGAGCTGTTGGTCAGCCATCAGTATGAACAGTCATGGGAAAAAGCTGGAGAGTTAAATAGCTTACTTAAAAAGCGTGAAGAATTGACTTTACCAGGTTATATGGTCGACATGATTCAACAACATTTGAAATCATACTACTACCAAAATAATATGATTAATAAGGCTCATAAGTCTATGTCAGCGATTGGTCATAAACTACAAGAATTTCAT

SEQ ID NO: 8296 - protein, 90 aa, Streptococcus agalactiae
MSNTRSEADKKLLVVTQELSELLVSHQYEQSWEKAGELNSLLKKREELTLPGYMVDMIQQHLKSYYYQNNMINKAHKSMSAIGHKLQEFH

SEQ ID NO: 8297 - protein, 351 aa, Streptococcus agalactiae
ATGATTGAAAATTTTGCACTTAATTTAATTCGTTTACGCAAACAAAAAGGTCTATCTCAAAAAGAACTTGCCAAAAAAATAGGAATGTTACCGCAAACCATTTCAAATATTGAAAATCAAAAAGGCTATCCTACATTTTCAAACTTGGATAAAATTGCTCGATATTTCAATGTCTCGGCAACGGAACTTTTTGGAACACCACAACAAATTGAATTAGAAAGAGTAATGTTTCAAACTGATGAATATAGCCGTAAAGCAGAAAAGATTTTGTCTGCTGTTTCGGTTTTTGAAAATTTTGTAAAGAAATATGATTATCAAAAGATTATAGAATTTGGTTTGAGTTTAAAAGAA

SEQ ID NO: 8298 - protein, 117 aa, Streptococcus agalactiae
MIENFALNLIRLRKQKGLSQKELAKKIGMLPQTISNIENQKGYPTFSNLDKIARYFNVSATELFGTPQQIELERVMFQTDEYSRKAEKILSAVSVFENFVKKYDYQKIIEFGLSLKE

SEQ ID NO: 8299 - protein, 228 aa, Streptococcus agalactiae
ATGAACGTGACTGACTTCAAATCTAATTTTATATTTCCAAAGAGACTTAAAAGTTTAAGGCAAGAAAGTGGATTAAAACAGCAAGAGATAGCTCCACTACTAGGGATAAAACAAAATACTTATAGTGATTGGGAAACAGGGAAAAGTGAACCGAATTTAGAAAATGTCGTCAAGCTAGCAAAATTATTTAAAACAACTACAGATTTTTTATTGGGGGTAACAGATGAT

SEQ ID NO: 8300 - protein, 76 aa, Streptococcus agalactiae
MNVTDFKSNFIFPKRLKSLRQESGLKQQEIAPLLGIKQNTYSDWETGKSEPNLENVVKLAKLFKTTTDFLLGVTDD

SEQ ID NO: 8301 - protein, 375 aa, Streptococcus agalactiae
TTGTATAGTAACCGAGAATTTGCTTATTTTGTTAATAGACGAAATAATTTAGATAAAATGATTGATTTACTAGTTTTTATGATTCCTGATCGTGAGTTTTATTATCCTGAGATTCAAACAGGTGAGCTTAGAGATTATCAGATAGACATTTATGATTTGATTAAGATTGGTTATGTTGGTGTTTATGAAATTCAAAAAGACTACGAAGATAAGTTAAGGGAACTTGCTGATTTTAAACGGAAACTTTTAAAGTTTGGGTTACTCATGCAACCACTAGATAGGCAAAAAGAAATTGTTATGAATTTAGCTAGTCAGTATCGTTTACATAAAAGATTATTAAAGCTAAGAGAAAATTTTAGAGGTGATGAACGTGAC

SEQ ID NO: 8302 - protein, 125 aa, Streptococcus agalactiae
MYSNREFAYFVNRRNNLDKMIDLLVFMIPDREFYYPEIQTGELRDYQIDIYDLIKIGYVGVYEIQKDYEDKLRELADFKRKLLKFGLLMQPLDRQKEIVMNLASQYRLHKRLLKLRENFRGDERD

SEQ ID NO: 8303 - protein, 1230 aa, Streptococcus agalactiae
GTGGATGCTATCTATTTAAAAAAATTTCGAAAGAAAACAGGTCTAAAACAAAAGGAATTTGCTTTAAGTTCTGGTTTGACATTGAAATCACTTAGAAACTATGAGCAAGGAAAGCGGAAGTTGACACTTGAAAAGTATCAAGAGATAAAATCACATTTTGGATATCTAGTAGAAAATGATAGTTCACGATTACAAGTGATGATTGACTATGTCAGAATTACGTTAAAGGATGTTAGGGATCTTGAATTTTTCTGTCGTAACTTTTTGCACTGTGCATTTAAAGAATTTCAGCCTTTTGAATCGAAGTTGATGAATTACAATCATCTTTGGAAACGTGGAGATATTTGGATATTTGATTTTGCGGATAAACATGAGACAGGTAATTTTCAAATAACTGTTCAATTGTCTGGTCGTGGATGCCGACAATTGGAATTGTTGATGGAAACTGAAAAATTTACATGGCATGATTGGTTAAGTTATCTAAGAAATTCATATCGTGATGATATGAATGTGACACGTTTTGATATTGCTATTGATGAATTGTATCTGGGTAAGGATAGAGAAAATGAACAGTTTCATTTGTCAGATATGATTTCAAAATATTATCGTCATGAGTTAGATTTTGAAAGTTTGAGAACTTGGAATTATATAGGTGGCGGTTCTTTAAATTTTTCGGATATGGAAGAGATTGAGCAGAATAGACAAGGAATATCGCTTTATTTTGGTAGTCGTCAATCAGAAATGTATTTTAACTTTTATGAAAAACGTTATGAAATTGCAAAGCAGGAAGGAATTACTGTTGAAGAAGCTTTAGAAATTTTTGAATTGTGGAATCGTTATGAGATACGGTTATCTCAAAGTAAAGCTAATGCGGCAGTTGATGAATTTATTTCTGGAGTGCCGATTGGTGAAATATCCAGAGGGTTAATTGTTAGTAAGATTGACGTGTATGATGGGAAAAATGAATATGGGTCGTTTCAAGCAGATAGAAAGTGGCAATTAATGTTTGGAGGTGTTGAGCCTTTAAAATTTGTTACAAAGCCAGAGGCTTATAGTATTGAACGAACCTTACGTTGGTTAAGTGATTCTGTTTCTCCGTCTTTAGCTATGATAAGAGAGTATGACATGATTGTGGATGGTGACTATTTACAAACCATTCTTAATTCTGGGGAAGTCAATGAACGTGGGGAGAAGATACTTGACAGTATCAAAGCTAGCTTAGGTATTTTG

SEQ ID NO: 8304 - protein, 410 aa, Streptococcus agalactiae; identical to SEQ ID NO: 3618

SEQ ID NO: 8305 - protein, 1659 aa, Streptococcus agalactiae
ATGAGTTATTACCTTTTTTCTTTTCTATTTATTTTGTTTTTGACACCTGTAGGCGTGTATAGTTATTACTATTTAGATTTGTTAAAAATGATGGATAAAATGTCTATGATCAGTGTAGGTACAGGTTTGTTTTTAGCATTTTTTGTTTCTTGGTATTTGACTTGGTTTTTGCAAGAAGCTAATCCATTATTTAATAAACTAGATCGATTAAAAAGAATGTCTAAGTTTTTATATGAGAATGGCTATGTTTATGAAAAACGTAAAAAATCAAATAAGAAAACGAAGACAAAATATCGTTTTCCAAAAGTTTATGTGAAACAAGGTAAGTATGATTTAAGTGTTTCATTTGAAATGGCTGGAGGAAAATTTCAAAAGAAATTTAAGGATATTGGTGGAGAATTAGAAGATACTTTTTTCATGGATTTTATGGAAAAAACTGATGATCCACGCTTTAAAATTTACAAATTAGCTTATTCGGCTTTCTTATCACGTATTACGGTTAAAGATGTGATATGGGATAAAGATAAGGGAATTAAGTTAATGGATGGCTATTATTGGGATTTCATCAATGATCCTCATTTATTAGTTGCTGGTGGTACTGGTGGAGGTAAAACAGTATTACTAAGGTCAATCCTTCGTTGTCTTGCGGAAATTGGAGTTTGTGATATATGTGACCCTAAAAGAGCCGATTTTGTTACTATGTCAGATTTATCAGCTTTTGAAGGTAGAATTGCCTTTGAAAAGGCTGATATTATTGAGAAGTTTGAAAATGCTGTTACGATAATGTTTGCACGTTATGATTTTGTTCGAAATGAAATGAAGCGTTTAGGTCATAAAGACATGAAAAAGTTTTATGATTATGGATTGGAACCTTATTTTTTTGTATGTGATGAATATAATGCTTTAATGAGTTCTTTGTCTTATCAGGAACGTGAGATTGTAGATAATGCATTTACTCAATATATATTGTTAGGACGTCAGGTTGGATGTAATGCGATTATAGCAATGCAAAAGCCGTCTGCAGATGATCTTCCCACTAAAATTAGATCTAATATGATGCACCATATCTCGGTTGGTCGTCTCGATGATGGTGGTTATGTGATGATGTTTGGTGATGAAAATAGAAATAAGGAATTTAGGTTTATTAAATATCTTGCAGGTCGTCGTGTTTATGGTCGAGGTTATTCAGCTGTTTTTGGTGAAGTAGCAAGAGAATTTTATTCTCCTTTATTACCTAAAAATTTCTCTTTTTATGATGCTTTTGAAAAAATAAATAGGCATGAGAATCCTTTTGATCCTACAGAAAATCAGGAAGTTTCTAAGGCGATTCTTAAAGACGAATCTTTGAGAGAGTTTGTGGAAAAAACGTCTGAAAATGAGTTACTTAAGGGTTCAGTAGGGTTTGATTTTGATGATGAAATGGAGGAAATGGAAAATATGAGTATTGGTGATTTAGCTAAGAAAACAGGTTTTTCATTTGGTAAGATTAAGAATTTAATAGATATGATTGAAAAAGATAATTATATGACTTTTAGTCGTGAAGATGAAAAGGTTGTATTAAATGATTCTGATGCAGTCGTCTTAGAAAGTTTACTGACACAAAAAGATGAATTTGAGGGTAGCTGGAAAGAGTTACTATTGAATTATTTTAAGGGTGAA

SEQ ID NO: 8306 - protein, 553 aa, Streptococcus agalactiae; identical to SEQ ID NO: 3632

SEQ ID NO: 8307 - protein, 459 aa, Streptococcus agalactiae
ATGGCAAAAATTGGTTTAAACTTTGGAGAAAAATTACAAATTGCAGATAAGGAATATCGTACCTTTAATGATGGATTGGATGTAAATGTTTTGTTAGGAGATTTAACTTGGAGACGATATGAAGAACCAGTTCAATTTACGGAAGATGATACGACACAACCACCAGATCGATTTGGTCGTTATCCACAAAAACCAACAGGTGAAGTGAAGTGGAATGATATTGCAGTATTTAGTACTGCTCAAAATGAAACAATTTTTGTTTCAATTACTGATATGCCTTCTTATGCAATCGAGGATTTAGGTCTTAAATTGGGTGACCCTATTGAATTAAGTGATGTTGTTGTGACATGGTCTAACGTTTCAGGTGGTATGTTTAAAATTTTTGCATCATCACTTAAGAAAAAGGATGTTGCAAATAATGGAAACGCATCAAAAAATGAAGCATCTAAAGTTAATAAA

SEQ ID NO: 8308 - protein, 153 aa, Streptococcus agalactiae
MAKIGLNFGEKLQIADKEYRTFNDGLDVNVLLGDLTWRRYEEPVQFTEDDTTQPPDRFGRYPQKPTGEVKWNDIAVFSTAQNETIFVSITDMPSYAIEDLGLKLGDPIELSDVVVTWSNVSGGMFKIFASSLKKKDVANNGNASKNEASKVNK

SEQ ID NO: 8309 - protein, 294 aa, Streptococcus agalactiae
ATGAAACAAGAAACATTAGTGTTACTTCCAAATTTTATTGGAGATGCAATTTATGAAGGATTTGAAGCTGGACCTGCTCAATTAAATGGTAAAAAAGGGTCTTATACAAGACACATTTTGTTTAATGAAAAACATGGTAAGTTTTATGTTTATACACCAGCATCTTCACGTGTGATTGGAAATGGAAAAATGGTAACTGTTGAAAAACCGTTATTGTTTATTGACAATACAATTAATGGTAGAAATATTGAACCTGCAAAAAATGTATGGGCTGAAAAGCTTATTGAAGTGAAA

SEQ ID NO: 8310 - protein, 98 aa, Streptococcus agalactiae; identical to SEQ ID NO: 3638

SEQ ID NO: 8311 - protein, 2589 aa, Streptococcus agalactiae
ATGTATAAAAATCAAAACACAAAAGGTCACGGATTTTTTAGAAAATCAAAAGCATATGGTTTAGTATGTGGGATTGCACTTGCAGGTGCATTTACATTAGCTACTAGTCAAGTGTCTGCTGATCAAGTTACAACTCAAGCAACAACTCAAACAGTAACGCAAAATCAAGCAGAAACAGTAACATCAACTCAACTTGATAAAGCAGTAGCTACAGCTAAAAAAGCAGCTGTAGCTGTTACAACCACAGCTGCAGTTAATCATGCGACAACTACTGATGCACAAGCTGATTTAGCTAATCAAACACAAACAGTTAAAGATGTTACTGCAAAAGCACAAGCTAATACACAAGCTATTAAAGATGCTACTGCTGAAAATGCAAAAATTGACGCAGAAAACAAAGCAGAGTCTCAACGTGTAAGTCAGTTAAATGCACAAACTAAAGCAAAAATTGATGCTGAAAACAAAGATGCACAAGCTAAAGCAGATGCGACTAATGCACAATTACAAAAAGATTATCAAGCTAAATTAGCGAAAATCAAATCAGTTGAAGCTTATAATGCAGGTGTACGTCAACGTAATAAAGATGCACAAGCTAAAGCAGATGCGACTAACGCACAGTTACAAAAAGACTATCAAGCTAAATTAGCACTTTATAATCAAGCTCTAAAAGCTAAAGCAGAAGCAGATAAACAGTCTATTAATAATGTTGCTTTTGATATCAAAGCTCAAGCTAAAGGTGTTGATAACGCTGAATATGGAAACTCAATCATGACTGCAAAAACTAAACCTGACGGAAGTTTCGAGTTTAACCATGATATGATCGATGGTGTGAAGACAATCGGCTATGGGAAATTGACAGGTAAAGTTAATCATCATTATGTTGCTAACAAAGATGGCTCTGTGACAGCATTTGTTGACTCTATCACTCTTTACAAGTACGAGTATCGTAATGTTGCTCAAAATGCTGCTGTTAATCAAAATATTGCTTTCAGAGTCTTAACTAAAGACGGACAAATCATTTTTGAGAAGAAACATAATGGTAACAAAACTTTTGCAGAAACTTTAAACAAAACTTTACAACTCAATCTTAAATATGAGCTTAAACCACATGGTTCTAGTGGAAGCGTTGAAGTCTTTAAGATTCATGATGACTGGGTACATGACACACATGGGTCTGCTTTAGTGTCTTATGTTAATAATAATGATGTTGTTCCTAACGTTGTTATACCAAAACAGCCAACACCACCGTCAACAGAAAAAGTGACTCCTGAAGCAGAAAAACCAGTACCTGAAAAACCAGTTGAGCCTAAATTTGTAACACCTACATTAAAAACTTACACTCCAGCTCAACCAAAAGTGAAACCACATGTGTCTATTCCTGAAAAGATTAACTACTCAGTTAGTGTTCATCCTGTTTTAGTTCCAGCTGCTAATCCTTCAAAAGCTGTCATTGATGAAGCAGGTCAATCTGTTAATGGTAAAACCGTATTACCAAATGCTGAATTAAATTACGTTGCTAAACAAGACTTTAGCCAATATAAAGGAATGACTGCATCACAAGGTAAAATAGCTAAAAACTTTGTCTTTATTGATGATTATAAAGATGACGCACTAGATGGTAAGTCTATGAAAGTGAACTCAATCAAAGCATCTGATGGCACAGATGTGTCACAACTCTTAGAAATGCGACATGTGCTTTCTACGGATACTTTAGATGAGAAACTTCAAACGCTTATTAAAGAAGCAGGAATCAGTCCTGTTGGTGAGTTTTACATGTGGACTGCAAAAGATCCACAAGCTTTTTATAAAGCTTATGTTCAAAAAGGTCTAGATGTTACTTATAACTTATCATTTAAAGTTAAAAAAGAGTTTACTAAAGGTCAAATTCAAAATGGTGTTGCACAAATCGACTTTGGCAATGGATATACAGGTAATATTGTAGTCAATGATTTGACAACTCCAGAAATACATAAAGATGTGTTAGACAAAGAAGATGGCAAGTCTATCAACAATGGTACTGTCAAATTAGGTGATGAAGTTACTTACAAATTAGAGGGTTGGGTAGTTCCAACAGGTCGTTCTTATGATCTATTTGAATACAAATTTGTGGATCAATTACAACGCACACATGATCTTTACTTACGTGATAAAGTGGTCGCTAAAGTTGATGTGACATTAAAAGATGGTACAGTCATTAAAAAAGGGACTAATTTAGGAGAGTACACAGAAACAGTTTACAACAAAAAGACAGGTCTCTATGAATTAGTCTTCAAGAAAGACTTCCTTGAAAAAGTTGCACGTTCTAGTGAATTTGGGGCAGATGATTTTGTGGTGGTTAAACGTATCAAAGCAGGTGATGTTTACAATACCGCAGACTTTTTTATCAATGGGAATAAGGTTAAAACTGAAACTGTGGTAACACATACTCCTGAGAAACCAAAACCAGTTGAACCACAAAAAGCAACTCCAAAAGCTCCTGCTAAAGGATTACCTCAAACTGGTGAAGCAAGCGTTGCCCCTCTTACAGCACTTGGAGCAATCATCTTGTCAGCTATCGGTTTAGCAGGATTTAAAAAACGCAAAGAAAAT

SEQ ID NO: 8312 - protein, 863 aa, Streptococcus agalactiae
MYKNQNTKGHGFFRKSKAYGLVCGIALAGAFTLATSQVSADQVTTQATTQTVTQNQAETVTSTQLDKAVATAKKAAVAVTTTAAVNHATTTDAQADLANQTQTVKDVTAKAQANTQAIKDATAENAKIDAENKAESQRVSQLNAQTKAKIDAENKDAQAKADATNAQLQKDYQAKLAKIKSVEAYNAGVRQRNKDAQAKADATNAQLQKDYQAKLALYNQALKAKAEADKQSINNVAFDIKAQAKGVDNAEYGNSIMTAKTKPDGSFEFNHDMIDGVKTIGYGKLTGKVNHHYVANKDGSVTAFVDSITLYKYEYRNVAQNAAVNQNIAFRVLTKDGQIIFEKKHNGNKTFAETLNKTLQLNLKYELKPHGSSGSVEVFKIHDDWVHDTHGSALVSYVNNNDVVPNVVIPKQPTPPSTEKVTPEAEKPVPEKPVEPKFVTPTLKTYTPAQPKVKPHVSIPEKINYSVSVHPVLVPAANPSKAVIDEAGQSVNGKTVLPNAELNYVAKQDFSQYKGMTASQGKIAKNFVFIDDYKDDALDGKSMKVNSIKASDGTDVSQLLEMRHVLSTDTLDEKLQTLIKEAGISPVGEFYMWTAKDPQAFYKAYVQKGLDVTYNLSFKVKKEFTKGQIQNGVAQIDFGNGYTGNIVVNDLTTPEIHKDVLDKEDGKSINNGTVKLGDEVTYKLEGWVVPTGRSYDLFEYKFVDQLQRTHDLYLRDKVVAKVDVTLKDGTVIKKGTNLGEYTETVYNKKTGLYELVFKKDFLEKVARSSEFGADDFVVVKRIKAGDVYNTADFFINGNKVKTETVVTHTPEKPKPVEPQKATPKAPAKGLPQTGEASVAPLTALGAIILSAIGLAGFKKRKEN

SEQ ID NO: 8313 - protein, 2259 aa, Streptococcus agalactiae
ATGAAACAAACTAAAGTTTTATCAGGTATTGCAATTGCAACATTAAGTACAGTAAGCGTAGCAGTAAATGCTGACGAAGTTAAATCATTATCGTTAGAAACAACTGCGAATCAAACTAATCACATTACAGAAGTAACACAAGAACAAGTTGACAGTGCAAAAGCAAAGTCTGATAGAGCAACGAGTGATGTTGAAACACAACAAAATGTAGTTAATACTGCACAAAATCAACAAAATCAAGCTCAACAAACTCTAGTCAATGCAACTAAAAAGTTGAATGCAACACAAAAACTAGCTCAAGAGTCAACTCAAGAAAATAAAGTTAAAGCACAACAAACAATTGATATAGCTAAACAAATGTTGTCACAGATTGGAGCTAAACAAAAAACTGCTGAAACTGAACAAGTCAAAGCGCAAGAAGCTGTTAAAGCACAACAAATAGTTGTTGCACACGATAAGCAAGACGTTGCAACTAAGACAACTGATGTTAAACAAGCTCAATCATCAGTGGATAGAGCTAAAGATGCTCTGACTAATACTACAGTTAATAGTGATTTAAATAAAGCACAGTCAAACATCACAACTAAGACAGCTGATGTTAAAACTGCGACAGATGCACTTACAAAAGCACAAGCGACTGATAAAACACTTACTAATCAAAAAGCAAAAGCACAACAAAATCTTGATAACGCAAAACAAAATTTATCTGTTAAAGATGCACAGTTAGCACAAGCTAATGCTACTGTTAACCAGAATAAGTTTAAAACTGCTCTAGGGCAAAGTCATTATTACAATCAACGTGACGGCGCATGGGCTAGCGTATATGGAGGGCATACTTTTGCTTCAACTGGATGTGTACCTTCGGCTTTAGCGATGGTTTATTCTGATTTATCACGCAAGACAGTTACACCAAAGGAAGTTGCGGATTATCTTTTTAACCAAACAAATGAATTTAATAAGAATTTTGGTGGAACAAGTGGAAGAGGTATTGTTGAAGCTACTAAAGCGTTTGGCTATGTTGTGACTCATTTAGCAAGTCAAAATGCTATAAAAGAAGCTTTGAAAGCAGGTCATCATGTTGTTGCTGCTGTACAAAATAATAAATTCAGTCCTTGGGGACCTCAATACAGTCACGAAATTGTATTGAGAGGTAGTTCAAATGGCAATACGTATGTTTATGATCCGTATAACCGTGATAACAATGGTTTTTACAGTGTTGACCGCATTTGGAATGAACAGTCACGAGATAGTATTGATACTGCTGGTGTAGGTGTACCGTTTTTCTCAATTATGACTAAAGATATGGCTAATGCCTTAACTAAGCAGTCACAAGCTTTAGCAAGTCAACAAGTTGCTCAAAGACAATTAAATGATGCACAAGCTAAAGCAATAGGTCTTAATGCAGTAACTATGCAGACACCGATTGCACAAGCTAATTTGATTAAAGCACAGTCTAATTTAAAAGATGCTCAAGATGCACTCACTAAAGCACAAGAAGCAGTTAAATTAGCTAATCAAGATAATGTTAAAAAACAAGCTGACTTAATAAAAGCAGAGTCTAAATTAACAGATGCTCAAAAGCAATTAGCAGATGCACAGGTTAAATTGACAACAAATACAACTAAACTTAATCAATTAAAACAAGTGTTAGCAGAAGCAAGTCAACAAGTAGCACAAGCAAATCAAGATTACAAGCAAGCTAAAGATAATCTAACACAAAAAACTGCTTATCTTACAAATCTACGCAATGCACAAGCTAATTTGCTTAAAGTACAGTCTGATGTAGCACAAGCTAAAGATAACTTAGCAAATAAGATTGCTAAGTTACAAAGAGAAGTAGCTTATTTACAAGAGTTAAAAACTAAAGCAGTAGATGCGCAATCACAATATCAAAAAGTTTTATCAGCTTATAAGTCAGTTTTAGAAGCTAAAGAAAAACTGAAATTAGCAGAAGAAAAAGCTCAAATTGAGAAAGTAAGACAAGAAGCAGTAGCAGTAGTTGATGAAACAGGTAAAATTACTAGTTATATTACTTCTAAACCAAAACTGCAAGAAGCTGTTAAAGCACAACAAATAGTTGTTGCTAACGATAAGAAAGACGTTGTAACTAAGACAGTTGATGTTGAACAAGTATCAGTTGTAAAATCTAGTGTCTTGCCATCAACTGGTGATGCTAAGACAGGTTTAATTGCAGTTTTAGGTATGCTGTTATCTTTAAGTGGGTTTTTAGGTGTACGTAAAAATAATAAGAATAATATT

SEQ ID NO: 8314 - protein, 753 aa, Streptococcus agalactiae
MKQTKVLSGIAIATLSTVSVAVNADEVKSLSLETTANQTNHITEVTQEQVDSAKAKSDRATSDVETQQNVVNTAQNQQNQAQQTLVNATKKLNATQKLAQESTQENKVKAQQTIDIAKQMLSQIGAKQKTAETEQVKAQEAVKAQQIVVAHDKQDVATKTTDVKQAQSSVDRAKDALTNTTVNSDLNKAQSNITTKTADVKTATDALTKAQATDKTLTNQKAKAQQNLDNAKQNLSVKDAQLAQANATVNQNKFKTALGQSHYYNQRDGAWASVYGGHTFASTGCVPSALAMVYSDLSRKTVTPKEVADYLFNQTNEFNKNFGGTSGRGIVEATKAFGYVVTHLASQNAIKEALKAGHHVVAAVQNNKFSPWGPQYSHEIVLRGSSNGNTYVYDPYNRDNNGFYSVDRIWNEQSRDSIDTAGVGVPFFSIMTKDMANALTKQSQALASQQVAQRQLNDAQAKAIGLNAVTMQTPIAQANLIKAQSNLKDAQDALTKAQEAVKLANQDNVKKQADLIKAESKLTDAQKQLADAQVKLTTNTTKLNQLKQVLAEASQQVAQANQDYKQAKDNLTQKTAYLTNLRNAQANLLKVQSDVAQAKDNLANKIAKLQREVAYLQELKTKAVDAQSQYQKVLSAYKSVLEAKEKLKLAEEKAQIEKVRQEAVAVVDETGKITSYITSKPKLQEAVKAQQIVVANDKKDVVTKTVDVEQVSVVKSSVLPSTGDAKTGLIAVLGMLLSLSGFLGVRKNNKNNI

SEQ ID NO: 8315 - protein, 261 aa, Streptococcus agalactiae
ATGGGGGTAAAAAGTAATGAGGAATTGAAAAGAGAGCAGTATTTAGCAGAGTTTAGTAGGGTGGTTACTAATTTTAAGTGGAATGCTAGTAGAATATATTTCGGAGATATAATTGCAATAAAACTTTGTTTTAAAGAAGCTTTAAAACAAATAGATATATTACATGAAAGAGCTATTTTACGTAGAGATGAAGTTAGTACATTTTACTACTGGGCTAAAAGAAATATAAATAATGTTTATCAAGAATTGATTGAAAAGAAG

SEQ ID NO: 8316 - protein, 87 aa, Streptococcus agalactiae
MGVKSNEELKREQYLAEFSRVVTNFKWNASRIYFGDIIAIKLCFKEALKQIDILHERAILRRDEVSTFYYWAKRNINNVYQELIEKK

SEQ ID NO: 8317 - protein, 459 aa, Streptococcus agalactiae
ATGGGATATAGATTGAATAGGTATGTTTGTGTTAGGAAGGATGTCTTTTTAGCTTTAGTGATGCTACTAGTGACGTTAATTGTATCACTTGTTTTTTTATTAAAGAGTGATGGCATCTCATTTTTTAGTGATCAGTACTATAGGTCTCAATTGACTGCTAAAGAAGCTAAAAATGTGATTAATAAAAACTATAATATTGTTTTTTATAAAAAGAGTTGCCCTTACTGCAAAATAGCGAAAAAAGAAATTTTAGAGAAAAGTAAAGGTAGTGATATAACTACTTTTTTTGCTGACGTGGAGACTGTTAGTGGCAAGGAGCTAGTACGTAAATATAGAATATCCAAAGCGCCAAGCATAGTTGCTGTAAGAGGAGACAACTTGAAAGTTAATTTGTATGCAAAAGATGATGAGGATGGTCGTATGATTGTAGAAAAGAAAGTAATAAAAGATAGTTTTAGA

SEQ ID NO: 8318 - protein, 153 aa, Streptococcus agalactiae
MGYRLNRYVCVRKDVFLALVMLLVTLIVSLVFLLKSDGISFFSDQYYRSQLTAKEAKNVINKNYNIVFYKKSCPYCKIAKKEILEKSKGSDITTFFADVETVSGKELVRKYRISKAPSIVAVRGDNLKVNLYAKDDEDGRMIVEKKVIKDSFR

SEQ ID NO: 8319 - protein, 309 aa, Streptococcus agalactiae
ATGTTTGATTTGTTAAAAAAACAATTTAATTCTTTCAGGTTAAAAAAAGTTTTGATGGATAAGGGAATTAAAAATTATGTTGTATTGTACTTTAAAGATAATGAAAAAGCGTTATGTATTGTAAGAAATGGGAAAAAATATAATCGTTGCTATTTATTAAAATTATCTTTTTACGATTATTCTATTGTTAAATCGTATGTGGCTGACGGTGATTTTTTAATTTATAAGGGTATTTGTAAAACAGGTATGGTTGCTTACCTTTTAGATAATAGAAAAAAATGGAAGTCGGTTGAAGTATGGGATATAGAT

SEQ ID NO: 8320 - protein, 103 aa, Streptococcus agalactiae
MFDLLKKQFNSFRLKKVLMDKGIKNYVVLYFKDNEKALCIVRNGKKYNRCYLLKLSFYDYSIVKSYVADGDFLIYKGICKTGMVAYLLDNRKKWKSVEVWDID

SEQ ID NO: 8321 - protein, 429 aa, Streptococcus agalactiae
ATGATTGAACTATCAAAAAGATTAAAACAATTAAGAATAGATAGAGGGATTGATAAGTCACAGTTGATTACCTATTTAGCTATCACTTCAAGAACTTATGATAGATATGAAGATGGTTCACGTAAGCCAGATATTGAAACATTAGTAAAGATAGCTGATTATTATTGTTGTTCGCTTGATGTTTTAGTAAGTAGAAATTATACTGAGGATTTTGTTGATAGGTCGCTAGTTGTTTCTTATCGTGATTTAAAGGAGTTGGGTTTAAATGATAAAATTGCGCATGGTTTAATAAAACAAGTCTATGATGGTTATTCAGCAGAGAAAATTCCTTTGGTCGATTCTATTAAAAAACTTAAATTTATTTATAAAAAAGATTTGGTTAGTTGTTTAAACGATATTATGAAAAATTTGGAGGAAAAAAAGTATGTT

SEQ ID NO: 8322 - protein, 143 aa, Streptococcus agalactiae
MIELSKRLKQLRIDRGIDKSQLITYLAITSRTYDRYEDGSRKPDIETLVKIADYYCCSLDVLVSRNYTEDFVDRSLVVSYRDLKELGLNDKIAHGLIKQVYDGYSAEKIPLVDSIKKLKFIYKKDLVSCLNDIMKNLEEKKYV

SEQ ID NO: 8323 - protein, 708 aa, Streptococcus agalactiae
ATGAAGCGTTTAGGTCATAAAGACATGAAAAAGTTTTATGATTATGGATTGGAACCTTATTTTTTTGTATGTGATGAATATAATGCTTTAATGAGTTCTTTGTCTTATCAGGAACGTGAGATTGTAGATAATGCATTTACTCAATATATATTGTTAGGACGTCAGGTTGGATGTAATGCGATTATAGCAATGCAAAAGCCGTCTGCAGATGATCTTCCCACTAAAATTAGATCTAATATGATGCACCATATCTCGGTTGGTCGTCTCGATGATGGTGGTTATGTGATGATGTTTGGTGATGAAAATAGAAATAAGGAATTTAGGTTTATTAAATATCTTGCAGGTCGTCGTGTTTATGGTCGAGGTTATTCAGCTGTTTTTGGTGAAGTAGCAAGAGAATTTTATTCTCCTTTATTACCTAAAAATTTCTCTTTTTATGATGCTTTTGAAAAAATAAATAGGCATGAGAATCCTTTTGATCCTACAGAAAATCAGGAAGTTTCTAAGGCGATTCTTAAAGACGAATCTTTGAGAGAGTTTGTGGAAAAAACGTCTGAAAATGAGTTACTTAAGGGTTCAGTAGGGTTTGATTTTGATGATGAAATGGAGGAAATGGAAAATATGAGTATTGGTGATTTAGCTAAGAAAACAGGTTTTTCATTTGGTAAGATTAAGAATTTAATAGATATGATGAAAAANNNNNTTAAT

SEQ ID NO: 8324 - protein, 236 aa, Streptococcus agalactiae
  VARIANT 233, 234, 235: Xaa = Any Amino Acid
MKRLGHKDMKKFYDYGLEPYFFVCDEYNALMSSLSYQEREIVDNAFTQYILLGRQVGCNAIIAMQKPSADDLPTKIRSNMMHHISVGRLDDGGYVMMFGDENRNKEFRFIKYLAGRRVYGRGYSAVFGEVAREFYSPLLPKNFSFYDAFEKINRHENPFDPTENQEVSKAILKDESLREFVEKTSENELLKGSVGFDFDDEMEEMENMSIGDLAKKTGFSFGKIKNLIDMMKXXXN

SEQ ID NO: 8325 - protein, 868 aa, Streptococcus agalactiae
GTGCTGGGTGGTACTGGGGTAAAACAGTATTACTAAGGTCAATCCTTCGTTGTCTGCGGGAAATTGGAGTTTGTGATATATGTGACCTAAAAGAGCCGATTTTGTTACTATGTCAGATTTATCAGCTTTTGAAGGTAGAATTGCCTTTGAAAAGGCTGATATTATTGAGAAGTTTGAAAATGCTGTTACGATAATGTTTGCACGTTATGATTTTGTTCGAAATGAAATGAAGCGTTTAGGTCATAAAGACATGAAAAAGTTTTATGATTATGGATTGGAACCTTATTTTTTTGTATGTGATGAATATAATGCTTTAATGAGTTCTTTGTCTTATCAGGAACGTGAGATTGTAGATAATGCATTTACTCAATATATATTGTTAGGACGTCAGGTTGGATGTAATGCGATTATAGCAATGCAAAAGCCGTCTGCAGATGATCTTCCCACTAAAATTAGATCTAATATGATGCACCATATCTCGGTTGGTCGTCTCGATGATGGTGGTTATGTGATGATGTTTGGTGATGAAAATAGAAATAAGGAATTTAGGTTTATTAAATATCTTGCAGGTCGTCGTGTTTATGGTCGAGGTTATTCAGCTGTTTTTGGTGAAGTAGCAAGAGAATTTTATTCTCCTTTATTACCTAAAAATTTCTCTTTTTATGATGCTTTTGAAAAAATAAATAGGCATGAGAATCCTTTTGATCCTACAGAAAATCAGGAAGTTTCTAAGGCGATTCTTAAAGACGAATCTTTGAGAGAGTTTGTGGAAAAAACGTCTGAAAATGAGTTACTTAAGGGTTCAGTAGGGTTTGATTTTGATGATGAAATGGAGGAAATGGAAAATATGAGTATTGGTGATNNNNNT

SEQ ID NO: 8326 - protein, 291 aa, Streptococcus agalactiae
  VARIANT 31, 290, 291: Xaa = Any Amino Acid
MLGGTGGGKTVLLRSILRCLREIGVCDICDXKRADFVTMSDLSAFEGRIAFEKADIIEKFENAVTIMFARYDFVRNEMKRLGHKDMKKFYDYGLEPYFFVCDEYNALMSSLSYQEREIVDNAFTQYILLGRQVGCNAIIAMQKPSADDLPTKIRSNMMHHISVGRLDDGGYVMMFGDENRNKEFRFIKYLAGRRVYGRGYSAVFGEVAREFYSPLLPKNFSFYDAFEKINRHENPFDPTENQEVSKAILKDESLREFVEKTSENELLKGSVGFDFDDEMEEMENMSIGDXX

SEQ ID NO: 8327 - protein, 834 aa, Streptococcus agalactiae
ATGTCTAAGTTTTTATATGAGAATGGCTATGTTTATGAAAAACGTAAAAAATCAAATAAGAAAACGAAGACAAAATATCGTTTTCCAAAAGTTTATGTGAAACAAGGTAAGTATGATTTAAGTGTTTCATTTGAAATGGCTGGAGGAAAATTTCAAAAGAAATTTAAGGATATTGGTGGAGAATTAGAAGATACTTTTTTCATGGATTTTATGGAAAAAACTGATGATCCACGCTTTAAAATTTACAAATTAGCTTATTCGGCTTTCTTATCACGTATTACGGTTAAAGATGTGATATGGGATAAAGATAAGGGAATTAAGTTAATGGATGGCTATTATTGGGATTTCATCAATGATCCTCATTTATTAGTTGCTGGTGGTACTGGTGGAGGTAAAACAGTATTACTAAGGTCAATCCTTCGTTGTCTTGCGGAAATTGGAGTTTGTGATATATGTGACCCTAAAAGAGCCGATTTTGTTACTATGTCAGATTTATCAGCTTTTGAAGGTAGAATTGCCTTTGAAAAGGCTGATATTATTGAGAAGTTTGAAAATGCTGTTACGATAATGTTTGCACGTTATGATTTTGTTCGAAATGAAATGAAGCGTTTAGGTCATAAAGACATGAAAAAGTTTTATGATTATGGATTGGAACCTTATTTTTTTGTATGTGATGAATATAATGCTTTAATGAGTTCTTTGTCTTATCAGGAACGTGAGATTGTAGATAATGCATTTACTCAATATATATTGTTAGGACGTCAGGTGGATGTAATGCGATTATAGCAATGCAAAAGCCGTCTGCAGATGATCTTCCCACTAAAATAGATCTTA

SEQ ID NO: 8328 - protein, 279 aa, Streptococcus agalactiae
  VARIANT 256: Xaa = Any Amino Acid
MSKFLYENGYVYEKRKKSNKKTKTKYRFPKVYVKQGKYDLSVSFEMAGGKFQKKFKDIGGELEDTFFMDFMEKTDDPRFKIYKLAYSAFLSRITVKDVIWDKDKGIKLMDGYYWDFINDPHLLVAGGTGGGKTVLLRSILRCLAEIGVCDICDPKRADFVTMSDLSAFEGRIAFEKADIIEKFENAVTIMFARYDFVRNEMKRLGHKDMKKFYDYGLEPYFFVCDEYNALMSSLSYQEREIVDNAFTQYILLGRQXGCNAIIAMQKPSADDLPTKIRSI

SEQ ID NO: 8329 - protein, 699 aa, Streptococcus agalactiae
TTGACACCTGTAGGCGTGTATAGTTATTACTATTTAGATTTGTTAAAAATGATGGATAAAATGTCTATGATCAGTGTAGGTACAGGTTTGTTTTTAGCATTTTTTGTTTCTTGGTATTTGACTTGGTTTTTGCAAGAAGCTAATCCATTATTTAATAAACTAGATCGATTAAAAAGAATGTCTAAGTTTTTATATGAGAATGGCTATGTTTATGAAAAACGTAAAAAATCAAATAAGAAAACGAAGACAAAATATCGTTTTCCAAAAGTTTATGTGAAACAAGGTAAGTATGATTTAAGTGTTTCATTTGAAATGGCTGGAGGAAAATTTCAAAAGAAATTTAAGGATATTGGTGGAGAATTAGAAGATACTTTTTTCATGGATTTTATGGAAAAAACTGATGATCCACGCTTTAAAATTTACAAATTAGCTTATTCGGCTTTCTTATCACGTATTACGGTTAAAGATGTGATATGGGATAAAGATAAGGGAATTAAGTTAATGGATGGCTATTATTGGGATTTCATCAATGATCCTCATTTATTAGTTGCTGGTGGTACTGGTGGAGGTAAAACAGTATTACTAAGGTCAATCCTTCGTTGTCTTGCGGAAATTGGAGTTTGTGATATATGTGACCCTAAAAGAGCCGATTTTGTTACTATGTCAGATTTATCAGCTTTTGAAGGTAGAATTGCCTTT

SEQ ID NO: 8330 - protein, 233 aa, Streptococcus agalactiae
MTPVGVYSYYYLDLLKMMDKMSMISVGTGLFLAFFVSWYLTWFLQEANPLFNKLDRLKRMSKFLYENGYVYEKRKKSNKKTKTKYRFPKVYVKQGKYDLSVSFEMAGGKFQKKFKDIGGELEDTFFMDFMEKTDDPRFKIYKLAYSAFLSRITVKDVIWDKDKGIKLMDGYYWDFINDPHLLVAGGTGGGKTVLLRSILRCLAEIGVCDICDPKRADFVTMSDLSAFEGRIAF

SEQ ID NO: 8331 - protein, 214 aa, Streptococcus agalactiae
ATGATTGAACTATCAAAAAGATTAAAACAATTAAGAATAGATAGAGGGATTGATAAGTCACAGTTGATTACCTATTTAGCTATCACTTCAAGAACTTATGATAGATATGAAGATGGTTCACGTAAGCCAGATATTGAAACATTAGTAAAGATAGCTGATTATTATTGTTGTTCGCTTGAGTTTTAGTAAGTAGAAATATACTGGAGGATTTTGT

SEQ ID NO: 8332 - protein, 72 aa, Streptococcus agalactiae
  VARIANT 60: Xaa = Any Amino Acid
MIELSKRLKQLRIDRGIDKSQLITYLAITSRTYDRYEDGSRKPDIETLVKIADYYCCSLXVLVSRNYTGGFC

SEQ ID NO: 8333 - protein, 312 aa, Streptococcus agalactiae
ATGTTTTCCAAAAAACTAAAAGAATTAAGAATTAACAACAAGCTTTCTCAAAAACAAATAGCTGAACAAATGAATATTTCTCAACAAGCTTATGCAAAATGGGAAAGTGGAAAAAATTCTCCATCTCTCGCAACACTTGAGAAAGTTGCAAATTTCTTCAATTTATCTATTGAAGAATTACTATCTGATGGTACTGTTAGTCTTGACAACTTATTAAAAGCTGAAACTATTACTTATCAAGGAAAAACACTATCAGAAGAAGATGCCTTTAAAGTAAAAGAAGTTTTGAACATTGTCATTAGTACAATCAAA

SEQ ID NO: 8334 - protein, 104 aa, Streptococcus agalactiae
MFSKKLKELRINNKLSQKQIAEQMNISQQAYAKWESGKNSPSLATLEKVANFFNLSIEELLSDGTVSLDNLLKAETITYQGKTLSEEDAFKVKEVLNIVISTIK

SEQ ID NO: 8335 - protein, 150 aa, Streptococcus agalactiae
GTGAAAAAACAGTTGACAATAAAAGCTAAAGGTTATATAATTAAAATACAAGCGATAGCTTATCAAAAACTCTTGCAAAAAAGTGTTAAAGTATTTATCAATAATCCTAAAAAGCACTTATTTGAGTACAGAGTTAAAAATTTAGATCAT

SEQ ID NO: 8336 - protein, 50 aa, Streptococcus agalactiae
MKKQLTIKAKGYIIKIQAIAYQKLLQKSVKVFINNPKKHLFEYRVKNLDH

SEQ ID NO: 8337 - protein, 336 aa, Streptococcus agalactiae
ATGTTCTCAGAACGCTTAAAATCTCTTCGGAAAGAAGCTAAATTAACTCAAAAAGATATAGCTTCTCAATTTGGATTTTCTCAACCTGCTTACCAACAATGGGAAAGTGGGAAAAAAAAACCAAGTGCAGAAACGCTTGAAAAATTCGCTTCCTTCTTTAATGTCTCTACCGATTATTTATTAGGAAATACAAATAAAAAAAATGCCAACGATTTAGACATTGAAAAAGTAAAAGAGAGCCTAAAAAAATCTCTTGGTTACAATGGAACTTCTGATATTCCTGAAGATGAGCTAGAAAGTATGGCACAAGCTTTTATTGAACACTTTAAAAATCAA

SEQ ID NO: 8338 - protein, 112 aa, Streptococcus agalactiae
MFSERLKSLRKEAKLTQKDIASQFGFSQPAYQQWESGKKKPSAETLEKFASFFNVSTDYLLGNTNKKNANDLDIEKVKESLKKSLGYNGTSDIPEDELESMAQAFIEHFKNQ

SEQ ID NO: 8339 - protein, 420 aa, Streptococcus agalactiae
ATGGATTTATCAACTGTAATTAAAAAAACGGAAGATTTAGGAATTACTATCTTATTTTGTAATATGCCAAAAACCAAAGGAAGATATGATAACACACTTGAAAAGCCTTGTATTTATGTCGACAAAAGTCTTTCAGATATAGAAAAAATTAACATCATTCTTCATGAAAAAATGCACTTTACAAAAAATGATCAGAGTAACTGCTTATCTTATATTTCTTCATATTCACATCATATCGAAAATCAAGCTGAAAAAGACCGCATATTAGATTTTATGAATCTAATTAACGAAGAATATCCGATTGATGAATCTTTTAACTATATCAACTATATGAAAAATGCTTGTGTACCTGAAAAGTATGAAACTTATATCAAAAATCTTGCTAAAGAATTTTATCTAAGAAATCACAGAAAAGAGAGC

SEQ ID NO: 8340 - protein, 140 aa, Streptococcus agalactiae
MDLSTVIKKTEDLGITILFCNMPKTKGRYDNTLEKPCIYVDKSLSDIEKINIILHEKMHFTKNDQSNCLSYISSYSHHIENQAEKDRILDFMNLINEEYPIDESFNYINYMKNACVPEKYETYIKNLAKEFYLRNHRKES

SEQ ID NO: 8341 - protein, 366 aa, Streptococcus agalactiae
ATGAAAAAGAAATTAGTTGGCTTTATTGTTCTAGCTTTATCTACACTAATTTTAGTGGCATGTTCTAATGATTCACTTGAAGGTGAATATTATTGGATTAATAAATATAGAAATGATTTGGAGATGACAATCACTAGTAATGCTGGTAGTGTGGATGTTGATGGGAAAGACTATGCTATTGTTAAAGTTGATAATGAAAACAAGCAAATTACAGTTTCGACTGATTATGGAAATAGGACATTTAATATGAAACTTACTAAGGAAGGTAAGGCTGTAAGTCCTAGTGATCACATTGTTTATAAAAAGGGATCAAAAGCATGTGAGGAAGCATTGAAAAAATATGGTTATAAAGAAGTAGGAAAAGAA

SEQ ID NO: 8342 - protein, 122 aa, Streptococcus agalactiae
MKKKLVGFIVLALSTLILVACSNDSLEGEYYWINKYRNDLEMTITSNAGSVDVDGKDYAIVKVDNENKQITVSTDYGNRTFNMKLTKEGKAVSPSDHIVYKKGSKACEEALKKYGYKEVGKE

SEQ ID NO: 8343 - protein, 336 aa, Streptococcus agalactiae
ATGAACAATATTGAGGTATATTCTGTTTTAGTTTCATGTATTGATTATGCAGATGGTACTGGTTCAAAAATAAGACCTGCAGTAGTAGTGAAATTTAATAATGAGGTTATTAGGACTTATAGACTAACTACAAAATATGAGAATAAGTCTGATTATATAAAAAGTCAGTATCTAGAAGTTATTGATTGGGCAAAAGCAAATTTAAAAAGACGTTCTTGGATTGATACAATTCAGTATTATGATTTAGAGAATAAGGGATTCAATATTAAAATTATTGGTAAGTTAAGTGATAGAGATATTGAAAGATTAAAAGATTTTCTTAAGGGTAGAGGTTTA

SEQ ID NO: 8344 - protein, 112 aa, Streptococcus agalactiae
MNNIEVYSVLVSCIDYADGTGSKIRPAVVVKFNNEVIRTYRLTTKYENKSDYIKSQYLEVIDWAKANLKRRSWIDTIQYYDLENKGFNIKIIGKLSDRDIERLKDFLKGRGL

SEQ ID NO: 8345 - protein, 291 aa, Streptococcus agalactiae
ATGTCAACAGTAGCAGTAAGAGTTGATGCTCAGTTAAAAGATGAAGCAACAAAGCTTTTTCAATCTTTAGGTTTAGATATGAGTACAGCTGTAAAAATGTTTTTAATTCAATCGGTTAAAACTCAAAGTATTCCATTTGAGATAAAAAATAAGTCATTTATTTCTGATGAGGAATTTCAAAAATTAGTAGAATTAAACTCTAAAGGAATTAGAGTTAGAGCTGATGATCCGGAAAGTGTAAAAGAATTTTTTGGTGATGAGGATTTTTCAGAATATGAGGAATATTTTAAA

SEQ ID NO: 8346 - protein, 97 aa, Streptococcus agalactiae
MSTVAVRVDAQLKDEATKLFQSLGLDMSTAVKMFLIQSVKTQSIPFEIKNKSFISDEEFQKLVELNSKGIRVRADDPESVKEFFGDEDFSEYEEYFK

SEQ ID NO: 8347 - protein, 756 aa, Streptococcus agalactiae
ATGGCAAAGAAACAAGTAGTCTATTTTTCCATAGCTATTTTGACAGGAGTTGCATTGTTTTCTCCAGCGATTTTGGAAGTTCATGCTGATCAAGCTACTAATCATGTCGTAGTTAGTCAAGTTAATAATCAACAACAAATAAAACAAAAACTTGATCAAGATAGTGTTCAATTGAATACTATTAAAAATCAAGTTCAAGGCACAGATTATGAAAAACCTGTAGATACTGCTATAAATGCTGTTGATAAGATGAAGTCTTCTTTAGGTGGTAATCCAGCGACAATCTACGATCTTGGTTCTATTGGTCCACGTATAGAAGCTATCACAGATGTTATTGAAGCAATTAATTTTTCAACACATAACTTGACTAACAAAGTTAGTCAAGCTAATGTTGACATGGGATTCGGAATAACTAAATTAGTTATTCGTATTGCTGATCCATTTGCATCTGTTGATTCTATAAAAGCACAAGTAGCAGAAGTGAAGCAATTAGAACAAAAAGTAATGACTTATCCAGATTTGAAGCCAACAGATAAAGCAACTATTTATACTAAGTCAAAACTGGACAAAGCAATTTGGGATATTCGTGTACAAAGAGACCAAAAAGTTTTAAACAAGAAAAGTTTTGATGTTTATAATGCTTTAAATAAAGCTATCACACATGCAGTAGGCGTCCAATTAAATCCTAATGTAACCGTTCAAGAAGTGGATCAAGAGATTGTGAACCTACAAATGGCACTTCAAACTGCTTTGAAA

SEQ ID NO: 8348 - protein, 252 aa, Streptococcus agalactiae
MAKKQVVYFSIAILTGVALFSPAILEVHADQATNHVVVSQVNNQQQIKQKLDQDSVQLNTIKNQVQGTDYEKPVDTAINAVDKMKSSLGGNPATIYDLGSIGPRIEAITDVIEAINFSTHNLTNKVSQANVDMGFGITKLVIRIADPFASVDSIKAQVAEVKQLEQKVMTYPDLKPTDKATIYTKSKLDKAIWDIRVQRDQKVLNKKSFDVYNALNKAITHAVGVQLNPNVTVQEVDQEIVNLQMALQTALK

SEQ ID NO: 8349 - protein, 1305 aa, Streptococcus agalactiae
ATGTCAGACTTATTATCCCTACCAGACATTAAAACAATAGAACCGCCACAAGAAAATGAAACCGATATGATGTTTAAAGTTGAAGCAGTCGGACCACCTGAACGTTGTCCTGAATGTGGTTTTGACAAGTTGTACAAACACAGTTCAAGAAATCAACTAATTATGGATTTGCCCATTCGTTTAAAGCGAGTGGGCTTACATTTGAACCGTAGACGATACAAGTGTCGTGAATGCGGATCTACCATATCTGTAGATGAAAAGCGTAGTATGACCAAAAGGCTTTTAAAGTCCATTCAAGAGCAATCCATGTCTAAGACCTTTGTAGAAGTCGCAGAAAGCGTTGGTGTTGACGAGAAAACCATTAGGAACGTTTTTAAGGACTATGTGGCACTCAAAGAACGTGAATACCAGTTTGAAACTCCTAAGTGGCTTGGGATAGACGAGATACATATTATCCGTAGACCTCGGCTTGTATTGACTAATATTGAACGCAGGACTATTTATGACATCAAGCCTAACCGTAACAAGGAAACAGTCATCCAACGTCTTTCAGAAATCAGTGACAGGACTTACATTGAGTACGTCACAATGGATATGTGGAAGCCCTACAAAGACGCAGTGAACACTATCCTTCCACAAGCTAAAGTTGTCGTAGATAAGTTTCATGTAGTTAGAATGGCTAATCAAGCCTTAGATAACGTCAGAAAGTCTTTGAAAGCCCATATGAGCCAAAAAGAAAGACGTACCCTTATGCGTGAAAGGTTTATCCTTCTAAAGCGTAAACACGATCTAAATGAACGTGAATCATTCCTCTTAGATACTTGGTTAGGTAATCTTCCTGCTTTAAAAGAAGCCTATGAACTCAAAGAAGAGTTTTACTGGATATGGGATACTCCTGATCCAGATGAAGGTCATCTTCGTTATAGTCAATGGAGACACCGTTGTATGTCCAGCAACTCTAAAGACGCATATAAAGACCTCGTGAGAGCCGTAGACAACTGGCATGTTGAAATATTCAACTACTTTGATAAAAGGCTCACTAATGCTTATACGGAGTCAATTAACAGCATTATTAGGCAGGTAGAGCGAATGGGTAGAGGTTACTCGTTTGATGCCTTACGAGCCAAAATCCTTTTCAATGAGAAGCTCCATAAAAAGCGTAAGCCACGATTTAATTCAAGTGCTTTCAATAAAGCTATGTTATACGATACTTTCAATTGGTATGAAGTGAATGATCACGACATTACAGACAACTTAGGTGTCGATTTTTCCACACTTATTAAGAATTTGGAGAAGGGTGATTTA

SEQ ID NO: 8350 - protein, 435 aa, Streptococcus agalactiae
MSDLLSLPDIKTIEPPQENETDMMFKVEAVGPPERCPECGFDKLYKHSSRNQLIMDLPIRLKRVGLHLNRRRYKCRECGSTISVDEKRSMTKRLLKSIQEQSMSKTFVEVAESVGVDEKTIRNVFKDYVALKEREYQFETPKWLGIDEIHIIRRPRLVLTNIERRTIYDIKPNRNKETVIQRLSEISDRTYIEYVTMDMWKPYKDAVNTILPQAKVVVDKFHVVRMANQALDNVRKSLKAHMSQKERRTLMRERFILLKRKHDLNERESFLLDTWLGNLPALKEAYELKEEFYWIWDTPDPDEGHLRYSQWRHRCMSSNSKDAYKDLVRAVDNWHVEIFNYFDKRLTNAYTESINSIIRQVERMGRGYSFDALRAKILFNEKLHKKRKPRFNSSAFNKAMLYDTFNWYEVNDHDITDNLGVDFSTLIKNLEKGDL

SEQ ID NO: 8351 - protein, 1638 aa, Streptococcus agalactiae
ATGAATAAATTTAAGGTAAACATTTCAGGAATGACTTGTACGGGTTGTGAAAAACACGTAGAATCAGCACTTGAAAAGATAGGTGCTAAAAATATTGAGTCTAGTTATCGTCGTGGTGAAGCAGTATTTGAACTGCCCGATGATATTGAGGTTGAAAGTGCAATAAAGGCGATTGATGAAGCAAATTACCAAGCCGGAGAAATTGAAGAAGTATCATCACTAGAAAACGTGGCGTTAATTAATGAAGACAATTATGACCTTCTTATTATTGGTTCTGGTGCTGCTGCCTTTTCTTCGGCAATTAAAGCTATAGAATACGGTGCAAAAGTTGGAATGATTGAGCGTGGAACGGTTGGGGGAACCTGTGTGAATATTGGCTGTGTTCCGTCAAAAACTCTTCTTAGGGCAGGGGAAATCAATCATTTATCAAAAGACAATCCGTTTATAGGTTTACAAACATCCGCTGGAGAAGTGGATTTAGCTAGTTTAATCACGCAAAAGGATAAATTGGTGAGCGAACTTCGGAATCAAAAATATATGGATTTAATTGATGAATATAATTTTGATTTAATTAAAGGTGAAGCAAAATTCGTTGATGCTAGTACGGTTGAGGTCAATGGGACAAAGTTATCTGCAAAACGCTTTTTAATTGCAACAGGTGCATCGCCTTCGTTGCCCCAAATTTCAGGACTTGAAAAAATGGACTATTTAACTAGTACAACACTTCTTGAGTTAAAGAAAATACCAAAACGATTAACTGTAATTGGTTCAGGATACATTGGAATGGAGCTTGGACAACTATTTCATCATTTAGGTTCAGAAATAACGCTTATGCAAAGAAGTGAGCGACTTTTAAAGGAGTATGATCCTGAGATTTCAGAGTCAGTTGAAAAAGCGTTAATTGAACAGGGTATAAACCTTGTCAAAGGGGCAACTTTTGAGCGTGTTGAACAAAGTGGAGAGATAAAAAGGGTTTACGTAACAGTAAATGGCAGTAGAGAAGTCATTGAATCAGATCAGTTACTTGTTGCCACTGGAAGAAAACCAAATACGGATTCTTTAAATTTAAGTGCAGCAGGTGTTGAAACTGGAAAAAATAATGAAATCCTGATCAATGATTTTGGTCAAACAAGTAATGAAAAGATTTATGCAGCAGGAGATGTGACTTTAGGACCACAATTTGTATATGTAGCAGCCTATGAAGGTGGAATTATTACTGATAATGCTATTGGTGGATTAAACAAAAAAATAGATTTATCGGTAGTTCCTGCTGTTACGTTTACGAATCCGACGGTTGCAACGGTTGGTTTAACAGAAGAACAAGCAAAAGAGAAAGGGTATGATGTGAAGACATCTGTATTACCTTTAGGTGCTGTTCCAAGAGCAATTGTAAACCGTGAAACAACCGGTGTATTTAAACTAGTAGCAGATGCAGAAACACTAAAAGTATTAGGGGTTCATATTGTATCTGAAAATGCAGGAGATGTCATCTATGCAGCATCATTAGCTGTTAAATTTGGCTTAACGATAGAAGATTTAACAGAAACCCTAGCACCATATTTAACAATGGCTGAAGGGCTAAAATTAGTTGCACTTACGTTCGATAAAGATATTTCGAAATTATCTTGTTGTGCAGGC

SEQ ID NO: 8352 - protein, 546 aa, Streptococcus agalactiae; identical to SEQ ID NO: 3644

SEQ ID NO: 8353 - protein, 390 aa, Streptococcus agalactiae
ATGATTTATCGCATTAGTGAGTTTGCAGATAAATGTGGAGTTAATAAAGAAACGATCAGATATTACGAGCGAAAAAATTTATTACAAGAACCTCACCGAACGGAAGCTGGTTATCGGATATATTCATATGATGACGTTAAGCGTGTTGGGTTTATTAAACGAATACAGGAACTTGGTTTCTCTTTAAGCGAGATTTATAAATTACTTGGTGTTGTAGATAAAGATGAAGTTCGTTGTCAAGATATGTTCGAATTTGTTTCTAAAAAACAAAAGGAAGTGCAAAAACAAATAGAGGATTTAAAACGAATTGAAACTATGTTAGACGACTTAAAACAACGATGTCCAGATGAAAAGAAATTACATTCGTGTCCAATAATAGAAACATTAACA

SEQ ID NO: 8354 - protein, 130 aa, Streptococcus agalactiae; identical to SEQ ID NO: 3646

SEQ ID NO: 8355 - protein, 1566 aa, Streptococcus agalactiae
ATGAATCTACAAAAAAATGATAAAACAAATAGTTTTATCCATTATGCAAACGGTCCTTCCCTAGAAGAAATAAATGGGACAATTGAAGTTCCTAAAGATTTGAGCTTTTTTAAAACTTTACTAGCTTATTCTGGACCGGGTGCACTTGTTGCTGTTGGTTATATGGATCCTGGAAATTGGTCCACTTCCATAACTGGCGGTCAAAATTTTCAATATTTACTAATTTCAATTATCTTAATGTCTAGTTTAATTGCTATGCTACTTCAATACATGTCAGCTAAGCTAGGTATTGTTACTCAGATGGATCTTGCTCAAGCTATCCGAGCAAGGACCAGTAAACAGTTGGGAATTGTCTTATGGATTCTCACTGAGCTTGCTATAATGGCAACAGATATTGCTGAAGTTATTGGTGGGGCTATTGCACTTTATTTACTGTTTCATATTCCACTTGCGATTGCTGTTTTCATTACAGTATTTGATGTATTACTCTTATTATTGTTGACAAAAATAGGATTTCGAAAAATTGAAGCTCTAGTAGTTGCTTTAATATTGGTTATTTTCTTAGTTTTTGCATATCAAGTGGCTCTTTCTCATCCTATATGGACGGATATTTTTAAAGGTTTAGTACCTACATCTGAAGCTTTCTCAACCTCTCATACAGTAAATGGACAAACACCACTTTCAGGTGCCTTAGGCATTATTGGGGCAACTGTTATGCCACATAATCTTTATCTACATTCTTCAGTTGTTCAAAGTCGAAAACTAGATCATAATAACAAAAAAGATATCGCTAGAGCAATTAGGTTTTCAACTTTTGATTCAAATATTCAATTAACAGTAGCCTTTTTTGTTAATTCACTATTACTCATTATGGGCGTTGCTGTTTTCAAAACAGGAAGTGTTACTGATCCATCATTCTTTGGTCTATTTAAAGCACTATCTAATTCTACTATTATGAGTAATTCTATTTTAGCTCATATAGCAAGTTCAGGTATTTTATCACTTTTATTTGCAATAGCTTTATTAGCATCTGGACAGAATTCAACTATTACTGGAACATTAACAGGTCAAATTATTATGGAAGGATTTATTCATATGAAAGTTCCAATTTGGTTCCGTCGTATCATTACTCGCCTAATTTCTGTTATTCCTGTAATGATTTGTGTCTTAGTAACTAGTGGTAGAAGTACTGTTGAAGAACATATAGCTATTAATAACTTAATGAATAACTCTCAAGTCTTCTTAGCATTTGCATTACCATTCTCAATGTTACCTCTACTAATATTTACTAATAGTAAAGTTGAAATGGATGATGATTTTAAAAATACTTGGATAATTAAGATTCTTGGTTGGCTTTCAGTTATAGGATTAATTTATCTCAATATGAAGGGATTGCCAAATCAAATTGAAGGTTTTTGGGGAGATAACCCAACTCATCAACAAATTATTCTTGCGCATCAAATAGCTCATATCATCATTATTAGTGTAATACTAACTTTAATATGGACTATTGTTGAATTGTATAAAGGAAATAAAAAATACAGTACGATGCAACAAAGTGCAACT

SEQ ID NO: 8356 - protein, 522 aa, Streptococcus agalactiae; identical to SEQ ID NO: 3650

SEQ ID NO: 8357 - protein, 720 aa, Streptococcus agalactiae
ATGTTAGGATTGGAGTTTAGAAAGTCTATAAGAGGTAGAACATTATTTTATATTATATCTACTGTAGCTTTGACCTATGTATTAGGATATATTTTACCAGTAGGGATAGATAAAATAAGACATTTAACTTTGGGAGAATTTTACTTTAGTACCTACACAGTATTTACCCAATTTGGATTTTTAATATTCGGCTTTGTCATTGTATATTTCTTTAATAAAGATTACTCTGACAAATGTATTTTATATCACTATTTTTCAGGGTATCATCTAACTAAATACTTTTATACTAAACTGTTAGTATTATTTTCAGAATTTTTTATTGCTATAATAGTTTGCAATATATTAGCTTCATTGCTTTGGGGATATTCACTATTTTATTTTTTAACAACTACAATCTTATTTTCACTCGTTGTTCTACAGTATCTACTAGTCGTCTCAACTATTAGTATCCTGTTTTCTAATATGCTAGTTTCTATTGGAGTTACTATTTTTTATTGGATTACATCCATTATTTTAGTGGCAATTGGAGGAATTTTTAAAGTATCTGCTATTTTTGATGCTTCAAATTCTCTCTATAAAATAATAGGGAAACTTTTCTCACATCCGATGACTATTGATTTAACCGACTTTTTTATAATTGTTCCTTATATGATATGCCTTAGTGTAATTAGTTTTTTGATAGTGTGCTTATCAAATAGAAGATGGTTATTAAATGGAATG

SEQ ID NO: 8358 - protein, 240 aa, Streptococcus agalactiae; identical to SEQ ID NO: 3652

SEQ ID NO: 8359 - protein, 615 aa, Streptococcus agalactiae
ATGTTTATTAATAATTACACCTTAAAAATAGGAAATAGAATACTTTTAGAGAATACTAACTTAGACTTTGAAGAAGGGGAAATAAATCATCTTTTAGGTAGGAATGGATCAGGTAAATCTCAACTAGCTAAAGATTTTATCATAAATAGAGGGAATTATTTTTCAAATGATATTTATGAAGACACGCTGATTATTTCGAGTTATTCTAATCTTCCTAGTGATGTTACCATTAACGATTTAGAAAGGACAATTCCGTGGAAGCTTTCTAAAGAAATTTATCAGTTATTGAATATTAATCAAATAAGTAAAACGGTTAAGTTAAAGCAATTAAGTGATGGGCAGAAACAAAAGGTGAAATTATTAGTTTTGTTGTCTTTAGACAAGCATATTATTATACTTGATGAAATTACTAATGCTTTAGATAAAAAGTCTGTTGATGAGATAAACGTATTTTTGCAAAACTATATTCAGTATTATCCCGAAAAAATTATTATTAATATTTCACATGATATCAATAATATCAGGTCTTTAAAGGGAAACTATTTTCTAATTGATAATCAAAAAATTTGTAAAGTAGACACATTAGATGATGCTATTAGTTGGTATTTAGGAGAA

SEQ ID NO: 8360 - protein, 205 aa, Streptococcus agalactiae; identical to SEQ ID NO: 3654

SEQ ID NO: 8361 - protein, 108 aa, Streptococcus agalactiae
ATGAGCTTTGCAAAAGTTCTAACTAAGAAAAATAAATTAGACAATGTAAACGATTTATGGTATTTTGTAAGAAATTCAAAAAATAGATGGGTTGCTGGTTCAGCCCAT

SEQ ID NO: 8362 - protein, 36 aa, Streptococcus agalactiae
MSFAKVLTKKNKLDNVNDLWYFVRNSKNRWVAGSAH

SEQ ID NO: 8363 - protein, 852 aa, Streptococcus agalactiae
ATGAGAGATGAGCAAGAAATATATAATTTGGTGTTAAACATAGCAAACCAAGATAAGAGAATCGAAGCTGTACTATTGAATGGATCTCGGGCTAACCCAAATGTACCGAAAGATGATTTTCAAGATTATGATATTGTTTTTGTTACTAATTTTATAGAAGATATTATTTCTGACACTAATTATCATAAAAAATTCGGTGATATTCTTATAATGCAGAAACCAAATGAGTTTAGAAATAAGACGGAATACAATTGCTTTGCTTACTTAATGCAGTTTCAAGATCTGACGAGGATTGATTTAAGACTTATTAAACCAGAATTCTTGGAGGATTATTTAGATGATGCTTTTTCAAAAGTACTTTTAGATAAAAAGAATAAATATCTTGATTATAATTTTGAAAGAAGTTCTCTGTACGAAACAAAGCAATTGTCAGAAGATGAAATCAACAAAATTCTTAATGAAATATATTGGGTTAGTACTTATGTAGTCAAGGGGATAGCAAGAAATGATATTATTTATTCAGAGTTTATGATATCTAATCCTATTAAAAATGCTTTTATTAAACTTCTAAAACAAAAAATATTAATAGAAAAAGAGCTTGATTCATTATCTTTTGGAAAGCTCGACAAGGATATCTTGCAATATATTACAGATAAAGATCAACTATTGAAAATTTTTTCAAATAAATCTTTAAAAGACATTGAGGCTAATTTGCGATTTTTATTGGATGAAACAAATCAAATGGCGAAATATATTTCTATTAATAGGAAACTTAATCTGAACCAAGGAGAATACCAATCAGCAATGAAATTTATGAATATCTTTTTGTCAAATTCATATCAAAATTTCAAC

SEQ ID NO: 8364 - protein, 284 aa, Streptococcus agalactiae; identical to SEQ ID NO: 3656

SEQ ID NO: 8365 - protein, 390 aa, Streptococcus agalactiae
ATGCAAAGCCAGAAATTAAATGTCCTTCAGAGAGTTTTAAGGGATAAATTTCTTTTACAAGGATTAGGAGTACCCAACAGTAATACTGTGTTAAACAGATCTTTTACTGCTCTATTACTAGCTTTATTATTGGAGGACTCAAATAATAAAAGTTGGATATCTGAAGAAGATCAGATAAAAATTATGAATCAGGCATTCTCCTGGCTTATAGATGAACCTGATTTTAGAGGCTTTGACGAGGAGCTTGGATGGATACATGCCTTTGCTCATGGAGCTGATTTATTAACAGAAATAGTCAAGATGAAATGTTTTTCAAAAGATGATAGTTTAAAAATCTTAACTATCATAAAAAGAGTGATGATAACTGATGACATACTAACATTAAACGGT

SEQ ID NO: 8366 - protein, 130 aa, Streptococcus agalactiae
MQSQKLNVLQRVLRDKFLLQGLGVPNSNTVLNRSFTALLLALLLEDSNNKSWISEEDQIKIMNQAFSWLIDEPDFRGFDEELGWIHAFAHGADLLTEIVKMKCFSKDDSLKILTIIKRVMITDDILTLNG

SEQ ID NO: 8367 - protein, 333 aa, Streptococcus agalactiae
ATGAAAAGGAATAAACATTTACCGTTAACAGAAACTACCTATTATATCTTATTAGCTTTGTTTGAGGAAGCACATGGCTATGCTATTATGCAAAAAGTTGAAGAAATGAGTGGCGGTGATGTTAGAATAGCCGCAGGGACAATGTACGGTGCCATTGAAAATTTACTTAAACAAAAATGGATAAAGTCTATCCCAAGTGACGATAGAAGAAGAAAAGTTTATATTATTACTGAGACAGGAAAAGAAATAGTAGAACTTGAAACGAATCGATTAAGAAAGTTACTTAATACTGCTAATCAGTTGGGTTTTGGGGGAGATAGTTATGATAAAGTT

SEQ ID NO: 8368 - protein, 111 aa, Streptococcus agalactiae; identical to SEQ ID NO: 3660

SEQ ID NO: 8369 - protein, 549 aa, Streptococcus agalactiae
ATGATATCCTATGCATACCTCATTGCAGAAATATACTTTAAAGTCAAAATAAGGAAATATATTATGGAAATTAAAGAATACGAGAATAATCCGTACCATTTAGCACAGCTAGTAGATTTAATTAATTATTGTCAGAATATAGAAGCTAAACTTGATATAAAGATGGCTGAACAAGACGATATTTTTCAAATAGAAAATTATTATCAAAACAGAAAAGGTCAATTTTGGATTGCCTTAGAAAATGAAAAAGTAGTTGGTTCGATTGCGTTACTGCGTATTGATGATAAAACAGCTGTTCTAAAAAAATTTTTTACATATCCAAAATATAGAGGAAATCCTGTTCGACTTGGTCGAAAATTATTTGAAAGATTTATGCTTTTTGCTCGAGCTAGTAAATTCACAAGAATTGTCTTGGATACTCCAGAAAAAGAGAAAAGATCTCACTTCTTTTATGAAAATCAAGGATTTAAGCAAATAACAAGAGATGAACTAGATGTAGACTACATTTTTCCAGATAGAGATTCAAGGATATATGTAAAACTTCTTGAT

SEQ ID NO: 8370 - protein, 183 aa, Streptococcus agalactiae; identical to SEQ ID NO: 3662

SEQ ID NO: 8371 - protein, 741 aa, Streptococcus agalactiae
ATGTTAAAAAAAGAATGGATGGAGAATGTTAGGACATACAAAGTTATATCTATTCTGATTACTTGTTCAATATTTGGTATATTAGGTCCCTTAACTGCACTTATGATGCCTGATATTATGGCAGGAATTTTACCTAAAAAACTACAGGGAGCGATACCAGAGCCTACCTATATTGATTCTTATATTCAGTATTTTAAAAATATGAATCAGCTTGGTTTAGTTATTTTAGTATTTTTATTTAGTAGTACACTGACGCAAGAATTTTCAAAAGGAACCTTAATTAATCTAGTTACGAAGGGATTAGCCAAAAAAGTTATAATCCTTGCTAAATTTATAGTAATTACCCTTCTATGGACAGTGTCATACTTATTAAGTGTTGTCATCCATTTTAGTTATACGTTATATTACTTTAGTAACGAAGGAAGTCATAAATTAATGGTTTACGGTGCAACATGGTTTATCGGTATTCTTTTCATAAGCTTAATACTCTTTTTTTCAGTTCTTTTTCGTAAAACTTTAGGGGGTTTGTTAGGTTGTCTTTTTATGGTGGTGTTATGTGTAGTATCTGGATTTTTTAAAATCAGTAAAAGCTATAATCCTATGCTTCTTATCCAAAAACAAGGAGAAATATTAAGTGGAAAGTTTAAAGTTCAAGACTTAATGGAACCGAGCATATTAGTGTTTTTGCTTATTATAATGACGTTATTACTTAGCATGTACATTTTTGAAAAAAGTGAAGTT

SEQ ID NO: 8372 - protein, 247 aa, Streptococcus agalactiae; identical to SEQ ID NO: 3664

SEQ ID NO: 8373 - protein, 813 aa, Streptococcus agalactiae
ATGATTTATGGATTCGTAGGACCAAATGGAGCAGGTAAAACAACGACAATAAAAATGATTTTAGGATTGTTAAAATTTGATACGGGTTTCATAACAATTTTTGGTAAAAAAGTTAATTTTGGAAGAACAGATACCAATCAACTGATTGGCTATCTCCCAGATGTTCCCGAGTACTACGATTATATGACAGCTCTAGAATATCTTGATTTATGTTCTGGTTTAGCGAGATCAAAGCATAAGCTTTCTAACAAAGAACTACTTAGGTCAGTTGGACTTGACGATAATCACCAAAAGATTGCTACTTATTCTCGAGGAATGAAACAGCGTCTTGGATTAGCCCAAGCACTGGTTCATGATCCTAAAATTATTATTTGCGATGAACCAACCTCTGCATTAGACCCGAAAGGTCGCCAAGATATTTTAGATATTATTTCAAATCTTAGAGGAGAAAAAACTGTGATTTTTTCTACCCATATTCTCTCTGATGTCGAAAAAATATGTGATCATGTTCTGGTGTTAACTAAGTGTGGGATTTATTCTCTTGAAGAGTTAAAAGGAAAAAAATCAGAGGAAAATTATTCGGTTCGTATTTTAATAAAAGTGACAAAGTCTGAAGCTAAGGTACTATCTCATAACTATCAGATAGAAAAGAAAGATAATGAGTATGCACTGACTCTCAAAGGCTCTAAAATGGATAACAAAGCAGATTTACTAGCTGGTTTTTACCAAGATTTAGTTTCTTTAAAGATTAGCCCATCAGCTATTGAAGTCATTGACAATAGTTTAGAGGAGCTTTATTTGGAGGTTACCAAA

SEQ ID NO: 8374 - protein, 271 aa, Streptococcus agalactiae; identical to SEQ ID NO: 3666

SEQ ID NO: 8375 - protein, 204 aa, Streptococcus agalactiae
ATGAATACAGAAATACCAAATCAATTATTACCATTCCTAGTTCCGTTGATTATGTTGCAAGGAGCTTTAATTATCATTTCTCTAGTCAAACTAAGTAAACTTAAGATGACTAAACACCTTTCAAAGCCAGTTTGGTTTTTGGTCATTATATTTCTTAATATAATTGGGCCAATTGCATTTCTTATTTTGGAAGGGAATAATGAA

SEQ ID NO: 8376 - protein, 68 aa, Streptococcus agalactiae
MNTEIPNQLLPFLVPLIMLQGALIIISLVKLSKLKMTKHLSKPVWFLVIIFLNIIGPIAFLILEGNNE

SEQ ID NO: 8377 - protein, 1074 aa, Streptococcus agalactiae
ATGCTTGGAGAGAATATCTATTTACAACGTACTCAGATTGGTATGACGCAAGAGAATTTGAGTGATTATCTGCATTTAACAAAAACTACAATTTCAAAGTGGGAAAATAATCAAGCTAAACCGGATATTGACTATCTTATTTTGATGGCTAATCTTTTTGATATTAGCTTGGATGACTTAGTCGGTTATCAAAAAACATTGTCAGATGATCAAAGAAATCAGCTCATTAAGGATCTAAAAATAAAAGCAAATGTATTGTCTGAGAGAGATTTCTTTCAGGAAGTTAAGGAATTATCAAAACAGTTCCCTAACGATTTTAAGACTCTGTTGATAATGATTAATATGGTCTTGAGCAACCTAACCAACCTTAATGATTCAGAAATGAAAGAGTGGTCACTAAGTACACTAAATAAAATTATTAGTAAAACAGTAGTTGAGTCTGACCTCCAGACGGCGATAATGTTCAAAACGGTCGTTCTTTTTCACAACCTTGAATATGATGAAGTGATAAACCTTTACCAGAATAGTCCCTATAAATTAGGTGAAGAATTACTTTTAGCTAATAGCTTTTTTGCAAAAGGCGATGTTTACCGAGCTAAGCAAGTATTACAGGTTGAAATTTATCAGCAGATTCTACTTGTATGCGAGTATCTATTGAGTTTATCAACTTTTGAAGTTGAAGAAAACAAAGGCGATATTTTTGAAAGGCTTGAACATATGATAGAAGCGTTTCAATTAAACTCTTTGCATCCCAACACAGTCATCAAGTGTTATTATAGTTTAGCTTGTCATTATAGTAAAAGTGATGATGATAAGGCATTAGGATACTTAAAACAATGTTTTAAATCTTTAAAACAATTGCTCCAAAGATTTGAATTACACGGTGATACTTTCTTTTATACCATCGATGATTGGTTAGAGACAATACCTACTGGTATTGCACCACCGACGAGTCAATTACAGGTAATAGAACGAGTTGAGGACTTATTTCAAAATTCACAATTTAAAGAACTATCAGGGCATAAAGAATTTCAACAAATGATTCAAAAACTTAACGATTTAAAAAAGGATTAC

SEQ ID NO: 8378 - protein, 358 aa, Streptococcus agalactiae
MLGENIYLQRTQIGMTQENLSDYLHLTKTTISKWENNQAKPDIDYLILMANLFDISLDDLVGYQKTLSDDQRNQLIKDLKIKANVLSERDFFQEVKELSKQFPNDFKTLLIMINMVLSNLTNLNDSEMKEWSLSTLNKIISKTVVESDLQTAIMFKTVVLFHNLEYDEVINLYQNSPYKLGEELLLANSFFAKGDVYRAKQVLQVEIYQQILLVCEYLLSLSTFEVEENKGDIFERLEHMIEAFQLNSLHPNTVIKCYYSLACHYSKSDDDKALGYLKQCFKSLKQLLQRFELHGDTFFYTIDDWLETIPTGIAPPTSQLQVIERVEDLFQNSQFKELSGHKEFQQMIQKLNDLKKDY

SEQ ID NO: 8379 - protein, 612 aa, Streptococcus agalactiae
GTGAACAAGAAATCCTTTTTCCAGTGTGTTATACTACTTGTTTCTTTTTTAGTGTTAACATTAGCAGTTAAATCTCAAAGTGATATGATAAGTTATTTGGATAATATCACTTCAGCTTTTTTTCAAAGCATACGAAATCCCGATTTAACTAACTTAATGACGATAATATCAACAGTTGTCAGCCCTTTGACAACGTCATTAATAGCACTTGTTATCCTTGGGTATCAATATTTTTTAAACCAAAGAATAGCTGTGTGGCTATTTATGTTATTTTTTGGTACCAATGCTTTGGCATTGCTTTTAAAAGATATCATCGCACGTCATAGACCTATGAATCAACTTGTTTTTGATTCGGGTTATAGTTTTCCCAGTGGACATACGATATCAACGTTTTTATTAATGATTCTTGTTTTAGTGGTTGCGAGACAGAGATTGAGAAGAGTATTGTCACAAGTAGTTTTCGTAATATTTGCATTAGTGATCCTTGCATCAGTTATTTTTTCAAGACTCTATTTAGAAAATCATTTTTTAACGGATATTTTAGGGTCGTTGTTACTAGGAGCATCGTCATATTATGGTTTGTCTGCTATTGTATCTTTGAAAGAGTTACAA

SEQ ID NO: 8380 - protein, 204 aa, Streptococcus agalactiae; identical to SEQ ID NO: 3670

SEQ ID NO: 8381 - protein, 294 aa, Streptococcus agalactiae
ATGGATATTACAGATTATCAAAAATGGGTGAGTGAATTCTATAAAAAAAGAAACTGGTATCAATACAATTCTTTTATTAGAAGTAACTTTCTTTCAGAAGAAGTCGGCGAATTGGCTCAAGCCATTCGCAAATATGAAATTGGACGTGACAGACCTGACGAAACCGAACAAACTGATTTGGAAAACTTAAATGATATAAAAGAAGAACTAGGAGATGTCTTAGATAATATCTTCATACTTGCTGATCAGTATAATATCTCACTAGAAGAGATTATCAGCGCACATCGCACTAAT

SEQ ID NO: 8382 - protein, 98 aa, Streptococcus agalactiae; identical to SEQ ID NO: 3672

SEQ ID NO: 8383 - protein, 557 aa, Streptococcus agalactiae
ATGAGAATAACTATTTTTTGTGGAGCAAGTACTGGGGAAAATCCTGTTTATAGTGAAAAAACAGTTGCCTTAGCACAATGGATGGCACAAAACAAACATTCTCTGGTGTATGGTGGAGGAAAAGTTGGCTTAATGGGAGTCATGGCTGATACTGTGATTGCAAATGGTGGCTACACTACTGGTGTTATTCCGACATTTTTAAGAGATCGTGAAATTGCACATGAAAATTTATCAGAGCTTATCATAGTAAATAATATGCCTGAACGTAAGGCAAAAATGATGCTACTTGGAGATGCCTTATCGCTCTACCTGGTGGACCTGGTACCCTTGAAGAAATTTCCGAAGTTATCTCTTGGTCTCGCATCGGTCAAAATGATAATCCTTGCATTTTATATAATGTTAATGGCTACTTTAATGATTTAAAAAATATGTTTGATCATATGGTTGGTGAGGGTTTTCTTAGTCTGGAAGATAGAGAAAATGTCCTATTCTCAGATGATATTACTGAAATCGAAGATTTTATAACGAATTATAAAGTCCCTAGCACGCGCCAATAC

SEQ ID NO: 8384 - protein, 186 aa, Streptococcus agalactiae; identical to SEQ ID NO: 3674

SEQ ID NO: 8385 - protein, 861 aa, Streptococcus agalactiae
TTGAATCAAGAAAAAAAGAGACTTAACCTAATCGGGCTGATACTTTTAGCTCAGGCTATTGTTTTAAGTTTGGCGACTACACTATTTGCTGAAATCTTACAAAATGATGTCTGGATAGGTATAGCAAGTACTTTAATCGCCTTACTCATTCCTTGTTTTTTTATGGGTTTTAAAAATTTAAAAAAACATCTAACGGCAACCCATCATACAATCACTTTCACCACTATTTTATTCTTGTTAAGCATTATATATACTACTAATAATATAGTCTCCACAATATGGGATGTTGTGCTAAATCATCTCAATATTATGGAATCGGAAAGTCAAAATTATGATGCCACATTCAATATACTTATGATTAGTTATTCTGTTGTTGTAGGTCCTTTTTTTGAAGAAGTTTTATACCGAGGAATAGTATTGAATTTATTATCCAAGTATGGTAAATGGTTTGCCATTATCACTTCTGGCATCCTATTTGGTTTAATGCACCAAGACATTTCTCAGCTATTGACTACATCTATTGCGGGTATCATAATGGGTTTTATCGCTTACCATTATTCCTTTAAGGTAGCCCTACTCCTTCATATCTGCAATAACTTTATCGTAGAAATTTTCACCCAGCTATCAACAGTAAACGAGTTATACGGGACTTATTTTGAAAATATATTGCTAATTTTAGCAATCTTATTTATATTATATTACCTTTTTACTCATAGGAATACTGCTCGCCGTCGTATAAGTCTGCACTCTAACGTTCGAGAGGCTGACTCAATAAACTCTAAACAACATACAAAATTATTACTTACTAGTTGGCCTTTTATTCTCCTTGTCATTTACGACATTGTCCTAACAACTATTAAT

SEQ ID NO: 8386 - protein, 287 aa, Streptococcus agalactiae
MNQEKKRLNLIGLILLAQAIVLSLATTLFAEILQNDVWIGIASTLIALLIPCFFMGFKNLKKHLTATHHTITFTTILFLLSIIYTTNNIVSTIWDVVLNHLNIMESESQNYDATFNILMISYSVVVGPFFEEVLYRGIVLNLLSKYGKWFAIITSGILFGLMHQDISQLLTTSIAGIIMGFIAYHYSFKVALLLHICNNFIVEIFTQLSTVNELYGTYFENILLILAILFILYYLFTHRNTARRRISLHSNVREADSINSKQHTKLLLTSWPFILLVIYDIVLTTIN

SEQ ID NO: 8387 - protein, 300 aa, Streptococcus agalactiae
ATGACTAAAAAGATAACTGTTGTAGCATTAGAAACATTGATTGCCCAGCATAATAATATCCATTTGATAGACGTTCGTGAAGAGCATGAGTATCGTGGGGGGCATATTTCAGGTGCGATAAATCTTCCTTTGAGTCAACTCAGTCATAAGTTTGAACAGTTAGATAAAAATAAGGAATATTATCTTGTTTGTCAACGAGGGGGAAGATCTATTAGAGCATGCCAATTTCTTGAGTTGAAAGGCTACAAAGTAATCAATGTAGATGGCGGCACAGAAGCGTGGAGAGGAAATCTAGAAGTG

SEQ ID NO: 8388 - protein, 100 aa, Streptococcus agalactiae
MTKKITVVALETLIAQHNNIHLIDVREEHEYRGGHISGAINLPLSQLSHKFEQLDKNKEYYLVCQRGGRSIRACQFLELKGYKVINVDGGTEAWRGNLEV

SEQ ID NO: 8389 - protein, 765 aa, Streptococcus agalactiae
ATGAACGTTAAACATATGATGTATCTATCTGGAACTCTAGTGGCTGGTGCATTGTTATTTTCACCAGCTGTATTAGAAGTACATGCTGATCAAGTGACAACTCCACAAGTGGTAAATCATGTAAACAGTAATAATCAAGCCCAGCAAATGGCTCAAAAGCTTGATCAAGATAGCATTCAGTTGAGAAATATCAAAGATAATGTTCAGGGAACAGATTATGAAAAAACGGTTAATGAGGCTATTACTAGTGTTGAAAAATTAAAGACTTCATTGCGTGCCAACCCTGAGACAGTTTATGATTTGAATTCTATTGGTAGTCGTGTAGAAGCCTTAACAGATGTGATTGAAGCAATCACTTTTTCAACTCAACATTTAGCAAATAAGGTTAGTCAAGCAAATATTGATATGGGATTTGGGATAACTAAGCTGGTTATTCGCATTTTAGATCCATTTGCTTCAGTTGATTCAATTAAAGCTCAAGTTAACGATGTAAAGGCATTAGAACAAAAGGTTTTAACTTATCCTGATTTAAAACCAACTGATAGAGCTACCATCTATACAAAATCAAAACTTGATAAGGAAATCTGGAATACACGCTTTACTAGAGATAAAAAAGTACTTAACGTCAAAGAATTTAAAGTTTACAATACTTTAAATAAAGCAATCACACATGCTGTTGGAGTTCAGTTGAATCCAAATGTTACGGTACAACAAGTTGATCAAGAGATTGTAACATTACAAGCAGCACTTCAAACAGCATTAAAA

SEQ ID NO: 8390 - protein, 255 aa, Streptococcus agalactiae
MNVKHMMYLSGTLVAGALLFSPAVLEVHADQVTTPQVVNHVNSNNQAQQMAQKLDQDSIQLRNIKDNVQGTDYEKTVNEAITSVEKLKTSLRANPETVYDLNSIGSRVEALTDVIEAITFSTQHLANKVSQANIDMGFGITKLVIRILDPFASVDSIKAQVNDVKALEQKVLTYPDLKPTDRATIYTKSKLDKEIWNTRFTRDKKVLNVKEFKVYNTLNKAITHAVGVQLNPNVTVQQVDQEIVTLQAALQTALK

SEQ ID NO: 8391 - protein, 771 aa, Streptococcus agalactiae
ATGCCACATAATCTTTATCTACATTCTTCAGTTGTTCAAAGTCGAAAACTAGATCATAATAACAAAAAAGATATCGCTAGAGCAATTAGGTTTTCAACTTTTGATTCAAATATTCAATTAACAGTAGCCTTTTTTGTTAATTCACTATTACTCATTATGGGCGTTGCTGTTTTCAAAACAGGAAGTGTTACTGATCCATCATTCTTTGGTCTATTTAAAGCACTATCTAATTCTACTATTATGAGTAATTCTATTTTAGCTCATATAGCAAGTTCAGGTATTTTATCACTTTTATTTGCAATAGCTTTATTAGCATCTGGACAGAATTCAACTATTACTGGAACATTAACAGGTCAAATTATTATGGAAGGATTTATTCATATGAAAGTTCCAATTTGGTTCCGTCGTATCATTACTCGCCTAATTTCTGTTATTCCTGTAATGATTTGTGTCTTAGTAACTAGTGGTAGAAGTACTGTTGAAGAACATATAGCTATTAATAACTTAATGAATAACTCTCAAGTCTTCTTAGCATTTGCATTACCATTCTCAATGTTACCTCTACTAATATTTACTAATAGTAAAGTTGAAATGGATGATGATTTTAAAAATACTTGGATAATTAAGATTCTTGGTTGGCTTTCAGTTATAGGATTAATTTATCTCAATATGAAGGGATTGCCAAATCAAATTGAAAGGTTTTTGGGGGAGAATACCCCACCTCATCCACAAATTATTTCTTGCGCATCAAATAGCTCATATCATCATTAT

SEQ ID NO: 8392 - protein, 257 aa, Streptococcus agalactiae
MPHNLYLHSSVVQSRKLDHNNKKDIARAIRFSTFDSNIQLTVAFFVNSLLLIMGVAVFKTGSVTDPSFFGLFKALSNSTIMSNSILAHIASSGILSLLFAIALLASGQNSTITGTLTGQIIMEGFIHMKVPIWFRRIITRLISVIPVMICVLVTSGRSTVEEHIAINNLMNNSQVFLAFALPFSMLPLLIFTNSKVEMDDDFKNTWIIKILGWLSVIGLIYLNMKGLPNQIERFLGENTPPHPQIISCASNSSYHHY

SEQ ID NO: 8393 - protein, 537 aa, Streptococcus agalactiae
ATGAAAATAGCAATAATCGGATATAGTGGGTCGGGTAAGTCCACTTTAGCAAGAAAATTGGGAAATTACTATAATTGCAATGTATTACATCTTGATAGTATTCACTTCGCCCCAAATTGGGAAGAGAGAAAATATGATGACATGATTGACGATGTCAGCAACATGTTAGAAAAAAGAACATGGATTATAGAAGGTAACTACAAAAAACTGCTATATCAAGAACGTCTAGCAGATGCAGATGAGATTATTTTTTTTGACTTTAATCGCTTCAACTGCTTGTGGAGAGCATTCAAACGTTACTGTAAGTTTCGTGGTAAGACTAGACCTGATATGGCCAATGGATGCCCGGAAAAATTAGATTTTGAATTTATCAGTTGGATTCTTAAAGACGGTCGCTCTGACAAACAAAAATCAAACTATAAACAAGTTGTTGAGGACTACCCTCAAAAAATAAAGATTCTAAAACACCAACGCGATCTTGATCAATACCTAAAAGAACTCCCTGTTGCATCCAATACAGACCCTCTCAAGAGCTTG

SEQ ID NO: 8394 - protein, 179 aa, Streptococcus agalactiae; identical to SEQ ID NO: 3686

SEQ ID NO: 8395 - protein, 1083 aa, Streptococcus agalactiae
ATGACAACAAATGTAATGGCAAATTATAGCTACGGAGAAGATTGCTTCAAAGAAATTCCTAGCGTTTTGGCAACTTACCGTATTCAAAGCATTGCTTTCGTCGGTGGCAAACGTGCCCTAGACAGCTCAGAAGCCGAGGTTCGCTCTATTTTAGAGGAAGCAAATATTAAAGTCACAGGAAGCTTTGTCTATGGAACGGATTCAACACAATCTAACATTGACAAGTTAGTAGCCAACCCACAAGTTCAAGCCGCTGATGCTATCTTAGGTTTTGGCGGTGGAAAAGCTTTAGACACAGCTAAAATGGTAGCAAAAGAGTTAGGTAAAAATAGCTTTACTATCCCAACTATTTGTTCTAATTGCTCCGCAGGTACTGCCATTGCAGTTGTATATAATGATGACCATTCTTTCTTAAGATACGGCTATCCCGAGTCTCCACTTCATATTTTTATCAATACACGGATTATTGCACAGGCACCAAGCAAATATTTTTGGGCTGGTATTGGGGACGGTATTTCAAAAGCCCCTGAAGTAGAACGTGCTACCTTAGAGGCTAAGACCAATAAACTACCACATACTGCAGTGTTAGGACAAGCAGTCGCTCTGTCTTCAAAGGAAGCTTTTTATCAATTTGGTGAACAAGGTCTAAAAGATGTTGAAGCTAATTTAGCTTCGCGTGCAGTTGAAGAAATTGCGCTTGATATCTTAATCTCAACTGGCTATGCTTCTAATTTAGTTAATCAACCTGATTTCTACTACAATTCTTGTCACGCGCATGCATTTTACTATGGTACAACCGCTATTCAAAGACAAGGTGAATTCTTACATGGCGTTGTAGTTGCGTTTGGTGTGTTAGTTTTACATGCTTATTTCAACGAACTAGAAGAACTTGAAAAAGTAGCTCGTTTTAATAAGTCACTAGGTTTGCCAACAACTCTAGCTGACGTCTCTTTATCAGAAAAAGATATTCCAAAAATTGTTGAAATTGCAATGACTACTAATGAATACAAAAATACCCCTTTCGATCCCAAAATGTTTGCTCAAGCTATTTTAGCAGCAGACGCTTTCGGACAGACACTAGCC

SEQ ID NO: 8396 - protein, 361 aa, Streptococcus agalactiae; identical to SEQ ID NO: 3688

SEQ ID NO: 8397 - protein, 705 aa, Streptococcus agalactiae
ATGGTATGTGTCGATTTTATTGATCAAAAAGTTTATAGTGAAGCAGAAGGCCTATTTGTTTCCGATTTAGACTTAGGCATTAAAGGTTTAATAAGAGCACGTTATCCTTTTGCTCTGGATAGTGACTTTATTTCGTATGGAAATTTAAGTCATTATTGTATGAATTATCTTGACGAAATTGTTCAGCGAGCGAATCAGAAAAATGAGAAGATAAAATATAATGTGACTACCTTGATGAAAGAAGAAGAGAAGCCCTTCAACGTTGAAGAGCGTTTGAACAAGCAAGCAACTATCGGTCAACGAATTGCTGATGATGTTGCACGTTTTGGCGGATCTTGGACTTTTATTATCGTTTTTGTATCCATTATGGCTATTTGGATGTTGGTTAATATCATGAAGCCTTTTGGTATTCAATTTGATCCTTACCCATTTATCCTGTTAAACTTAGCTTTATCAACGATTGCTGCAATCCAAGCACCACTTATTATGATGAGTCAAAATCGTGCTGCTGATTATGATCGTTTGCAAGCTCGAAATGACTTTAATGTCAATAAAACCTCTGAGTTAGAAATTAGATTATTGCACGAAAAGATTGATCATATGGTACAACAAGATCAGTTTGAATTGTTAGAGATTCAAAAGTTACAGACAGAAATGCTAGTATCATTGGGAAATCAGTTAGCACAATTGAAACAACTACAAAAA

SEQ ID NO: 8398 - protein, 235 aa, Streptococcus agalactiae; identical to SEQ ID NO: 3690

SEQ ID NO: 8399 - protein, 1842 aa, Streptococcus agalactiae
ATGTCCAAGTTTTTAGAGAAATTAAAAACAGATATTCTAGTAGCTGACGGTGCAATGGGAACTCTCCTTTATACTTATGGGCTAGATACTTGTCATGAATCCTACAATGTAACACATCCAGAAAAGGTTCTAGCCATTCATCAAGCTTATATTGAAGCGGGTGCAGATGTTATTCAGACGAATACCTATGGGGCTCAACGTCATCGATTAAAGAACTACGGTTTGGAAGATCAGGTTGTCTCTATCAATCAAGCAGCAGTTAATATAGCTCATCAAGCGACTTTGGGTAAAGAAACATTTATTTTAGGTACTGTTGGAGGTTTTCGTTCTCAAAGACAATGCGATTTAACATTGGATAATATTGTAGAAGAAACTTTGGAACAAGTTGAGGCTTTATTGGCGACAGGACAGCTAGACGGATTATTGTTTGAAACTTATTATGATATTGAGGAGATAACGACAGTTTTAAAAATTGTGAGGGAGATGACTGATCTACCAATTATTACTAATATTTCTCTTCATGAAGCAGGGGTAACATCAAATGGAAAGCCTATTGTAGAGGCGCTCAGCCAATTAGTTATGCTAGGTGCAGATGTGATTGGCTTAAATTGTCACCTTGGACCCTATCATATGATCCAATCATTGAAGCAAGTTCCTTTATTTGCCCAGTCTTATTTGTCAGTTTATCCTAATGCAAGTCAGTTATCTTTAGATGGTGAGAATAGTCAATACCAGTTTAGTCAGAATTCAGAGTATTTTGGAAAATCTGCAGAACTTCTCGTAGCAGAAGGAGTTAGGCTTATTGGTGGTTGTTGTGGGACAACTCCAGATCATATTAGAGCTGTGAAACGATCTATTAGAGGATTGAAACCTATTGAACGAAAGGTTGTTACTCCTATAATACCTGTAAAAGATTTTGTTAGGCGTATCAGACGAACAGATACTCTAGTGGATAAGGTAAAAAAAGAAGTAACAATTATCGCAGAATTAGATCCTCCAAAGCATTTAGATATCGTTCAGTTTCAAAAGGCTATACGAGCGATTGACCAAAAAGGTATTGCAGCAATTACTTTAGCAGATAATTCACTATCTAATACACGTATTTGTAATTTAAGTATAGCTAGCTTGCTTAAAGATGAAATTAGCACACCCTTTTTACTACATATAGCTTGTCGTGACCATAATTTAATTGGTTTACAGTCTAGACTGTTGGGCATGGAATTATTAGGTTTTAACCATATTTTAGCCATAACAGGAGATCCGACTAAACTTGGTGATTTCCCAGGAGCGACTAGTGTTTATGATGTGACTTCCTTTAAACTCCTTTCTCTGATTAAACAACTTAATCAAGGTTTATCTTATAGTGGTGCTAGCTTGAGACGTCCAACAGATTTTACAGTTGCTGCTGCCTTTAATCCTAATGTGAAAAACCTTACTCGAACCGTAAAATTGATTGAGAAAAAAGTAGCTTCTGGTGCTGATTATTTTATGACACAACCAATATTTGATCACTCTGTGTTAAAGGAATTAGCTGATCTTACTAAAACAGTTGAACAACCCTTTTTTATCGGAATTATGCCAATAACAAGTTATAATAACGCTGTTTTTCTACACAATGAAGTTCCTGGTATTAAACTTTCTGAGTCATTTTTATCTGCTCTTGAAAAGGTAAAGGACGACAAAGAAGCTTGTTTAACTTTGGCCTTAAACGAGAGTAAGTCCTTGATTGATGAAGCCTTGAACTATTTTAATGGTATCTATTTGATTACTCCCTTTTTACGCTATGATCTGACTCTTGAGTTAATTGACTATATACAAAAAAAGCAAGTAAGAAAGTCCTCT

SEQ ID NO: 8400 - protein, 614 aa, Streptococcus agalactiae
MSKFLEKLKTDILVADGAMGTLLYTYGLDTCHESYNVTHPEKVLAIHQAYIEAGADVIQTNTYGAQRHRLKNYGLEDQVVSINQAAVNIAHQATLGKETFILGTVGGFRSQRQCDLTLDNIVEETLEQVEALLATGQLDGLLFETYYDIEEITTVLKIVREMTDLPIITNISLHEAGVTSNGKPIVEALSQLVMLGADVIGLNCHLGPYHMIQSLKQVPLFAQSYLSVYPNASQLSLDGENSQYQFSQNSEYFGKSAELLVAEGVRLIGGCCGTTPDHIRAVKRSIRGLKPIERKVVTPIIPVKDFVRRIRRTDTLVDKVKKEVTIIAELDPPKHLDIVQFQKAIRAIDQKGIAAITLADNSLSNTRICNLSIASLLKDEISTPFLLHIACRDHNLIGLQSRLLGMELLGFNHILAITGDPTKLGDFPGATSVYDVTSFKLLSLIKQLNQGLSYSGASLRRPTDFTVAAAFNPNVKNLTRTVKLIEKKVASGADYFMTQPIFDHSVLKELADLTKTVEQPFFIGIMPITSYNNAVFLHNEVPGIKLSESFLSALEKVKDDKEACLTLALNESKSLIDEALNYFNGIYLITPFLRYDLTLELIDYIQKKQVRKSS

SEQ ID NO: 8401 - protein, 2235 aa, Streptococcus agalactiae
ATGGTAAAAGTTTCAAATTTAGGGTATCCACGTCTTGGTGAACAGCGCGAATGGAAGCAAGCGATCGAAGCTTTCTGGGCAGGGAATCTTGAACAAAAAGATTTAGAAAAACAACTAAAACAATTACGTATCAATCATTTAAAGAAACAAAAAGAGGCAGGTATTGACCTTATTCCAGTGGGGGATTTTTCTTGTTATGATCATGTTTTGGATTTGTCATTTCAATTCAATGTAATCCCAAAGCGTTTCGATGAGTATGAGAGGAATTTAGACCTTTATTTTGCTATTGCAAGAGGTGATAAAGATAATGTCGCATCATCTATGAAAAAGTGGTTTAATACCAACTACCACTACATAGTCCCAGAATGGGAGGTTGAGACTAAACCTCACTTGCAGAATAATTACTTACTTGATCTTTATCTAGAAGCTAGGGAAGTAGTTGGTGATAAAGCAAAGCCGGTTATCACTGGTCCAATAACCTATGTTTCCTTATCATCAGGAATTGTCGACTTTGAAGCGACTGTTCAGCGGTTATTACCACTTTATAAGCAGGTCTTTCAAGATCTGATAGATGCAGGCGCCACCTATATTCAGATTGATGAGCCGATATTTGTAACTGATGAAGGTGAACTTTTAGTAGATATAGCTAAGTCTGTTTATGATTTTTTTGCAAGAGAAGTACCACAAGCCCACTTCATCTTTCAAACCTACTTTGAATCAGCAGTCTGTTTAGATAAACTCTCTAAGCTGCCAGTAACGGGATTTGGCCTTGATTTTATACATGGTAGGGCGGAAAATTTAGCTGCTGTTAAGCAAGGTCTATTCCGCGAAAAAGAATTATTTGCAGGAATTGTTAATGGTCGAAATATCTGGGCAGTAAATTTAGAAGAAACGTTGGCTTTATTGGAAGAGATAGGTCCCTTTGTTAAACGATTGACTCTTCAACCTTCTTCAAGTCTTTTACATGTACCGGTGACGACTAAATACGAAACACATTTAGACCCTGTGTTAAAGAATGGCTTATCATTTGCTGATGAAAAACTAAAGGAATTAGAACTATTAGCTAGTGCTTTTGATGGTAATAAAACAAAGGGATATCACGAAGCTTTATCTCGTTTTTCAGCTCTTCAAGCTGCTGATTTTCGTCATGTAGCATTGGAATCATTAGCAGAAGTAAAGCTTGAACGAAGTCCGTATAAATTACGCCAAGCTTTGCAAGCTGAAAAATTACAGTTACCGATTTTACCAACAACAACTATTGGATCCTTTCCTCAATCACCTGAAATTAGGAAGAAACGCCTTGCTTGGAAAAGAGGAAATCTATCTGACTCAGATTATAAAGATTTCATAAAAACTGAAATTAGAAGATGGATTGCTATTCAAGAAGATCTTGATCTTGATGTGTTAGTACATGGCGAATTTGAGCGTGTTGATATGGTTGAATTTTTTGGTCAAAAGTTAGCTGGTTTTACGACAACCAAATTAGGCTGGGTACAGTCTTATGGTTCAAGGGCGGTCAAACCACCTATCATTTATGGTGATGTCAAACATATTCAACCCTTAAGCCTTGAAGAAACGGTTTATGCCCAAAGTTTGACTAAGAAACCTGTTAAAGGCATGTTGACAGGTCCTATTACTATAACGAACTGGTCATTTGAGCGAGATGATATTAGCCGATCTGATCTTTTTAATCAAATTGCTTTGGCTATAAAAGATGAGATTCAACTTTTGGAACAATCAGGTATTGCTATTATACAAGTGGATGAAGCAGCCCTTCGAGAAGGTTTACCCTTACGCCAGCAAAAGCAACAGGCTTACTTAGATGATGCTGTTGCGGCCTTTAAAATTGCAACTTCATCTGTGAAAGATGAGACACAAATTCATACACATATGTGTTATTCAAAATTTGACGAAATTATTGATTCTATCCGTGCACTAGATGCAGATGTTATTTCTATTGAAACGAGTAGAAGTCATGGGGACATCATTGAAAGTTTTGAAACAGCAGTTTATCCTCTAGGAATTGGCCTGGGTGTTTATGATATTCATTCCCCTCGCATACCTACTAAGGAAGAAATTATTGTCAATATTCAACGATCACTAAAATGTCTATCAAAAGAGCAATTTTGGGTAAACCCTGATTGTGGCTTAAAAACACGCCGTGAAGCAGAAACAATTGCTGCCTTGGAGGTTCTTGTTTCAGCTACCAAAGAGGTTCGTCAGCAATTAGATAAT

SEQ ID NO: 8402 - protein, 745 aa, Streptococcus agalactiae; identical to SEQ ID NO: 3696

SEQ ID NO: 8403 - protein, 210 aa, Streptococcus agalactiae
GTGAAATTTTTAAAATTTCTTCCTCTTTCTATTTTATTTGCCCTAACATTCTCTAGCTTTTTTTCAGTTAAATTAGGACAATTGCCAACACTAAAATGGTTAGATTTATTGGCTGGCATACCAACTCTAGTTGTCACTATTCGATATCGAAATTTATTTTACACTGTTCTTACTGGTATCGTTACTATGGCTTTATTGAGATTACTATTT

SEQ ID NO: 8404 - protein, 70 aa, Streptococcus agalactiae
MKFLKFLPLSILFALTFSSFFSVKLGQLPTLKWLDLLAGIPTLVVTIRYRNLFYTVLTGIVTMALLRLLF

SEQ ID NO: 8405 - protein, 690 aa, Streptococcus agalactiae
ATGGAAAAAGGATTTAAAGAGGGAGTGAAAGATGCCTTGCCCACAGCTTTAGGGTATATCTCAATAGGCTTGGCGTTTGGGATAGTTGCTTCAGCATCAGATTTATCTGCAATAGAAGTTGGTCTTATGAGTGCCTTGGTATATGGGGGATCTGCTCAGTTTGCTATGTGTGCGCTATTATTAGCAAAAGCAGACTTGATGACTATTACGATGACAGTATTTTTAGTTAATTTGAGAAATATGTTAATGAGTTTACACGCGACTACTATCTTCAAGTCTGCTCACCTAATGAATCAATTAGCCATAGGAACTCTAATAACAGATGAGAGCTACGGCGTTTTACTTGGAGAAGCATTACATCACAAAGTTGTATCGCCTAGTTGGATGCATGGTAATAATGTGATGAGTTATTTGACATGGGTAATCTCAACGATAATAGGAACTTTACTGGGGAGTACTATTCCTAATCCAGAAATGTTTGGTTTAGACTTTGCATTAGTCGCCATGTTTATAGGTCTCTTTGTATTTCAGTTGTTTGGGATGTTATCTGATGGAAAGCGACTTGTTGTATATGTTCTTGCTTCTGTAGGTTTAAGTTACTTCTTATTAGCTACTTTTTTGTCAGGAGCCTTATCAGTATTGCTTGCGACTGTTGTTGGATGTAGTGTGGGAGTTGTTTTAGATGATAAA

SEQ ID NO: 8406 - protein, 230 aa, Streptococcus agalactiae; identical to SEQ ID NO: 3700

SEQ ID NO: 8407 - protein, 902 aa, Streptococcus agalactiae
ATGAACACAAAACAGCGTTTTTCAATCCGGAAATATAAGTTAGGTGCCGTATCTGTACTTTTGGGAACCCTATTTTTTTTAGGTGGTATCACAAATGTAGCTGCTGATTCTGTCATAAATAAGCCATCTGATATTGCAGTTGAACAGCAAGTAAAAGACAGTCCAACGAGCATAGCAAATGAGACACCTACTAACAACACGTCATCAGCCCTTGCGTCGACAGCTCAAGACAATCTTGTTACAAAGGCTAATAATAGTCCAACAGAAACACAACCAGTAGCTGAGTCTCACTCTCAAGCCACCGAGACATTTTCCCCAGTCGCAAATCAACCGGTTGAAAGCACTCAAGAAGTTTCTAAAACTCCTTTAACCAAACAAAATTTAGCAGTCAAATCTACACCAGCTATTTCTAAAGAAACCCCTCAAAACATTGATAGTAATAAAATTATCACTGTCCCCAAAGTATGGAACACAGGCTACAAAGGAGAGGGAACTGTTGTAGCAATTATTGACTCAGGACTAGATATCAATCACGATGCTCTCCAATTAAATGATTCGACAAAAGCAAAATACCAAAACGAACAGCAAATGAATGCTGCTAAAGCAAAAGCTGGTATAAACTATGGAAAATGGTATAACAACAAAGTAATCTTTGGTCACAACTATGTTGATGTCAATACAGAGCTAAAAGAGGTGAAAAGCACTTCTCATGGTATGCACGTAACCAGTATCGCAACAGCTAATCCTAGCAAGAAAGATACAAATGAATTAATCTATGGTGTTGCTCCTGAAGCACAAGTAATGTTTATGAGAGTCTTCTCTGATGAAAAAAGAGGAACTGGACCAGCCCTTTATGTTAAAGCTATTGAAGATGCCGTTAATCGGTGCTGACAGCATTAATT

SEQ ID NO: 8408 - protein, 301 aa, Streptococcus agalactiae
MNTKQRFSIRKYKLGAVSVLLGTLFFLGGITNVAADSVINKPSDIAVEQQVKDSPTSIANETPTNNTSSALASTAQDNLVTKANNSPTETQPVAESHSQATETFSPVANQPVESTQEVSKTPLTKQNLAVKSTPAISKETPQNIDSNKIITVPKVWNTGYKGEGTVVAIIDSGLDINHDALQLNDSTKAKYQNEQQMNAAKAKAGINYGKWYNNKVIFGHNYVDVNTELKEVKSTSHGMHVTSIATANPSKKDTNELIYGVAPEAQVMFMRVFSDEKRGTGPALYVKAIEDAVNSVLTALI

SEQ ID NO: 8409 - protein, 3741 aa, Streptococcus agalactiae
ATGGCTAGACTCGCTGGCGTTTCTGTTGTTATAGCAGCAGGTAACGACGGTACATTTGGGAGTGGAGCATCAAAGCCTTCTGCTCTTTATCCTGATTATGGTTTAGTTGGTAGTCCATCAACAGCTCGTGAGGCCATTTCTGTAGCATCATATAATAATACAACACTGGTTAATAAAGTCTTCAACATTATCGGATTAGAAAACAACAGAAATCTCAACAACGGATTAGCTGCTTATGCAGATCCTAAAGTTAGTGATAAGACCTTTGAAGTAGGGAAACAATATGATTATGTTTTCGTAGGAAAAGGAAACGACAATGATTATAAGGACAAAACTTTAAATGGTAAAATCGCCTTAATTGAACGTGGAGATATTACTTTTACAAAAAAAGTCGTCAATGCTATTAATCACGGTGCTGTGGGAGCTATTATCTTTAATAACAAAGCTGGGGAAGCTAATCTAACAATGAGTTTAGATCCTGAAGCAAGTGCTATTCCTGCTATTTTTACCCAAAAAGAGTTTGGAGATGTTTTAGCTAAAAACAACTATAAAATTGTATTTAACAATATCAAAAATAAACAAGCCAACCCTAATGCAGGTGTCCTATCTGACTTTTCAAGCTGGGGGTTAACAGCAGACGGACAATTAAAACCTGACTTATCTGCTCCTGGAGGCTCTATTTACGCCGCTATCAATGATAATGAATATGATATGATGAGTGGGACAAGTATGGCTTCTCCCCATGTCGCTGGTGCTACTGCTCTAGTTAAACAATACTTATTGAAAGAACATCCAGAACTTAAAAAAGGTGACATTGAAAGAACTGTCAAATACCTTCTTATGAGTACTGCTAAAGCACACCTAAACAAAGATACAGGCGCTTACACCTCACCACGCCAACAAGGAGCAGGTATTATCGATGTCGCAGCAGCAGTTCAGACAGGATTATACCTAACTGGTGGGGAAAACAACTATGGCAGCGTTACATTAGGAAATATTAAAGATAAAATTTCCTTTGATGTTACTGTTCATAATATCAATAAAGTTGCAAAAGATTTACACTATACAACCTATTTAAATACTGATCAAGTTAAAGATGGCTTTGTCACATTGGCTCCTCAACAACTTGGTACATTTACAGGGAAAACGATACGGATTGAACCAGGGCAAACCCAAACGATTACAATTGATATAGATGTTTCGAAATACCATGACATGTTAAAAAAAGTAATGCCAAACGGCTATTTCCTAGAAGGCTACGTACGTTTTACAGACCCTGTTGATGGTGGGGAAGTTCTTAGTATTCCTTATGTTGGATTTAAGGGAGAATTCCAAAACTTAGAAGTTTTAGAAAAATCCATTTATAAGCTTGTTGCTAACAAAGAAAAGGGATTTTATTTCCAACCAAAACAAACAAACGAAGTTCCTGGTTCAGAAGATTATACTGCCTTAATGACTACAAGTTCAGAGCCTATCTACTCAACAGACGGTACTAGTCCTATCCAATTGAAAGCCTTGGGAAGCTATAAGTCTATAGATGGAAAATGGATCTTACAACTAGATCAAAAAGGCCAGCCTCATCTAGCCATTTCACCTAATGATGACCAAAATCAAGATGCCGTTGCAGTGAAAGGTGTTTTCTTACGTAATTTCAATAATTTAAGAGCCAAAGTCTATCGTGCAGATGATGTTAATTTACAAAAACCACTATGGGTAAGTGCTCCCCAAGCAGGAGATAAAAATTACTACAGCGGAAATACTGAAAATCCAAAATCTACATTTTTATATGACACAGAATGGAAAGGAACCACTACTGATGGTATTCCTTTAGAAGATGGAAAATACAAATACGTTTTAACTTATTACTCTGATGTCCCTGGCTCTAAGCCACAACAAATGGTGTTTGATATCACTTTGGATAGACAAGCTCCTACACTAACAACAGCAACTTATGACAAAGATAGACGTATCTTCAAAGCTCGTCCTGCAGTAGAACACGGGGAATCTGGTATCTTTAGAGAACAAGTTTTTTACTTAAAAAAAGATAAAGATGGTCATTATAATAGCGTCTTACGTCAACAAGGAGAAGACGGTATCCTTGTTGAAGATAACAAAGTATTTATCAAACAAGAAAAGGATGGTAGCTTTATTCTACCTAAAGAGGTTAACGATTTCTCTCATGTCTACTATACTGTTGAAGATTATGCAGGCAATCTAGTATCAGCAAAACTCGAAGATTTGATCAATATTGGCAATAAAAATGGTTTAGTAAACGTCAAAGTGTTTAGCCCTGAGCTTAACAGTAATGTCGATATTGATTTCTCTTACTCTGTCAAAGATGACAAAGGTAATATCATCAAAAAGCAACATCACGGGAAAGACCTCAATTTATTGAAATTGCCTTTTGGTACCTATACGTTTGATCTATTCTTATACGATGAGGAACGAGCAAATCTAATCAGTCCCAAAAGTGTCACTGTAACTATTTCTGAAAAAGATAGCCTTAAAGACGTCTTATTTAAAGTTAACTTACTCAAGAAAGCAGCCTTACTCGTTGAATTTGACAAGCTTTTACCAAAAGGAGCAACAGTCCAGTTGGTTACTAAGACAAATACTGTTGTTGATCTACCAAAAGCAACTTATTCTCCTACTGACTATGGTAAAAACATACCTGTAGGAGACTATCGTTTAAACGTAACGCTGCCTAGTGGGTATAGCACTTTAGAGAACTTAGATGATTTACTTGTATCCGTAAAAGAAGATCAGGTAAACCTAACAAAATTGACGCTGATTAATAAAGCTCCTCTGATTAATGCCCTAGCAGAACAAACTGATATTATTACCCAGCCTGTGTTTTATAATGCTGGAACTCACTTAAAAAATAATTACCTAGCTAATCTTGAAAAGGCACAAACTTTAATTAAAAATAGAGTGGAACAAACAAGTATTGATAATGCTATTGCTGCTTTGAGAGAAAGTCGCCAAGCTCTTAACGGTAAAGAAACAGATACTTCTTTACTGGCAAAAGCTATTTTAGCTGAAACAGAAATCAAGGGAAACTATCAATTTGTTAATGCTAGTCCATTAAGCCAATCAACTTATATCAATCAAGTCCAATTGGCGAAAAACCTTCTACAAAAACCTAACGTCACTCAATCAGAAGTAGACAAAGCCTTAGAAAATCTTGATATTGCTAAAAATCAATTAAATGGTCATGAAACTGATTACTCTGGTTTACACCATATGATAATTAAAGCAAACGTTCTGAAACAAACATCATCTAAATATCAGAACGCCAGTCAATTTGCTAAAGAAAATTATAATAACCTTATCAAGAAAGCAGAATTGCTGCTTTCCAATAGACAAGCTACACAAGCTCAAGTTGAAGAGTTATTAAACCAAATAAAAGCAACCGAACAAGAGCTTGATGGCCGTGATAGAGTTTCTTCCGCAGAGAATTATAGTCAATCACTCAATGATAATGACTCTCTCAATACCACACCTATCAATCCGCCAAATCAGCCCCAGGCGTTGATATTCAAAAAAGGCATGACTAAAGAAAGTGAGGTTGCTCAGAAGCGTGTCTTAGGGGTGACTAGCCAAACCGATAATCAAAAGGTAAAGACAAACAAGCTTCCTAAAACAGGCGAAAGCACTCCTAAAATAACCTATACAATATTGCTATTTAGTCTCTCTATGCTAGGTCTGGCAACAATCAAACTAAAGTCTATCAAAAGAGAA

SEQ ID NO: 8410 - protein, 1247 aa, Streptococcus agalactiae
MARLAGVSVVIAAGNDGTFGSGASKPSALYPDYGLVGSPSTAREAISVASYNNTTLVNKVFNIIGLENNRNLNNGLAAYADPKVSDKTFEVGKQYDYVFVGKGNDNDYKDKTLNGKIALIERGDITFTKKVVNAINHGAVGAIIFNNKAGEANLTMSLDPEASAIPAIFTQKEFGDVLAKNNYKIVFNNIKNKQANPNAGVLSDFSSWGLTADGQLKPDLSAPGGSIYAAINDNEYDMMSGTSMASPHVAGATALVKQYLLKEHPELKKGDIERTVKYLLMSTAKAHLNKDTGAYTSPRQQGAGIIDVAAAVQTGLYLTGGENNYGSVTLGNIKDKISFDVTVHNINKVAKDLHYTTYLNTDQVKDGFVTLAPQQLGTFTGKTIRIEPGQTQTITIDIDVSKYHDMLKKVMPNGYFLEGYVRFTDPVDGGEVLSIPYVGFKGEFQNLEVLEKSIYKLVANKEKGFYFQPKQTNEVPGSEDYTALMTTSSEPIYSTDGTSPIQLKALGSYKSIDGKWILQLDQKGQPHLAISPNDDQNQDAVAVKGVFLRNFNNLRAKVYRADDVNLQKPLWVSAPQAGDKNYYSGNTENPKSTFLYDTEWKGTTTDGIPLEDGKYKYVLTYYSDVPGSKPQQMVFDITLDRQAPTLTTATYDKDRRIFKARPAVEHGESGIFREQVFYLKKDKDGHYNSVLRQQGEDGILVEDNKVFIKQEKDGSFILPKEVNDFSHVYYTVEDYAGNLVSAKLEDLINIGNKNGLVNVKVFSPELNSNVDIDFSYSVKDDKGNIIKKQHHGKDLNLLKLPFGTYTFDLFLYDEERANLISPKSVTVTISEKDSLKDVLFKVNLLKKAALLVEFDKLLPKGATVQLVTKTNTVVDLPKATYSPTDYGKNIPVGDYRLNVTLPSGYSTLENLDDLLVSVKEDQVNLTKLTLINKAPLINALAEQTDIITQPVFYNAGTHLKNNYLANLEKAQTLIKNRVEQTSIDNAIAALRESRQALNGKETDTSLLAKAILAETEIKGNYQFVNASPLSQSTYINQVQLAKNLLQKPNVTQSEVDKALENLDIAKNQLNGHETDYSGLHHMIIKANVLKQTSSKYQNASQFAKENYNNLIKKAELLLSNRQATQAQVEELLNQIKATEQELDGRDRVSSAENYSQSLNDNDSLNTTPINPPNQPQALIFKKGMTKESEVAQKRVLGVTSQTDNQKVKTNKLPKTGESTPKITYTILLFSLSMLGLATIKLKSIKRE

SEQ ID NO: 8411 - protein, 684 aa, Streptococcus agalactiae
ATGACAAAAATAATTTATTTCGCTGATGATGAAAAGAATATTCGTGACTTGGTGGTTCCTTTTTTAGAACATGATGGTTTCACTGTTCGAGCATTTGAAACTGGAGACCTTCTCTTAGAAGCCTATAAAAACCAAAAACCCGATTTAGTTATATTAGACATAATGATGCCTGGAACTAATGGTTTAGATGTTATGAAAAGCATCCGCCAATATGATAATATTCCTATTATCATGTTAACAGCTAGAGATTCTGATGTTGATTTCATTACGGCTTTTAATTTAGGAACTGACGATTACTTCACCAAGCCTTTTTCACCTATAAAACTTAGTCTACATGTTAAAGCATTGTTCAAACGCCTTGATGAAAAAGCAATCAAAAATGACACTCAGTATCAGTTCCTAGATTTAACTCTGGATACCGAAAAGCGAATAGCCCTATTATCAAATGAAGAAATGCCCTTAACCAAGACAGAATTTGATTTTCTTTTAGTATTAATTGAAAAACCTGAAACTGCTTTTTCTAGGGAAACACTGCTTAATCGTATTTGGGGATTTGATGATATTGAAAGCAGAGCAGTTGATGACACTATTAAACGATTACGTAAAAAATTTAAGCAATACCACAGTCAGGTTAGTATCAAAACTGTCTGGGGTTACGGCTTCAAATTAATCAAAGAGGACAAA

SEQ ID NO: 8412 - protein, 228 aa, Streptococcus agalactiae; identical to SEQ ID NO: 3704

SEQ ID NO: 8413 - protein, 1386 aa, Streptococcus agalactiae
ATGAAAAAGAAAAGTTTAATTAGCAATCTTATCCTTATTAATAGCATCACTCTATTTCTTGGTTTTTACCTCATCTATTTTTCTGTCAACTATGTCATTAAAGACTATGTCCATCAAATGACAAGGAATTCCATGCAGGCGAATTTCACCATTTTAGATAGTATCTATAACAACAAGAAAATACCAGATGAAAATATGGTTAACCAAGATAGCATCTTTGTTTGGTCTTACTATGCTATTTTTGACCAGCATTATCGTATGAAATATGGCACTGATAATCATAAAAAAGAGAGCCATGATATTATTCGCTATCTTACCCAAAAAAGATTGTGGCAAATTTCTAAGGAAAAAGATGGTATGTTTGTAACCATCAAGAAAAAAACCTATTATGTAATGACCAAAGACTACTCTGGTATCCTTGTTGATGGTAGCATAAAAAAAGTTCCTAAAGCACAGTCGCAACTTTTTCATGTGATTAACTTTTCAGACATTACTTACACCCAGCATCTAATTACTAAAATTAATCATTTTCTTATAGTTATCTTAGTACTAACCTATATTCCCATGCTATTTATTATGAGGAAGACTTTCACTGGAATTAGAGAATCTATTCAATCAGTACAAACTTATATTTCCAGCCTTTGGAAAAATCAAGGCAATCATCAATCTAGTCAAAAAGAAATTGTCTTTTCTGATTTCGATCCTCTTCTACTTGAGAGCCAAGAAATGGCAAATCGAATCTACCAAGCAGAAGAGAGCCAAAGAAACTTCTTTCAAAATGCCTCCCACGAGTTACGGACACCTTTAATGTCCATCCAAGGATATACTGAGGGAGTTCAAGAGGGTATTATTGATGCCGAGCTCGCACACTCTGTTATTCTGCAAGAGAGCAAAAAAATGAAACAGCTCGTAGACGATATTATCTTACTCTCTAAATTAGATAGTAACTTAAGTGATCAAAAAGATGAATTTTCTTTAAATGAATTACTTAATAGTATTATTGCTTATTTCAAACCCCTAGCTAATAAACAAAAGATTAGTATTACTTATAGACCAGACAAGCATGAAAAGTTACTAAAAGGTAACGAAGAGTTGATTCAACGAGCTATCAATAATATCCTTAGTAACGCACTACGCTATGCTGTTTCTCATATTGAAATCTCTTACACAAATCAAAAACTAACTATCTCAAACGACGGACCAGCCATTTCAAAAGAAGACTTGCCTTATATTTTCGATCGCTTCTATAAAGGACATGGCGGCCAAACAGGTATTGGACTTGCAATGACTAAAGAAATTATCAAGCAACATCATGGTAATATCATCGCTGAGAGTGATTCGACCTCAACAACTTTTACGATTTATTTCAATTGCCACAAAATTGCC

SEQ ID NO: 8414 - protein, 462 aa, Streptococcus agalactiae; identical to SEQ ID NO: 3706

SEQ ID NO: 8415 - protein, 606 aa, Streptococcus agalactiae
ATGTTACATTCTAAAAAAATACATTCCTTATCGCTTATTGCCGTTCTCTCTTTAGCAACATATACGAGTTTACAACCAAATCATGTAACGGCTGAACAATCACAAAAAACATCAACTGTTCATATGAGTCAAAAAACTATTGAACATAAGTTAAAAGTTGCAGATAAAGAAGCTGCTCCTCTCTACGCTAAAATCGACCATATCCAACGACATATTGAAGTCAAAAAAGCAAAAGATTTAAAAGTTATTGAATTGTATATTAACAAAGATATCAACCAACTAGAGAAGCAAAATAAACGTCTACTAACTAAATTCTATACTTCTATTGATAATCAAACATGGGATAGCACAAGTGAAGTCAAAAAATTGATTGATAAGACAAACCTATCCACTAACGAAAAAGATAGATTAAAATTATATTTTGAACAACGTGCTTACCTTGAGACAAGGTTGAACGACCGCTATCAAAAATTTGATAACTCTATTGAAAACCAAAATAAAGAACTAAAAATATTAACGTCAAAAATAGAAAAAATCTATCAAAAACATGGTATTACAAAAGAGGTATTAAAAACTTACTATGCTAAAAAAACAGTACGAGCTGAC

SEQ ID NO: 8416 - protein, 202 aa, Streptococcus agalactiae; identical to SEQ ID NO: 3708

SEQ ID NO: 8417 - protein, 99 aa, Streptococcus agalactiae
ATGCTAAAAAAACAGTACGAGCTGACTGATTTAGCTAAAAATAGAAAAATCCCAAAAGTTAAACTTTTGGGATTTTATACGCGTAAATATCACTATTTC

SEQ ID NO: 8418 - protein, 33 aa, Streptococcus agalactiae; identical to SEQ ID NO: 3710

SEQ ID NO: 8419 - protein, 2499 aa, Streptococcus agalactiae
ATGACATTCTATAATCACAAAGAAATCGAACCCAAATGGCAAGCTTTTTGGGCAGATAATCATACCTTTAAAACAGGAACAGACGCATCAAAACCTAAGTTTTATGCCCTAGATATGTTCCCATACCCATCTGGAGCTGGTCTCCACGTTGGTCACCCAGAAGGCTATACAGCAACGGATATTCTCAGCCGTTTCAAACGTGCCCAAGGTCACAATGTCCTCCACCCAATGGGTTGGGATGCTTTTGGACTTCCTGCTGAGCAGTACGCTATGGATACTGGTAATGACCCAGCTGAGTTTACAGCTGAAAACATCGCTAACTTCAAACGCCAGATTAATGCTCTTGGTTTCTCATACGACTGGGATCGTGAAGTTAACACAACTGACCCTAACTACTACAAGTGGACACAGTGGATCTTTACCAAGCTTTATGAAAAAGGTCTAGCTTACGAAGCTGAAGTTCCAGTTAACTGGGTTGAAGAATTGGGAACAGCTATCGCCAACGAAGAGGTTCTTCCAGATGGTACATCAGAACGTGGTGGCTACCCAGTTGTCAGAAAACCAATGCGCCAATGGATGCTCAAAATCACTGCCTATGCAGAGCGCTTGCTGGAAGACTTGGAAGAAGTTGACTGGCCAGAGTCAATCAAGGACATGCAACGCAACTGGATTGGTAAATCAACTGGTGCTAATGTAACCTTCAAGGTTAAGGATACAGATAAGGACTTCACTGTCTTTACAACACGTCCTGACACCCTTTTTGGTGCGACTTACGCAGTTCTTGCTCCTGAGCATGCCTTGGTTGATGCTATTACAACAGCTGACCAAGCAGAAGCCGTTGCCGAATACAAACGTCAAGCGAGTCTCAAATCAGACCTTGCTCGTACAGACCTTGCCAAAGAAAAAACTGGTGTCTGGACAGGTGCCTATGCCATTAACCCAGTTAATGGTAAAGAAATTCCAGTTTGGATTGCGGACTATGTCCTTGCTAGCTACGGTACAGGTGCTATCATGGCAGTTCCAGCTCACGATGAACGTGACTGGGAATTCGCAAAACAATTCAACCTAGACATCATTCCAGTTCTTGAAGGTGGGAATGTTGAAGAGGCTGCCTTTACAGAAGACGGTCTTCACATCAACTCAGACTTCCTAGATGGTCTCGACAAAGCGGCAGCTATTGCCAAAATGGTCGAGTGGCTTGAAGCAGAAGGTGTTGGTAATGAGAAAGTTACTTACCGTCTTCGTGACTGGCTCTTCAGCCGTCAGCGTTACTGGGGTGAGCCAATCCCAATCATCCACTGGGAAGATGGAACATCAACTGCGGTTCCTGAGAGCGAATTGCCACTAGTTCTTCCAGTTACTAAGGATATCCGTCCTTCAGGTACTGGTGAGAGCCCACTTGCTAACTTGACAGACTGGTTGGAAGTCACTCGTGAAGATGGCGTTAAAGGTCGTCGTGAGACCAACACCATGCCACAATGGGCAGGTTCAAGCTGGTACTATCTCCGCTACATCGATCCACACAACACTGAAAAACTAGCTGACGAGGAACTCCTCAAACAATGGTTGCCAGTTGATATCTATGTCGGTGGTGCAGAGCATGCCGTGCTTCACCTTCTCTATGCTCGCTTCTGGCACAAGGTTCTTTATGATCTCGGTGTCGTACCTACCAAAGAGCCATTCCAAAAACTCTTTAACCAAGGGATGATTTTGGGAACAAGCTACCGCGACAGCCGTGGTGCTCTTGTGGCAACTGACAAGGTTGAAAAACGTGATGGCAGCTTCTTCCATGTGGAAACTGGTGAAGAGCTTGAACAAGCACCTGCTAAGATGTCTAAATCACTTAAGAACGTTGTCAATCCAGATGATGTTGTTGAGCAGTACGGTGCTGACACCCTTCGTGTTTACGAGATGTTCATGGGACCACTCGATGCTTCAATCGCTTGGTCTGAAGAAGGTCTTGAAGGCTCACGTAAGTTCTTGGACCGTGTTTACCGTTTGATCACGACTAAAGAGATCACTGAGGAAAATAGCGGAGCTCTTGACAAGGTTTACAACGAAACTGTTAAGGCAGTTACTGAGCAAGTTGACCAAATGAAATTCAACACAGCTATCGCTCAACTCATGGTCTTTGTCAATGCAGCCAACAAGGAAGACAAACTCTTTAGCGACTATGCCAAAGGCTTTGTTCAATTGATTGCACCATTCGCACCGCACTTAGGTGAAGAACTCTGGCAAGTCTTGACAGCCTCAGGACAGTCAATCTCTTACGTGCCATGGCCAAGCTATGACGAAAGCAAATTGGTTGAAAACGAAATCGAAATCGTTGTCCAAATCAAAGGTAAGGTCAAAGCTAAACTCGTCGTTGCTAAAGACCTTTCACGCGAAGAATTGCAAGATCTTGCTCTTGCTAACGAAAAAGTCCAAGCCGAAATCGCAGGCAAAGACATCATCAAAGTCATCGCAGTACCAAACAAACTCGTTAATATTGTGGTGAAA

SEQ ID NO: 8420 - protein, 833 aa, Streptococcus agalactiae; identical to SEQ ID NO: 3712

SEQ ID NO: 8421 - protein, 1245 aa, Streptococcus agalactiae
ATGTCACCATTAAATATCAATAAGAATAATTGGCGCGCCCTAATCGCTGCCATTGTCGCATCCGGAACCGATGATTTAAATATCATGTTCCTTGCATTTTCTATGTCAACTATCATTACTGATCTTCATTTATCTGCGGCACAGGCTGGTTGGATTGGGACAATTACCAACTTGGGAATGCTCGTGGGAGGACTAATCTTTGGTTTATTAGCTGATCGCTACAATAAATTTAAAGTTTTCAAATGGACGATTCTAATCTTTTCAATCGCAACTGGTTTAGTTTTCTTCACTACTAATTTATCATATCTCTATATCATGCGCTTCATTGCAGGAATTGGCGTTGGTGGCGAATATGGTATCGCTATTGCCATTATGGCAGGAATTGTCCCAACTAATAAAATGGGCCGGATTTCTTCACTAAATGGTATCGCTGGTCAAGTTGGATCTATTAGCTCAGCACTCTTAGCAGGATGGCTAGCTCCAGCACTCGGTTGGCGGGGACTTTTTCTCTTTGGCCTTCTCCCTATAGTTCTCGTCCTATGGATGCAATTTGCTGTTGATGATAAAGATATCTTAGATCAATATAATACAGACGCAGATGATGAACCTCTAGATATCAGTATAAAAGCTTTATTTGATACTCCTGTATTAGCCACACAGAGCCTAGCACTAATGGTTATGACAACTGTTCAGATTGCCGGATACTTTGGCATGATGAACTGGTTACCAACTATTATCCAAACCAACTTAAACGTTTCTGTCAAGAATTCATCATTATGGATGATTGCAACCATTCTTGGAATGTGCCTTGGCATGCTAGTATTTGGTCAATTGTTAGATAAATTTGGACCGCGTTTAGTATACGGGTGTTTCCTTCTATCATCTGCAATTTGTGTCTATCTCTTTCAATTCGCAACAACAATGCCTTCTATGATTATAGGCGGGGCAGTTGTCGGATTCTTTGTTAATGGTATGTTTGCAGGCTATGGTGCCATGATTACACGTCTCTATCCACATCATATTCGTTCAACAGCTAACAATCTTATCTTAAATGTTGGTCGTGCAATAGGTGGCTTTTCATCTGTTATCATCGGAATGATTCTAGACGTTTCAAATGTCTCTATGGTCATGCTTTTCTTAGCAAGTCTCTATATCGTTAGTTTTTTATCAATGCTAAGCATTAAGCAATTAAAACGTCAAAAATATCACACTAATTTAACACAATTAGATGTCAAACCAACTGAC

SEQ ID NO: 8422 - protein, 415 aa, Streptococcus agalactiae; identical to SEQ ID NO: 3714

SEQ ID NO: 8423 - protein, 807 aa, Streptococcus agalactiae
ATGAGAGGTCTTTATACTGCTGGAGTTTTAGATGCTTTTCTAGATGCAGGAATAAAAATAGATGGTATCGTATCTGTCTCTGCTGGTGCATTGTTTGGTGTTAATTTTGTATCTAGACAACGAGAGAGGGCTTTGCGATACAATAAAAAGTATTTATCCCACCCTAAATATATGAGTCTAAGGTCATGGTTTCGAACAGGGAATTTTGTTAATAAAGATTTCACCTATTATGAAGTTCCTATGAAATTGGATGTATTTGACGATGAAGCATTTAAAAAATCAAGTATTGATTTTTACGTAGTTGCTACAGAGATGACATCTGGTAAACCTGAATATTTTAAAATTGATAGTGTTTTTGAACAAATGGAAATTTTACGTGCTAGTTCAGCATTACCAGTAGTCTCAAAGATGGTTGATTGGCAGGGGAAAAAGTACTTAGATGGTGGTTTATCTGATAGTATTCCCGTTGATTTTGCCCGTGGTTTAGGATTTGACAAGTTGATTGTTGTGATGACTAGGCCGCTCAATTATCAGAAAAAGCCTTCAAGTGGACGATTGTATAAAACTCTGTATAGGAAATATCCTAATTTTGTAAAGACAGCCTCGAATCGGTACCAACAGTATAATAATAGTCTTGAAAAGGTCATGAGCCTTGAAAAAACAGGCGATCTATTTGCAATTAGACCGAGTAAGAGCTTGGTTATTGGCCGCTTAGAGAAGAATCCGGATAAACTTGATAGTATTTATCAGCTTGGTATGAAAGATGCTAAAAGTGTGATGCCTGAGCTGAATAGTTATCTAATGAAA

SEQ ID NO: 8424 - protein, 269 aa, Streptococcus agalactiae; identical to SEQ ID NO: 3716

SEQ ID NO: 8425 - protein, 1194 aa, Streptococcus agalactiae
ATGACTTATCAAAAAACAGTTGTTTTGGCTGGTGATTATTCCTACATTAGACAAATTGAAACCACATTAAAATCTCTCTGTGTCTATCATGAGAATCTCTCAATTTTTATTTTTAATCAAGATATTCCTCAAGAATGGTTTTTAGCTATGAAAGATAGGGTTGGACAAACTGGAAATCAAATTCAGGATGTAAAGCTCTTCCATGATCACTTATCCCCAAAATGGGAAAATAAAAAGCTTAATCATATTAATTATATGACCTATGCTCGTTATTTCATACCTCAGTACATCTCAGCTGATACAGTTTTATATCTTGACTCTGACTTAGTTGTTACTACTAATTTAGATAACCTCTTTCAAATTTCACTAGACAATGCATATTTAGCTGCAGTTCCAGCTCTTTTTGGGCTTGGATATGGGTTTAATGCTGGAGTAATGGTAATTAACAACCAACGTTGGCGACAAGAAAATATGACTATTAAATTAATTGAAAAAAATCAAAAGGAAATTGAGAATGCCAACGAAGGGGATCAAACAATTCTTAATCGCATGTTTGAAAATCAGGTAATTTATTTAGATGATACCTACAATTTTCAAATTGGTTTTGATATGGGAGCTGCTATCGATGGGCATAAATTTATTTTTGACATCCCAATTACCCCACTCCCAAAAATTATTCACTACATTTCGGGAATCAAACCTTGGCAAACATTATCAAATATGAGACTCCGTGAGGTATGGTGGCACTATAATTTACTTGAATGGTCAAGTATCATATCTAGTAAAAAAGTATTTGGTTTAGACCACCCAATTAAAACACAAAATTATCGTCTCAATTTCCTTATTGTTACAACTTCTGATTGTATACCATCTATCTCAGAATTAGTCACTGCCCTTCCAGATTGTCTATTTCACATTGCAGCACCAACAGTTATGTCTGACATTCTTATAAGCCTATTAGCTTTTGAAAATATCCGCCTTCATAAAACTTACACTCCACCTATTATTGATAAATTATTAGCAGAAGCTGATATTTATCTTGATATTAATGTTTTTGGAAAAATGGAGGGCATTCTACAGAAAATGTCACAATCTGAAAAACCAATTCTTACTACAAGAGAATGCAATAGCCAGCTTGTTCCAGAAACAGTTTTTGCATCTATCGATGATTTAATTAATTATCTTCAGTCTATA

SEQ ID NO: 8426 - protein, 398 aa, Streptococcus agalactiae; identical to SEQ ID NO: 3718

SEQ ID NO: 8427 - protein, 1203 aa, Streptococcus agalactiae
ATGGAAAAAGCAGTTGCACTTGCAGTTGATTCAAACTACTTGGATAAAGCCTTAGTAACAATAAAGTCTATTTGTGTTTATAATAGAAATATAACTTTTTATTTATTCAATCAAGATACCCCAGTTGAATGGGTACGTAATATAAACAGGAAACTAGAGCCTCTAGGATCAAAACTGATTAATGTTAAAATATATAACTATGATATTGCTCATCTAACGACTTTTCTAACTGTTAGTACATGGTTTAGATTATTTTTAGCAGATTATATACCTAGTTCACGTGTACTTTATTTAGATTCAGATATTATCGTTAACACTAATCTTGATTACTTATTTGAACTAGATTTTAAAGGTTATTACTTAGCAGCCGTCAAAGATCCCCATAAAAATGAAGAAGGAGGGTTTAATGCTGGCATGCTTTTAGCTAATCTAGAACTATGGCGGGAAGATGGGCTCACTAAAACATTACTAAAAACAGCTGAAGAACTCCACCGAGTTGTCAAAACAGGGGATCAAAGTATCTTGAACATTGTTTGCCATAATCGTTGGTTATCTCTGAACAAAACATGGAACTTTCAAACTTATGATGTCGTTAGCCGCTATAATCATCGATCTTATTTATATCTAAACATAGAAAATAGAACTCCTAATATTATACATTTTTTAACTAGTGACAAACCTTGGAATGAAAATAGCGTTGCAAGGTTTAGAGAACTATGGTGGTATTACTTCCAACTTGATTTTTGCCAATTAACCGGCAAGCAAAGAAAAGTGATTTCTTACGAAAAGTCCATGGAATTGCTTTCTGTTTCAGATATTCATCTTTTCACTCTTACATCTTCCGATAATTTAGAACACATTGAATCGCTAATTTGTAGATGTCCTACTGTTCAATTCCATATTGGTGCCTACACAACAGTGTCAAATAAACTTAGCAAACTAGAACAATATCCAAATGTCCTAGTTTACCCTGAATTAATTGAGGCAAGAATTGAAAAATTAATAACATTAGCCACTGCATACCTTGATATTAATCATGGTCCAGAAGTAGGTAATATTTTACAAAGAGTTCATTTGAAACAAAAGCCAATTTATTCTTTCAACAACACGTCTCATCAAGAGAATATAACCAAACATATCGTTAATCATAATTCTATTGATAATATGGTTGTTTTAATTAACGAATTAAACCTAAATCAATTA

SEQ ID NO: 8428 - protein, 401 aa, Streptococcus agalactiae; identical to SEQ ID NO: 3720

SEQ ID NO: 8429 - protein, 537 aa, Streptococcus agalactiae
ATGTTAGATTCTTTTGATAAGGGTTGGTTTGTACTCCAAACCTACTCAGGTTATGAAAATAAAGTAAAGGAAAATCTCTTGCAACGTGCGCAAACTTATAATATGTTAGACAACATTTTGCGTGTGGAAATCCCTACTCAAACTGTAAATGTTGAGAAAAATGGGAAAACAAAAGAAATTGAAGAAAATCGCTTCCCGGGTTATGTACTTGTGGAAATGGTAATGACTGATGAAGCCTGGTTTGTTGTTCGTAATACTCCAAACGTTACTGGATTTGTTGGATCACACGGCAATCGCTCTAAACCAACACCGTTGTTAGAAGAAGAGATTCGTTCAATACTCATCTCAATGGGACAAACCGTTGATGTCTTTGATACTAATATCAAGGAAGGTGATGTTGTTCAAATCATTGATGGTGCTTTCATCGGACAAGAAGGACGTGTAGTTGAGATTGAGAATAACAAAGTTAAATTAATGATCAACATGTTCGGCTCAGAAACACAAGCAGAACTTGAGTTGTACCAAGTTGCAGAATTA

SEQ ID NO: 8430 - protein, 179 aa, Streptococcus agalactiae; identical to SEQ ID NO: 3722

SEQ ID NO: 8431 - protein, 1053 aa, Streptococcus agalactiae
ATGCTTGATGAAGTCAAAAAGCTTTTAAAAGAACTTCAAGACCTTACCAGAGGTACTAAAGAAGATAAAAAACCAGACGTTAAGCCAGAAGCCAAACCAGAGGCCAAACCAAATATTCAAGTACCTAAACAAGCACCTACAGAAGCTGCAAAACCAGCTTTGTCACCAGAAGCCTTGACAAGATTGACTACATGGTATAATCAAGCTAAAGATCTGCTTAAAGATGATCAAGTAAAGGACAAATACGTAGATATACTTGCAGTTCAAAAAGCTGTTGACCAAGCTTATGATCATGTGGAAGAGGGAAAATTTATTACCACTGATCAAGCAAATCAATTAGCTAACAAGCTACGTGATGCTTTACAAAGTTTAGAATTAAAAGATAAAAAAGTAGCCAAACCAGAAGCCAAACCAGAGGCCAAACCAGACGTTAAGCCAGAGGCCAAACCAGACGTTAAGCCAGAAGCTAAGCCAGACGTTAAACCAGAAGCTAAGCCAGACGTTAAACCAGAAGCTAAGCCAGACGTTAAACCAGAAGCTAAGCCAGACGTTAAACCAGAAGCTAAGCCAGACGTTAAACCAAAGGCCAAACCAGACGTTAAGCCAGAAGCTAAGCCAGACGTTAAACCAGACGTTAAACCAGACGTTAAGCCAGAGGCCAAACCAGAGGCTAAGCCAGACGTTAAACCAGACGTTAAGCCAGAAGCTAAACCAGACGTTAAGCCAGAGGCCAAACCAGAAGCTAAGCCAGACGTTAAGCCAGAAGCTAAACCAGACGTTAAACCAGAGGCTAAGCCAGAAGCTAAACCAGAGGCTAAGTCAGAAGCTAAACCAGAGGCTAAGCTAGAAGCTAAACCAGAGGCCAAACCAGCAACCAAAAAATCGGTTAATACTAGCGGAAACTTGGCGGCTAAAAAAGCTATTGAAAACAAAAAGTATAGTAAAAAATTACCATCAACGGGTGAAGCCGCAAGTCCACTCTTAGCAATTGTATCACTAATTGTTATGTTAAGTGCAGGTCTTATTACGATAGTTTTAAAGCATAAAAAAAAT

SEQ ID NO: 8432 - protein, 351 aa, Streptococcus agalactiae
MLDEVKKLLKELQDLTRGTKEDKKPDVKPEAKPEAKPNIQVPKQAPTEAAKPALSPEALTRLTTWYNQAKDLLKDDQVKDKYVDILAVQKAVDQAYDHVEEGKFITTDQANQLANKLRDALQSLELKDKKVAKPEAKPEAKPDVKPEAKPDVKPEAKPDVKPEAKPDVKPEAKPDVKPEAKPDVKPEAKPDVKPKAKPDVKPEAKPDVKPDVKPDVKPEAKPEAKPDVKPDVKPEAKPDVKPEAKPEAKPDVKPEAKPDVKPEAKPEAKPEAKSEAKPEAKLEAKPEAKPATKKSVNTSGNLAAKKAIENKKYSKKLPSTGEAASPLLAIVSLIVMLSAGLITIVLKHKKN

SEQ ID NO: 8433 - protein, 1134 aa, Streptococcus agalactiae
ATGAATAATAACGAAAAAAAAGTAAAATACTTTTTAAGAAAAACAGCTTATGGTTTGGCCTCAATGTCAGCAGCGTTTGCTGTATGTAGTGGTATTGTACACGCGGATACTAGTTCAGGAATATCGGCTTCAATTCCTCATAAGAAACAAGTTAATTTAGGGGCGGTTACTCTGAAGAATTTGATTTCTAAATATCGTGGTAATGACAAAGCTATTGCTATACTTTTAAGTAGAGTAAATGATTTTAATAGAGCATCACAGGATACACTTCCACAATTAATTAATAGTACTGAAGCAGAAATTAGAAATATTTTATATCAAGGACAAATTGGTAAGCAAAATAAACCAAGTGTAACTACACATGCTAAAGTTAGTGATCAAGAACTAGGTAAGCAGTCAAGACGTTCTCAAGATATCATTAAGTCATTAGGTTTCCTTTCATCAGACCAAAAAGATATTTTAGTTAAATCTATTAGCTCTTCAAAAGATTCGCAACTTATTCTTAAATTTGTAACTCAAGCCACGCAACTGAATAATGCTGAATCAACAAAAGCTAAGCAAATGGCTCAAAATGACGTGGCCTTAATAAAAAATATAAGCCCCGAAGTCTTAGAAGAATATAAAGAAAAAATTCAAAGAGCTAGCACTAAGAGTCAAGTTGATGAGTTTGTAGCAGAAGCTAAAAAAGTTGTTAATTCCAATAAAGAAACGTTGGTAAATCAGGCCAATGGTAAAAAGCAAGAAATTGCTAAGTTAGAAAATTTATCTAACGATGAAATGTTGAGATATAATACTGCAATTGATAATGTAGTGAAACAGTATAATGAAGGTAAGCTCAATATTACTGCTGCAATGAATGCTTTAAATAGTATTAAGCAAGCAGCACAGGAAGTTGCCCAGAAAAACTTACAAAAGCAGTATGCTAAAAAAATTGAAAGAATAAGTTCAAAAGGATTAGCGTTATCTAAAAAGGCTAAAGAAATTTATGAAAAGCATAAAAGTATTTTGCCTACACCTGGATATTATGCAGACTCTGTGGGAACTTATTTGAATAGGTTTAGAGATAAACAAACTTTCGGAAATAGGAGTGTTTGGACTGGTCAAAGTGGACTTGATGAAGCAAAAAAAAATGCT

SEQ ID NO: 8434 - protein, 378 aa, Streptococcus agalactiae
MNNNEKKVKYFLRKTAYGLASMSAAFAVCSGIVHADTSSGISASIPHKKQVNLGAVTLKNLISKYRGNDKAIAILLSRVNDFNRASQDTLPQLINSTEAEIRNILYQGQIGKQNKPSVTTHAKVSDQELGKQSRRSQDIIKSLGFLSSDQKDILVKSISSSKDSQLILKFVTQATQLNNAESTKAKQMAQNDVALIKNISPEVLEEYKEKIQRASTKSQVDEFVAEAKKVVNSNKETLVNQANGKKQEIAKLENLSNDEMLRYNTAIDNVVKQYNEGKLNITAAMNALNSIKQAAQEVAQKNLQKQYAKKIERISSKGLALSKKAKEIYEKHKSILPTPGYYADSVGTYLNRFRDKQTFGNRSVWTGQSGLDEAKKNA

SEQ ID NO: 8435 - protein, 171 aa, Streptococcus agalactiae
ATGTTTGTCAAAGGGATTTTTCAAGTATTGCGTGACACTACTTGGCCAAATCGAAAACAACGTTGGAAAGATTTTATTTCCATCTTGGAATACACTGTATTTTTCACAATCGTTATCTACATCTTTGACAAACTGTTAGCCGCAGGAGTCATGGACTTGATTAATCGATTT

SEQ ID NO: 8436 - protein, 57 aa, Streptococcus agalactiae; identical to SEQ ID NO: 3726

SEQ ID NO: 8437 - protein, 2319 aa, Streptococcus agalactiae
ATGAAATTATTTGATAAGTTTATAGACTTATTTCGTGTTGATGAAGACAACGACGAAATGACAAGAAAAAATGAACAAGAAACTAGAGAAGAAACTAGCAATTTGGATGGCGAAGAAGTCTATGATATTGATGATATTACCCGACCTAGTAAATCCCAGTATCAGCGAGGCATTCGTCACCAAAAGGAAAATGCTAAATCTCGACCTGAATGGCTACAAAAAGTTGATCGTTACCTCCCTTCTCCTAAAAATCCTATCCGTCGTTTTTGGCGGCGCTATCGTATTGGGAAGTTGCTTTTTATCGCCTTAATGGCTTTTATTCTTATATTTGGTAGCTATCTTTTTTATCTTTCTAAAACTGCTACAGTTAGTGATTTACAGAGTGCTCTAAAAACAACCACCACCATTTATGATAAGAATAAAGAATATGCTGGAAAACTTTCGGGACAAAAGGGAACTTATGTAGAGTTAAATGCTATTTCTGATCATCTCAAAAATGCTGTTATAGCAACTGAAGATAGAACTTTTTATGAAAATAATGGTGTAAACTTTAAGCGATTTTTTTTGGCAGTAGCTACACTTGGGAAATTTGGCGGAGGCTCAACTATTACCCAGCAATTAGCAAAAAATGCTTACTTGTCACAGGACCAAACGATTAAACGCAAGGCGCGTGAATTCTTTTTAGCGCTAGAATTGACTAAGAAATATAGCAAGGCTGAGATTCTGACCATGTATCTTAATAACTCTTATTTTGGTAATGGTGTTTGGGGTGTGGAAGATGCTAGTAGGAAATATTTTGGAACCAGTGCTGCTAATTTGACAGTAGATGAGGCTGCTACACTTGCTGGAATGCTTAAAGGACCAGAAGTTTATAATCCTTATTATTCTGTTGAAAATGCAACTAACCGAAGAGATACTGTTTTGGCAGCGATGGTTGATGCAGGTAAACTAACCAAGTCTCAAGCTAAAGAAGCTGCTTCAATTGGTATGAAAAATAGATTAGCAGATACCTATGCTGGTAAAATTAATGATTACAGGTACCCATCCTATTTTGATGCTGTTGTCAATGAAGCCATTGATACTTATGGTATTTCAGAAAAAGATATTGTCAATAATGGCTATAAGATTTACACTGCATTAGATCAAAATTATCAATCAGGAATGCAAAAAACATTTGATGATACTAGCCTCTTCCCTGTATCTGACTATGATGGTCAATCTGCCCAAGGTGCTAGCGTAGCTTTAGATCCAAAAACTGGTGGTGTAAGAGGTTTAGTTGGACGTGTTCAAAGTACTAAAGATGCACAGTTTAGAAGTTTTAACTACGCGACTCAATCAAAGAGAAGTCCAGCCTCAACCATAAAACCTTTAGTTGTTTATTCACCAGCTATTGCTTCAGGATGGTCAATAGATAAAGAACTTCCTAATAAAGTTCAAGATTTTCATGGTTATAAACCAAGTAACTATGGTGGGATTGAGACTGAAAGTATCCCGATGTATCAAGCACTAGCTAATTCTTATAATATTCCTGCTGTTTATACTTTAGACAAACTAGGAATCAATAAAGCCTTTACTTATGGCAGGAAGTTTGGTCTAAATATGTCATCAGCAAACAAAGAGCTAGGAGTGGCGCTAGGTGGAAGTGTAACCACTAATCCTTTAGAAATGGCACAAGCTTACTCAACTTTTGCAAATGACGGTATAATGCATCGCGCTCATTTGATTACTCGAATTGAGACAGCTAATGGAAAATTAGTAAAGCAATTTACAGATAAGCCTAAGCGAGTTATTAGTCGCTCAGTGGCTAGTAAAATGACTAGTATGATGTTAGGAACATTCTCAAATGGTACAGCTATTAATGCCAATGTTTATGGTTATACAATGGCAGGTAAAACTGGAACAACCGAAACAGATTTTAACCCCAATTTATCTGGAGACCAGTGGGTAGTCGGCTATACGCCTGATGTCGTTATTAGTCAATGGGTTGGCTTTAAGAACACAGATAAACACCATTATTTGACAGATTCTAGTGCAGGTACAGCTTCAAATATATTTAGCACGCAAGCTTCATATATACTACCGTATACTAAGGGGTCTAGTTTTACTCATATTGAGAATGCTTATTTCCAAAACGGTATTGGTTCAGTTTATAATGCACAAGATGCTAGTAATACAACGAACCAAGAATCACGCTCAATTATTAATGATTTAAAAGATTCGGCAAGTAAGGCTGCACAAGATATTTCTAGAGCGGTGGAAGATTCAAATTTCCAAGAGAAGGTAAAAGATGCTTGGAATAGTCTAAAGGACTACTTTAGA

SEQ ID NO: 8438 - protein, 773 aa, Streptococcus agalactiae
MKLFDKFIDLFRVDEDNDEMTRKNEQETREETSNLDGEEVYDIDDITRPSKSQYQRGIRHQKENAKSRPEWLQKVDRYLPSPKNPIRRFWRRYRIGKLLFIALMAFILIFGSYLFYLSKTATVSDLQSALKTTTTIYDKNKEYAGKLSGQKGTYVELNAISDHLKNAVIATEDRTFYENNGVNFKRFFLAVATLGKFGGGSTITQQLAKNAYLSQDQTIKRKAREFFLALELTKKYSKAEILTMYLNNSYFGNGVWGVEDASRKYFGTSAANLTVDEAATLAGMLKGPEVYNPYYSVENATNRRDTVLAAMVDAGKLTKSQAKEAASIGMKNRLADTYAGKINDYRYPSYFDAVVNEAIDTYGISEKDIVNNGYKIYTALDQNYQSGMQKTFDDTSLFPVSDYDGQSAQGASVALDPKTGGVRGLVGRVQSTKDAQFRSFNYATQSKRSPASTIKPLVVYSPAIASGWSIDKELPNKVQDFHGYKPSNYGGIETESIPMYQALANSYNIPAVYTLDKLGINKAFTYGRKFGLNMSSANKELGVALGGSVTTNPLEMAQAYSTFANDGIMHRAHLITRIETANGKLVKQFTDKPKRVISRSVASKMTSMMLGTFSNGTAINANVYGYTMAGKTGTTETDFNPNLSGDQWVVGYTPDVVISQWVGFKNTDKHHYLTDSSAGTASNIFSTQASYILPYTKGSSFTHIENAYFQNGIGSVYNAQDASNTTNQESRSIINDLKDSASKAAQDISRAVEDSNFQEKVKDAWNSLKDYFR

SEQ ID NO: 8439 - protein, 1026 aa, Streptococcus agalactiae
TTGCTAGTTTCTTCTCTAGTTTCTTGTTCATTTTTTCTTGTCATTTCGTCGTTGTCTTCATCAACACGAAATAAGTCTATAAACTTATCAAATAATTTCATAGACTTATTATATCAATTTTCAATAAAATGCTATAATAAAACCATGTCATTTTCATTAAAAATTAGAAATCCATACGGTGAACATACCGTTAAAGAACTCCTTGAAGATTATTTTTTGATTCCACGTAAGATTAGACATTTTTTGCGTGTTAAAAAACATGTACTTATAAACAATGAATTTATTAATTGGCAAACTGTCGTCCAAGAAAACGATACTATTACCTTAATCTTTGATGATGAGGATTACCCTACTAAAAAAATTCCTCTGGGCAGAGCAGAGCTTATTGATTGTCTTTATGAGGATGAACATCTTATTATCGTTAATAAACCTGAAGGTATGAAAACTCACGGTAACCAACCAAATGAAATAGCACTGTTAAATCATGTATCTGCCTATTCTGGACAAACATGCTATGTTGTTCATCGCCTAGATATGGAGACCAGTGGAGCTGTTTTATTTGCTAAAAATCCATTTATACTTCCCCTTATCAATCAACGCTTAGAACGAAAAGAAATTTGGCGTGAATATTGGGCTTTAGTTGAAGGAAAATTTTCACCTAAGCATCAAGTTTTGAGAGACAAAATTGGACGGAACCGTCATGACAGACGTAAACGAATCATTGATTCTAAAAACGGTCAACATGCTATGACAATCATTGACGTTTTGAAGTATATCCAAAATAGTAGTCTCATAAAATGCCGACTGGAAACCGGAAGAACCCATCAAATTCGCGTTCACTTATCTCATCATGGACATCCCTTAATAGGAGACCCCCTCTACAACCCTTCTTCTAATAATGAAAGGTTAATGCTACACGCTCACCGATTGACTCTATCTCATCCATTAACTTGCGAAACTATTAGCGTAGAGGCCCCTTCATCTACTTTCGAGAAGATTTTAAACAATTATAAAAAAGGAGTTGGA

SEQ ID NO: 8440 - protein, 342 aa, Streptococcus agalactiae
MLVSSLVSCSFFLVISSLSSSTRNKSINLSNNFIDLLYQFSIKCYNKTMSFSLKIRNPYGEHTVKELLEDYFLIPRKIRHFLRVKKHVLINNEFINWQTVVQENDTITLIFDDEDYPTKKIPLGRAELIDCLYEDEHLIIVNKPEGMKTHGNQPNEIALLNHVSAYSGQTCYVVHRLDMETSGAVLFAKNPFILPLINQRLERKEIWREYWALVEGKFSPKHQVLRDKIGRNRHDRRKRIIDSKNGQHAMTIIDVLKYIQNSSLIKCRLETGRTHQIRVHLSHHGHPLIGDPLYNPSSNNERLMLHAHRLTLSHPLTCETISVEAPSSTFEKILNNYKKGVG

SEQ ID NO: 8441 - protein, 1638 aa, Streptococcus agalactiae
ATGTTTGATTTTTTTAAGAAAAAAGTTGTTAAAGTGTGCTTAGTTATTTTTGGTATAGTTTTAGTATCACTTCTGAGTCTAGGATTCTTTTATTTTTCAAAGGGACAAGTACTTAGTCGTTTTGTAGCAGCACGTTCTCGTACGTCAGGTCAAGCGTTTGATAATATTAAAGAATACATGGTTTGGTCAGATACGGGAGAATCTATCACAAATGATGAGGCCAATTACGCTAATTTTGAGCCCTTGTCTAAAAGTGAGGCGCGTAAATTAGGGCAGGAAATAAAAGAAGGAAACAAAAATGATTCAATGTATCTAAAGCGTGTAGGTAGTCGCTTAGGTATATTCCCTGATTATCGTATTGCTAATAAGCCTATGTCTTTGACCTTGAAAACCAATGTTCCTAAATTGGATGTTTTGTTGAATCAAAAAAAGGTCGCGACAAGCAATTCAGATCATTTTTCAGTAACGGTGGAACGTTTACCTAGAACCCATTATACTGCTAGCCTTGAAGGGACTAGTGACGGAAAAGAGATTAAACTCAAAAAAGATTATGATGGTAAAAACCAAACTATTGATTTATCGGTCGCTTTTAAATCTTTTACAGTAACAAGTAATCTTATGGATGGTAATCTTTATTTTGGTGATAATCGTATTGCTAAATTAAAAGATGGTAGCCATTCCGTAGAGAATTATCCAGTGACTGATGGTTCAAAAGCTTATATCAAAAAAGTTTTTAATGATGGTGAGATAACCTCTCATAAACAAAAATTAATCTCTATCGCTGATAATCAGACAATCAAATTAGATGTTGATGGTTTATTAAATGAAAAAGAAGCTGGACAGAAATTGATAACTGCTTTCAATCAATTGATACTTTATGTATCAACTGGGCAAGACCCTCAGACTTTAGGAACAGTTTTTGAAAAAGGTGCCGAAAATGATTTTTACAAAGGATTGAAAGAAAGTATTAAAGCAAAATTTGTAACTGATAATCGTAAAGCGAGCCATTTCACTATTCCTAATATTGTCCTTAATAAAATGACACAGGTTGGGAAAGAAAGTTATCAAGTTAATTTTGCTGCCGATTATGATTTTAATTATGATAAATCAACAGATCCTGATAAGAAAACATATGGCCACATTATTCAGAATTTAACTGGTAATTTTATTATGAAAAAATCGGGAAATAGTTACCTTATTTCTAATGATGGTAAAAAAGATATCACAGTAGCTAAGGAAACTAATAAAGTTAAGGCTGATCCCGTTTCCATTTTTCCAGAGAACCTTGTAGGAAGTTGGAAAGGTGAAGTTGAGGACGGTACAGTAACGATGACTTTTGATAAGGATGGTAAAGTTACTCAGAAAAAAGTTTACAAGGATAGTAAATCTAAGGAAAGTAACCATTCTGCTAAAGTTACGAAGTTGGAGGATAAGGGAAATGGGCTCTACCTTTATCAATATGAATCAGGTACTGATACTACAACTTTTGTAACAGGAGGTATCGGTGGTCTTAAAGTTAAATACGCCTATGGAATAAAAATTGAAGGGAATAAGATCATCCCAGTGATCTGGCAGACATCTAGTGATGGAGAATTTGATTACCATAAACCACTACTCAGTAAGCCATTAACTAAGCAA

SEQ ID NO: 8442 - protein, 546 aa, Streptococcus agalactiae; identical to SEQ ID NO: 3734

SEQ ID NO: 8443 - protein, 1209 aa, Streptococcus agalactiae
ATGTCACAATTTGATCGCATTCACTTAGTTGTCTTAGATTCAGTGGGTATTGGAGCGGCACCAGATGCCAATGATTTTGTCAATGCAGGAGTTCCTGATGGTGCTTCAGACACGCTTGGCCACATTTCAAAAACAGTTGGACTTGCGGTGCCAAACATGGCTAAAATTGGACTTGGTAATATTCCTCGTCCCCAAGCGCTTAAGACCGTCCCTGCAGAAGAAAATCCAAGTGGCTACGCGACGAAGTTACAAGAAGTATCACTTGGTAAAGATACAATGACAGGGCATTGGGAGATCATGGGCTTAAATATTACAGAGCCATTTGATACTTTCTGGAATGGTTTTCCAGAAGATATTATCACAAAGATTGAGGATTTTTCAGGACGTAAAGTTATTCGTGAAGCGAATAAACCTTATTCAGGGACAGCTGTTATTGATGACTTTGGACCACGCCAAATGGAAACTGGTGAGCTCATTATCTATACCTCAGCTGACCCAGTCCTACAAATTGCAGCTCATGAGGATATCATCCCTCTAGAAGAACTCTACCGGATTTGTGAATATGCTCGTAGTATCACAATGGAGCGTCCAGCTCTCCTTGGTCGTATTATCGCTCGTCCATATGTAGGTGAACCAGGTAACTTTACGCGTACAGCCAACCGTCACGACTATGCAGTATCACCATTTGAAGATACCGTATTAAATAAACTAGATCAAGCTGGCATCGATACTTATGCTGTTGGTAAAATCAATGATATTTTCAATGGTTCAGGCATTAATCATGATATGGGACATAACAAATCAAATAGTCATGGTATTGATACTTTGATAAAAACAATGGGGTTATCAGAGTTTGAAAAAGGCTTCTCCTTTACTAATTTGGTTGACTTTGATGCTCTCTATGGTCACCGTCGTGATCCTCATGGTTATCGTGATTGTCTTCATGAGTTTGATGAGCGTCTTCCAGAGATCATTTCAGCAATGCGTGACAAAGACTTACTTTTGATCACTGCCGATCATGGTAATGACCCAACTTATGCAGGTACAGACCATACAAGAGAATACATTCCTCTCTTAGCCTATAGCCCATCCTTCACAGGAAACGGACTTATCCCAGTAGGGCATTTCGCAGATATTTCAGCAACAGTTGCGGATAACTTTGGTGTTGATACTGCGATGATTGGAGAAAGCTTCTTGCAGGACTTAGTA

SEQ ID NO: 8444 - protein, 403 aa, Streptococcus agalactiae
MSQFDRIHLVVLDSVGIGAAPDANDFVNAGVPDGASDTLGHISKTVGLAVPNMAKIGLGNIPRPQALKTVPAEENPSGYATKLQEVSLGKDTMTGHWEIMGLNITEPFDTFWNGFPEDIITKIEDFSGRKVIREANKPYSGTAVIDDFGPRQMETGELIIYTSADPVLQIAAHEDIIPLEELYRICEYARSITMERPALLGRIIARPYVGEPGNFTRTANRHDYAVSPFEDTVLNKLDQAGIDTYAVGKINDIFNGSGINHDMGHNKSNSHGIDTLIKTMGLSEFEKGFSFTNLVDFDALYGHRRDPHGYRDCLHEFDERLPEIISAMRDKDLLLITADHGNDPTYAGTDHTREYIPLLAYSPSFTGNGLIPVGHFADISATVADNFGVDTAMIGESFLQDLV

SEQ ID NO: 8445 - protein, 669 aa, Streptococcus agalactiae
GTGGAAGTAAAAGATATTTTAAAAACGGTAGACCATACTTTGCTAGCAACAACAGCAACATGGCCAGAAATCCAAACAATTTTAGATGATGCAATGGCTTATGAAACAGCTTCAGCATGTATTCCAGCCTCTTACGTCAAAAAAGCAGCAGAGTACGTTTCAGGTAAATTAGCTATTTGTACTGTTATTGGGTTCCCAAATGGCTATAGTACAACTGCAGCGAAGGTTTTTGAATGTCAAGATGCTATTAAAAATGGTGCTGATGAAATTGACATGGTCATTAATTTGACAGATGTTAAAAATGGGGATTTTGATACTGTTGAAGAAGAAATTCGTCAAATCAAGGCTGCATGTCAAGACCATATCTTAAAAGTTATCGTTGAGACATGTCAATTAACTAAAGAAGAACTTATCGAACTTTGTGGGGTTGTCACACGTTCAGGTGCAGACTTTATTAAAACCTCTACTGGTTTTTCGACAGCAGGTGCTACATTTGAAGATGTTGAAGTGATGGCAAAATATGTCGGCGAAGGTGTTAAAATTAAGGCAGCAGGTGGAATCTCATCATTGGAAGATGCTGAAAAATTTATTGCTTTAGGAGCTTCACGCTTGGGTACTAGCCGTATCATCAAGATTGTTAAGAACCAAAAAGTTGAAGAAGGCACTTAT

SEQ ID NO: 8446 - protein, 223 aa, Streptococcus agalactiae; identical to SEQ ID NO: 3742

SEQ ID NO: 8447 - protein, 809 aa, Streptococcus agalactiae
ATGAAATCCTCAGAGGTTGAGAGTTTTGTGCCGTAGCTAATATGTTTCTTGGTCAAACAGACAGTCCAATTTTGGTTAGCAAATACCTAGGTCGTATGACTGATAGTGAGATAATGGTTGTGTTGGTATCAGGTATGGGAAGTATGTCAGTTTCTATTCTTGGTGGCTACATTGCATTAGGCATTCCAATGGAATATCTCTTGATTGCTTCAACAATGGTTCCTATTGGCAGTATTCTCATTGCTAAAATCTTATTGCCTCAAACAGAACCTGTTCAAAAAATTGATGACATTAAGATGGATAATAAAGGTAATAACGCCAATGTGATTGATGCAATCGCTGAGGGTGCAAGCACAGGTGCACAAATGGCTTTCTCAATTGGTGCTAGTTTGATTGCCTTTGTTGGTTTAGTTTCTTTGATTAATATGATGTTAAGTGGATTGGGAATCCGCTTAGAACAAATCTTCTCATATGTTTTTGCTCCATTTGGTTTTCTTATGGGATTTGACCACAAAAACATTCTTCTAGAAGGAAACCTTCTTGGAAGTAAGTTGATTTTAAATGAGTTTGTTTCGTTCCAACAATTGGGTGACCTAATCAAATCTTTAGATTATCGTACAGCATTGGTAGCAACTATTTCACTTTGTGGTTTTGCTAATTTATCAAGTTTAGGTATTTGTGTTTCAGGTATTGCTGTTCTTTGTCCAGAGAAACGTGGCACCCTAGCTCGACTTGTTTTCCGTGCAATGATTGGTGGTATTGCTGTAAGTATGCTTAGCGCCTTTATCGTCGGTATTGTAACTCTATTC

SEQ ID NO: 8448 - protein, 270 aa, Streptococcus agalactiae
  VARIANT 10: Xaa = Any Amino Acid
MKSSEVESFXAVANMFLGQTDSPILVSKYLGRMTDSEIMVVLVSGMGSMSVSILGGYIALGIPMEYLLIASTMVPIGSILIAKILLPQTEPVQKIDDIKMDNKGNNANVIDAIAEGASTGAQMAFSIGASLIAFVGLVSLINMMLSGLGIRLEQIFSYVFAPFGFLMGFDHKNILLEGNLLGSKLILNEFVSFQQLGDLIKSLDYRTALVATISLCGFANLSSLGICVSGIAVLCPEKRGTLARLVFRAMIGGIAVSMLSAFIVGIVTLF

SEQ ID NO: 8449 - protein, 351 aa, Streptococcus agalactiae
ATGCAATTTATTTATAGTATTATTGGTATTTTATTGGTATTAGGAATTGTGTATGCAATTTCTTTCAATCGTAAGAGTGTTTCTCTAAGTTTAATTGGAAAAGCTCTTATCGTTCAATTCATTATTGCGCTAATCTTAGTACGTATCCCACTAGGTCAACAAGTTGTTAGTGTTGTTTCAACTGGAGTTACTAAAGTAATCAACTGTGGTCAAGCTGGATTAAATTTTGTGTTTGGTTCATTAGCAGATAGTGGAGCAAAAACTGGTTTTATTTTCGCCATTCAAACGCTTGGCAATATTGTTTTCTTATCTGCCCTAGTTAGTCTACTTTATTATGTAGAATCCTGGATG

SEQ ID NO: 8450 - protein, 118 aa, Streptococcus agalactiae
  VARIANT 114: Xaa = Any Amino Acid
MQFIYSIIGILLVLGIVYAISFNRKSVSLSLIGKALIVQFIIALILVRIPLGQQVVSVVSTGVTKVINCGQAGLNFVFGSLADSGAKTGFIFAIQTLGNIVFLSALVSLLYYVXILGL

SEQ ID NO: 8451 - protein, 777 aa, Streptococcus agalactiae
ATGCAGAATTATTCAGGTGAAGTCGGATTGCAATATCACCTACAGATTCGTCCAGGTGATGTAGGTCGTTATGTTATCATGCCAGGTGATCCAAAACGTTGTGCAAAAATTGCAGAACATTTTGATAATGCAGTTCTTGTAGCAGACAGCCGTGAATATGTTACTTATACAGGTACATTAAACGGTGAAAAAGTCAGTGTTACTTCAACTGGTATTGGTGGTCCATCAGCGTCTATTGCGATGGAAGAATTGAAACTCTGTGGCGCTGATACCTTTATCCGTGTTGGAACATGTGGTGGTATTGACCTTGATGTTAAAGGCGGAGACATCGTTATTGCAACTGGAGCTATCCGTATGGAAGGTACAAGTAAAGAATATGCTCCGATTGAATTTCCTGCTGTAGCTGACTTGGAGGTAACGAATGCTCTAGTTAATGCAGCTAAAAAGCTTGGTTACACAAGTCACGCAGGAGTAGTTCAATGTAAAGATGCATTTTATGGACAACATGAGCCAGAACGTATGCCAGTTAGTTATGAATTATTAAATAAATGGGAAGCATGGAAACGTCTGGGAACAAAAGCGTCTGAAATGGAATCTGCAGCTCTTTTTGTAGCAGCAAGTCATCTAGGAGTTCGTTGTGGATCAGATTTCCTTGTTGTTGGTAATCAAGAACGCAACGCTTTGGGTATGGATAACCCAATGGCTCATGACACAGAAGCAGCTATTCAAGTTGCTGTTGAAGCACTCCGCACACTTATTGAAAATGATAAATCACAA

SEQ ID NO: 8452 - protein, 259 aa, Streptococcus agalactiae; identical to SEQ ID NO: 3746

SEQ ID NO: 8453 - protein, 735 aa, Streptococcus agalactiae
ATGCCTAAAAATGAACTAAATAATAAACTAAATAAACTAAAGCATGTACAAGTCTACAATAAGATTTTTAACATGATTCAAGACGGTACTTATTCTCCTGGAATGCAATTACCTTCTGAACCCGAATTAGCAGGGCAACTTAATGTTAGTCGAGCTACTTTACGAAAGTCATTAGCACTATTACAAGAAGACCATTTGGTTAAAAATATCAGAGGAAAAGGTAATTTCATTAGAGAAAATTCTAGCAACTTGTCTGAAAACGGTTACGAAAATAGACAACACCCTATTAAAACTTGTCTAACTTCCAAAATTACAGAAGTAGAATTAGAATTTCGTGTAGAGGTTCCTGCAGAAGCTATCACAGCTTCACTTAAACAAGAAACCCCTGTAGTTGTTATTGCTGATCGTTGGTACCACACCGATGATGGACCATTAGCTTACACACTTTCTTTTATCCCTATCGAACTTATTTCAGATGCTGAGATTTCTTTACATGATACTAAACAGTTGTTAAACTTCATTGAAGAAGGTATCTATCAAGAAGGCATATCAAGCCACTCACAAAGCCATTTGGGATATGCGACATCTGGCAATTTTTCAGCAACTAAATATACCCTATCCGATCATGGACAATTCATATTAATACAAGAAACAATTTTTAAGCAAGAGAAAATACTAATGTGTAATAAGCATTACGTTCCCATTGAGCACTTTGAATTGTCCATTACCTCTCAT

SEQ ID NO: 8454 - protein, 245 aa, Streptococcus agalactiae; identical to SEQ ID NO: 3748

SEQ ID NO: 8455 - protein, 1620 aa, Streptococcus agalactiae
ATGGCAAAAGATATTAAATTTTCAGCAGATGCCCGCTCAGCAATGGTGCGTGGTGTTGATATTTTAGCTGATACAGTCAAAGTAACATTAGGTCCTAAAGGCCGTAATGTTGTTCTTGAAAAAGCATTTGGTTCTCCTTTAATTACAAATGATGGTGTGACAATTGCTAAAGAAATTGAGCTAGAAGAACACTTTGAAAATATGGGAGCTAAACTTGTGTCAGAAGTGGCTTCAAAAACTAATGATATTGCAGGGGATGGCACTACAACTGCTACTGTTTTGACCCAAGCTATTGTACGGGAAGGTCTTAAAAATGTAACTGCAGGGGCAAATCCGATTGGCATTCGTCGTGGTATTGAAACAGCTGTTTCAGCAGCAGTTGAAGAGCTAAAAGAGATTGCACAACCAGTTTCAGGCAAAGAAGCTATTGCTCAAGTTGCGGCTGTGTCTTCACGTTCTGAAAAAGTTGGGGAATACATTTCTGAAGCTATGGAGCGCGTGGGTAATGATGGTGTTATCACTATTGAAGAATCGCGAGGTATGGAAACAGAGCTTGAAGTTGTGGAAGGAATGCAGTTTGACCGTGGGTACTTGTCACAGTATATGGTAACTGATAACGAGAAAATGGTCTCTGAACTTGAGAATCCGTATATCCTTATTACAGATAAGAAAATTTCAAATATCCAAGAAATTTTACCATTATTAGAAGAGGTTCTTAAAACAAATCGTCCGTTGCTAATCATCGCTGATGATGTTGATGGAGAAGCTCTCCCAACGCTTGTTCTTAACAAAATTCGTGGAACTTTCAATGTCGTAGCTGTTAAAGCGCCTGGATTTGGTGATCGTCGTAAAGCCATGCTGGAAGATATTGCTATCCTAACAGGAGGAACTGTCGTTACTGAAGACCTTGGTTTAGACTTAAAAGATGCTACTATGCAAGTTTTAGGACAGTCTGCTAAAGTAACAGTAGATAAAGATTCTACTGTTATTGTCGAAGGTGCCGGTGACTCATCAGCAATTGCTAATCGCGTAGCTATCATTAAGTCACAGATGGAGGCTACAACTTCTGATTTTGATCGTGAAAAATTACAAGAACGACTTGCTAAGTTAGCCGGTGGTGTAGCAGTAATTAAAGTTGGTGCAGCGACTGAAACAGAATTAAAAGAGATGAAACTTCGCATCGAAGATGCGTTAAATGCAACGCGTGCTGCAGTTGAAGAAGGTATTGTTTCAGGTGGAGGTACGGCTCTTGTGAACGTTATTGAAAAAGTAGCGGCACTGAAACTTAATGGTGATGAGGAGACTGGACGTAATATTGTTCTTCGTGCTCTCGAAGAGCCTGTTCGTCAAATTGCTTACAATGCTGGATATGAAGGTTCAGTTATTATTGAACGTTTAAAACAGTCTGAAATTGGTACAGGATTTAATGCGGCCAATGGAGAATGGGTAGATATGGTTACCACAGGTATCATTGACCCTGTCAAAGTAACACGTTCTGCACTTCAAAATGCGGCATCTGTAGCAAGTCTTATCTTGACTACAGAAGCAGTAGTAGCAAATAAACCTGAACCAGAAGCTCCTACAGCTCCTGCAATGGATCCATCTATGATGGGTGGCTTC

SEQ ID NO: 8456 - protein, 540 aa, Streptococcus agalactiae
MAKDIKFSADARSAMVRGVDILADTVKVTLGPKGRNVVLEKAFGSPLITNDGVTIAKEIELEEHFENMGAKLVSEVASKTNDIAGDGTTTATVLTQAIVREGLKNVTAGANPIGIRRGIETAVSAAVEELKEIAQPVSGKEAIAQVAAVSSRSEKVGEYISEAMERVGNDGVITIEESRGMETELEVVEGMQFDRGYLSQYMVTDNEKMVSELENPYILITDKKISNIQEILPLLEEVLKTNRPLLIIADDVDGEALPTLVLNKIRGTFNVVAVKAPGFGDRRKAMLEDIAILTGGTVVTEDLGLDLKDATMQVLGQSAKVTVDKDSTVIVEGAGDSSAIANRVAIIKSQMEATTSDFDREKLQERLAKLAGGVAVIKVGAATETELKEMKLRIEDALNATRAAVEEGIVSGGGTALVNVIEKVAALKLNGDEETGRNIVLRALEEPVRQIAYNAGYEGSVIIERLKQSEIGTGFNAANGEWVDMVTTGIIDPVKVTRSALQNAASVASLILTTEAVVANKPEPEAPTAPAMDPSMMGGF

SEQ ID NO: 8457 - protein, 282 aa, Streptococcus agalactiae
ATGTTAAAACCATTAGGTGATCGTGTGATCATTTCGTTTGTTGAAACTGAAGAGAAATCTGTCGGTGGTTTTGTTCTTGCAGGAGCAAGCCATGATGCGACAAAGACAGCCAAAGTTCTTGCTGTGGGTGACGGTATTCGTACCTTAACAGGGGAATTAGTTGCACCGAGCGTTGCAGAGGGTGATACTGTTTTAGTCGAAAATGGTGCTGGTCTGGAAGTTAAAGACGGTAACGAAAAAGTGACAGTTGTTCGCGAAAGTGACATTGTTGCTGTCGTTAAA

SEQ ID NO: 8458 - protein, 94 aa, Streptococcus agalactiae; identical to SEQ ID NO: 3752

SEQ ID NO: 8459 - protein, 801 aa, Streptococcus agalactiae
ATGTCATTACTTGAATTAGTCAATCTGCACAAAACTTTTGAAAAAGGAACTGTCAATGAGAACCATGTTTTACGTGGTTTAGATTTAACGATTGAAGACGGTGATTTTATTTCAGTAATTGGAGGTAACGGTGCGGGAAAATCAACCCTCCTTAACTGTATCGCTGGTCTGATCCCTATTGATCAGGGGGCAATCACATTAGACAACCAATCAATTACTAAAGACTCTGTAGAAAAACGATCTAAGGATATTAGTCGAGTCTTCCAGGATCCTAGAATGGGAACTGCAACAAATTTGACGATTGAAGAAAATATGGCAATTGCACATAAAAGAGGCAATAAGCGTCACATTTTTAGACAGTCAGTGACTGACGATGACCGTCAACTATTTAAAAAGTCTCTATCACAATTAGGTCTAGGCTTAGAAAATCGAATGAAGACTGATGCTGCATTTTTATCTGGCGGTCAGCGTCAAGCCCTCACGTTAGCTATGGCAACTCTTGTTCGTCCCAAATTATTATTACTGGATGAACATACAGCGGCTCTAGATCCCAAAACTAGCGATATGGTTATGGAATTAACACAGAAAGTGATAGAAGAACAACGATTGACAGCCTTAATGATTACGCACAATATGGAGCATGCCATTGCTTATGGTAATCGTCTCGTGATGCTCTACCACGGGAAAATTGTTGTTGATGTTAAAGGAGAAGCAAAGAGAAACTTAACAGTTGCAGAATTAATGGAACTTTTCCATAAAAACTCAGGTCAACAGTTGATAGATGATGCCCTTGTCTTAGGT

SEQ ID NO: 8460 - protein, 267 aa, Streptococcus agalactiae; identical to SEQ ID NO: 3754

SEQ ID NO: 8461 - protein, 894 aa, Streptococcus agalactiae
ATGTTAGATATTATCTTATCCGGAATTTCGCAAGGATTACTTTGGTCAATTATGGCAATTGGCGTGTTTATCACTTTTCGTATCTTAGACATAGCCGATCTCTCTGCAGAGGGTGCTTTCCCTATGGGGGCTGCAGTTTGCGCTTTATGTATCGTTAATGATATTAATCCAATTGTGGCAACCATAGCGGGCATGTTAGGTGGTATGTTGGCAGGACTAGTATCGGGTTTTCTTCATACTAAAATGAAAATACCAGCCCTCCTCACAGGTATTATTACGTTGACAGGACTTTACTCTATTAATTTACTTGTTTTAGGAAGATCAAACGTCTCTTTTGCTCTCAAAAATACTTTGGTTACAATGGTAACAAGATTAGGTTTAAATAAACTTTCAGCAGTTTTATTAATTGGAATTGTTTGTGTAGGCTTGGTTATCTTAATTTTGTATCTCTTTTTAAATACCCAACTAGGATTAGCTTTAAGAGCGACAGGTGATAATGAGGCTATGGGACAAGCCAATAGTATTAAAGTAGATCGGATGAAAATGCTAGGATATATGATTGGGAATGGCCTGATTGCTTTATCTGGTGCACTTTTAGCGCAAAATAATGGCTATGCAGATTTGAATATGGGAGTGGGTACAATCGTTATTGGATTAGCTTCAATTATCTTGGCAGAAGTAATGATAAAATACTTACCTCTTGGCAAAAGGTTATGGTCAATTGTATTAGGGTCTGTTTTATACCGTATGATTATTGTTTTCATATTAACAACCGATATTGATGCACAGATGATAAAGTTGGTTTCAGCAATTTTGTTGGCTCTCATTTTGTATGTCCCAGAATTACGAGCTAAACTAGGAGTAAAAACCTCTAAATCACTTACAAAGGAAGGA

SEQ ID NO: 8462 - protein, 298 aa, Streptococcus agalactiae; identical to SEQ ID NO: 3756

SEQ ID NO: 8463 - protein, 960 aa, Streptococcus agalactiae
ATGAAAAAAATAACAAAGATGGTAATTAGCAGCGTTTTAGCAACTGTTCTGATGACAGCTTGTTCACAATCTTCTCAAAATGGTCAATCTGATGTAAAACATATTGGTATTTTACAATATGTAGAACATCCCTCTCTAACTGCCACTAGGAAAGGATTTATAAAAGAATTAGCTAAAGAAGGCTATAAAGATGGCAAAAATATCAAAATTGAGTATAAGAATGCTCAAGGGGATCAGTCAAATATCCAATCAATTTCTGAAAAACTCATTAAAGATAATAAATTAGTATTGGGAATTGCGACTCCGGCGGCTCAATCGTTGACAACGGTGTCAACAGAAACACCTATTTTATTTACAGCAGTGACAGATCCGGTATCAGCCGAATTAGTAAAATCAATGAAAAAACCTGAAGGTTTAGCGACTGGTACAAGTGACATGTCTCCAATTAAAAAGCAAGTATCCCTTTTGAGAAAAGTAATGCCTAAGGTTAAACGTGTTGGTATTATGTATACCACTAGCGAGCGTAACTCAGAAGTTCAGGTAAAACAAGCAAAAAAAATCTTCCAAGAGGCGGGGATTAAAACAAGTGTTAAAGGTATTTCTTCCACTAATGATGTACAAGATACTGCTAAGAGTTTAATGTCTAAAACAGAGGTTATTTTTGTACCAACAGATAATATTATAGCCAGCTCAGTAACGCTGTTAGGGAATCTATCGAAAGAATTAAAAGTGCCTGTTGTGGGAGGTTCAGCAGATATGGTACCAAGTGGTTTGCTCTTTTCTTATGGGGCTGATTATGAGGCTTTAGGTCGTCAAACGGCAAGACAAGCTGTTAAAATCCTCAAAGGTAAAGACGTCGCTAAAGTTCCTTCAGAATATCCTCAAAATCTAAAAGTAGTAGTTAATGAAGATATGGCAAAAGAGCTTGGAATTGATGTTTCAAGTATTAAAAATAATAAA

SEQ ID NO: 8464 - protein, 320 aa, Streptococcus agalactiae; identical to SEQ ID NO: 3758

SEQ ID NO: 8465 - protein, 795 aa, Streptococcus agalactiae
ATGGTAAGGCTAATATTTAGTGATATTGATGGTACTTTAATTAACAGTAATTTTAAAGTAACACCTAAGACACGGCAGGGAATTAAACAAATAGTAGCTCAAGGGGCTACTTTCGTTCCCATATCAGCTAGGATGCCTGAGGCAATTACTCCGATTATGGAACAAATTGGAATAGATTCTTATATTATTTCCTATAATGGGGCTTTAATACAAGATATGCAACAAAAAACAATTGCTTCCCACACAATGGATGGTCAAGTTGCCTTACAAGTTTGTTCTTATGTAAGCAAGCATTATTCGAAAATTGCATGGAATGTCTATCGTTATCATGAATGGTATTCCTGTGATAAAGAAAATGAGTGGGTCCAAAAAGAGGAGGAGATTGTTGGTTTACAATCTAAAGAGATGAGTTTGATGGAGTTAGAGAAGCAAGATAGGATTCATAAACTTCTCTTGATGGGAGAACCATCTCTGATGGGAGAATTGGAGAACACTTTGAAAGCTCAATATCCACATTTATCAATCGCACAATCTGCTCCTTACTTTATTGAAATAATGGCTCCAGGTATTGAAAAAGGAAAATCTGCTAAAACTTTAGCAGACTATTTAGATATTTCTCTTGCAGACTCTATTGCGTTTGGTGATAACTATAATGATTTAAATCTGCTTGAAATTGTGGGTAAAGGTTTTGTCATGGGGAATGCTCCTAAAGATTTACAAGAGAGAATTGGAAATGTAACTCAGGATAATGATAACGATGGTATTTATTATGCTTTAGTAGAGTATATGGAAAAT

SEQ ID NO: 8466 - protein, 265 aa, Streptococcus agalactiae; identical to SEQ ID NO: 3760

SEQ ID NO: 8467 - protein, 858 aa, Streptococcus agalactiae
ATGTCGTATCCATACAAAGCCAATCATTCCATTGAATCAATCACCTTAAAAGTAAATGACCTCGAAAACCTCGTAAACTTCTATAGCGATATCATTGGGTTAACTGTTATTGACAAATCAAGCACTAGAGCCTTACTAGGGGTAAATCAAAAAATCCCTCTTATTATCCTTGAAAAAACTGAACTTGAAAAGCATAGTACCTATGGCCTTTATCACACTGCTATTTTAGTACCAGATGAATACCATCTCAGTCTAGCTCTAAATCATTTATTATCTCAGCATATCCCTCTAGAGGGTGGAGCTGACCATGGCTATAGCAATGCTATCTATCTAAGTGATCCTGAAGGTAATGGAATTGAAATTTATAATGATAAGGATATCTCTATGTGGGATATCAGAGAGAGTGGACAAATTATTGGTATTACTGAAAGACTAGATATTGACAATTTACTTGACAGCCTTGTCAACGTTCCTAATAATTATAAGCTTTCTGAAAAAACTAGTATTGGTCATATTCATTTGAGTGTTAAAGATGCTAAGATTAGCTCAAAACTCTATCAAAATGTTTTTGGCCTTGATGAGAAATTTGCAATCCCGACAGCTAGTTGGATTGCATCCGGCAACTACCATCATCATCTAGCCTTTAATAATTGGGCTGGTCCAAATCTTTCTAAAAACCAAGAAGATAGACCCGGAATTTCCTTATTGACAATTGCTTACAATGATGACAACCTTTTTAGAGATAGCTTAAAAAAAGCGCAACTTTACCAACTGACTTTCCTTGAAAAACAAGATCATTATTATATTATTGAAGATTTTGATGGCATCCGAATTAAAGTTGTTCTAAAACCAGAGAAT

SEQ ID NO: 8468 - protein, 286 aa, Streptococcus agalactiae
MSYPYKANHSIESITLKVNDLENLVNFYSDIIGLTVIDKSSTRALLGVNQKIPLIILEKTELEKHSTYGLYHTAILVPDEYHLSLALNHLLSQHIPLEGGADHGYSNAIYLSDPEGNGIEIYNDKDISMWDIRESGQIIGITERLDIDNLLDSLVNVPNNYKLSEKTSIGHIHLSVKDAKISSKLYQNVFGLDEKFAIPTASWIASGNYHHHLAFNNWAGPNLSKNQEDRPGISLLTIAYNDDNLFRDSLKKAQLYQLTFLEKQDHYYIIEDFDGIRIKVVLKPEN

SEQ ID NO: 8469 - protein, 690 aa, Streptococcus agalactiae
GTGTGTCAAAACATTGCATGGCCTAAACTGAGTGCTCAAACGAAAATTATAATTGATTATTTTTCTACTTTAACTGTTTCAGACTTAGAGGATATCTACAGAATTAATACAAGTGCAGCTCGTTGTGAGGCTCAAAGATGGCAAGATTTTAAAGCTAAACAACTTACTCTGAATCCTGCTATTAAGTTATTCAACGGTCTTATGTACCGCAATATCAAAAGGCACAACTTATCCACAAGTGAAGCACAATTTATGGAAAATTCTGTTTTTATTACTAGTGCTCTTTATGGCATCATTCCTGCTATGACACTAATATCCCCTCATCGTTTAGATTTTAACACTAAAATCAAAATCAACAATAACTCTCTTAAAGTTTTTTGGCGTGAAAATTACGATACTTTTATGCAGTCAGATGACATTATGGTTTCTTTGCTTTCTAATGAATTTGAAACTGTCTTTTCTCCTAAAGAGCGTCAAAAACTAATACATCTTAACTTTATTGAAGATCGAGATGGCCAATTAAAAACCCACTCTACCATATCAAAAAAAGCAAGAGGAAAGTGTTTAACTGCTATGATGGAAAATAATTGCCAAACTCTAGAACACTTAAAGCAATTACGCTTTGATGGCTTCTGTTATGATAATGAACTCTCAGACTCTAAGCAATTAACTTTTGTTAAAAAACAGACT

SEQ ID NO: 8470 - protein, 230 aa, Streptococcus agalactiae
MCQNIAWPKLSAQTKIIIDYFSTLTVSDLEDIYRINTSAARCEAQRWQDFKAKQLTLNPAIKLFNGLMYRNIKRHNLSTSEAQFMENSVFITSALYGIIPAMTLISPHRLDFNTKIKINNNSLKVFWRENYDTFMQSDDIMVSLLSNEFETVFSPKERQKLIHLNFIEDRDGQLKTHSTISKKARGKCLTAMMENNCQTLEHLKQLRFDGFCYDNELSDSKQLTFVKKQT

SEQ ID NO: 8471 - protein, 615 aa, Streptococcus agalactiae
ATGTCAGAAGAAGCAAGTTGGAATACTCCAAAGCCTGGGGAGTGGAAAAGCGAAGAATTAAGTCATGGCCATATCATTGATTATAAAGCTTTTAATTTTGTAGATGGTGAAGGTGTTAGAAACTCACTCTACGTAGCTGGATGTATGTTCCACTGTAAAGGGTGTTATAATACTGCTACATGGTCCTTTCGAGCCGGAATCCCTTATACAAAAGAGCTTGAAGATCAAATTATGACAGATTTAGAACAACCTTACGTCCAAGGTTTAACGTTATTAGGTGGAGAGCCGTTCTTAAATACAGGTATTTTGTTGCCACTTCTTCAGCGTATCCGACGTGAATTGCCAGAAAAAGATATTTGGTCATGGACGGGGTATACTTGGGAAGAAATGATGCTGGAGACTCAAGATAAATTGGAGATGTTATCTTTGATTGATATTTTAGTGGATGGTAGGTTTGATCAAAGTAAGCGAAATTTAATGCTACAATTTAGAGGATCTTCAAATCAAAGAATCATTGATGTACAAAAATCTTTAAAAGAAGGTGAAGTCGTGATTTGGGAAGGATTAAACGATGGTGACAATAGTTATGAACAAGTCAAACGAGATGATTTACTC

SEQ ID NO: 8472 - protein, 205 aa, Streptococcus agalactiae
MSEEASWNTPKPGEWKSEELSHGHIIDYKAFNFVDGEGVRNSLYVAGCMFHCKGCYNTATWSFRAGIPYTKELEDQIMTDLEQPYVQGLTLLGGEPFLNTGILLPLLQRIRRELPEKDIWSWTGYTWEEMMLETQDKLEMLSLIDILVDGRFDQSKRNLMLQFRGSSNQRIIDVQKSLKEGEVVIWEGLNDGDNSYEQVKRDDLL

SEQ ID NO: 8473 - protein, 489 aa, Streptococcus agalactiae
ATGAAATTACGGCGCCCAGTGTTAGAAGATAAAGAAGAAATTTTAGCCATGTATAAAGAGTTTCAAAAAGAAAGTAGTTCAGTGGACGGTGGTTTTTATGAACCAACTATGCATTTTGAAGACTGGCTAGATCATAACCTAAATATGGAGTTAGGGGTAGGCGTTCCTGATAATTTTGTTCCATATATTCAGTTTGTGTCTTTTGACAATGACAATAATGCTATAGGTTTCTTAAATTTACGTTTAAGACTAAATGATACTCTTTTAGAAAAAGGTGGACATATTGGTTATTCCATACGACCTCGCCAGCGTGGCAAAGGTTATGCTAAAGAACAGTTGAAGCTAGGAATTGAGCAAGCACATCTAAAAAATATTAATGAAATACTTGTGACATGCCATGTAGACAATGATGCCAGCAAGTCAGTAATATTAGCTAACGGTGGTGTTTTAGAAGATTGTCTTCATCAGACAGAGCGTTATTGGATAACC

SEQ ID NO: 8474 - protein, 163 aa, Streptococcus agalactiae
MKLRRPVLEDKEEILAMYKEFQKESSSVDGGFYEPTMHFEDWLDHNLNMELGVGVPDNFVPYIQFVSFDNDNNAIGFLNLRLRLNDTLLEKGGHIGYSIRPRQRGKGYAKEQLKLGIEQAHLKNINEILVTCHVDNDASKSVILANGGVLEDCLHQTERYWIT

SEQ ID NO: 8475 - protein, 930 aa, Streptococcus agalactiae
ATGTTGCAACTTGGAATTGTCGGTTTAGGAGGTATTTCACAGAAAGCTTATCTACCTTATATGCGTCAAGTGACAGGTGTGCACTGGCATCTTTTTACACGCCAAAAACAGATTTTAGAAGAAGTTAATATGCTTTTTGGTTCTTCTACAGCTTATGACAGTTTAGATAGTCTAGCCGAGCATCCTTTGGATGGAGTCTTCATTCATGTCGCGACTAGTGCTCACTTTGATATAGCAAAGCTTTTTTTAAAAAAGGGTATTCCAGTTTTTATGGATAAGCCTTTGACAGAAGATTATACTTCAACTAAAGCATTGTATGATTTGGCGAAGGATCATAAAACATTTTTAATGGCAGGTTTTAATCGTCGCTTTGCACCACGTATTATGGAAATGAAAAAAGTAGAAGATAAAAACCATATTCGCACCTTTAAAAATGCTGTCAATGCACCAGCGGATTTTCAATATAAGCTTTTTGATATGTTTATCCATCCTTTAGATACGGCGCTATTTTTGACAAATAATGTTGTTAAAAGAGGATACTTTGTGACTAAACGTGATGGGAATAAGATATTACAAGTATCAGTAACGCTAGAAACAGACAGTGAGATAATAGAAGCAAGCATGAACCTGCAGTCGGGGTCTCGTCGAGAAATAATTGAAATAGAGTCGCCAGAAGTAACCTATTCATTAGATGATTTGTCAAATCTTTCTGTTATTGATGGCTTTGACCGTCGTGCTATCGGTTTTGGTTCTTGGGCAAGCACTCTAGAGAAACGTGGTTTTGAACCAATGATTGATGCTTTTATTCAAGCTATCACTACAGGTGTCAATCCTATATCACCAAAGTCTAGTTTATTGAGTCATTTTATTTGTGACCAGATTAATAAAGCGAATGCTCCTTTTGGAATGCTTAACTTGAAGATAATGGAA

SEQ ID NO: 8476 - protein, 310 aa, Streptococcus agalactiae
MLQLGIVGLGGISQKAYLPYMRQVTGVHWHLFTRQKQILEEVNMLFGSSTAYDSLDSLAEHPLDGVFIHVATSAHFDIAKLFLKKGIPVFMDKPLTEDYTSTKALYDLAKDHKTFLMAGFNRRFAPRIMEMKKVEDKNHIRTFKNAVNAPADFQYKLFDMFIHPLDTALFLTNNVVKRGYFVTKRDGNKILQVSVTLETDSEIIEASMNLQSGSRREIIEIESPEVTYSLDDLSNLSVIDGFDRRAIGFGSWASTLEKRGFEPMIDAFIQAITTGVNPISPKSSLLSHFICDQINKANAPFGMLNLKIME

SEQ ID NO: 8477 - protein, 141 aa, Streptococcus agalactiae
ATGGGGAAATACCAATTAGATTACAAAGGGCAAGCACAAGTACAGAAGTTCCATGAGAAGCACTCTACTGGAGAGAATGCTAATCAAAAATCACGTCTAAAAGATTTAAGGAAACAATTTTTGGAAAAGGCAAAGAAAAAA

SEQ ID NO: 8478 - protein, 47 aa, Streptococcus agalactiae
MGKYQLDYKGQAQVQKFHEKHSTGENANQKSRLKDLRKQFLEKAKKK

SEQ ID NO: 8479 - protein, 2169 aa, Streptococcus agalactiae
ATGACAGAATCTGATATCAAAGTGATTAAACGTGACGGGCGTTTGGTCAGCTTTGATAAGTATAAAATCTACACGGCTCTATTAAAAGCTAGTAATAAAGTTATCAAAATGTCTCCTTTAGTTGAGGCTAAACTTGAGATGATTGCAGATCATGTCATCGCTGAGATCTACAATCGTTTTAAAGATAACATCAAGATATATGAAATACAAAATATCGTTGAACATAAATTATTGGAAGCTAATGAGTACGCTATTGCACAAGAATATATCAATTATCGTACCCAACGCGATTTTGAGCGTTCACAGGCTACAGATATCAATTTTTCTATTGGAAAATTAATTAATAAGGATCAAACTGTTGTTAATGAGAATGCTAATAAAGACTCTGATGTGTTTAATACCCAACGTGATTTAACAGCAGGTATTGTAGGGAAATCAATTGGTCTGAAAATGTTACCTTCTCATGTAGCAAATGCACATCAAAAGGGTGATATCCATTATCATGATTTAGATTACAGCCCATACACTCCCATGACAAATTGCTGTTTAATCGATTTTAAGGGAATGCTTGCAAATGGTTTTAAGATTGGTAATGCAGAAGTTGAGAGTCCAAAATCTATTCAGACAGCGACTGCTCAGATTTCACAGATTATTGCGAACGTTGCTTCAAGTCAATATGGTGGCTGTACAGCAGATCGCATTGATGAGTTTTTAGCTCCTTATGCACAGTTAAATTATCAAAAACATTTAAAAGATGCAAAAGAATGGGTTATTGAAGATAAACAAGAAGACTATGCGCGCGCTAAAACACAAAAAGATATATATGATGCCATGCAATCTTTGGAGTATGAAATTAATACTTTATTTACTTCAAATGGGCAAACGCCATTTACTTCGCTTGGTTTTGGATTAGGAACTAATTGGTTTGAACGAGAAATTCAAAAAGCGATTTTGAAAATTCGGATTCAAGGTTTAGGAAGCGAGCATCGTACTGCTATTTTTCCAAAATTAATTTTTACGCTTAAAAAAGGTCTTAATTTAGAAGAAGATAGCCCCAATTATGATATTAAACAATTAGCATTAGAGTGTGCGACAAAACGGATGTATCCAGATGTCCTTTCTTATGATAAAATTATTGACTTAACGGGCTCTTTTAAAGCCCCTATGGGCTGTCGTTCTTTCCTACAAGGGTGGCGAGATGCAAATGGTCAGGATGTAACATCTGGTCGTATGAATCTTGGAGTTGTAACAGTTAATCTACCGCGTGTTGCCATGGAGTCTAACGGTGATATGGATAAATTCTGGGAGATATTTAATGAACGTATGAGTATTGCTAGAGATGCCTTGGTTTATCGTGTGGAACGTGTCAAAGAGGCTATCCCAGCAAATGCGCCCATTCTTTACCAGTATGGAGCATTTGGAGAACGTTTAGGAAAATATGACAATGTTGATCGACTCTTTAATCACCGCCGTGCAACGGTGTCTCTTGGTTATATTGGTTTATATGAGGTGGCGAGTGTTTTTTATGGTGGTGACTGGGAAGATAACCATCAAGCTAAAGCATTTACTGTAGACATCGTTCGTAAGATGAAGCAGTTATGTGCAGATTGGTCTGATGAGTATGATTATCATTTTTCAGTTTATTCGACACCATCGGAGAGCTTGACTGACCGGTTTTGTCGTTTAGATACTGAAAAATTTGGTATAGTAACTGATATTACTGATAAGGAATACTACACTAATTCATTCCATTATGATGTGCGTAAGAATCCAACACCTTTTGAAAAACTAGATTTTGAGAAAATCTATCCTGAAACGGGTGCATCAGGAGGATTTATTCACTACTGTGAATACCCTGTTTTGCAACAGAATCCAAAAGCTTTAGAAGCAGTTTGGGACTATGCTTATGATCGGGTAGGTTATCTAGGTACTAATACACCGATTGATAAGTGTTACCAATGTCAATTTGAAGGGGATTTTACACCGACAGATCGAGGTTTTACTTGTCCAAATTGTGGTAACAGCGACCCTAAGACAGTAGATGTTGTCAAACGTACATGTGGTTATTTAGGTAATCCACAGGCTCGTCCGATGGTTAATGGTCGTCATAAGGAAATCTCTGCTCGTGTAAAACATATGAACGGATCAAGTATTAAAAATCAAGGTAAT

SEQ ID NO: 8480 - protein, 723 aa, Streptococcus agalactiae
MTESDIKVIKRDGRLVSFDKYKIYTALLKASNKVIKMSPLVEAKLEMIADHVIAEIYNRFKDNIKIYEIQNIVEHKLLEANEYAIAQEYINYRTQRDFERSQATDINFSIGKLINKDQTVVNENANKDSDVFNTQRDLTAGIVGKSIGLKMLPSHVANAHQKGDIHYHDLDYSPYTPMTNCCLIDFKGMLANGFKIGNAEVESPKSIQTATAQISQIIANVASSQYGGCTADRIDEFLAPYAQLNYQKHLKDAKEWVIEDKQEDYARAKTQKDIYDAMQSLEYEINTLFTSNGQTPFTSLGFGLGTNWFEREIQKAILKIRIQGLGSEHRTAIFPKLIFTLKKGLNLEEDSPNYDIKQLALECATKRMYPDVLSYDKIIDLTGSFKAPMGCRSFLQGWRDANGQDVTSGRMNLGVVTVNLPRVAMESNGDMDKFWEIFNERMSIARDALVYRVERVKEAIPANAPILYQYGAFGERLGKYDNVDRLFNHRRATVSLGYIGLYEVASVFYGGDWEDNHQAKAFTVDIVRKMKQLCADWSDEYDYHFSVYSTPSESLTDRFCRLDTEKFGIVTDITDKEYYTNSFHYDVRKNPTPFEKLDFEKIYPETGASGGFIHYCEYPVLQQNPKALEAVWDYAYDRVGYLGTNTPIDKCYQCQFEGDFTPTDRGFTCPNCGNSDPKTVDVVKRTCGYLGNPQARPMVNGRHKEISARVKHMNGSSIKNQGN

SEQ ID NO: 8481 - protein, 1553 aa, Streptococcus agalactiae
ATGAGGAGAAAAATAGTGGTAGAAAACCTAGAAAAACCAATTGGAGTGAGCTATAAAAATAGCCCATCAATGAGTAAACGAACGGCTATCAGAATGAAGAAATCTAGTCGATTTTCAATTTTACTATATAGTGTTTTGTCAACTCTCTTAGCAATTGCAAATCCTTTATTGACTTATTTTGCAAATGGTTTGCAGACTCAGAATCTCTATACAGGTTTGATGATGACCAAAGGACAGATCCCTTATAGTGATGTTTTTGCTACAGGAGGATTTTTATACTATGTAACGATTGCTCTAAGTTACCTTTTAGGGTCTAGTATCTGGTTACTTATTGTACAGTTATTGCTTACTATGTATCTGGAATTTATTTTTATAAATTAGTTTATTATGTGGCACAAAGTGAAATTGTCTCGATAGGCATGACGTTGATTTTCTATATAATGAATATTGTCTTAGGATTCGGTGGTATGTACCCAATACAGTGGGCATTACCTTTTATGCTCATTTCGCTATGGTTTTTAATTAAATTTTGTGTCGATAATATCGTTGATGAAGCATTTATATTTTATGGCATTTTAGCAGCATTCTCACTATTTATAGATCCCCAAACACTGATTTTTTGGCTTTGCTCTTTTGTTCTCTTAACAGCAACCAATATTAAGCAAAAGCAGTCACTACGAGGATTTTATCAGTTTTTATGCGTTGTTTTTGGTATGATTTTAATTGCTTATACTGTTGGTTACTTTATGTTTAATCTACAGATTATCTCTTCTTATATTGACAAAGCTATTTTTTACCCCTTTACGTATTTCGCTAGGACAAACCACTCATTCCTTCTTAGTTTAGCAATTCAAATTGTTGTCCTTCTAGGGTCAGGTTGTCTCTTTGGACTATGGGATTTTATTCAAAATCGTAAAAAAGCATCTTATCAAATCGGCTTGAACTTTATTGCCTGTATTTTTATTATTTACGCTATAATGGCCATTTTTTCAAGAGATTTTAACCTTTACCACTTTTTACCTGCTTTACCATTTGGTCTTTTGCTAACGAGTAATAAAATTACTATTCTTTACCAAAAAGTGATTGACAGACGTTCACATAGACGTCAGTATTTCTCTGGTAAATCTCTTATCGTAGACCTTTTTGTAAAGAAAACATATTATTTGCCCCTCTTACTAGTTTCCTTATCGATAGGGTTACTAGTTTATAATACTTATCAAAATGTTACTCTTAGTAAAGAAAGGCGTGACATTTCACATTATTTGACTACAAAAATTGATAGAGATGGTAAGATTTATGTTTGGGACAAAGTTGCTAGCATTTATAGCCAGACTCGGTTAAAATCTGCTTCTCAATTTGTTTTGCCACATATTAATACAGCGCAAAAAAATAATGAGAAAATTTTGAAGGACGAGCTGCTTCAGCATGGGGCTAAATACTTTATCTTAAATAAAAATGAGAAGTTACCAAATGAACTGAAATCTGATATTAAGAAGCACTACCAAGAAGTTCCTCTATCAAATATCACTCATTTTGTTCTATATCGTTTCAAA

SEQ ID NO: 8482 - protein, 518 aa, Streptococcus agalactiae
  VARIANT 114: Xaa = Any Amino Acid
MRRKIVVENLEKPIGVSYKNSPSMSKRTAIRMKKSSRFSILLYSVLSTLLAIANPLLTYFANGLQTQNLYTGLMMTKGQIPYSDVFATGGFLYYVTIALSYLLGSSIWLLIVQXIAYYVSGIYFYKLVYYVAQSEIVSIGMTLIFYIMNIVLGFGGMYPIQWALPFMLISLWFLIKFCVDNIVDEAFIFYGILAAFSLFIDPQTLIFWLCSFVLLTATNIKQKQSLRGFYQFLCVVFGMILIAYTVGYFMFNLQIISSYIDKAIFYPFTYFARTNHSFLLSLAIQIVVLLGSGCLFGLWDFIQNRKKASYQIGLNFIACIFIIYAIMAIFSRDFNLYHFLPALPFGLLLTSNKITILYQKVIDRRSHRRQYFSGKSLIVDLFVKKTYYLPLLLVSLSIGLLVYNTYQNVTLSKERRDISHYLTTKIDRDGKIYVWDKVASIYSQTRLKSASQFVLPHINTAQKNNEKILKDELLQHGAKYFILNKNEKLPNELKSDIKKHYQEVPLSNITHFVLYRFK

SEQ ID NO: 8483 - protein, 120 aa, Streptococcus agalactiae
ATGTCAGATACTCAGCTAACACTAGAAGAACAAGAATTTCTCAAACAATATATGTCTAGAAAATACCACTACTTTAGGGATATTATTCGTTACGGTCAAGTGTTGGCTAAATTGACTAAA

SEQ ID NO: 8484 - protein, 40 aa, Streptococcus agalactiae; identical to SEQ ID NO: 3764

SEQ ID NO: 8485 - protein, 315 aa, Streptococcus agalactiae
ATGGCACATAATCATAACCACGATCATAACCATGAACATCAACATGAAGTAATCACTCTTGTAGATGAGAATGGGAACGAAACACTTTTTGAAATTCTATTAACTATTGATGGGCGTGAAGAGTTTGGCAAAAACTATGTTCTCCTCGTTCCTGCAGGTGCGGAAGAAGACGAACAAGGTGAAATTGAGATTCAAGCTTACTCATTTACAGAAAATGCCGATGGAACTGAAGGAGACCTTCAGCCTATACCAGAAGATTCAGATGCAGAATGGGACATGATTGAGGAAGTTTTCAACAGCTTTCTAGATGAAGAA

SEQ ID NO: 8486 - protein, 105 aa, Streptococcus agalactiae; identical to SEQ ID NO: 3766

SEQ ID NO: 8487 - protein, 408 aa, Streptococcus agalactiae
ATGGGACTTGACGTCGGCTCGAAAACTGTCGGCGTTGCAATTAGTGATCCACTCGGTTTCACTGCACAAGGTCTTGAAATCATTAAGATCGATGAAGAATCTGGAAATTTTGGTTTTGACCGCTTAGCAGAGTTAGTAAAAGAGTACAAAGTTGATAAATTTGTAGTTGGTCTACCTAAAAATATGAATAATACAAGTGGTCCTCGTGTAGAGGCTAGTCAGGCATATGGCGATAAAATCACTGAATTATTCAATCTTCCAGTTGAATATCAAGATGAACGTTTAACGACTGTTCAAGCAGAGCGTATGCTAGTTGAGCAAGCTGATATTAGTCGTGGTAAGCGTAAGAAAGTTATCGATAAATTAGCAGCTCAACTAATCTTACAAAATTATTTAGACCGCATGTTT

SEQ ID NO: 8488 - protein, 136 aa, Streptococcus agalactiae; identical to SEQ ID NO: 3768

SEQ ID NO: 8489 - protein, 263 aa, Streptococcus agalactiae
ATGGGATTTACAGATGAAACTGTTCGTTTTAGATTAGATGATAGTAACAAGTAGAAATTAGTGAAACATTAACAGCTGTTTATCGTTCATTAGAAGAAAAAGGTTACAATCCCATCAATCAAATTGTTGGTTACGTATTGAGTGGGGACCCTGCTTATGTACCTCGTTACAATGATGCTCGCAATCAAATTCGTAAATATGAACGTGATGAGATTGTAGAAGAGCTCGTTCGTTATTATTTACAAGGAAATGGAATAGATTTG

SEQ ID NO: 8490 - protein, 88 aa, Streptococcus agalactiae; identical to SEQ ID NO: 3770

SEQ ID NO: 8491 - protein, 396 aa, Streptococcus agalactiae
ATGATTAAGATTTATACTATTTCAAGTTGCACAAGTTGTAAAAAAGCAAAAACTTGGCTAAATGCTCATCAACTTCCATATAAAGAACAAAACCTAGGTAAAGAATCACTAACACGTGATGAAATTTTAGAAATATTAACAAAAACTGAAAGTGGTATTGAAAGTATCGTTTCTTCTAAAAATCGTTATGCTAAGGCGCTCAATTGTAATATTGAGGAGTTGAGTGTAAATGAAGTTATTGATCTTATTCAAGAAAATCCACGTATTTTAAAGAGTCCAATTCTAATTGATGACAAACGTCTTCAAGTAGGTTATAAGGAAGATGATATTCGTGCTTTTCTACCTCGCTCTATTCGTAACGTTGAAAATGCAGAAGCTCGTCTTCGTGCAGCACTT

SEQ ID NO: 8492 - protein, 132 aa, Streptococcus agalactiae
MIKIYTISSCTSCKKAKTWLNAHQLPYKEQNLGKESLTRDEILEILTKTESGIESIVSSKNRYAKALNCNIEELSVNEVIDLIQENPRILKSPILIDDKRLQVGYKEDDIRAFLPRSIRNVENAEARLRAAL

SEQ ID NO: 8493 - protein, 753 aa, Streptococcus agalactiae
TTGTCTCAACCTGACTCAGGTGAGCAAGGTCTTGAAATTGCAGGTAAATTGATTGATTCAGGCGCAGTTGATTTAGTTGTTGTCGATTCAGTTGCAGCCCTTGTTCCTCGTGCTGAGATTGATGGTGATATTGGTGACAGCCACGTTGGTTTGCAAGCTCGTATGATGAGTCAAGCAATGCGTAAATTGTCAGCATCCATTAACAAGACAAAGACAATCGCAATTTTTATCAACCAGTTAAGGGAAAAAGTAGGCGTTATGTTTGGTAACCCTGAAACAACACCTGGTGGTCGTGCTTTGAAATTTTATTCATCGGTTCGTCTAGATGTTCGTGGTAATACTCAAATCAAGGGAACTGGTGAGCATAAAGATCATAATGTTGGTAAAGAGACAAAAATCAAAGTTGTTAAAAATAAAGTTGCTCCACCATTCCGTGAAGCTTTTGTCGAAATTATGTATGGTGAAGGTATTTCTCGCACGGGTGAGTTAATTAAAATTGCTAGTGATTTGGATATTATCCAAAAAGCAGGTGCATGGTACTCATATAATGGTGAGAAAATTGGACAAGGTTCTGAAAATGCCAAAAAATATTTAGCAGATAATCCAGCAATTTTTGATGAAATTGACCATAAAGTGCGCGTGCACTTTGGAATGACTGAAGATGATTCGCCAGTTCAGTCTGAGCTCGTTGAAGAAAAAAATGAAGCTGATGATCTTGTTTTAGATTTGGACAATGCTATTGAAATTGAGGAA

SEQ ID NO: 8494 - protein, 251 aa, Streptococcus agalactiae
MSQPDSGEQGLEIAGKLIDSGAVDLVVVDSVAALVPRAEIDGDIGDSHVGLQARMMSQAMRKLSASINKTKTIAIFINQLREKVGVMFGNPETTPGGRALKFYSSVRLDVRGNTQIKGTGEHKDHNVGKETKIKVVKNKVAPPFREAFVEIMYGEGISRTGELIKIASDLDIIQKAGAWYSYNGEKIGQGSENAKKYLADNPAIFDEIDHKVRVHFGMTEDDSPVQSELVEEKNEADDLVLDLDNAIEIEE

SEQ ID NO: 8495 - protein, 723 aa, Streptococcus agalactiae
TTGGTTACTAAGACAAATACTGTTGTTGATCTACCAAAAGCAACTTATTCTCCTACTGACTATGGTAAAAACATACCTGTAGGAGACTATCGTTTAAACGTAACGCTGCCTAGTGGGTATAGCACTTTAGAGAACTTAGATGATTTACTTGTATCCGTAAAAGAAGATCAGGTAAACCTAACAAAATTGACGCTGATTAATAAAGCTCCTCTGATTAATGCCCTAGCAGAACAAACTGATATTATTACCCAGCCTGTGTTTTATAATGCTGGAACTCACTTAAAAAATAATTACCTAGCTAATCTTGAAAAGGCACAAACTTTAATTAAAAATAGAGTGGAACAAACAAGTATTGATAATGCTATTGCTGCTTTGAGAGAAAGTCGCCAAGCTCTTAACGGTAAAGAAACAGATACTTCTTTACTGGCAAAAGCTATTTTAGCTGAAACAGAAATCAAGGGAAACTATCAATTTGTTAATGCTAGTCCATTAAGCCAATCAACTTATATCAATCAAGTCCAATTGGCGAAAAACCTTCTACAAAAACCTAACGTCACTCAATCAGAAGTAGACAAAGCCTTAGAAAATCTTGATATTGCTAAAAATCAATTAAATGGTCATGAAACTGATTACTCTGGTTTACACCATATGATATTTAAAGCAAACGTTCTGAAACAACATCATCTAAATATCAGAACGCCAGTCAATTTTGCTAAGAAATTA

SEQ ID NO: 8496 - protein, 241 aa, Streptococcus agalactiae
MVTKTNTVVDLPKATYSPTDYGKNIPVGDYRLNVTLPSGYSTLENLDDLLVSVKEDQVNLTKLTLINKAPLINALAEQTDIITQPVFYNAGTHLKNNYLANLEKAQTLIKNRVEQTSIDNAIAALRESRQALNGKETDTSLLAKAILAETEIKGNYQFVNASPLSQSTYINQVQLAKNLLQKPNVTQSEVDKALENLDIAKNQLNGHETDYSGLHHMIFKANVLKQHHLNIRTPVNFAKKL

SEQ ID NO: 8497 - protein, 453 aa, Streptococcus agalactiae
ATGTATCAAGCACTAGCTAATTCTTATAATATTCCTGCTGTTTATACTTTAGACAAACTAGGAATCAATAAAGCCTTTACTTATGGCAGGAAGTTTGGTCTAAATATGTCATCAGCAAACAAAGAGCTAGGAGTGGCGCTAGGTGGAAGTGTAACCACTAATCCTTTAGAAATGGCACAAGCTTACTCAACTTTTGCAAATGACGGTATAATGCATCGCGCTCATTTGATTACTCGAATTGAGACAGCTAATGGAAAATTAGTAAAGCAATTTACAGATAAGCCTAAGCGAGTTATTAGTCGCTCAGTGGCTAGTAAAATGACTAGTATGATGTTAGGAACATTCTCAAATGGTACAGCTATTAATGCCAATGTTTATGGTTATACAATGGCAGGTAAAACTGGAACAACCGAAACAGATTTTAACCCCCAATTTATCTGGAGACCCAGTGGG

SEQ ID NO: 8498 - protein, 151 aa, Streptococcus agalactiae
MYQALANSYNIPAVYTLDKLGINKAFTYGRKFGLNMSSANKELGVALGGSVTTNPLEMAQAYSTFANDGIMHRAHLITRIETANGKLVKQFTDKPKRVISRSVASKMTSMMLGTFSNGTAINANVYGYTMAGKTGTTETDFNPQFIWRPSG

SEQ ID NO: 8499 - protein, 1266 aa, Streptococcus agalactiae
ATGTTAGTTTATTTAAATGCTCTAACCGCTTCGAGCTATACGTATATCGTTTTTGGAGAGTTAGATGAGTTTATTGAGAATCTGTTTCATTATTTTTTCAGTTCTATTTTATATAGAGATTTAGAGGCTGTAGATGAAAAACTATATTCTTTCATGAGTGATGATTTAATTTCAATCCAATCAAGTTGTCTAAGTATTGCCAAGACATTTGCAAATTTCAATATTCAAAGAAAAAGATTTATGATTTCTACTGAAACTGAAATGGATACTTTTCACAAGAAAGATGACATTGACGTATGGGTTGGTGGAAAAAGTGATAACCCCGCTAGAAGTTTTAGAACCCGTACCATCAATGAATTGACTGTCATTGATTTTGAAGAAATGTTTGATATTCTTTGGTTGATGTTAGGGGATAATTTAATTAAATCATTTGAAGTTAATGTCTGTGGTATCCTATTTGAATTAGGCGGAAATGACATACCCTCAACATTTAGGCAAGAAAACATTGATCCTCTCATCAATAAATGGTGGTATGATAATGTTTCGACAGAAATTATCCCTAATCTAATAAAAAAACTCAAAGAAAATCCCTTGTTTAATATCGGATTTATGGTAAATGATATATTAGAAAGAATGTATAAAGAGAATATTCCAAAATCTTACCTTACATCCGTCCCATTAGTTATTTCTCAAAAAGGAAGAACAACCTATTCGTTTAGTATGACTGGTGGTCAACAAATAGATGGAGTGAAATTCACACAGATATATGAGGACTATATGAAATTACTCAGTCAAGGTAAGGATATCGCAGAGTTATATCAAAAATATTCTAAAGAAGAGTTGGCAAATCTAGGCATTAATATTTATCAATCCAATGATATAGAAAGGACTGAGGAAAGAACTTTTGATGAAATTATCAGTTGGGTTTCCAACCCTTATGCAACAAGACCAATTCAAGAAAGGCACACTATTCAATTAGAGCCAACAAGATTTTCACTAGAGGATAAGAAAAGAATTGAAGAAGCTGCAGCTCAAGGACTAAGCGAAATCGACCTTATTGATTTAGTTGACCTATATGATATTAATTTAGACAATACAAGCGTCAATCGCCATATTGTGGGGTTATTGACTAATAACACCCAAGTAACATACTATTTCCAAGAACAATTAAATAAGGAGTTGCTGTCAATGGCTCACGCTTTAGATAACGTACAACAGGCCTTTATTAAATTATTAAGTGAAGAGGAGATACGAAAATTTGCTCTT

SEQ ID NO: 8500 - protein, 422 aa, Streptococcus agalactiae
MLVYLNALTASSYTYIVFGELDEFIENLFHYFFSSILYRDLEAVDEKLYSFMSDDLISIQSSCLSIAKTFANFNIQRKRFMISTETEMDTFHKKDDIDVWVGGKSDNPARSFRTRTINELTVIDFEEMFDILWLMLGDNLIKSFEVNVCGILFELGGNDIPSTFRQENIDPLINKWWYDNVSTEIIPNLIKKLKENPLFNIGFMVNDILERMYKENIPKSYLTSVPLVISQKGRTTYSFSMTGGQQIDGVKFTQIYEDYMKLLSQGKDIAELYQKYSKEELANLGINIYQSNDIERTEERTFDEIISWVSNPYATRPIQERHTIQLEPTRFSLEDKKRIEEAAAQGLSEIDLIDLVDLYDINLDNTSVNRHIVGLLTNNTQVTYYFQEQLNKELLSMAHALDNVQQAFIKLLSEEEIRKFAL

SEQ ID NO: 8501 - protein, 447 aa, Streptococcus agalactiae
ATGAGTAATAAAGTACAAGAACGTCGTGAGCGTAAAATCAAAGAAGCTATTAAAGCTAAAAATTGGGATGAAGTAACTCGTTTGCTTCAACAAGAACAAAGTAACGCAGAACGTCGTGACCGATACCACAATAGACGAATCAAAGACGAAACAATAGCTAGCAAAAATGCCAAAAAGTCTGTACGTTATGATGTCATTGCAAGTTCTGATTTGAATCCCGAAGAAGCTTTAATCCTAGAGGAGTTAAGACAAGCTATTCGTGAAGCTAAAGCATCCCTATCAGAAATTGACAGTAAGATTGTTGAAATGATAGCGGAACAAGGTTCAAGCTATAAAGAAACGGCTCGCTATATCACTGAACATTATAAGAAAATGAGTGATGTAACTGTTAAATCCCATTATTGTAAAGCGCTAAAAAAATTAGCTCCTTTATTAAAAGCTTACCGC

SEQ ID NO: 8502 - protein, 149 aa, Streptococcus agalactiae
MSNKVQERRERKIKEAIKAKNWDEVTRLLQQEQSNAERRDRYHNRRIKDETIASKNAKKSVRYDVIASSDLNPEEALILEELRQAIREAKASLSEIDSKIVEMIAEQGSSYKETARYITEHYKKMSDVTVKSHYCKALKKLAPLLKAYR

SEQ ID NO: 8503 - protein, 318 aa, Streptococcus agalactiae
ATGGCGTTTAAAATGAAAACCACAAAAGGTGGTTATACAACTACATTGGCTGATAAAATTATCAGTCAAAAACAACCGATTTACTCACTTAGTACCGAACTTGAACCACAACAACGGTTTGAAGAAGGAAAACCAACCGGAGAAATCGTAGCTTATAAAGCATGGTTTGTACAGGAAGGGCAAGACCCTTTCCAAGTAAAATTTGAAGAAACGATTGAGCTTCCAGCTTTTCAATCCATGATTCAATTTGACACACTACAAGCCTGCGAAGTAAAATATAACATCTACTTCAAAGCAAATGGTATCAAGGAGGTTCGG

SEQ ID NO: 8504 - protein, 106 aa, Streptococcus agalactiae
MAFKMKTTKGGYTTTLADKIISQKQPIYSLSTELEPQQRFEEGKPTGEIVAYKAWFVQEGQDPFQVKFEETIELPAFQSMIQFDTLQACEVKYNIYFKANGIKEVR

SEQ ID NO: 8505 - protein, 1098 aa, Streptococcus agalactiae
ATGACTTCACAATCTCGTGATGTGCTGAACCAATCTTACCTGCAATCTTACCTGCTCCAGAGCCTAAACATGGCTCTGGGGGCTTTAATGCAGGGAGAAACCAGCTACACCAATTCTTTTAATATTGTTATTCAAGCAGACGGCTTTATCTTTGTCCCTCGTCTACCATGTGCTTATATCCTTGATGATGACTTGTACAAGAAAATCTTTCTGATTGCCAATGCTTCACTTTATCCACAATATACGCTTCTAAAACAAAACGCTACCTATTTTGTCCCTCTAGAAACAGATGACTTACACACTCAGCGTGGATTATTTTTCCCTTGGAAAAAGGGAATTTCAGAACGTTTAGTCATTCCAGATTTGGATAAGTTTTCAGCTAGCTTGCCACAGGGGAAAATCCCTATCATGAAGTACTTTGAACTCAATTTAGATAAGGTTAATCACTGGGCTATTGCTGGAAATTCAGGTTCTGGGAAATCGTACGCTCTCACTTATTTCTTGAGTGTACTAAAGCATATGTCTGACTTGATTATCATTGACCCTAAATTTGATACCCCAAGTCGATGGGCAAGAGAAAATCACGTTGCTGTTATACACCCTGTTGAAAACCGTTCAAAATCAGATTTTGTCTCACAGGTCAATGAACAATTAAGTCAGTGTGCAACTCTCATTCAGAAACGACAAGCTGTCTTGTATGATAATCCCAATCATCAATTTACCCATCTAACTATTGTTATTGATGAAGTCCTCGCTCTATCAGAGGGAGTCAATAAGAATATCAAAGAAGCCTTTTTCTCCCTACTCTCACAGATTTCCTTATTAGGACGTGCTACCAAAATCCATCTGTTTTTGGTAAGCCAGCGTTTTGACCACAATACTATTCCAATTTCAGTGAGGGAACAGCTAAACGTATTGTTGCAAATTGGAAATATCAATCAGAAAACTACTCAATTTTTATTTCCAGACCTAGACCCAGAGGGTATTGTTATTCCAATAGGACATGGGACAGGTATCATTCAAGTTATCGATAATGAACATCCCTACCAAGTTCTGCCCTTACTCTGTCCAACCTACTACACTAAACGAGGTATTCTA

SEQ ID NO: 8506 - protein, 366 aa, Streptococcus agalactiae
MTSQSRDVLNQSYLQSYLLQSLNMALGALMQGETSYTNSFNIVIQADGFIFVPRLPCAYILDDDLYKKIFLIANASLYPQYTLLKQNATYFVPLETDDLHTQRGLFFPWKKGISERLVIPDLDKFSASLPQGKIPIMKYFELNLDKVNHWAIAGNSGSGKSYALTYFLSVLKHMSDLIIIDPKFDTPSRWARENHVAVIHPVENRSKSDFVSQVNEQLSQCATLIQKRQAVLYDNPNHQFTHLTIVIDEVLALSEGVNKNIKEAFFSLLSQISLLGRATKIHLFLVSQRFDHNTIPISVREQLNVLLQIGNINQKTTQFLFPDLDPEGIVIPIGHGTGIIQVIDNEHPYQVLPLLCPTYYTKRGIL

SEQ ID NO: 8507 - protein, 603 aa, Streptococcus agalactiae
ATGACCAATAAAACCTACTTTATGAGAAGTTTTAATCTCATACTATATTTATTTCTATTTGCACCTATCTGTTCTGCATTTGGATGGTTATTCAATTATCTTTCCGTTCAATTAACAAATATCACGTTTGTCAATTTAGATACGGTCAAAAGTATTACGGATATCATTAGTTCCGTTTGTCATGGATTTGCACTTATTTCTCTTCTACTTGCCTTATTTTTGGTTGGATTAGAAATAATACAACGGTTGAAAACAGATAGTCTTTGGAACTATATCCAATCTGTCTATCACACTTTTCTGTTGCGACACTTCCTGTTTCAGCGTGAACGAGTACAGAAGATAAGCAATCTTGAACATCAGACGGTTACTACTATCAACCCAATCCATAACGGATTTAACCGAGCTGTTCGTAAGTGTATCGTAGATATACGAAAAGATACCATCACTATTTTTCTAAAAGTCCCTAGAGACCAACAAGGGCAAAAAATCCTAAAAGAGATGGAAGCACAATTAAAAGAAGAAATCGTCAGCCAACACGCAGACTATTATTTCTCCTCTCCTATTCGAGTTCGTAACCAATTGTGGTTCACTGGACAAAAACGT

SEQ ID NO: 8508 - protein, 201 aa, Streptococcus agalactiae
MTNKTYFMRSFNLILYLFLFAPICSAFGWLFNYLSVQLTNITFVNLDTVKSITDIISSVCHGFALISLLLALFLVGLEIIQRLKTDSLWNYIQSVYHTFLLRHFLFQRERVQKISNLEHQTVTTINPIHNGFNRAVRKCIVDIRKDTITIFLKVPRDQQGQKILKEMEAQLKEEIVSQHADYYFSSPIRVRNQLWFTGQKR

SEQ ID NO: 8509 - protein, 603 aa, Streptococcus agalactiae
ATGGCAAAAGAACAGCGCTCAACCAAATGGACTTTTCTCTTCTACGAGGAAAGCGCCCCAGAGAACTACTTGAATATATTAGAGGAACTCCATATTCCGTTTATTCTTAGTCCTTGGCACGATAAGGACGTTAATAGACAGACGGGAGAGTTCAAGAAATCGCACAAACACGGTGCTTTCTTCTTTGATTCACTGAAAAGCTATTCACAAGTATCAAATATCATCAGTGACAAACTAAACGGTCCAGCACATGTGGAGGTAGTTATGTCTCCCACTGGTTTATTTGACTACTTTACCCATGCGGAAAATCCAGATAAGACCCCCTACAACATTGAGGATATTGAAGTCGGTTGCGGCTTTAATTTAGAAAAATTCTTGATGGAGATGAACTCCTCGGATTTTATACATGAAGTAGTTGATATTATCGAAGAGAACGACTTTACCGAATTTGAAGAATTGGTCTGGTATGCCCGAGCAAACAATACCAATTTATTAGGGCTTATCATTGAACGTACATATTTCTTCGCTAAATACCTAGATTCACGAAGATACAATCCTAATCGACTCCATAATTCAAACACAGAGGAGAAAGAGAATAATGAA

SEQ ID NO: 8510 - protein, 201 aa, Streptococcus agalactiae
MAKEQRSTKWTFLFYEESAPENYLNILEELHIPFILSPWHDKDVNRQTGEFKKSHKHGAFFFDSLKSYSQVSNIISDKLNGPAHVEVVMSPTGLFDYFTHAENPDKTPYNIEDIEVGCGFNLEKFLMEMNSSDFIHEVVDIIEENDFTEFEELVWYARANNTNLLGLIIERTYFFAKYLDSRRYNPNRLHNSNTEEKENNE

SEQ ID NO: 8511 - protein, 246 aa, Streptococcus agalactiae
ATGAATAACGAAAAATTAGAACAAATTGAACAATTATTGCAAACACTTATCAAACTCATTCAAATCAAAGAACAGAACATACCACTAAAGATAATACAACAGCGAGAATTGCTAAAACAGCTAAATATCTCCCCAAACACACTAAAAACTTGGGAACAAAAAGGATTAAAAAGATTAGAACCTCCTATAGAGGGAACTCGAACCGTCTTCTATCTACTAGATGATATTATCAACTTTTTACAATCC

SEQ ID NO: 8512 - protein, 82 aa, Streptococcus agalactiae
MNNEKLEQIEQLLQTLIKLIQIKEQNIPLKIIQQRELLKQLNISPNTLKTWEQKGLKRLEPPIEGTRTVFYLLDDIINFLQS

SEQ ID NO: 8513 - protein, 1263 aa, Streptococcus agalactiae
ATGGAAACTGAAACAATTATTCATAATGGCAAAAAAGTCATTAAAAAAATCAAAAAAGATAAGTCCATCTCATACACTTTGAAGGGGACATTTCTGGGAAAAGATATCAAAACTGGTAAGCAAGTCACTACTACCATTACAGCCAAGACACTAAAACAGTTAGATAGAGCAATCATTCAAGCACGACTAGAATTTGAAAAAAATGGCTCAACACGAGAAAAAGTTATCGTCATTGATACACTGGAAGATTTAGCTGAAGAATGGTTTAAATCATATAAAACCTGGGTTAACTCGCATAATACTCTGAACAGAGTAAGAGGTTATCTTGATAATTATATTATCCCTAAATTTGGAGATTACAAACCAGATAAAATTGAATCTGCGGATATCCAGCTTTGGTTAAACGATTTGGCAAAGAAATCAAAAGAGTCCATTGAATCTGGTATAAAGCGTGCTGATAAAGGTAGTGCTAAAGATTTTGGTGCTGTTATCCATAAGTTGAAAGATATTTTTGACTATGGAATTACAAACTATGGACTAATCACTAATCCTGTTAGCACTGTTAAGATACCACCTAAGCCAAAATCAAATAAGCAACGCATCATGGTATTACATGATGATGGTCTTGTAATATGGCTTAATTATCTTGAAAGTTTAGATAACAATAGAGCCAATCGTAGATTTAAGTTAATTTGTAATACTCTATTAGCCTCCGCTTTGCGAATAAATGAATTACTTGCATTGACGATTGATGACCTAGATTTTGAAAATTCTTCTATTAACGTCAGTAAAACATTGATGTGGAAAACCGCAAATAAAAAAGATGGGACAAAAGGGGAAGTTATCTGTAAAGCTACACCAAAAACTGATGCAGGAAATCGCTCTGTCCCTGTCCCTCCCCCCATAATAGAAAAACTCAGAGATTTCCACCACGAAATGAACAAGTATCTTGAATTGCACAACAGACATAGAACAAAACTGATTTTCCCTACAATCTATGGGAACTATATGTGTGACAGAAACGAGAGAACAACTCTTAAGAAAAGGTTAGTAGGTCTTGGATTACCAAACTATGGTTTCCATTTATTCCGACATACTCATGCTTCAATGCTACTTAATGCTGGAACAAATTGGAAAGAACTCCAAGTCAGAATGGGACATAAATCCATTTCAACTACAATGGATACTTACGCTGAATTAGCACCACAACGAAAGTTAGAAGCTGTGGGGATTTATCTTGAAAAGATTGCTGAGCTAACGCAA

SEQ ID NO: 8514 - protein, 421 aa, Streptococcus agalactiae
METETIIHNGKKVIKKIKKDKSISYTLKGTFLGKDIKTGKQVTTTITAKTLKQLDRAIIQARLEFEKNGSTREKVIVIDTLEDLAEEWFKSYKTWVNSHNTLNRVRGYLDNYIIPKFGDYKPDKIESADIQLWLNDLAKKSKESIESGIKRADKGSAKDFGAVIHKLKDIFDYGITNYGLITNPVSTVKIPPKPKSNKQRIMVLHDDGLVIWLNYLESLDNNRANRRFKLICNTLLASALRINELLALTIDDLDFENSSINVSKTLMWKTANKKDGTKGEVICKATPKTDAGNRSVPVPPPIIEKLRDFHHEMNKYLELHNRHRTKLIFPTIYGNYMCDRNERTTLKKRLVGLGLPNYGFHLFRHTHASMLLNAGTNWKELQVRMGHKSISTTMDTYAELAPQRKLEAVGIYLEKIAELTQ

SEQ ID NO: 8515 - protein, 669 aa, Streptococcus agalactiae
ATGACAAACTATAAAAACAACTTTAAAAAATTCATGAGCAATAAATTATACGTAGGGTTAGCTTCCATTACGCTACTTGGTATTGGGGGAGCTATAGGAGTAAGTGGAGCTGCATTAGCGCATAACCATCACTCAGAACACATGTCTTTTGAACATAAGCATGAAGGACACGATAAACATCACGATCATAGAGAAAAATACTCACTAAAAACATTAAAGAATATCTCGACAAAAATCGATTATAAGACTGCCTTAGAAACTGCCAAAAAAGAAGCTCGCTCAGGCTTTATTTCACAAATTGAATTAAATACCAAAGGTGATACACCTTTTTATGAAATCAAAGTTATTGATAATAAAATAGCTAAAAAATATAAAATTGATGCTAATTCTGGGAAGATCCTTTCAACAACATCAGATAATCAACTCAATTCAAAAGATGCCCAATTAAAACAACCAAGTAAAGATATTCAGACTGCATTACAAGCTATTCAAGCAAAATATAAAAATGCAAAAATAAAAGAAATTTCTCTTGCGAATAACAAATCAAATAAGCTAGTTTATAAAGTAAAACTACTTGATGGAAATACTCCTAAGATTGCCCAATTTGATAGTGATAAAGCATCATTTATAAAGGCAAATAAGCTTAATACAACTCATAAAAATCACGAC

SEQ ID NO: 8516 - protein, 223 aa, Streptococcus agalactiae; identical to SEQ ID NO: 3810

SEQ ID NO: 8517 - protein, 669 aa, Streptococcus agalactiae
ATGAAAATCCTTGTTGTTGAAGATGAGTTTGACTTGAACCGTAGTATTGTAAAACTTTTAAAAAAGCAACACTACAGTGTTGACAGTGCTTCAAATGGTGAAGAAGCCTTACAATTTGTTTCAGTGGCAGAATATGATGTGATTATCTTAGATGTAATGATGCCAAAAATGGACGGCTTCACCTTTTTAAAACTGCTTCGCAACAAAGGAAGTCAAGTATCTATTCTTATGTTGACTGCTCGAGATGCCGTTGAAGATCGTATCGCAGGTCTAGATTTTGGTGCGGATGATTACCTTGTAAAACCATTTGAATTTGGAGAACTCATGGCCCGAATTCGAGCTATGTTACGACGTGCAAATAGACAAGTATCTTCTGATGATATTCAAATTCAAGATATAACAATCAATTTATCTACAAAGCAAGTTTGGAGAAACGACAATTTGATTGATTTAACAGCTAAGGAATACGAAGTCCTTGAGTATTTGGCACGTCACAGAGACCAAGTCCTCTCTCGTCATCAAATTCGTGAACACGTTTGGGATTATGATTATTATGGAGAGTCCAATATTATTGATGTCCTTATCAAAAACCTTCGTCGAAAACTAGATAACAATCGAGATGGATCACTAATAAAAACTAAACGAGGTTTAGGATATGTTATTCCAAAG

SEQ ID NO: 8518 - protein, 223 aa, Streptococcus agalactiae; identical to SEQ ID NO: 3812

SEQ ID NO: 8519 - protein, 1362 aa, Streptococcus agalactiae
ATGTTATTCCAAAGTAAAATAAATTACCCTAAAAAGTCTAGCATCATCACTCAAATTACCCTCTGGTACAGCTCTTTTATTTTTATCCTTGTTATCGGTGTATTAATTGGTTCATTTTTTATTTCAAAAAGCATTGCTGAAAACAAATCTAAAAAAAATTTAGAAGCTAAAGCTGTGCAAATGAGTCAAGCGTTAGCTAAAGGTCATCGGTATGAGGCTTTTGAAGATGGAATATTTTATTCAGTCTATGACCAAAATGGAAAAGTTATCTATTCTGGTTTTCCAAAAGGATTTAAAAGGGATTTAGACCATCAACATAAACATAAAAAGAAATTATCTCTATTTTCCATGGAGAATCGTACCTTTCAGTATGTTGATATTCCAATTTCTGGGAAAAATCAGTGGTTACGTGCTATCCGTACTGTTGACAGACTGGATAAGCAATTAACTGAATTGTTATTTAGTTTGGGTATCGTTCTTCCTCTTATGTTGATTATAATAACTGTTGGTGGCTATTTAATTTTAAAGCGCACTTTTAGACCGATTCAAGAAATTACTGAAACCGCTCAATTTATTACCCAAAATGAAGACTATACTAAGCGAATTATCACTAAAAATAACGAAAATGAATTAACTGAGCTAGCAGCTGTTATCAATACTATGTTGGCTTCTATTGAATCATCATTTGTTCGGGAAAAACAATTTAACAATGATGTTTCTCATGAACTACGGACTCCTGTAACAGTTATACTTTCTGAAAGTGAATACGGAAAAAACTACGCAGAAAATTTAAGTGAAGCAAAAGAATCCTTTGAGGTTATACACCGTCAGTCACTATCAATGAAAAAATTAGTTGAGCAACTTCTAGAATTGACTAAGGCAGAAAATCCATTATCAATTCAGTTAGAACCTCTTAATTTCTCAATTATGATGAAGCAACTAGTATCCGATTCGAGTAGATTATTAGATAATACCCCTATACACCTTGACTCTCAAATCGAAGATGACCTTTGGATTATAGGTCAACAAACACTACTCAAACGGCTTTTTGATAATCTATTTTCAAATGCTATTAAATTTACAAACAATCATATTTCTATTAGTCTAAGACAGTCCGATAATCAAATTGTCTTCTCTATTAAAGATAATGGTCTAGGTATCTCAGTTGATGACCAAAGTAAAATTTGGAACCGTTTCTATCAAGTGGACTCTGCTCGAACCAAGGATAGTCAGTCTGGAATTGGTTTAGGGCTATCTTTAGTAAAACAAATCGCTACAATACACCGTGCTAAAATATGGGTTGATTCTAAACCTGATGATGGCAGTCAGTTTACGCTCACCTTTCCAAAATTGAAGAAAGAC

SEQ ID NO: 8520 - protein, 454 aa, Streptococcus agalactiae
MLFQSKINYPKKSSIITQITLWYSSFIFILVIGVLIGSFFISKSIAENKSKKNLEAKAVQMSQALAKGHRYEAFEDGIFYSVYDQNGKVIYSGFPKGFKRDLDHQHKHKKKLSLFSMENRTFQYVDIPISGKNQWLRAIRTVDRLDKQLTELLFSLGIVLPLMLIIITVGGYLILKRTFRPIQEITETAQFITQNEDYTKRIITKNNENELTELAAVINTMLASIESSFVREKQFNNDVSHELRTPVTVILSESEYGKNYAENLSEAKESFEVIHRQSLSMKKLVEQLLELTKAENPLSIQLEPLNFSIMMKQLVSDSSRLLDNTPIHLDSQIEDDLWIIGQQTLLKRLFDNLFSNAIKFTNNHISISLRQSDNQIVFSIKDNGLGISVDDQSKIWNRFYQVDSARTKDSQSGIGLGLSLVKQIATIHRAKIWVDSKPDDGSQFTLTFPKLKKD

SEQ ID NO: 8521 - protein, 1551 aa, Streptococcus agalactiae
ATGCCAGAAAAAATGACAAACAGTGAAAACAAAAGGAGTAAAGGTTTTCGAATGCCAGGTGCCTTTACAATATTATTCATTTTAACAATCTTTTCGGTTTTGGCTACATGGTGGATACCTGCTGGGTCCTATTCAAAATTACAATTTGATACAGCATCATCCAAACTAGTAGTAACAGATCCAAATGGTAAGACAGTTCATGTTCCAGCAACGCAAACACAGTTGGATAAGATGAATGTCAAAATTAAAATTAAAGAATTTACTTCTGGTGCTATTAGTAAGCCAGTTTCAGTTCCAAATACTTACAAACGTTTGAAGCAAAATCCAGCAGGCATTGGCTCCGTGACGACTAGTATGGTAAATGGAACCATTGAAGCTGTTGATATTATGGTATTTATCATGGTACTTGGAGGCATGATAGGAGTAGTTAGAAAGAGTGGCGCTTTTGAGTCTGGTCTTCTAGCTTTAACAAAGAAAACCAAAGGTAGAGAGTTTTTATTGATATTTTTAGTTTCCTTATTGATGGTTTTAGGCGGTACTCTATGTGGTATTGAAGAAGAAGCAGTTGCTTTTTATCCTATTTTAGTTCCAATCTTTTTAGCCATGGGTTATGATTCTATCATTTGTGTAGGTGCTATTTTCTTAGCAAGTTCTGTTGGGACATCATTTTCAACAATTAATCCGTTTTCTTCTGTTATTGCTTCAAATGCAGCTGGTATTAGTTTCACAGAAGGCTTATCATGGCGTACAGCAGGGTGTATTGCAGGTGCTATTTTTGTTGTGGTGTATCTACATTGGTATGCTAAAAAAATAAAAGCGAATCCAGAGTTTTCATATTCCTATGAAGATAGAGTAGAATTTAATGCTAAATGGGGCATGACAACTAACCATACACCCTCACTCTTTACTATTAGACAAAAAATTATTTTAAGTTTATTTGTTATTTCATTTCCTTTGATGGTTTGGGGAGTAATGTCACAGGGATGGTGGTTTCCAACCATGGCTTCTTCCTTTTTAGCTATTACAATTATTATTATGTTTTTAACAGCAACTGGGGCAAATGGTATTGGAGAAAGGGATGTTGTTGATGAGTTTGTTAATGGTGCATCAAGCCTTGTTGGGGTTTCATTAATCATTGGTTTAGCGCGTGGTATCAATATTATTTTGAGCCAAGGTTATATATCAGATACGATGCTTTACACAGCTTCAAAATTAGCTTCACATGTTAGTGGCTCTGTCTTTATCATTGTTATGATGTTTATCTACTTTGTGTTAGGATTTGTTGTTCCATCCTCGTCGGGTTTAGCAGTACTTTCAATGCCAATTCTAGCACCTCTTGCAGATACTGTTGGGATTCCTCGTTCAGTAGTAGTAATGGCTTATCAATTTGGGCAGTATGCAATGTTGTTTTTAGCACCTACTGGACTAGTTATGGCAACCTTGCAGATGTTAGATATGAAGTACTCCCATTGGCTAAAATTTGTGTGGCCGGTTGTTTTATTCCTCCTAATATTTGGTGGCGGTTTGTTAGTTCTACAAGTTTTAATACTT

SEQ ID NO: 8522 - protein, 517 aa, Streptococcus agalactiae; identical to SEQ ID NO: 3816

SEQ ID NO: 8523 - protein, 924 aa, Streptococcus agalactiae
ATGGCAAAAATTGTTGTTGCACTAGGAGGAAATGCCTTAGGAAATTCTCCAGAAGAACAATTAAGATTAGTAAAACATACTGCAAAATCATTGGTGGCCTTGATAAAAAAGGGACACGAAATTGTTGTAAGTCATGGTAATGGACCACAAGTTGGTGCCATTAATTTAGGAATGAATTTTGCGGCTGAGAGTGGTCAAGGAACTAATTTTCCTTTTCCAGAATGTGGAGCAATGAGCCAAGGATACATAGGCTATCATCTCCAACAGAGCCTTTTAAATGAATTACGTCAAGAGGGAATAAATAAGGAAGTTGCTACAATTATTACCCAAATTGAGGTGGATGAATCAGACCAAGCATTTAGCGCACCTACCAAGCCTATAGGCACCTTTTATGATAAGGAGACATCAGAAAAGATTGCTATAGAGAAAGGGTATACTTTCGTAGAAGACGCTGGACGAGGGTATCGTCGTGTTGTTGCTTCACCTGAACCTAAAAAAATCATCGAAATTAATAGCATTAAAACACTTATTGAAAATGATACCCTAGTTATCGCAGGTGGAGGTGGAGGCATCCCTGTCATTAATAAGGGAGGTTATGAAGGTATTGCAGCTGTTATTGATAAAGACAAATCTAGTGCACTGTTAGCAGGAGAACTAGCTGCGGATCAATTGATTATTCTCACTGCAGTTGATTATGTTTATACTCAATTTGGTAAAGAAAATCAAAAAGCTTTAACAGAGGTTAATGAGAATCAAATGATTGATTACGTTAACCAAGGTGAGTTTGCAAAAGGAAGTATGTTACCTAAAGTAATAGCCTGTATGAGTTTCTTAGATCACAATCCGAAAGGAACAGCCTTAATCACCTCATTAAATGGTTTAGAAGATGCATTAGATGGGAAATTAGGAACACGTATAACTAAG

SEQ ID NO: 8524 - protein, 308 aa, Streptococcus agalactiae; identical to SEQ ID NO: 3818

SEQ ID NO: 8525 - protein, 996 aa, Streptococcus agalactiae
ATGAAAAATTTACGTAACCGTAGTTTTCTTACTTTATTGGATTTTAGTACAGCAGAAGTTGAATTTCTTTTAAAACTTTCAGAAGATTTAAAACGTGCTAAATACGCAGGAATTGAACAACAAAAACTTGTTGGTAAAAATATCGCTTTGATTTTTGAAAAAGATTCTACACGGACACGTTGCGCTTTTGAAGTTGCTGCTCACGATCAAGGAGCTCATGTTACTTATTTAGGTCCAACAGGCAGTCAGATGGGTAAAAAAGAGACCTCAAAAGACACTGCGCGTGTGCTAGGTGGTATGTATGATGGTATTGAGTATCGTGGATTTTCTCAAGAAACAGTTGAGACTTTAGCCGAATTTTCAGGAGTTCCTGTGTGGAATGGTTTAACCGATGCTGATCATCCAACGCAAGTACTAGCCGATTTTCTGACCGCTAAGGAATGCTTACATAAGCCCTATAAAGATATTCGCTTTACGTATGTGGGTGATGGACGTAACAATGTCGCTAATGCCTTGATGATCGGTGCTTCTATTGTAGGCATGACTTATCATTTGGTTTGTCCTAAAGAATTAGAGCCAGATCCTGAACTACTCTCTAAATGTCAAGAAATTGCGAAAACTACTGGTGCTTCTATTGAAATCACTGCTGATATTGCAGAAGGCGTCAGAGATTCAGACGTCCTATATACAGATGTTTGGGTTTCAATGGGAGAACCGGATGAAGTTTGGAAAGAAAGAATAGCTCTTTTAGAACCCTATCGTATTACCCAAGAAATGCTTAATATGACAGAAAATCCAAACGTTATTTTCGAGCATTGCTTGCCCTCATTTCATAATATAGATACTAAAGTTGGATACGACATTTATGAAAAATATGGTTTGAAGGAAATGGAAGTATCAGATGAAGTTTTTGAAGGCCCTCACTCAGTTGTTTTCCAAGAAGCTGAAAATCGTATGCATACTATTAAAGCAGTTATGGTAGCAACTTTAGGTGAT

SEQ ID NO: 8526 - protein, 332 aa, Streptococcus agalactiae; identical to SEQ ID NO: 3820

SEQ ID NO: 8527 - protein, 1293 aa, Streptococcus agalactiae
ATGCTAGATATATTATCAGAAAAACATCTAGAAAGAAGGCAGCGTATTATTATCTCTGCAATAGCTATCGCCTTAGCTGCTCAAATCAATATCTCAATACTTGCTGATGGGTTTATTATGACCTTATCTTTGTTCATTTTGCCTGTCTTTTTATATTTTAATGACGACATTAATCCAATTCTTCTCTGTCTAGGAATTACTTTTGCTTCTCCTATCTTCAGAGGAATCATATTAAGTATCGCTGGCGAGGCTGAGATTCATCAAATAATTGAATTCGTTTTAACTGATATGGCGTTTTATATTTGTTATGGCATCACCTTTTATACTATTTATTGGCATCGTTCCTACCGTAATAAAGGTACTTTTTTCTTTTCTATCATTATTTGTGATTATTTTGCCAACCTTGTAGAAATTAGTTTTCTCATAAAGTTTAACAATTATACTATAACTATATTCGCTACTTTATTTGCCATAGCACTTTTGCGAGCTTTTATTAGTTGCGCTGTGGCTTATACTTATAGTTATCTATCACTTCTCTTACAAAAAGACGATCACGAACGTCGATACTATTATTTTATGTGGTCAACTTCAGCCGTTAAAAGCGAGGTTTATTTTATGCAAAAAAATATCATTGAAATTGAAAACATCATGAAAAATGCTTATTTATTAGATAAAGAGTTATCCAAATATCATCTACCTAAAGAATACCAACACCTCTCTCTAGATATTTCGCGGGACGTTCACGAAGTTAAGAAAGATTACCAAAATATTATTAAAGGCTTAGGAACCTATTTTAGTGTAAAAAATGAATCAACTATGGCATTGAAAGATATCTTTCAAATTGTTTTATCTTATACTAGGAGTATTATTCAATTTCGGCATCAAGATATCATTATTCTCGAAAATAATAAATGTAATTTGATAATATCAAACTATTACTATTTACTAACCATTATTTCCAATATCGTTTTAAATGCAGTAGAAGCTATTGATAAACAAAAAAAGGGTACAATCAGTGTTCACACAGAAGAATTAGAAGATTTTATTAAAATTGAGATTAGTGATAACGGACCAGGAATACCTGATAAAATGAAACACATGATTTTCAAACCTGGATTTTCGACTAAATTTGATGCTAATGGTGATATCTATCGAGGAATCGGGCTATCCCACGTGCGTATTTTAATGGAAGAGCAATATCAAGGAACGATAACTGTTTGTCCTAATCAGCCAAATGGAACAACATTTACACTGTTATTCCGTAAAAATCGATTTAAGTTAGGAGATAATACG

SEQ ID NO: 8528 - protein, 431 aa, Streptococcus agalactiae
MLDILSEKHLERRQRIIISAIAIALAAQINISILADGFIMTLSLFILPVFLYFNDDINPILLCLGITFASPIFRGIILSIAGEAEIHQIIEFVLTDMAFYICYGITFYTIYWHRSYRNKGTFFFSIIICDYFANLVEISFLIKFNNYTITIFATLFAIALLRAFISCAVAYTYSYLSLLLQKDDHERRYYYFMWSTSAVKSEVYFMQKNIIEIENIMKNAYLLDKELSKYHLPKEYQHLSLDISRDVHEVKKDYQNIIKGLGTYFSVKNESTMALKDIFQIVLSYTRSIIQFRHQDIIILENNKCNLIISNYYYLLTIISNIVLNAVEAIDKQKKGTISVHTEELEDFIKIEISDNGPGIPDKMKHMIFKPGFSTKFDANGDIYRGIGLSHVRILMEEQYQGTITVCPNQPNGTTFTLLFRKNRFKLGDNT

SEQ ID NO: 8529 - protein, 831 aa, Streptococcus agalactiae
GTGAAATTCTATATTATTGATGATGACCCCACTATCACTATGATTTTACAAGATATTATTGAAGAAGATTTCAATAATACAGTAGTCAGAGTGAATAATGTCTCCAGTAAAGCATACAACGAATTGCTGATTGCAGATGTTGATATCGTATTGATTGATTTATTAATGCCAATATTAGACGGTGTAACATTAGTCCAAAAAATCTATAAACAGCGTTCCGATTTAAAATTTATTATGATTTCCCAAGTCAAAGATAATGATTTACGACAAGAAGCATATAAAGCAGGAATCGAATTTTTTATTAATAAACCCATTAATATTATTGAAGTAAAAAGCGTCGTGAAACGTGTCACTGATACTATCGAAATGCAAAAAAAATTAAATACAATCCAAAATCTCCTAGAAAATACGCCATCATATCAAAAGCCTATAACGACTAGTAACCTCACTAAAATCCGTTCAATACTCAGTTATTTAGGTATTACTTCAGAGACAGCCTACACAGATATTCTTAACATCTGTGAACTTTTATTAAAACAAGAATTAAATTTTGCCCAATTTGATTTTCAAAAAGAACTTTCTATCGATGAACACCAACAAAAAATCATTTTACAACGTATTCGTCGTGCCGTTAAAAAAGCTATGATAAATATGGCTCATCTGTACATTGATGATTTTGAAAATGAATTAACACTGCAATATGCTAATGCATTGTTTGGATTTCAGAATATCCATAATGAGGCACAACTTATTCAAGGAAAAAGCATGTATGGTGGTAAAATTTCACTTAAACATTTTTTCGATGAACTTATTTTACAGAGTAAAACGTTT

SEQ ID NO: 8530 - protein, 277 aa, Streptococcus agalactiae
MKFYIIDDDPTITMILQDIIEEDFNNTVVRVNNVSSKAYNELLIADVDIVLIDLLMPILDGVTLVQKIYKQRSDLKFIMISQVKDNDLRQEAYKAGIEFFINKPINIIEVKSVVKRVTDTIEMQKKLNTIQNLLENTPSYQKPITTSNLTKIRSILSYLGITSETAYTDILNICELLLKQELNFAQFDFQKELSIDEHQQKIILQRIRRAVKKAMINMAHLYIDDFENELTLQYANALFGFQNIHNEAQLIQGKSMYGGKISLKHFFDELILQSKTF

SEQ ID NO: 8531 - protein, 720 aa, Streptococcus agalactiae
ATGATTTCATTTGAAAATGTTAGTAAATCATATGGTGATCATACCATCATTGATAATATTAGTTGCCATATTCAAAGAGGAGAATTCTTTGTCCTTGTGGGGGCCAGTGGCAGTGGTAAAACTACCATCCTCAAGATGATTAATCGTCTCATCGAACCAAGCCAAGGCGCTATTACTTTAGATGGGGAAAACATTACATCACTTGATTTGCGACAATTACGCTTAGAAACTGGTTATGTCTTGCAACAAATTGCACTTTTCCCTAATTTAACAGTTGGAGAAAATATAGAACTTATCCCTGAAATGAAGGGCTGGTCAAAAGGTGACCAAAAAAAAGCCGCTAGCGACCTTCTTGATAAGGTGGGTTTACCTGCTAAGGACTACTTTAATCGCTATCCTCATGAGCTCTCTGGTGGGGAACAACAACGCATAGGTATCCTACGAGCAATCGTTGCTAAACCTAAGGTACTACTTATGGATGAGCCATTTTCTGCTTTAGACCCTATCTCAAGACGTCAATTACAAGATATCACCAAACAATTACAGTCTGAATTGGGTATTACATTAGTGTTTGTCACCCATGACATGAAGGAAGCTATGCGTCTTGCAGATAGAATTTGTGTTATTAAGGAAGGTAAGATAGTGCAATTGGATAGACCAGAAATAATTCAAAATAATCCCTCTGACCAATTTGTTAGAACCCTATTTGAAGAGGAGAAC

SEQ ID NO: 8532 - protein, 240 aa, Streptococcus agalactiae; identical to SEQ ID NO: 3824

SEQ ID NO: 8533 - protein, 1512 aa, Streptococcus agalactiae
ATGACAACACTAATCACTACCTTTCAAGAGCGTTTTGGAGATTGGACTCAAAGTCTTATTGAACACCTCCAGCTATCACTACTAACACTTATTTTAGCAACTTTAATTGCTATTCCACTCGGTATCATCATTAGTCATTATAAAAAAATCAGTCATGTTGTCCTTCAGATAACTGGGATATTTCAAACAATTCCTTCTTTAGCCTTGCTTGGTTTATTTATACCTTTTATGGGAATTGGAACTGTACCAGCTGTCGTTGCACTAATTATTTACGCTCTATTTCCAATTTTACAAAATACTGTAACAGTACTGATGCAAATTGATGCTAATCTCATTGAGGCAGCAACCGCTTTTGGAATGACACGTTGGGAAAGGCTTAAAAAGTTTGAGTTAGCTTTAAGTATGCCTGTTATCATCTCAGGCATTAGAACTGCCTCTGTTATGATTATTGGTACAGCTACATTAGCTAGTCTTATCGGAGCTGGTGGCCTTGGATCATTTATTTTGTTAGGGATTGATCGCAACAATCCTTCTCTAATTCTCATAGGGGCAATCTCTTCTGCTGTCTTAGCTATTATATTTAGTGGTTTAATTGGATTACTAGAAAAGGCTAGATTACGAACCATAGCCGTTTCTGGTATACTTTTACTAGCAGGCTTAGGACTATCCTATGCTCCAAAATGGATGCCTGGAACAAATACTGCAACGATAACTGTTGCAGGGAAGTTAGGAACTGAACCAGATATTTTAATTAATATGTACAAAGAACTTATTGAGGATCAGACAGATATCAAAGTTAAGCTTAAACCTAATTTCGGAAAAACAACTTTCTTATATCAAGCCCTAAAATCTGGTGATATTGATCTTTACCCAGAGTTTACAGGTACTATTACATCAAGTTTACTTAAAAATCCTCCTAAAGTAAGTAATAACCCTAAACAGGTTTACAACTTAGCCAAAAACGGTATTTTAAAACAAGATAAGTTGTCACTTTTGTCACCTATGGCTTATCAAAACACCTACGCTGTAGCTGTTAAAAAAGATTACGCTGAAGCTAATCAACTCAAAAATATCAGCGACCTAAAAAAATTAGATAAACTAAAAGCTGGTTTCACTTTAGAATTTAAGGATAGAGAGGATGGGAGTATTGGTTTACAGAAACATTATGGTTTAAACCTTGATATCTCAACCTTAGAACCTGCTTTACGATACCAAGCTATCAATAGTAAAGATGTCAATATTATTGACGCTTACTCTACCGATAGTGAATTAATCCAGTATCAACTTCAAATTCTCAAAGACGATAAGCATCTATTTCCGCCATATCAAGGAGCACCGCTACTAAGGCAAGATACGATTAAAAAATACCCTCAAGTAAAAAAAGCTCTCAATAAACTTGCTGGTCATATCACTGAAAAAGAAATGCAAGAAATGAACTACCAAGTAGCTGTAAAGCATAAATCAGCAGCTACAGTAGCTAAACAATATTTAAAAGCACATCATATTATAAAG

SEQ ID NO: 8534 - protein, 504 aa, Streptococcus agalactiae; identical to SEQ ID NO: 3826

SEQ ID NO: 8535 - protein, 2499 aa, Streptococcus agalactiae
GTGATTAAAATTGTATTTTTTATATCTGTTTTAGTGCTTATTATTGTTGAAATGATTCATTTGAAACGAACTATTTCTGTTGAGCAACTAAAGAGTGTTTTTGGGCAATTATCTCCAATGAATCTTTTCTTAATTATCCTTGTGGGGGTTATCGCTGTCTTACCGACAACCGGATATGACTTTGTACTGAATGGACTTTTACGTACAGATAAAAGCAAAAGGTATATTTTACAGACTAGTTGGTGTATCAACACTTTTAATAACTTGTCAGGATTCGGTGGCTTAATCGATATTGGGTTGCGCATGGCTTTTTATGGTAAAAAAGGTCAAGAGAAGAGTGACCTAAGAGAAGTGACTCGTTTTTTACCCTATCTTATTTCTGGTCTGTCATTTATTAGTGTGATTGCCTTAATCATGAGCCATATTTTTCATGCCAAAGCTAGTGTTGATTACTATTATTTGGTATTAATTGGTGCTAGTATGTATTTTCCTGTTATTTATTGGATTTCTGGTCATAAAGGAAGCCATTATTTCGGAGATATGCCATCTAGTACTCGTATAAAATTAGGTGTTGTTTCTTTTTTTGAATGGGGATGTGCGGCCGCAGCATTTATAATTATCGGTTATTTAATGGGCATTCATCTACCAGTTTATAAAATTTTACCACTATTTTGTATTGGTTGTGCCGTCGGGATTGTATCCCTTATTCCCGGTGGATTAGGAAGTTTTGAATTAGTTCTATTTACAGGGTTTGCTGCCGAGGGACTACCTAAAGAAACTGTGGTTGCATGGTTATTACTTTATCGTTTAGCCTACTATATTATTCCATTCTTTGCAGGTATCTATTTCTTTATCCATTATTTAGGTAGTCAAATAAATCAACGTTATGAAAATGTCCCGAAAGAGTTAGTATCAACTGTTCTACAAACCATGGTGAGCCATTTGATGCGTATTTTAGGTGCATTCTTAATATTTTCAACAGCATTTTTTGAAAATATTACTTATATTATGTGGTTGCAGAAGCTAGGCTTGGACCCATTACAAGAACAAATGTTATGGCAGTTTCCAGGTTTATTGCTGGGGGTTTGTTTTATTCTCTTAGCTAGAACTATTGATCAAAAAGTGAAAAATGCTTTTCCAATTGCTATTATCTGGATTACTTTGACATTGTTTTATCTTAATTTAGGTCATATTAGTTGGCGACTATCTTTCTGGTTTATTTTACTATTGTTAGGCTTATTAGTCATTAAGCCAACTCTCTATAAAAAACAATTTATTTATAGCTGGGAAGAGCGTATTAAGGATGGAATCATTATCGTTAGTTTAATGGGAGTTCTATTTTATATTGCAGGACTACTATTCCCTATCAGGGCTCATATTACAGGTGGTAGTATTGAACGCCTGCATTATATCATAGCATGGGAGCCGATAGCATTGGCTACGTTGATTCTTACTCTCGTTTATTTATGTTTGGTTAAGATTTTACAAGGAAAATCTTGTCAGATTGGTGATGTGTTCAATGTGGATCGTTATAAAAAACTACTTCAAGCTTACGGTGGTTCTTCGGATAGCGGTTTAGCCTTTTTAAATGATAAAAGGCTCTACTGGTACCAAAAAAATGGAGAAGATTGCGTTGCGTTCCAATTTGTAATTGTCAATAATAAATGTCTTATTATGGGGGAACCAGCCGGTGATGACACTTATATTCGTGAAGCTATTGAATCGTTTATTGATGATGCTGATAAGCTAGACTATGACCTTGTTTTTTACAGTATTGGACAGAAGTTGACACTACTTTTACATGAGTATGGTTTTGACTTTATGAAAGTTGGTGAGGATGCTTTAGTTAATTTAGAAACGTTTACTCTTAAAGGGAATAAGTACAAACCTTTCAGAAATGCCCTAAATAGAGTTGAAAAGGATGGTTTCTATTTCGAAGTTGTACAATCGCCACATAGTCAAGAGCTACTAAATAGTTTGGAAGAGATTTCTAATACTTGGTTAGAAGGACGTCCTGAAAAAGGTTTCTCACTAGGATATTTTAATAAAGATTATTTCCAACAAGCCCCAATAGCTTTGGTAAAAAATGCTGAACACGAAGTTGTTGCTTTTGCTAATATTATGCCAAACTATGAAAAGAGTATTATCTCTATTGATTTAATGCGTCACGATAAACAGAAAATTCCGAATGGCGTTATGGATTTCCTCTTTTTATCATTATTCTCTTATTATCAAGAGAAGGGATACCACTATTTTGATTTGGGGATGGCACCTTTATCAGGAGTTGGTCGCGTTGAAACAAGTTTTGCTAAAGAGAGAATGGCGTATCTTGTCTATCATTTCGGTAGTCATTTCTACTCATTTAATGGTTTACACAAGTATAAGAAGAAGTTTACACCATTGTGGTCGGAACGTTATATTTCTTGTTCTCGTTCGTCCTGGTTAATTTGTGCTATTTGTGCCCTATTAATGGAAGATAGTAAAATTAAGATTGTTAAA

SEQ ID NO: 8536 - protein, 833 aa, Streptococcus agalactiae; identical to SEQ ID NO: 3828

SEQ ID NO: 8537 - protein, 741 aa, Streptococcus agalactiae
ATGACTGAGAACTGGTTACATACTAAAGATGGTTCAGATATTTATTATCGTGTCGTTGGTCAAGGTCAACCGATTGTTTTTTTACATGGCAATAGCTTAAGTAGTCGCTATTTTGATAAGCAAATAGCATATTTTTCTAAGTATTACCAAGTTATTGTTATGGATAGTAGAGGGCATGGCAAAAGTCATGCAAAGCTAAATACCATTAGTTTCAGGCAAATAGCAGTTGACTTAAAGGATATCTTAGTTCATTTAGAGATTGATAAAGTTATATTGGTAGGCCATAGCGATGGTGCCAATTTAGCTTTAGTTTTTCAAACGATGTTTCCAGGTATGGTTAGAGGGCTTTTGCTTAATTCAGGGAACCTGACTATTCATGGTCAGCGATGGTGGGATATTCTTTTAGTAAGGATTGCCTATAAATTCCTTCACTATTTAGGGAAACTCTTTCCGTATATGAGGCAAAAAGCTCAAGTTATTTCGCTTATGTTGGAGGATTTGAAGATTAGTCCAGCTGATTTACAGCATGTGTCAACTCCTGTAATGGTTTTGGTTGGAAATAAGGACATAATTAAGTTAAATCATTCTAAGAAACTTGCTTCTTATTTTCCAAGGGGGGAGTTTTATTCTTTAGTTGGCTTTGGGCATCACATTATTAAGCAAGATTCCCATGTTTTTAATATTATTGCAAAAAAGTTTATCAACGATACGTTGAAAGGAGAAATTGTTGAAAAAGCTAAT

SEQ ID NO: 8538 - protein, 247 aa, Streptococcus agalactiae; identical to SEQ ID NO: 3830

SEQ ID NO: 8539 - protein, 354 aa, Streptococcus agalactiae
ATGTCTACTTTAACAATAATTATTGCAACATTAACTGCTTTGGAACATTTTTATATTATGTATTTGGAGACGTTAGCCACCCAGTCAAATATGACTGGGAAGATTTTTAGTATGTCTAAAGAAGAGTTGTCATATTTACCCGTTATTAAACTTTTTAAGAATCAAGGTGTATACAACGGCTTGATTGGCCTATTCCTCCTTTATGGGTTATATATTTCACAGAATCAAGAAATTGTAGCTGTTTTTTTAATCAATGTATTGCTAGTTGCTATTTATGGTGCTTTGACAGTTGATAAAAAAATCTTATTAAAACAGGGTGGTTTACCTATATTAGCTCTTTTAACATTCTTATTT

SEQ ID NO: 8540 - protein, 118 aa, Streptococcus agalactiae; identical to SEQ ID NO: 3832

SEQ ID NO: 8541 - protein, 2316 aa, Streptococcus agalactiae
ATGTTAGACGAATTAAAAGCAATCATAAAAAGCCCAAAATTATGGATTACGATGGCTGGGGTTGCACTGATTCCAACGCTATATAATGTTATCTTTCTAAGCTCAATGTGGGATCCTTATGGGAATACTAAAAATTTACCTGTGGCAGTCGTTAACCAAGATAAATCGGCTAAATTAAATGGAAAAACTATTTCAATTGGCAAAGATATGGAGGACAATTTGTCTAAAAATGATAGCTTAGATTTCCATTTTACAACAGCTAAAAGAGCAGAAAAAGAATTAGAAAAGGGTCACTATTATATGGTTATTACCTTTCCTAAAGATCTTTCTAGAAAAGCGACAACTCTCATGACAGAAAAACCAGAAAGGTTAAATATTACTTATAAAACTACTAAGGGGCGTAGTTTTGTAGCTTCAAAAATGAGTGAGACAGCAGCTAATAAACTAAAAGATGAGGTAGCAGAATCTATTACAGGGACTTATACTGAATCAGTTTTTAAAAATATGGGTTCTATGAAAACAGGTATCAATAAAGCTGCTGATGGGAGTCAAGAATTATTAAATGGTTCTAATAAGCTACAGGATGGGAGCCAAACCTTGACAAGTAATTTAGATGTTTTAGCAAGCTCTAGTCAAACTTTTTCTGGAGGAGCTAATAAACTAAATAGTGGAATAAACCTTTATACAGATGGTGTGGGGACCCTATCTAACGGGTTAGAAACATTATCAGATGGTGTTACTGCTTACACAACAGGTGTGCATAAGTTGAGTGAAGGTAGTCAAAAATTAGATGATAAGTCTCAAGCATTGGTGGAAGGATCAGAAAAGTTGACGGATGGTTTACAACAATTGTCACAAGCAACTCAACTAAAACCAGAGCAAGAACGTACTTTGCAGAACCTTTCAGATGGATTAAAGAATCTAAATCAGATTATTACAAATTTACAATCGACAGCAACTACTGATAGCGATACTAATAGTAAGTTATTTAATTTTTTATCAACTATTGAATCAAGTACAAAGGCTTTGATGAATACGGCTGCTGCTGATAAACAAAAGCAAATGACTGCGGTACAATCAACGTCAGCTTTTAAAAGTTTAACCCCTGAACAACAATCTCAAATCACCTCAGCGGTTACTGGAACACCTACTTCAGCTGAGACAATTGCAGCAAATATTTCTTCAAATATAGAAAATATGAAAACTGTGCTTAGTGAAGCATCTAGTTCAGCCCCTTCTAATAATGGATCACAAAATCTTCAAACTTTGTCAGGAACAGCTAACAATTTAGTATTAAAAGCTATCTCAGATTTAGATAAAATTCAAAAATTGCCAACGGCTACTAAGCAGTTATATCAAGGTAGTCAAACCTTGACAAAAGGAATCACGGATTATACGAATGCTGTAGGGCAATTACGCAAAGGTGCAGTAACTTTAGATAGTAAATCCAATCAATTGATTTCAGGAACACAAAAAGCAAGTCAGGGAGCTCAAACTTTAGATAGTAAATCGGATCAATTGAGAGACGGAGCGGGGCAATTAGCTAGTGGTTCTGATAGAATTGCAGATGGTTCTAATAAGCTTGCTGGGGGAGGACATCAGTTGACAGATGGGTTGACAGAGTTGTCAGGTGGTGTTTCTCAATTATCAAGTTCTTTGGGGAAAGCTGGGGACCAGTTGTCCATGGTTTCTGTAAATAAAGATAATGCCAATGCAGTATCTAGCCCAGTCACTATCAAGCATGAAGATTATGATAGCGTTGATACGAATGGTGTTGGAATGGCACCATACATGATTTCAGTTGCGTTGATGGTGGTAGCTTTATCAGCCAATGTTATTTTTGCGAAAGCTTTATCTGGCAAAGAGCCAGCTAATCGTTTTAGTTGGGCTAAAAATAAATTATTAATCAATGGATTCATTGCAACTCTAGCAGCAACTATCTTATTTTTTGCAGTTCAATTCATAGGTCTTAAACCAGATTACCCTGGAAAAACCTACTTTATTATCCTATTGACAGCATGGACTTTGATGGCATTAGTAACTGCTTTAGTGGGATGGGATAATAGGTATGGTTCCTTCTTGTCGTTATTAATATTATTATTCCAGCTTGGTTCAAGCGCAGGAACTTACCCAATAGAATTGAGTCCTAAGTTCTTTCAAACAATTCAACCATTTTTACCGATGACTTACTCTGTTTCAGGATTAAGAGAGACCATCTCGTTGACGGGAGACGTTAACCATCAATGGAGAATGCTAGTAATCTTTTTAGTATCATCGATGATACTTGCTCTTCTTATTTATCGTAAACAAGAAGAT

SEQ ID NO: 8542 - protein, 772 aa, Streptococcus agalactiae
MLDELKAIIKSPKLWITMAGVALIPTLYNVIFLSSMWDPYGNTKNLPVAVVNQDKSAKLNGKTISIGKDMEDNLSKNDSLDFHFTTAKRAEKELEKGHYYMVITFPKDLSRKATTLMTEKPERLNITYKTTKGRSFVASKMSETAANKLKDEVAESITGTYTESVFKNMGSMKTGINKAADGSQELLNGSNKLQDGSQTLTSNLDVLASSSQTFSGGANKLNSGINLYTDGVGTLSNGLETLSDGVTAYTTGVHKLSEGSQKLDDKSQALVEGSEKLTDGLQQLSQATQLKPEQERTLQNLSDGLKNLNQIITNLQSTATTDSDTNSKLFNFLSTIESSTKALMNTAAADKQKQMTAVQSTSAFKSLTPEQQSQITSAVTGTPTSAETIAANISSNIENMKTVLSEASSSAPSNNGSQNLQTLSGTANNLVLKAISDLDKIQKLPTATKQLYQGSQTLTKGITDYTNAVGQLRKGAVTLDSKSNQLISGTQKASQGAQTLDSKSDQLRDGAGQLASGSDRIADGSNKLAGGGHQLTDGLTELSGGVSQLSSSLGKAGDQLSMVSVNKDNANAVSSPVTIKHEDYDSVDTNGVGMAPYMISVALMVVALSANVIFAKALSGKEPANRFSWAKNKLLINGFIATLAATILFFAVQFIGLKPDYPGKTYFIILLTAWTLMALVTALVGWDNRYGSFLSLLILLFQLGSSAGTYPIELSPKFFQTIQPFLPMTYSVSGLRETISLTGDVNHQWRMLVIFLVSSMILALLIYRKQED

SEQ ID NO: 8543 - protein, 537 aa, Streptococcus agalactiae
ATGGTAAACGATACGAGGAGAGAAAAAACAAAAAGAGCTATTGAAGCAGCTATGATTACGTTATTAAAAGATCAGAGCTTCGATGAAATTTCAACGATTAATCTAACTAAAACAGCTGGAATCAGTCGTTCTAGTTTTTATACTCATTATAAAGATAAATATGAAATGATTGATCAATACCAACAGTCACTCTTCAATAAAGTCGAATATATTTTTGATCGCAATCAATTTAAAAAAGAAGATGCCTTGCTCGAAATTTTTCAATTCTTAGATAGAGAATCATTATTTGCTGCTCTCTTAACCCAAAATGGAACAAAAGAAATTCAGACCTACATCCTTAATAAATTACAATTAATGCTTTCTAAAGAATTACCTGTGGTCAATCCAGATGCAACAAAGTCTGATATCAACCGTTTGTATTATAGTGTCTATCTCAGTCATGCTATTTTTGGAGTCTATCAAATGTGGATAACACGAGGAAAAAAAGAAAGCCCTCAACAAATTACACAAGTGCTACTCAGTTTATTACCTCAAACT

SEQ ID NO: 8544 - protein, 179 aa, Streptococcus agalactiae
MVNDTRREKTKRAIEAAMITLLKDQSFDEISTINLTKTAGISRSSFYTHYKDKYEMIDQYQQSLFNKVEYIFDRNQFKKEDALLEIFQFLDRESLFAALLTQNGTKEIQTYILNKLQLMLSKELPVVNPDATKSDINRLYYSVYLSHAIFGVYQMWITRGKKESPQQITQVLLSLLPQT

SEQ ID NO: 8545 - protein, 294 aa, Streptococcus agalactiae
ATGAATCTAAATGATAGATTAAAAATAGAAGAAATGGAAGAGAAGTATGATAGCTTCAAACCTAGAATCAATGCATTAGTAGAAGCTATAGATGATTTTCAAAAGCACTATGAAGATTACGTGAAATTAAGAGAATTTTATGGTAGCGAAGACTGGTTTAGACTATCAGAACAAACAGAAAATAATCTCAAATGCGGTGTACTGAGTGAGGATCAGCTCTTTGATTTTATAGGAGAACATAACGAGCTTGTAGGCCAATTTTTAGATATGTCTTCTCAAATGTATCGTCATTTA

SEQ ID NO: 8546 - protein, 98 aa, Streptococcus agalactiae; identical to SEQ ID NO: 4022

SEQ ID NO: 8547 - protein, 609 aa, Streptococcus agalactiae
ATGTCACGTTATACTGGTCCATCATGGAAACAATCACGTCGCCTTGGTTTATCACTTACAGGCACAGGTAAAGAATTGGCACGTCGTAACTACGTACCTGGTCAACACGGTCCTAATAACCGTAGCAAGCTTTCAGAATATGGCTTGCAGTTAGCTGAGAAACAAAAACTTCGTTTTTCATACGGACTTGGTGAAAAACAATTCCGTAACTTGTTCGTACAAGCTACTAAAGCAAAAGAAGGAACTCTTGGTTTCAACTTTATGGTTCTTTTAGAGCGTCGTCTTGATAACGTTGTTTATCGTTTAGGACTTGCAACAACTCGTCGCCAAGCTCGTCAATTTGTTAACCATGGTCATATCCTTGTTGATGGTAAACGTGTTGATATCCCATCATACCGCGTTACTCCAGGACAAGTTATTTCAGTTCGTGAAAAATCAATGAAAGTACCTGCAATCCTTGAAGCTGTTGAAGCTACTTTAGGACGTCCAGCTTTCGTATCATTTGATGCTGAAAAACTTGAAGGTTCATTGACTCGCCTTCCAGAACGCGATGAAATTAACCCAGAAATCAATGAAGCACTTGTCGTTGAATTCTACAACAAAATGCTT

SEQ ID NO: 8548 - protein, 203 aa, Streptococcus agalactiae; identical to SEQ ID NO: 3848

SEQ ID NO: 8549 - protein, 285 aa, Streptococcus agalactiae
ATGAGTGATGCATTTGCAGATGTTGCAAAAATGAAAAAAATAAAAGAAGATATCAAGTCACATGAGGGACAGATGGTCGAACTTACTCTCGAAAATGGTCGTAAGAGGGAAAAAAATAAAATTGGGCGCCTAATTGAAGTTTACCCATCTTTGTTTATCGTAGAGTATAAGGATACTGCAGCTGTACCAGGAGCAATTGATAATACTTATGTAGAGTCTTACACTTATTCAGATATTTTAACTGAGAAAACTTTAATTCGTTATTTTGATGACGAGTCAGCAGAA

SEQ ID NO: 8550 - protein, 95 aa, Streptococcus agalactiae; identical to SEQ ID NO: 3850

SEQ ID NO: 8551 - protein, 1353 aa, Streptococcus agalactiae
TTGGTAGAAGTATCTGAGCTAAGAGTACAACCTCAAGACCTGTTGGCAGAACAGGCCGTTCTAGGATCTATCTTTATCTCACCAGAGAAACTGATTATGGTGAGAGAATTTATAAGTCCAGATGATTTTTATAAATATTCACACAAAGTTATCTTCAGAGCGATGATTACCTTAGCTGATAGAAATGATGCAATTGATGCTGCTACTGTTAGAAATATTTTAGATGACCAAGGTGATCTTCAAAACATTGGTGGGTTGGGCTATATTGTTGAATTAGTTAATAGTGTTCCAACAAGTGCTAATGCGGAGTTTTATGCCAAAATAGTTTCTGAGAAAGCCATGTTGCGAGATATCATTTCTAAGTTGACAGATACTGTCAACATGGCCTATGAAGGAAATGATTCTGATGAAATTATTGCCACCGCTGAGAAGGCTTTAGTTGATATTAACGAACACAGTAATCGTAGCGGGTTTAGAAAGATATCTGATGTTTTAAAAGTTAATTACGAAAACTTAGAATTACGTTCACAGCAAACCTCAGATGTCACAGGTTTACCAACTGGATTTAGAGATTTAGACAGGATTACTACAGGTTTACATCCAGATCAATTAATCATCTTAGCGGCCCGTCCTGCAGTAGGTAAAACAGCCTTTGTTTTAAATATTGCTCAAAATGTTGGAACTAAACAAAATAGACCTGTAGCTATTTTTTCACTTGAAATGGGGGCTGAGAGTTTAGTTGACCGTATGTTGGCAGCAGAGGGAATGGTTGATTCTCATAGTTTACGAACTGGTCAGTTGACGGATCAAGATTGGAATAATGTAACGATTGCTCAAGGAGCTTTGGCGGATGCGCCAATTTATATTGATGATACGCCCGGGATTAAAATTACAGAAATTAGAGCACGCTCTAGGAAGTTATCTCAAGAAGTTGATGATGGTTTAGGTTTAATCGTCATTGACTACCTCCAATTAATTTCAGGAACTAGACCAGAAAATCGTCAGCAAGAAGTTTCTGAAATTTCAAGGCAGTTGAAGATTTTAGCTAAAGAATTAAAGGTTCCTGTTATCGCATTAAGCCAGCTCTCTCGTGGGGTTGAGCAAAGGCAGGATAAACGACCGGTCTTATCTGATATTCGTGAATCTGGATCGATTGAACAAGATGCTGACATTGTTGCTTTCTTATATCGAGATGATTATTATCGTAGAGAGGGCGAAGAAGCAGAGGAAATTGTAGAAGATAATACTGTTGAGGTTATTTTAGAAAAGAACCGTGCTGGTGCGCGTGGGACAGTAAAATTAATGTTTCAAAAGGAATATAATAAATTTTCTAGTATAGCTCAATTTGAAGAA

SEQ ID NO: 8552 - protein, 451 aa, Streptococcus agalactiae
MVEVSELRVQPQDLLAEQAVLGSIFISPEKLIMVREFISPDDFYKYSHKVIFRAMITLADRNDAIDAATVRNILDDQGDLQNIGGLGYIVELVNSVPTSANAEFYAKIVSEKAMLRDIISKLTDTVNMAYEGNDSDEIIATAEKALVDINEHSNRSGFRKISDVLKVNYENLELRSQQTSDVTGLPTGFRDLDRITTGLHPDQLIILAARPAVGKTAFVLNIAQNVGTKQNRPVAIFSLEMGAESLVDRMLAAEGMVDSHSLRTGQLTDQDWNNVTIAQGALADAPIYIDDTPGIKITEIRARSRKLSQEVDDGLGLIVIDYLQLISGTRPENRQQEVSEISRQLKILAKELKVPVIALSQLSRGVEQRQDKRPVLSDIRESGSIEQDADIVAFLYRDDYYRREGEEAEEIVEDNTVEVILEKNRAGARGTVKLMFQKEYNKFSSIAQFEE

SEQ ID NO: 8553 - protein, 450 aa, Streptococcus agalactiae
ATGAAAGTTATTTTTTTACAAGATGTTAAGGGGAAAGGAAAAAAAGGTGAGGTTAAGGAAGTACCTACTGGTTATGCTCAAAACTTCTTATTAAAAAAGAATCTAGCTAAAGAAGCAACGACACAAGCTATCGGTGAATTAAAAGGAAAACAAAAGTCCGAAGAAAAAGCACAAGCAGAAATTTTAGCACAGGCAAAGGAGCTGAAAACACAATTAGAATCCGAAACTACCCGAGTGCAATTTATTGAAAAGGTAGGTCCAGATGGTCGTACGTTTGGTTCTATCACAGCCAAAAAGATTGCTGAAGAGTTACAAAAACAATACGGCATTAAAATTGACAAACGTCATATTGATTTAGATCATACTATTAGAGCGATTGGTAAGGTTGAAGTACCAGTAAAATTACATAAACAGGTTTCTTCACAGATTAAGCTTGATATCAAAGAAGCG

SEQ ID NO: 8554 - protein, 150 aa, Streptococcus agalactiae
MKVIFLQDVKGKGKKGEVKEVPTGYAQNFLLKKNLAKEATTQAIGELKGKQKSEEKAQAEILAQAKELKTQLESETTRVQFIEKVGPDGRTFGSITAKKIAEELQKQYGIKIDKRHIDLDHTIRAIGKVEVPVKLHKQVSSQIKLDIKEA

SEQ ID NO: 8555 - protein, 1980 aa, Streptococcus agalactiae
ATGAAAAGATTTCGTTTTGCAACCGTCCATTTAGTTTTAATAGGCCTGATTTTATTTGGACTATTAGCTATTTGTGTTAGGTTATTTCAATCCTATACGGCTCTATTATTGGCTATTTTTGTTGCTTTATCTTTTGTTGTTGCCTTATTATATTACCAAAAGATAACTTATGAACTATCTGAAGTTGAACAAATTGAATTACTTAATGATCAAACAGAAGTTTCTCTTAAGAGTCTTCTTGAACAAATGCCAGTTGGTGTTATACAATTTGATCTTGAAACAAATGATATTGAGTGGTTTAACCCTTATGCAGAATTGATTTTTACTGGGGATAATGGTCATTTTCAGTCTGCTACTGTTAAAGATATCATTACTAGTAGACGTAATGGAACGGCTGGGCAATCATTTGAATACGGTGATAACAAATATTCAGCTTATTTGGATACAGAGACGGGTGTTTTCTATTTCTTCGATAATTTCATGGGGAATAGAAGAAACTATGATAGTTCAATGCTACGTCCAGTTATTGGTATTATTTCCATTGATAACTACGATGATATTATGGATACTATGTTAGAGGCTGATATGTCAAAGATTAACGCCTTCGTGACTAGTTTTATTTCTGATTTTACACAGTCTAAAAATATTTTTTATCGTCGTGTCAATATGGATCGATACTATATTTTTACCGACTATAGCGTTTTAAATACATTGATAAAAGATAAATTTGATATTTTAAATGAGTTTCGAAAACGCGCTCAGGAAAACCATTTATCATTAACATTAAGTATGGGAATTTCTTATGGTGATGGTAACCATAATCAAATTGGGCAAATTGCTTTAGAAAATCTTAATACAGCACTCGTTCGCGGAGGAGATCAAATAGTAGTACGTGAAAATGATAGTAGTAAAAAAGCACTTTACTTTGGTGGTGGTGCTGTTTCAACTATTAAACGTTCACGAACACGTACCAGAGCTATGATGACTGCTATTTCTGACCGTTTGAAAGTAGTTGATAGTGTCTTTATTGTGGGACACAGGAAATTGGACATGGATGCACTAGGTGCATCTGTAGGGATGCAATTTTTTGCTAGTAATATTGTTAATGCCAGTTATGTAGTTTATGACCCAAATGACATGAATTCTGATATTGAAAGAGCAATTGATTACTTGCAAGAAGACGGCGAAACACGTCTCGTAAGTGTTGAGAGAGCTTTTGAATTAATTACTCAAAATTCTTTATTAGTCATGGTAGACCATTCTAAAACAGCTTTAACCTTATCTAAGGAATTCTTTAACAAGTTTGCAGATGTTATTGTGGTAGATCATCATAGAAGAGATGAAGATTTTCCAAAAAATGCTGTTCTTTCATTTATAGAAAGTGGCGCAAGTAGTGCCAGCGAACTAGTTACAGAATTGATTCAATTTCAACAAGCTAAAGATAAATTAAGCCGCAGTCAAGCAAGTATTTTAATGGCTGGTATCATGCTTGATACAAGAAATTTTGCATCTAATGTAACGAGTAGAACTTTTGATGTGGCAAGCTATTTACGCGGTTTAGGTAGTAATAGTATGGCTATTCAAAAAATATCAGCTACAGATTTTGATGAATATCGTTTAATTAATGAATTGATTTTAAAAGGTGAGCGTATTTATGATAACATCATTGTTGCTACCGGAGAAGAACATAAAGTTTACTCGCATGTTATAGCTAGTAAAGCAGCTGACACCATGTTGACAATGGCAGGTATTGAGGCTACTTTTGTTATTACTAAAAACAGTTCAAATATTGGTATTTCAGCGCGCAGTAGAAATAATATCAATGTCCAGCGTATTATGGAAAAACTTGGTGGTGGCGGACATTTTAGTTTTGCTGCTTGTCAAATACAAGACAAGTCTGTAAAGCAAGTTAGACGTATGTTACTGGAAATAATTGACGAAGATTTAAGAGAAAATAGTACAGTCGAAAATAGAAGGGAT

SEQ ID NO: 8556 - protein, 660 aa, Streptococcus agalactiae
MKRFRFATVHLVLIGLILFGLLAICVRLFQSYTALLLAIFVALSFVVALLYYQKITYELSEVEQIELLNDQTEVSLKSLLEQMPVGVIQFDLETNDIEWFNPYAELIFTGDNGHFQSATVKDIITSRRNGTAGQSFEYGDNKYSAYLDTETGVFYFFDNFMGNRRNYDSSMLRPVIGIISIDNYDDIMDTMLEADMSKINAFVTSFISDFTQSKNIFYRRVNMDRYYIFTDYSVLNTLIKDKFDILNEFRKRAQENHLSLTLSMGISYGDGNHNQIGQIALENLNTALVRGGDQIVVRENDSSKKALYFGGGAVSTIKRSRTRTRAMMTAISDRLKVVDSVFIVGHRKLDMDALGASVGMQFFASNIVNASYVVYDPNDMNSDIERAIDYLQEDGETRLVSVERAFELITQNSLLVMVDHSKTALTLSKEFFNKFADVIVVDHHRRDEDFPKNAVLSFIESGASSASELVTELIQFQQAKDKLSRSQASILMAGIMLDTRNFASNVTSRTFDVASYLRGLGSNSMAIQKISATDFDEYRLINELILKGERIYDNIIVATGEEHKVYSHVIASKAADTMLTMAGIEATFVITKNSSNIGISARSRNNINVQRIMEKLGGGGHFSFAACQIQDKSVKQVRRMLLEIIDEDLRENSTVENRRD

SEQ ID NO: 8557 - protein, 1899 aa, Streptococcus agalactiae
ATGACACATAATTTTGCAGAAAACTATGATATTATCGTTGTTGGAGCGGGTCATGCAGGTGTGGAAGCTAGTCTAGCTGCTAGTCGTATGGGATGTAAGACACTTCTAGCCACTATCAACTTAGAAATGTTAGCATTTATGCCTTGTAATCCTTCTATAGGTGGCTCTGCTAAAGGTATCGTTGTCAGAGAGATTGACGCTTTAGGTGGTGAAATGGGTAAAAACATTGATAAAACCTATATACAAATGAAAATGCTTAATACAGGTAAGGGGCCTGCTGTCCGTGCCTTAAGAGCACAAGCTGATAAAGCCCTCTATGCACAAACAATGAAGCAAACTGTAGAAAAGCAAGAAAATCTTACCTTAAGACAAGCTATGATTGACGAAATACTTGTTGAAGATGGAAAGGTTGTGGGGGTTCGTACAGCAACTAATCAGAAATTTTCAGCAAAATCTGTTGTTATAACAACAGGTACTGCTCTTCGAGGAGAGATTATATTAGGTGATCTTAAGTACTCCTCGGGCCCTAATAATAGTTTAGCTTCTGTGACATTGGCAGATAATTTAAGAGACCTAGGATTAGAAATTGGTCGTTTCAAAACTGGAACACCTCCTCGTGTAAAAGCCTCCTCTATTAATTATGAAAAGACAGAGATACAACCTGGGGATGAGCAACCAAATCATTTTTCATTTATGTCTAGGGATGAAGATTATATTACTGACCAGGTACCGTGCTGGTTGACCTATACGAATACTTTGAGTCATGACATCATCAATCAAAATCTACACCGTGCTCCTATGTTTTCTGGAATCGTTAAGGGAGTTGGTCCTAGATATTGTCCGTCAATTGAAGATAAAATTGTGCGTTTTGCTGATAAAGAGCGCCACCAACTCTTCTTAGAACCAGAAGGTAGATACACTGAAGAAGTTTATGTTCAAGGGCTATCAACGAGTCTTCCTGAGGATGTTCAAGTTGATTTATTACGTTCTATAAAAGGGCTTGAAAATGCTGAAATGATGCGTACAGGCTATGCTATTGAGTATGATATTGTATTGCCTCATCAATTAAGAGCAACACTCGAAACAAAAGTAATTGCTGGTTTGTTTACTGCAGGACAGACTAATGGTACTTCAGGTTATGAAGAAGCTGCTGGTCAAGGGTTGGTTGCTGGGATCAACGCTGCTCTTAAAGTTCAAGGGAAGCCAGAACTTATTTTAAAACGAAGTGATGCTTACATTGGTGTCATGATTGATGATTTAGTTACCAAAGGGACTCTAGAACCATATCGTCTGTTGACAAGTCGCGCAGAATATCGTCTGATTCTTCGTCATGATAATGCAGATATGCGTTTAACAGAAATCGGTTATGAGATTGGCCTAGTAGATGAAGAGCGTTATGCGATATTTAAAAAGCGTCAAATGCAATTTGAAAATGAATTAGAACGTTTAGACTCTATAAAGTTAAAGCCAGTTTCTGAGACAAATAAACGGATTCAAGAATTGGGCTTTAAACCTTTGACAGATGCTTTAACTGCCAAAGAATTTATGCGCCGCCCACAAATCACATATGCAGTAGCAACGGATTTTGTTGGTTGTGCTGATGAGCCATTAGACAGTAAGGTTATTGAACTTTTGGAAACTGAAATTAAATACGAAGGCTATATTAAAAAGGCTTTAGATCAAGTTGCAAAAATGAAACGAATGGAAGAAAAACGTATTCCCCCTCATATTGACTGGGACGACATTGATTCTATCGCAACAGAAGCTAGACAAAAATTCAAAAAAATTAACCCAGAAACGCTAGGTCAGGCTAGTCGTATTTCAGGAGTTAATCCAGCCGATATTAGTATTTTAATGGTTTACCTTGAAGGAAGACAAAAAGGTCGTAAAAATATCAAT

SEQ ID NO: 8558 - protein, 633 aa, Streptococcus agalactiae
MTHNFAENYDIIVVGAGHAGVEASLAASRMGCKTLLATINLEMLAFMPCNPSIGGSAKGIVVREIDALGGEMGKNIDKTYIQMKMLNTGKGPAVRALRAQADKALYAQTMKQTVEKQENLTLRQAMIDEILVEDGKVVGVRTATNQKFSAKSVVITTGTALRGEIILGDLKYSSGPNNSLASVTLADNLRDLGLEIGRFKTGTPPRVKASSINYEKTEIQPGDEQPNHFSFMSRDEDYITDQVPCWLTYTNTLSHDIINQNLHRAPMFSGIVKGVGPRYCPSIEDKIVRFADKERHQLFLEPEGRYTEEVYVQGLSTSLPEDVQVDLLRSIKGLENAEMMRTGYAIEYDIVLPHQLRATLETKVIAGLFTAGQTNGTSGYEEAAGQGLVAGINAALKVQGKPELILKRSDAYIGVMIDDLVTKGTLEPYRLLTSRAEYRLILRHDNADMRLTEIGYEIGLVDEERYAIFKKRQMQFENELERLDSIKLKPVSETNKRIQELGFKPLTDALTAKEFMRRPQITYAVATDFVGCADEPLDSKVIELLETEIKYEGYIKKALDQVAKMKRMEEKRIPPHIDWDDIDSIATEARQKFKKINPETLGQASRISGVNPADISILMVYLEGRQKGRKNIN

SEQ ID NO: 8559 - protein, 609 aa, Streptococcus agalactiae
ATGATTTCAAAATTTATTTTAGCTTTCATGGCTTTTTTCGCCATTATGAATCCCATTTCTAATTTGCCAGCTTTTATGGCTTTAGTAGCTGATGATGATCAGAAGATTTCACGTCGGATTGCAGCAAAAGGAGTATTACTTGCTTTTGTCATTATTGTAATCTTTGTATTAAGTGGCCACTTACTTTTTAACTTATTTGGGATTACCCTAGCCGCCCTAAAAATATCTGGTGGAATATTGGTAGGCATTATAGGTTATAAAATGATTAATGGTATACATTCACCAACCAATAAAAACCTAGAGGAGCATAAGGATGATCCAATGAATGTGGCAGTTTCACCATTAGCAATGCCCCTTTTGGCAGGTCCGGGTACTATTGCAACTGCTATGGGGTTATCAAGTGGTGGTTTATCTGGCAAACTCATTACTATACTTGCTTTTGCCATATTATGTGTGATAATGTATGTTATTTTAATAAGTGCAAACGAAATTACTAAATTTCTTGGAAAAAATGCAATGACTATAATCACCAAAATGATGGGACTTATTTTGATGACTATCGGGATAGAGATGCTAATAACAGGCATAAAAATTGGTTTTCATTTAACA

SEQ ID NO: 8560 - protein, 203 aa, Streptococcus agalactiae
MISKFILAFMAFFAIMNPISNLPAFMALVADDDQKISRRIAAKGVLLAFVIIVIFVLSGHLLFNLFGITLAALKISGGILVGIIGYKMINGIHSPTNKNLEEHKDDPMNVAVSPLAMPLLAGPGTIATAMGLSSGGLSGKLITILAFAILCVIMYVILISANEITKFLGKNAMTIITKMMGLILMTIGIEMLITGIKIGFHLT

SEQ ID NO: 8561 - protein, 1118 aa, Streptococcus agalactiae
ATGACTGATAATTCAAACATTCGTGTCGTTGTAGGCATGAGTGGAGGTGTTGATTCATCAGTAACTGCCCTGCTTTTAAAAGAGCAAGGTTATGATGTTATTGGTGTTTTATGAAAAATTGGGATGACACAGATGAATTTGGTGTTTGTACGGCTACTGAAGATTATAAAGATGTTGCTGCTGTTGCTGATCAGATCGGCATACCATACTACTCTGTCAACTTTGAAAAAGAGTATTGGGACAGGGTTTTCGAATATTTTTTAGCAGAATATCGAGCAGGTCGTACGCCAAATCCAGATGTTATGTGTAATAAGGAAATTAAATTTAAAGCATTTCTAGATTATGCGATGACATTAGGTGCTGACTATGTAGCAACAGGTCATTATGCACAAGTAACACGTGATGAGAACGGAATAGTTCATATGCTTAGAGGAGCAGATAATAATAAGGATCAAACTTATTTTCTAAGTCAATTATCTCAGGAGCAATTGCAAAAAACGTTATTTCCACTTGGTCATTTACAAAAACCAGAAGTTCGCCGTATAGCTGAAGAAGCAGGACTTGCGACCGCTAAGAAAAAAGACTCTACTGGTATTTGTTTTATTGGAGAAAAAAATTTCAAGGATTTCCTGGGTCAATATTTACCGGCTCAACCAGGTCGTATGATGACTGTTGATGGTCGTGACATGGGTGAACATGCTGGTTTAATGTATTATACTATTGGTCAAAGAGGGGGCCTTGGTATTGGTGGGCAACATGGTGGAGATAATAAACCTTGGTTTGTAGTTGGAAAGGATTTAAGTAAAAACATTCTTTATGTAGGTCAAGGTTTCTATCATGACTCATTGATGTCAACTAGCTTGACAGCTTCTGAAATCCACTTTACACGTGATATGCCTAATGAATTTAAGCTAGAATGTACAGCTAAGTTCAGATATCGTCAACCTGACAGTAAAGTTACAGTTTACGTAAAAGGTAATCAAGCAAGGGTTGTGTTTGATGATTTACAACGAGCAATCACACCAGGTCAAGCTGTTGTTTTTTATAATGAACAAGAATGTTTAGGCGGTGGGATGATTGATCAGGCTTATCGTGATGATAAAATCTGTCAATACATT

SEQ ID NO: 8562 - protein, 373 aa, Streptococcus agalactiae
  VARIANT 36: Xaa = Any Amino Acid
MTDNSNIRVVVGMSGGVDSSVTALLLKEQGYDVIGXFMKNWDDTDEFGVCTATEDYKDVAAVADQIGIPYYSVNFEKEYWDRVFEYFLAEYRAGRTPNPDVMCNKEIKFKAFLDYAMTLGADYVATGHYAQVTRDENGIVHMLRGADNNKDQTYFLSQLSQEQLQKTLFPLGHLQKPEVRRIAEEAGLATAKKKDSTGICFIGEKNFKDFLGQYLPAQPGRMMTVDGRDMGEHAGLMYYTIGQRGGLGIGGQHGGDNKPWFVVGKDLSKNILYVGQGFYHDSLMSTSLTASEIHFTRDMPNEFKLECTAKFRYRQPDSKVTVYVKGNQARVVFDDLQRAITPGQAVVFYNEQECLGGGMIDQAYRDDKICQYI

SEQ ID NO: 8563 - protein, 666 aa, Streptococcus agalactiae
ATGAAACATTTAAAATTTCAATCGGTCTTCGACATTATTGGTCCTGTTATGATTGGACCATCAAGTAGTCATACTGCAGGAGCTGTCCGCATTGGTAAAGTTGTCCATTCTATTTTTGGTGAACCTAGTGAAGTAACCTTTCATTTATACAATTCTTTTGCTAAAACTTACCAAGGACACGGTACTGATAAAGCATTGGTTGCAGGGATTCTAGGAATGGATACAGATAATCCAGATATTAAAAACTCTCTTGAAATTGCTCATCAAAAAGGAATTAAGATTTACTGGGATATCCTAAAAGATAGTAATTCACCACATCCAAATACTGCGAAAATAACTGTTAAAAATGGGGATAGGAGCATGAGTATTACAGGAGTGTCAATTGGTGGCGGAAACATCCAAGTTACTGAGTTGAATGGATTCTCAGTTTCATTAACAATGAATACTCCTACTTTAATTATCGTTCATCAAGATATACCTGGCATGATTGCTAAAGTAACTGATATTTTATCTGACTTTAACATTAATATTGCTCAAATGAATGTAACACGCGAAAGTGCAGGAGAAAAAGCTATCATGATTATAGAAGTAGATTCACGAGATTGTCAACAAGCTGTCAAAAAGATAGAAGCTATTCCTCATTTACACAATGTCAACTTCTTTGAT

SEQ ID NO: 8564 - protein, 222 aa, Streptococcus agalactiae; identical to SEQ ID NO: 3872

SEQ ID NO: 8565 - protein, 870 aa, Streptococcus agalactiae
ATGTTTTATACAATTGAAGAGCTGGTAGAGCAAGCTAATAGCCAACATAAGGGTAACATAGCAGAGCTCATGATCCAAACGGAAATTGAAATGACTGGTAGAAGTCGTGAAGAAATTCGTTATATTATGTCCCGAAATCTTGAAGTCATGAAAGCTTCTGTTATTGATGGATTAACCCCTAGTAAATCAATCAGTGGTTTAACAGGCGGTGATGCTGTCAAGATGGATCAATATTTACAATCAGGAAAAACTATTTCAGATACCACAATCCTAGCTGCCGTTAGGAATGCTATGGCTGTTAATGAGTTAAATGCTAAGATGGGACTGGTCTGTGCAACACCAACTGCAGGTAGTGCAGGATGTTTACCAGCTGTGATTTCTACAGCCATTGAAAAGCTTAATTTAACAGAAGAAGAGCAACTTGATTTTCTATTTACAGCCGGCGCATTTGGTCTCGTCATTGGTAATAATGCCTCTATCTCAGGTGCAGAAGGAGGTTGCCAAGCTGAAGTTGGGTCAGCTAGTGCTATGGCTGCGGCTGCTTTAGTTATGGCTGCTGGAGGTACTCCTTTCCAAGCTAGCCAAGCTATAGCATTTGTTATTAAAAATATGCTTGGACTTATCTGTGACCCTGTTGCAGGTTTAGTTGAAGTCCCTTGTGTGAAGCGGAATGCTCTTGGATCAAGTTTTGCACTTGTTGCTGCTGATATGGCCTTGGCTGGTATTGAATCGCAAATTCCAGTAGATGAAGTTATTGATGCAATGTATCAAGTTGGATCAAGTTTACCGACTGCTTTTCGTGAGACTGCAGAAGGAGGACTTGCTGCCACGCCGACAGGAAGACGTTATAGTAAAGAAATTTTTGGGGAA

SEQ ID NO: 8566 - protein, 290 aa, Streptococcus agalactiae
MFYTIEELVEQANSQHKGNIAELMIQTEIEMTGRSREEIRYIMSRNLEVMKASVIDGLTPSKSISGLTGGDAVKMDQYLQSGKTISDTTILAAVRNAMAVNELNAKMGLVCATPTAGSAGCLPAVISTAIEKLNLTEEEQLDFLFTAGAFGLVIGNNASISGAEGGCQAEVGSASAMAAAALVMAAGGTPFQASQAIAFVIKNMLGLICDPVAGLVEVPCVKRNALGSSFALVAADMALAGIESQIPVDEVIDAMYQVGSSLPTAFRETAEGGLAATPTGRRYSKEIFGE

SEQ ID NO: 8567 - protein, 675 aa, Streptococcus agalactiae
TTGAATGTAAAAAAACATCATTTAGCTTATGGAGCTATCACTTTAGTAGCCCTTTTTTCATGTATTTTGGCTGTAATGGTCATCTTTAAAAGTTCACAAGTTACTACTGAATCTTTGTCAAAAGCAGATAAAGTTCGCGTAGCCAAAAAATCAAAAATGACTAAGGCGACATCTAAATCAAAAGTAGAAGATGTAAAACAGGCTCCAAAACCTTCTCAGGCATCTAATGAAGCCCCAAAATCAAGTTCTCAATCTACAGAAGCTAATTCTCAGCAACAAGTTACTGCGAGTGAAGAGGCAGCTGTAGAACAAGCAGTTGTAACAGAAAACACCCCTGCTACCAGTCAGGCACAACAAGCTTATGCTGTTACTGAGACAACTTATAGACCTGCTCAACACCAGACGAGTGGCCAAGTATTGAGTAATGGAAATACTGCAGGGGCTATTGGCTCAGCAGCTGCAGCACAAATGGCTGCTGCAACAGGAGTCCCTCAGTCTACTTGGGAACATATTATTGCCCGTGAATCAAATGGTAATCCTAATGTTGCTAATGCCTCAGGAGCTTCAGGACTTTTCCAAACGATGCCAGGTTGGGGTTCAACAGCTACAGTTCAGGATCAAGTTAATTCAGCTATTAAAGCTTATCGTGCTCAAGGTTTATCAGCTTGGGGTTAC

SEQ ID NO: 8568 - protein, 225 aa, Streptococcus agalactiae; identical to SEQ ID NO: 3876

SEQ ID NO: 8569 - protein, 537 aa, Streptococcus agalactiae
ATGTCAATAACCTCGGTTAAAAAATCAAAACCATTTAAATTAGGAGTGGCAGGTCTTTTAGTGGGTGCTTCATTAGCTTTACCACTTTCAGTAAGCGCAGCATCTTATACCGTGAAATCAGGTGATACCTTATCAGCTATTGCTAAAAATCATAAAACTACGGTACAAGAGTTAGTGTCTCTCAATAGTATCAGTAACGCTGATGTCATCAGTATAGGTGATGTTTTAAAATTGGATAATTCTACAGCTAGTCAAGCAGAAGCAAAATCTCAACCAACAATTGAAAATTCAATGAATTCTTCATCAAATTTGAGTTCAAGTGATTCAGCCGCAAAAGAAGAAATAGCTCGTCGTGAATCAAATGGTAGTTATACTGCACAGAATGGACAATATTATGGAAGATATCAACTGTCTCAATCTTACCTAAATGGCGACTTATCTCCTGAAAATCAAGAAAAAGTAGCGGACAATTATGTGGTTTCTCGTTACGGATCTTGGTCGGCAGCGCTATCATTTTGGAATAGTAACGGCTGGTAT

SEQ ID NO: 8570 - protein, 179 aa, Streptococcus agalactiae; identical to SEQ ID NO: 3878

SEQ ID NO: 8571 - protein, 792 aa, Streptococcus agalactiae
ATGGATAAATTGATTTTGGGACGTTACATACCAGGTAATTCTCTCATTCATAAATTAGATCCTCGAAGTAAGTTACTAGCCATGTTGCTTTTTATCATTATTGTTTTTTGGGCAAATAATGTAGTGACAAATGTGATCGTATTCATTTTTACGTTGGTTATTGTGGGTTTATCTCAGATAAAATTTTCCTATTTTTTCAATGGTATTAAACCGATGGTTGGTATTATTTTATTTACAACCCTCTTCCAGATGCTGTTTGCACAAGGCGGGCAGGTTATCTTCTCGTTTTGGATTTTTAGCATCACTAGCCTTGGGTTACAACAAGCAGCACTTATTTTTATGAGATTTGTTTTAATTATCTTCTTTTCGACATTACTTACCTTAACTACTACTCCGTTAAGTTTAGCAGATGCTGTTGAATCTTTGTTAAAACCATTGGAAGTACTGAGAGTACCAGCACACGAGATTGGTTTGATGTTATCCCTTAGCTTACGTTTCGTTCCTACTTTAATGGATGATACAACACGTATCATGAATGCTCAAAGAGCTCGTGGAGTTGATTTTGGAGAGGGAAACCTAATTCATAAGGTTAAGTCTATTATCCCTATTTTGATTCCATTATTTGCTTCTAGTTTTAAAAGAGCAGATGCGTTGGCAATTGCTATGGAAGCAAGAGGTTATCAAGGCGGAGCCAATCGTAGTAAGTACCGTTTATTGAAGTGGACTGTTCGGGATACTTTTAGTATATTACTTATGTTATTATTGGGTTTGAGTTTGTTTCTATTAAAAAAT

SEQ ID NO: 8572 - protein, 264 aa, Streptococcus agalactiae; identical to SEQ ID NO: 3880

SEQ ID NO: 8573 - protein, 840 aa, Streptococcus agalactiae
ATGGGAATTGAATTTAAAAATGTAAGTTATACCTATCAAGCCGGCACTCCTTTTGAAGGGCGTGCCCTTTTTGACGTCAATCTGAAAATTGAAGATGCTTCCTATACCGCGTTCATTGGGCACACAGGTTCTGGAAAATCAACTATTATGCAACTTTTGAATGGTTTACATATTCCTACAAAAGGTGAGGTAATTGTCGATGATTTTTCTATTAAAGCAGGGGACAAGAACAAAGAAATCAAATTTATAAGGCAAAAAGTTGGTTTAGTTTTTCAATTTCCAGAAAGTCAGCTTTTTGAAGAGACAGTTTTAAAGGATGTTGCTTTTGGACCACAAAATTTTGGTATTTCTCAGATTGAAGCTGAAAGGCTGGCTGAAGAAAAATTAAGGTTAGTTGGTATCAGTGAGGATTTATTCGATAAAAATCCATTTGAACTTTCTGGAGGGCAGATGAGGCGGGTTGCTATAGCTGGTATTTTAGCGATGGAACCCAAAGTACTAGTACTGGATGAGCCAACAGCTGGACTTGATCCTAAGGGAAGAAAAGAATTAATGACTCTTTTTAAAAATCTTCATAAAAAAGGAATGACTATCGTCTTAGTGACTCACTTAATGGACGATGTAGCGGATTATGCTGACTATGTGTATGTTTTAGAAGCAGGGAAAGTAACCTTATCAGGACAACCAAAACAGATTTTTCAAGAAGTAGAACTTTTAGAAAGTAAACAATTAGGAGTTCCCAAAATCACCAAGTTTGCTCAAAGACTATCTCATAAGGGATTAAATTTACCTAGTTTACCAATTACTATTAACGAATTTGTGGAGGCTATTAAGCATGGA

SEQ ID NO: 8574 - protein, 280 aa, Streptococcus agalactiae; identical to SEQ ID NO: 3882

SEQ ID NO: 8575 - protein, 837 aa, Streptococcus agalactiae
ATGACAAATATTATTACCGTTAATAATCTCTTTTTTAAATATGATAGTAATCAAACACATTATCAATTGGAGAATGTATCGTTTCATGTGAAACAAGGAGAATGGCTATCTATTATTGGTCATAATGGTTCTGGGAAATCCACTACTGTTCGTTTAATAGATGGACTTTTAGAGGCGGAGTCTGGCCAGATTATCATTGATGGACAAGAGTTAACCGAAGATAATGTCTGGGAGTTACGTCACAAGATTGGCATGGTATTTCAAAATCCTGATAACCAATTTGTAGGGGCAACTGTTGAAGATGACGTCGCCTTTGGTTTGGAAAATAAAGGTATTCCTTTGAAAGACATGAAAGAAAGAGTGGACCAAGCACTTGATTTGGTAGGAATGTCTGAATTTAAAATGAGGGAGCCTGCACGTTTATCTGGAGGACAAAAGCAGCGTGTAGCCATTGCAGGAGCTGTAGCTATGCGTCCACAAGTTATCATCTTGGATGAGGCGACTAGTATGCTTGATCCTGAGGGACGATTGGAACTGATAAGAACGATACGAGCTATTCGTCAAAAATATAATCTTACTGTTATTTCAATTACACACGACTTAGATGAAGTTGCATTGAGTGATCGTGTCATCGTTATGAAAAATGGTAAAGTTGAGTCGACATCCACTCCAAAAGCGTTATTTGGTCGTGGAAATCGTTTGATTAGTTTAGGTTTAGATGTTCCCTTTACAAGTAGGTTAATGGCAGAACTGGCTGCTAATGGTCTTGATATAGGGACAGAGTATCTTACAGAGAAGGAATTAGAAGAACAATTATGGGAATTGAATTTAAAAATG

SEQ ID NO: 8576 - protein, 279 aa, Streptococcus agalactiae; identical to SEQ ID NO: 3884

SEQ ID NO: 8577 - protein, 540 aa, Streptococcus agalactiae
ATGATGAAGAAAGAAAATATTCCGAATCTATTAACTGTAGTCAGAATTTTAATGATTCCGTTATTTATAGTATTAACTTCAGTAACAACAAGTACAACTTGGCATATTGTTGCAGCTATTGTATTTGCTATTGCAAGTTTGACCGATTACCTAGATGGTTATCTAGCACGTAAATGGCAAGTAGTAACAAATTTTGGGAAATTTGCAGACCCATTAGCTGATAAAATGCTAGTTATGAGTGCTTTTATCATGTTAGTTGGACTAGACTTAGCACCAGCTTGGGTTTCAGCTATTATCATTTGTAGAGAGTTAGCAGTTACAGGTTTGCGTTTACTTTTAGTTGAAACAGGTGGAACAGTACTTGCTGCAGCTATGCCAGGGAAAATAAAGACGGCTACTCAAATGTTTGCAGTTATTTTTTTGTTAGTACATTGGATGACACTTGGTAACATCATGTTATACATTGCTCTATTCTTTACCTTGTATTCAGGCTACGACTATTTTAAAGGTGCAGGCTTCTTATTTAAGGATACTTTTAAA

SEQ ID NO: 8578 - protein, 180 aa, Streptococcus agalactiae; identical to SEQ ID NO: 3886

SEQ ID NO: 8579 - protein, 1281 aa, Streptococcus agalactiae
ATGACAGTTAATAAAATAACTTATCAGAACCTTCAGGAGGAAGTATATAAGTTAACATTAGAGAGCGGACTAAATGTATACCTTATTCCAAAGCCATCATTTAAGGAAACTGTTGGAGTATTGACAGCAAATTTTGGATCACTCCATACAAAATATACGAGGAATGGTTGTGTAGAACATTATCCGGCAGGAATTGCTCACTTCTTAGAACATAAATTATTTGAACTGGATAAAGGACAAGACGCTGCAACTCAATTTACTAAATATGGCGCCGAGAGTAACGCCTTTACAACTTTTGATAAAACTAGTTTTTATTTTTCAACTATAAGTCACATTACAAACTGCTTAGATATACTACTTGACTTTGTATTGACAACAAACTTTACAGAAGAGTCAATTACTAAAGAAAAAGATATTATCAAACAAGAAATTGAAATGTATCAAGATGACCCAGAATATAGGCTTTATCAAGGAGTGTTATCGAACCTTTACCCCAACTCTCCATTAGCATTTGATATCGCTGGAGATTACCAATCAATCTCTCAAATAACCTTAACCGATTTACAAGAAAATCACAAAGACTTTTATCAGTTGTCTAATATGAATTTAGTTCTTGTTGGACAATTTAGTCCACAAGAAATTATAACTTACCTTCAAAAAAATTCTCATTTCACAAGTTACTCACAGAATATTGACCGAGATTCTATTAGCCTTGAGCCTGTTATAAAAAACAACTCTTGCCATATGACAGTGACAAAACCTAAATTAGCTATTGGTTATCGAAAATCAAATCATATGATACATGGTTCTTACCTAAAAGAGAAAATCGGATTACAGCTATTTTTTGCAATGCTTTTAGGATGGACTTCTACAATTAACCAAGACTGGTACGAATCTGGTCAAATTGATGATTCTTTTGATATAGAAATTGAAGTTCATCCAGATTTTGAGTGCGTTATTATTTCTTTAGATACGACAGAGCCAATTGCTTTTTCAACTCAGTTGAGGTTATTGCTAAAAAATGCTTTGCAATCATCTGATCTTACCGAAAGCCACTTAAAAAACGTTAAGAGAGAGCTCTATGGCGATTTTTTAAGAAGCTTAGATTCTATTGAAAATCTCGCAATGCAATTCGTCACCTATTTATATGATGGAAAAACGATGTATTTGGATTTGCCATCTATCGTTGAAGAATTAGATTTGGAAGATGTCATTACGATTGGTAAGGATTTCTTAGATAATGCTGACACATCTGACTTCGTTATTTTTCCAAAATCTTCG

SEQ ID NO: 8580 - protein, 427 aa, Streptococcus agalactiae
MTVNKITYQNLQEEVYKLTLESGLNVYLIPKPSFKETVGVLTANFGSLHTKYTRNGCVEHYPAGIAHFLEHKLFELDKGQDAATQFTKYGAESNAFTTFDKTSFYFSTISHITNCLDILLDFVLTTNFTEESITKEKDIIKQEIEMYQDDPEYRLYQGVLSNLYPNSPLAFDIAGDYQSISQITLTDLQENHKDFYQLSNMNLVLVGQFSPQEIITYLQKNSHFTSYSQNIDRDSISLEPVIKNNSCHMTVTKPKLAIGYRKSNHMIHGSYLKEKIGLQLFFAMLLGWTSTINQDWYESGQIDDSFDIEIEVHPDFECVIISLDTTEPIAFSTQLRLLLKNALQSSDLTESHLKNVKRELYGDFLRSLDSIENLAMQFVTYLYDGKTMYLDLPSIVEELDLEDVITIGKDFLDNADTSDFVIFPKSS

SEQ ID NO: 8581 - protein, 271 aa, Streptococcus agalactiae
TTGAAGCTTATTAATAAGCAATCAATAATATAAGATGGGCAGGTTTTCTTCTACATTATTGAAACAAACAAAAGATATATTGAAAATGAACTATGTTTTAGCTTCTGATAATCCTAAGGTCATAGTTGACCACATTTATCATGAACATTATTTAGATCAGTTTCATACTTCAGCACTATTCATTGACAAAGTAGACGATGTAACAAAATCAGATATTGTCAGCGTAGCAACAAAATTAAAATTACAAGCTTTTTATTTTTTGGAAGGAAAC

SEQ ID NO: 8582 - protein, 91 aa, Streptococcus agalactiae
MKLINKQFNNIKMGRFSSTLLKQTKDILKMNYVLASDNPKVIVDHIYHEHYLDQFHTSALFIDKVDDVTKSDIVSVATKLKLQAFYFLEGN

SEQ ID NO: 8583 - protein, 1242 aa, Streptococcus agalactiae
ATGAAAATAGTTGAAGGCGTTTCTCTACATTTAATTAAAAACCAACAATTTAAGACTAATCATCTTACTTTTCGATTTTCAGGTGATTTTAATAATAAAACAGTAGCACGTAGATCGCTCGTTGCTCAAATGTTAGTTACTGCAAATGCTAAGTATCCTAAGGTACAAGAATTTCGAGAAAAGTTAGCTTCCTTATATGGCGCTAGTTTATCAACTAAGATTTCTACTAAGGGTCTTGTTCACATTGTTGATATTGATATTGTATTTGTTAAAAATACCTTTACTTTAGAACAAGAAAATATCGTTGAACAAATTATTACATTCTTGGAGGATATGCTGTTTTCTCCTTTAATTTCTTTAGAACAGTATCAAACATCTATTTTTGATACTGAGAAGAAAAACCTTATTCAATATTTAGAGGCTGATATTGAAGATAATTTTTATAGCAGTGACTTAGCACTAAAATCTTTATTCTACAATAATAAGACACTTCGTTTACCTAAGTATGGTACAGCATCTTTAGTGGAATCAGAAAATTCATTTACAGCTTATCAAGAATTTCAGAAGATGCTTAAGGAAGATCAATTAGATATTTTTGTCGTAGGGGATTTTGATGACTATCGAATGATTCAGGCTTTTAATCGTATGGCATTTGAGCCACGTCACAAAGTATTAGCTTTTGATTATACGCAGACTTATGAAAATATAACGAGAAGTCAAGTAGAAGATAAGGACGTTAATCAATCTATTATGCAATTGGCTTATCATCTTCCAATAACTTATAAAGATGAAGATTATTTTGCTTTAATAGTATTTAACGGTTTATTTGGTGCTTTTGCCCACTCCTTGTTGTTTACAGAAATTCGAGAAAAGCAAGGTTTAGCCTATACTATAGGTAGTCAATTTGACAGCTTTACAGGTCTCTTTACGATATATGCAGGTATTGATAAAGAGAATCGTGAGCGTTTTTTGAAGCTTATTAATAAGCAATTCAATAATATTAAGATGGGCAGGTTTTCTTCTACATTATTGAAACAAACAAAAGATATATTGAAAATGAACTATGTTTTAGCTTCTGATAATCCTAAGGTCATAGTTGACCACATTTATCATGAACATTATTTAGATCAGTTTCATACTTCAGCACTATTCATTGACAAAGTAGACGATGTAACAAAATCAGATATTGTCAGCGTAGCAACAAAATTAAAATTACAAGCTTTTTATTTTTTGGAAGGAAAC

SEQ ID NO: 8584 - protein, 414 aa, Streptococcus agalactiae
MKIVEGVSLHLIKNQQFKTNHLTFRFSGDFNNKTVARRSLVAQMLVTANAKYPKVQEFREKLASLYGASLSTKISTKGLVHIVDIDIVFVKNTFTLEQENIVEQIITFLEDMLFSPLISLEQYQTSIFDTEKKNLIQYLEADIEDNFYSSDLALKSLFYNNKTLRLPKYGTASLVESENSFTAYQEFQKMLKEDQLDIFVVGDFDDYRMIQAFNRMAFEPRHKVLAFDYTQTYENITRSQVEDKDVNQSIMQLAYHLPITYKDEDYFALIVFNGLFGAFAHSLLFTEIREKQGLAYTIGSQFDSFTGLFTIYAGIDKENRERFLKLINKQFNNIKMGRFSSTLLKQTKDILKMNYVLASDNPKVIVDHIYHEHYLDQFHTSALFIDKVDDVTKSDIVSVATKLKLQAFYFLEGN

SEQ ID NO: 8585 - protein, 351 aa, Streptococcus agalactiae
ATGGATTATAAATTATTTGATGAATATATTACTTTACAATCACTTCTAAAAGAGATTGGTATCATTCAAAGTGGCGGAGCCATTAAAAAATTTTTAGCGGATAATCGAGTATTGTTTAACGGTGACCTTGAAAATAGGCGTGGAAAGAAACTCCGCCTGGGGGATATTATTACTATTCCTGATCAAAATATCGAGATCATTATAAGGAAGCCATCAGATCAAGAAATTGAAGAACGTAATATAGAAATAGCTGAAAAACAGCGTGTTTCAGCAATCGTTAAAGAAATGAATAAAAACACCAACAAAGGTAAATCAAAAACTAGCAAAAAACCAGTTCGCTTTCCAGGGACA

SEQ ID NO: 8586 - protein, 117 aa, Streptococcus agalactiae
MDYKLFDEYITLQSLLKEIGIIQSGGAIKKFLADNRVLFNGDLENRRGKKLRLGDIITIPDQNIEIIIRKPSDQEIEERNIEIAEKQRVSAIVKEMNKNTNKGKSKTSKKPVRFPGT

SEQ ID NO: 8587 - protein, 1107 aa, Streptococcus agalactiae
ATGTGGATAAAAAATATTTCTTTAAAACATTATCGTAATTATGAAGAAGCACAAGTAGATTTTTCACCCAACCTCAATATTTTCATTGGCCGCAATGCTCAAGGAAAGACAAATTTTTTAGAAGCAATCTACTTCTTGGCTTTGACTCGAAGTCACCGTACCCGTTCTGATAAAGAACTTGTACATTTTAAACACCATGATGTACAAATTACAGGTGAGGTAATCCGCAAAAGTGGCCATCTTAACTTAGATATTCAATTATCTGAAAAAGGAAGAATCACTAAAGTTAACCATCTTAAACAGGCAAAATTATCTGATTATATTGGGGCTATGACTGTCGTACTTTTTGCCCCTGAAGATCTTCAATTAGTTAAAGGTGCACCTAGTCTAAGACGAAAATTTTTAGATATAGATATTGGACAAATTAAGCCAACGTACTTAGCTGAACTTTCAAATTACAATCATGTATTAAAACAAAGAAACACTTATCTAAAAACTACTAATAACGTCGACAAAACTTTTTTAACAGTCCTTGATGAACAATTAGCTGATTATGGAAGTCGTGTCATTGAACACCGTTTTGATTTTATCCAAGCCCTAAATGATGAAGCGGACAAACATCACTACATTATCAGTACTGAGTTAGAACATTTATCTATTCACTACAAATCGTCAATAGAGTTTACAGATAAGTCAAGTATTAGGGAACATTTTTTAAACCAATTATCTAAAAGCCACTCAAGAGACATCTTTAAGAAAAACACAAGCATCGGACCTCATCGTGATGATATTACTTTCTTTATTAATGATATCAATGCTACTTTTGCTAGCCAAGGGCAACAAAGAAGCCTTATTTTATCATTGAAATTAGCAGAAATTGAGCTAATAAAAACCGTTACCAACGATTATCCGATTCTCTTACTTGACGACGTCATGAGTGAACTTGACAACCATCGTCAACTAAAACTCTTAGAGGGAATCAAAGAGAATGTTCAAACATTTATTACTACAACAAGTTTAGAACATTTAAGTGCTTTACCTGATCAACTCAAAATCTTTAACGTTAGTGATGGTACTATTAGTATTAATGAAAAAAAAGCAACAGAT

SEQ ID NO: 8588 - protein, 369 aa, Streptococcus agalactiae
MWIKNISLKHYRNYEEAQVDFSPNLNIFIGRNAQGKTNFLEAIYFLALTRSHRTRSDKELVHFKHHDVQITGEVIRKSGHLNLDIQLSEKGRITKVNHLKQAKLSDYIGAMTVVLFAPEDLQLVKGAPSLRRKFLDIDIGQIKPTYLAELSNYNHVLKQRNTYLKTTNNVDKTFLTVLDEQLADYGSRVIEHRFDFIQALNDEADKHHYIISTELEHLSIHYKSSIEFTDKSSIREHFLNQLSKSHSRDIFKKNTSIGPHRDDITFFINDINATFASQGQQRSLILSLKLAEIELIKTVTNDYPILLLDDVMSELDNHRQLKLLEGIKENVQTFITTTSLEHLSALPDQLKIFNVSDGTISINEKKATD

SEQ ID NO: 8589 - protein, 705 aa, Streptococcus agalactiae
ATGACTGCCTCATTGTGGATTTTTGGTATCTTAGGTGGTATCCTATGGTCAGTCGGCCAAAATGGTCAATTCCAAGCAATGAAATATATGGGAGTCTCTGTTGCTAATCCACTGTCAAGTGGTGCACAATTAGTAGGTGGAAGCCTAGTTGGTGCTTTAGTCTTTCATGAATGGACTAAGCCAATCCAATTTATTTTAGGATTGACAGCGTTGACATTATTAGTTATCGGCTTCTATTTCTCAAGTAAACGTGATGTCTCAGAACAAGCTTTGGCAACACATCAAGAGTTTTCAAAAGGATTTGCTACAATTGCTTATTCAACTGTAGGTTACATCTCATACGCAGTTTTATTTAATAACATTATGAAGTTCGACGCTATGGCCGTTATTTTACCCATGGCTGTTGGAATGTGTCTAGGTGCAATTTGTTTCATGAAGTTTCGTGTTAACTTTGAGGCTGTTGTTGTTAAAAATATGATTACAGGTCTCATGTGGGGCGTTGGTAATGTCTTCATGTTATTGGCAGCAGCTAAAGCAGGGCTAGCAATTGCTTTTAGTTTTTCTCAACTTGGAGTAATTATCTCTATTATTGGTGGTATTTTATTTTTAGGTGAGACAAAAACGAAGAAAGAGCAGAAGTGGGTTGTCATGGGTATCCTTTGTTTTGTTATGGGTGCTATATTACTTGGTATTGTTAAATCTTAT

SEQ ID NO: 8590 - protein, 235 aa, Streptococcus agalactiae; identical to SEQ ID NO: 3892

SEQ ID NO: 8591 - protein, 660 aa, Streptococcus agalactiae
ATGAAAAATTATGGAAAAATTTTAAAAGAGTTGAGAGAGGACAAAGGTATATCCCTAAGTTCTCTAGCCAAAAGTGCTCAATTATCAAAATCAACTCTATCACGTTTTGAAAATGGTGAGACACAAATAGGTATTGATAAATTTATTAAAGCTTTACAAACGTTGGAGGTTGGGGTAACTATCAATGAAGTATCCATTCTAGATTCAAAAGTTAAGGCTGGAACTTCTAATACTGATTTAGAGCAATTAACTTTACTGGAATCTTATCGAGATAATGAAGATATCATGAGAATTTTCAGTTTCCAAAAACAACAATCCTGTGATAGAATAGAAAGCAATGTTCTCAAAATATTGGCTAAACTTTTTATTTCAAATTTAGGGTTAAATATGAGGCTGCCTCAAGATGAGATTAACCTGGTAGTTACTTATCTGAATGGTGTGACACAGTACAATGATTTTTATTTCAAAGTCATCTGCTATTTTCAAGATATTTTACCTGAAGATGTTATTTTAAATAAGATTAGTAATATGACTAAAGAACAGTTACCTTATTCTAAATCACTGGTCAATTTATTGATAAAACAAGTCATTATAGCTTTGGAAAAAGATAGTGTTGATAAAGCTATAGTATTTGCTGATCTTGCTAATAAAGTTAGTCAA

SEQ ID NO: 8592 - protein, 220 aa, Streptococcus agalactiae; identical to SEQ ID NO: 3894

SEQ ID NO: 8593 - protein, 1478 aa, Streptococcus agalactiae
ATGTCAAATTGGGATACTAAGTTTTTGAAAAAAGGTTTTACTTTTGATGATGTTCTGCTTATTCCTGCTGAAAGCCATGTTTTACCAAATGAAGTTGATATGAAGACAAAGTTGGCTGATAATTTGACATTAAACATTCCAATCATTACAGCTGCAATGGATACAGTTACAGATAGTAAGATGGCTATTGCTATTGCACGTGCTGGTGGGCTTGGTATCATTCATAAAAATATGTCAATAGTTGATCAAGCAGAAGAAGTTCGTAAAGTTAAACGCTCAGAAAATGGTGTTATTATTGACCCATTCTTCTTGACACCAGATAATACTGTCTCTGAAGCTGAGGAATTGATGCAAAACTATCGCATTAGTGGAGTTCCTATTGTAGAGACACTCGAGAATCGTAAATTAGTTGGAATTATTACTAACCGTGATATGCGTTTCATTTCTGATTATAAACAACTAATCTCAGAGCACATGACAAGTCAAAATCTTGTAACAGCTCCTATTGGTACAGATCTTGAAACTGCAGAGCGTATTCTTCATGAGCATCGTATTGAAAAGCTACCTTTAGTAGATGATGAGGGACGTCTTTCAGGACTTATTACTATTAAGGATATCGAAAAAGTTATTGAATTTCCTAAGGCAGCAAAAGATGAATTTGGACGTCTCTTAGTTGCAGGTGCAGTAGGTGTAACCTCTGATACTTTTGAACGTGCAGAAGCTTTGTTGAAGCAGGTGCAGATGCTATTGTCATTGATACAGCACATGGACATTCAGCTGGTGTGCTCCGTAAAATTGCTGAAATTCGTGCTCACTTCCCTAATCGCACATTGATTGCGGGAAATATTGCTACAGCAGAAGGAGCGCGTGCACTTTATGATGCAGGTGTGGATGTCGTTAAAGTTGGTATTGGTCCAGGTTCAATTTGTACGACTCGTGTCGTTGCTGGGGTAGGTGTTCCTCAGATTACAGCTATTTACGATGCAGCGGCTGTTGCGCGTGAGTACGGTAAGACTATCATTGCTGATGGTGGTATTAAATATTCAGGTGATATTGTAAAAGCACTTGCAGCAGGTGGAAATGCAGTTATGCTAGGTTCAATGTTTGCAGGAACAGATGAAGCGCCAGGAGAAACAGAAATTTTCCAAGGGCGTAAGTTCAAGACATACCGTGGTATGGGCTCAATTGCAGCAATGAAAAAAGGTTCAAGCGATCGTTATTTCCAAGGTTCTGTAAACGAGGCTAACAAATTGGTTCCAGAAGGTATTGAAGGTCGTGTAGCATACAAAGGTTCAGTAGCCGATATTGTTTTCCAAATGCTTGGTGGCATTCGCTCTGGTATGGGATATGTAGGTGCAGCGAACATAAAAGAACTTCATGATAATGCTCAATTTGTTGAAATGTCAGGAGCTGGCTTGAAAGAAAGCCATCCCCATGATGTTCAAATTACAAATGAGGCACCAAATTATTCAGTACAC

SEQ ID NO: 8594 - protein, 493 aa, Streptococcus agalactiae; identical to SEQ ID NO: 3896

SEQ ID NO: 8595 - protein, 483 aa, Streptococcus agalactiae
ATGAATAAAAAAGAAACAAGACACCAATTAATTCGTTCCTTAGTCTCTGAGACTAAGGTGCGTACACAACATGAGTTAAGGGAATTACTAGAAAAAAATGGCGTTTCAGTGACGCAAGCAACATTATCTCGAGATATGAAGGAACTTAATTTAATTAAGGTTAACGAAAGCAGTGATAATGCTACAGAAACTTATTATGAGATTCATAGTATATCTCAGAAGCGTTGGGAAGAACGGTTACGTTTTTACATGGAAGATGCCCTAGTCATGCTGTTTCCAGTTCAAAACCAAATCGTTTTGAAGACACTACCTGGCTTAGCTCAATCTTTTGGCTCCATATTAGATTCGATTTTATTACCTGAGATCTTAGCAACTGTCTGTGGTGATGATACTTGTTTGATTATTTGTAATAATAGTGAAGAAGCTCAAAAGTGTTTTGAGAAATTAAGTCAGTATACGCCGCCTTTCTTCTTCTCAAAAAAA

SEQ ID NO: 8596 - protein, 161 aa, Streptococcus agalactiae
MNKKETRHQLIRSLVSETKVRTQHELRELLEKNGVSVTQATLSRDMKELNLIKVNESSDNATETYYEIHSISQKRWEERLRFYMEDALVMLFPVQNQIVLKTLPGLAQSFGSILDSILLPEILATVCGDDTCLIICNNSEEAQKCFEKLSQYTPPFFFSKK

SEQ ID NO: 8597 - protein, 678 aa, Streptococcus agalactiae
GTGATTACAAAAGAACAATATTTTTATTTCAGACAACTAGATGATTTTAAACACTTTACTATTGAACAATTTGACCATATTGTGAGCCACATTAAACATCGTACAGCTCTAAAAAATCATACCTTATTTTTTGAAGGTGATTACCGTGAAAAACTGTTTTTAATCCAGTCAGGACATGTAAAAATTGAACAATCAGACGCTTCTGGTTCTTTCATTTATACAGATTATGTTAGACAAGGTACGGTTTTTCCTTATGGAGGTCTCTTTTTGGATGATGATTACCATTTTTCAGCAGTGGCTATTACGGATATTGAGTATTTTTCTCTGCCAATGGCTTTATACGAAGAATACTCTCTTCAAAATATCAATCAAATGAAGCATCTTTGTCGGAAATATTCTAAGCTATTACGAGTTCATGAAATACGACTTCGTAATATGGTGACTTCAAGTGCCAGTATGAGAGTTATCCAATCGCTTGCAACTCTACTTTTGCAAGTTCCTACAGAAAGGGGACATTTACCTTTTCCTATTACAACGATTGAAATTGCCAATATGAGCGGAACTACTCGCGAGACAGTTAGTCATGTTTTAAAGGAATTACGCCAAAAAGATATCGTTGAAATGAAAGGAAAGAAGCTTCTCTATAATAATAAAAATTATTTCAAGAAATTCATTGAA

SEQ ID NO: 8598 - protein, 226 aa, Streptococcus agalactiae; identical to SEQ ID NO: 3900

SEQ ID NO: 8599 - protein, 702 aa, Streptococcus agalactiae
ATGACTAAATTTATTGTTGATTCATCGTACTGGAATTTGTTTCCAACTTCTAAAATTGGAGTAATCTTAATCAAAGATTATCACATGGACAGAAACCTTGAAACAGAACTTAAACAGTTACTGTCTGATAGTCATTCTTTAGCAAAAAAATATTTGCAAGAGAAAGAATTCAGTCAAAACAGAGTTATCCAAACTTATCGCAAAGCATATCAAACCTTTAAAACTAAAAAAGGTGCACGTTCAAGTATCGAAGCATTATTGAAGCGAGTTAATTCAGGAAACGAAATTACTAGTATAAATCCTCTAGTTGATATCTATAATGCCGCTAGCCTTAGGTTTGGATTACCTATTGGTGCTGAGGATAGTGATACATTTAGAGGTGATTTAAAACTAACTATTACCAATGGTGGTGATGAATTTTACTTGATTGGCGAAGATTTTAACAGACCAACTCTTTCAGGTGAGCTTGCCTATGTTGATGATGTTGGAGCAGTTTGCCGCTGTTTTAATTGGCGTGATGGAAAACGTACTATGATTACCGATAATACTCAGAATGCTTTTTTAGTTATCGAATTAATTGATAATGGAAGAGAAATTATTTTTAAAGAAGCGTTGGACTTTATCGCCACCAATACAAATCGTTTTCTAAAAGCTAAAACACAGACCATCATATTAGATAAAGAACACAGTGAAATAACGCTA

SEQ ID NO: 8600 - protein, 234 aa, Streptococcus agalactiae; identical to SEQ ID NO: 3902

SEQ ID NO: 8601 - protein, 1230 aa, Streptococcus agalactiae
ATGACTCAAACACATCCAATTCATGTTTTCTCAGAAATTGGAAAACTTAAAAAAGTTATGCTACACCGTCCAGGTAAAGAAATAGAAAATCTGATGCCTGATTATTTAGAGAGACTCTTGTTTGATGATATCCCATTTTTGGAAGATGCACAAAAAGAACACGATGCGTTTGCACAAGCACTTCGCAACGAAGGAGTCGAAGTACTTTACCTTGAAAATCTTGCTGCCGAGTCGTTAACAAACCAAGAAATTCGTGAACAGTTTATCGATGAGTACATTGGCGAAGCAAATGTTCGCGGTCGTGCTACTAAAAAAGCTATTCGAGAATTATTACTCAATATCAAAGATAATAAAGAACTTATCGAAAAAACTATGGCAGGTATCCAAAAGTCTGAGCTACCTGAAATCCCATCTTCTGAAAAAGGTCTAACTGATCTTGTCGAATCTAATTATCCATTTGCCATAGATCCGATGCCAAATCTTTACTTTACACGTGATCCATTTGCAACTATTGGGAATGGAGTTTCATTAAATCATATGTTCTCTGAAACACGTAATCGCGAAACTTTATACGGTAAATATATCTTTACACATCACCCAGAGTACGGTGGAAAAGTCCCTATGGTCTATGAACGTGAAGAAACAACTCGTATTGAAGGTGGAGATGAGCTTGTCCTTTCTAAAGATGTCCTTGCCGTTGGTATCTCTCAACGTACTGATGCTGCCTCTATTGAAAAACTCTTAGTCAATATTTTTAAACAAAATTTAGGTTTTAAAAAGGTTTTAGCATTTGAATTTGCAAATAATCGTAAATTTATGCACCTTGACACAGTCTTTACAATGGTTGACTATGACAAGTTTACAATTCACCCAGAAATTGAAGGCGATCTTCGCGTTTACTCTGTAACTTACGAAAACCAAGATCTTCATATTGAAGAAGAAAAAGGTGATTTGGCAGATCTTCTAGCGAAAAACCTAGGAGTTGAGAAAGTGGAATTGATTCGTTGTGGGGGTGACAACTTAGTCGCTGCTGGACGTGAACAATGGAATGATGGTTCAAATACATTAACTATAGCACCAGGTGTCGTTATCGTTTACAACAGAAATACAATCACAAATGCAATCTTAGAGTCCAAAGGATTGAAATTAATTAAGATTAATGGAAGTGAATTAGTTCGTGGGCGTGGTGGACCACGCTGCATGTCAATGCCATTTGAACGTGAAGACCTT

SEQ ID NO: 8602 - protein, 410 aa, Streptococcus agalactiae; identical to SEQ ID NO: 3904

SEQ ID NO: 8603 - protein, 429 aa, Streptococcus agalactiae
ATGAAGCTATTAGTCAATCACTTGCCTTACCAAAGAGCTGCAAGCCTATATATTCGCTTTTCTGTTTTCGTTATCGAAAGAAATATAAAAATGGAAGAAGAATTCGATGATAATGACGAGCAAGATACTATTTATGCTGTTCTTTATGATGGGAAACAGCCAGTTTCAACAGGACGCTTTCTTCCTGAAACTCAAACAGAAGCTCGTTTGACTCGAATTGCGACTTTAAAAGGTTATCGTGGTAACGGCTATGGTACCAAAATTATTATAGCACTAGAAAATTATGCAAAAGAAAATGGTTATCACTATCTAACTATACATGCTGAATTGACAGCAAAAGATTTCTACCAGACACTTGGGTATCAAGCTACTGGGAATATTTATATGGAAGACGGGGAAGCCTGTCAAACACTCGAAAAATATTTAATT

SEQ ID NO: 8604 - protein, 143 aa, Streptococcus agalactiae; identical to SEQ ID NO: 3906

SEQ ID NO: 8605 - protein, 1011 aa, Streptococcus agalactiae
ATGACACAAGTATTTCAAGGACGTAGTTTCTTAGCAGAAAAAGATTTTTCTCGTGAGGAATTTGAATATCTTATTGATTTTTCAGCTCATTTAAAAGACCTTAAAAAACGTGGTGTTCCTCATCATTATCTTGAAGGTAAAAATATTGCTCTCTTATTTGAAAAAACATCTACTCGTACTCGCGCAGCCTTTACAACTGCAGCAATTGACCTAGGCGCTCATCCGGAATACCTTGGTGCAAATGATATTCAACTTGGTAAAAAAGAATCAACAGAAGATACTGCTAAGGTTTTAGGACGTATGTTTGATGGTATTGAATTCCGTGGTTTTAGCCAAAGAATGGTTGAAGAGCTTGCTGAATTTTCTGGAGTACCTGTCTGGAATGGTTTAACAGATGAATGGCATCCAACACAAATGCTAGCTGACTACCTTACTATCAAAGAAAACTTCGGTAAACTTGAAGGTATTACTCTTGTTTACTGTGGTGACGGACGTAACAATGTTGCCAACTCGCTTTTAGTGGCTGGGACTTTGATGGGGGTCAATGTACACATCTTTTCTCCAAAAGAACTTTTCCCTGCTGAAGAGATTGTTAAATTGGCTGAAGAATATGCCAAAGAGTCCGGGGCTCACGTTCTCGTTACTGATAATGTAGACGAAGCTGTAAAGGGAGCAGATGTCTTTTACACTGATGTCTGGGTATCGATGGGAGAAGAAGATAAGTTCAAAGAACGCGTTGAACTTCTTCAACCATATCAAGTAAACATGGAACTGATTAAAAAAGCTAATAATGATAATCTTATCTTCTTACACTGCTTACCTGCATTCCATGATACAAATACCGTTTACGGCAAAGACGTCGCTGAAAAATTTGGCGTCAAGGAAATGGAAGTTACTGATGAAGTCTTCCGTAGCAAATATGCTCGTCATTTCGACCAAGCTGAAAATCGTATGCACACTATTAAAGCTGTAATGGCTGCAACCCTTGGAAATCTTTTCATTCCAAAAGTT

SEQ ID NO: 8606 - protein, 337 aa, Streptococcus agalactiae; identical to SEQ ID NO: 3908

SEQ ID NO: 8607 - protein, 1425 aa, Streptococcus agalactiae
ATGGAAAAAGAAAAAAAATTAGGTCTTTTACCACTAACAATGCTTGTCATTGGCTCTCTTATCGGTGGCGGAATCTTTGATTTAATGCAAAATATGAGTTCCAGAGCCGGTTTGGTACCAATGCTTATTGCTTGGGTAATTACTGCTATCGGGATGGGGACTTTCGTTTTAAGTTTTCAAAATTTATCTGAAAAAAGGCCGGACCTAACAGCTGGAATCTTTAGTTACGCTAAAGAGGGGTTTGGAAACTTTATGGGATTTAACTCTGCATGGGGTTATTGGTTATCAGCTTGGCTTGGAAATGTTGCCTACGCTGCACTCTTATTCAGTTCACTCGGTTATTTCTTTAAATTCTTTGGTAATGGAAATAATATCATCTCAATTATTGGAGCAAGTATAGTTATTTGGGTTGTCCATTTCTTAATTTTAAGAGGTGTTAATACAGCTGCATTTATTAATACCATAGTTACCTTTGCAAAATTAGTACCTGTTATTATTTTCTTAATTTCAGCGTTATTAGCTTTCAAATTTAACATTTTTAGTCTTGATATCTGGGGAAATGGATTACATCAATCAATTTTCAACCAAGTCAATTCAACTATGAAAACCGCTGTTTGGGTATTTATTGGTATTGAGGGCGCCGTTGTCTTCTCAGGTCGTGCTAAAAAACACTCTGATATTGGTAAAGCAAGTATCCTAGCATTATTCACTATGATTTCACTTTATGTATTGATTTCTGTTTTATCACTTGGTATCATGTCACGTCCAGAACTTGCAAACTTAAAAACACCAGCTATGGCTTACGTTCTAGAAAAGGCTGTTGGTCACTGGGGCGCTATCTTAGTTAACCTTGGTGTTATCATTTCAGTATTTGGCGCTATTCTTGCTTGGACTTTATTTGCAGCAGAATTACCATATCAAGCTGCTAAAGAAGGTGCTTTTCCTAAATTCTTTGCAAAAGAAAATAAAAACAAAGCTCCAATCAATTCACTCTTAGTCACTAATCTTTGTGTACAAGCATTCTTAATCACGTTCTTATTCACACAAAGTGCTTATCGTTTTGGTTTCGCATTAGCATCATCTGCTATCTTAATTCCTTATGCTTTTACAGCACTATATCAATTACAATTCACACTCCGTGAGGATAAGTCAACTCCAGGACATCAAAAGAATTTAATTATCGGTATCCTCGCTACAATCTATGCTGTTTACCTTATCTACGCTGGTGGTTTTGATTACTTACTTTTGACAATGATTGCTTACACTCTAGGTATGATTCTCTATATTAAAATGAGAAAAGATGACAAGCTTCCTATCTTTGTGGGATATGAAAAAATTAGTGCCATTGTCATTCTAGCGCTTTGCTTATTATGTATTATTGAAATTATGACTGGACAAATTGACATTGCTGCAATCCTAGCAGGT

SEQ ID NO: 8608 - protein, 475 aa, Streptococcus agalactiae; identical to SEQ ID NO: 3910

SEQ ID NO: 8609 - protein, 954 aa, Streptococcus agalactiae
TTGGTAAAAGAACATCAAAAAATCGTAGTTGCCTTAGGTGGCAACGCTATTCTATCAACAGATGCTTCAGCAAAAGCACAACAAGAAGCATTAATCAACACATCAAAATCACTGGTCAAACTGATTAAAGAAGGCCATGATGTCATTGTTACTCATGGAAATGGTCCCCAAGTTGGTAACTTATTGCTACAGCAAGCAGCTTCAGATTCTGAAAAGAATCCAGCAATGCCTTTGGATACTTGTGTTGCCATGACAGAAGGAAGTATTGGTTTTTGGTTACAAAATGCTCTTAACAATGAATTACAAGAACAAGGCATTGACAAAGAGGTTGCAACAGTGGTAACTCAAGTTATTGTAGATGAAAAAGATCAAGCTTTCACTAATCCAACAAAACCTATTGGCCCATTCTTATCTGAAGAAGATGCCAAGAAACAAGCCCAAGAAACAGGTTCAAAATTTAAAGAAGATGCTGGCCGTGGATGGCGTAAAGTCGTTCCTTCACCAAAACCGGTTGGTATCAAAGAAGCTTCTGTTATTAGACGGTTAGTGGACTCTGGTGTGGTTGTTATTAGCGCAGGTGGCGGAGGTGTACCAGTTATTGAAGATGCTAATACAAAGGCATTAAAAGGGGTTGAAGCTGTTATTGACAAAGACTTTGCCAGTCAAACTTTATCAGAACTTGTTGATGCTGACTTATTCATCGTCTTAACTGGCGTTGACAACGTTTTTGTTAATTTTAATAAACCTAATCAAGAAAAATTAGAAGAAGTTACTGTTTCACAAATGAAACAATATATCACTGAAAATCAATTTGCCCCTGGAAGTATGCTACCAAAGGTCGAAGCTGCGATTGCTTTTGTTGAAAATAAACCTGAATCACGAGCTATTATTACTTCACTTGAAAATATTGATAATGTTTTAGCCCAAAATGCAGGGACACAAATTGTTGCAAAT

SEQ ID NO: 8610 - protein, 318 aa, Streptococcus agalactiae; identical to SEQ ID NO: 3912

SEQ ID NO: 8611 - protein, 1023 aa, Streptococcus agalactiae
ATGACAAAACCAATTATCTTAACAGGTGATAGACCGACAGGAAAGTTGCATATTGGACATTATGTAGGTAGCTTAAAAAATAGAGTTCTACTTCAAAATGAGGGTAGCTATACTTTATTTGTCTTTTTAGCAGACCAACAAGCACTGACAGACCATGCTAAAGATCCGCAAACTATTGTTGAATCAATTGGTAATGTTGCACTTGATTATTTAGCTGTTGGGTTAGATCCAAACAAGTCGACTTTATTCATTCAAAGTCAAATTCCTGAGTTAGCAGAATTAAGTATGTATTATATGAACTTGGTTTCACTTGCACGTTTAGAACGTAATCCAACTGTAAAAACAGAAATTGCTCAAAAAGGTTTTGGTGAGTCTATTCCAGCAGGATTCTTAGTTTATCCTGTTGCACAAGCAGCTGATATAACCGCTTTTAAAGCTAACCTTGTTCCTGTAGGGACTGACCAAAAACCAATGATTGAACAAACACGTGAAATAGTTAGATCTTTCAATCATGCTTATAATTGTCAGGTTTTAGTTGAACCAGAGGGAATCTATCCAGAAAATGATGCAGCAGGTCGTCTGCCAGGGTTAGATGGTAATGCAAAAATGTCTAAGTCATTAAATAATGGAATCTTTTTAGCAGATGATATGGATACAGTTAAGAAAAAAGTTATGAGTATGTATACTGATCCAAACCACATTAAAGTAGAAGAACCAGGACAAATCGAAGGTAATATGGTATTTCATTACCTTGATGTTTTTGGAAGAGATGAAGACCAAAAAGAGATTACTGCTATGAAAGAACACTATCAAAAAGGTGGACTTGGGGATGTTAAAACAAAACGTTATCTACTTGATATCTTAGAGCGTGAATTATCACCTATTAGAGAACGTCGCCTCGAATATGCTAAAGATATGGGACAAGTTTATCAAATGTTACAAAAAGGTAGTGAGAAAGCTCAAGCTGTTGCAGCCTCTACTTTGGATGAGGTTAAATCAGCCATGAGTTTGAACTATTTTAAA

SEQ ID NO: 8612 - protein, 341 aa, Streptococcus agalactiae
MTKPIILTGDRPTGKLHIGHYVGSLKNRVLLQNEGSYTLFVFLADQQALTDHAKDPQTIVESIGNVALDYLAVGLDPNKSTLFIQSQIPELAELSMYYMNLVSLARLERNPTVKTEIAQKGFGESIPAGFLVYPVAQAADITAFKANLVPVGTDQKPMIEQTREIVRSFNHAYNCQVLVEPEGIYPENDAAGRLPGLDGNAKMSKSLNNGIFLADDMDTVKKKVMSMYTDPNHIKVEEPGQIEGNMVFHYLDVFGRDEDQKEITAMKEHYQKGGLGDVKTKRYLLDILERELSPIRERRLEYAKDMGQVYQMLQKGSEKAQAVAASTLDEVKSAMSLNYFK

SEQ ID NO: 8613 - protein, 689 aa, Streptococcus agalactiae
ATGCGCAGAGATGATATTATAATGCCACAAGATGGAAGAAAAATGGCTGTATTATTGGGTTTTATTGGTGGTTTTATTGACGTTTATAGTCACATGCAGTTTCACTCCCTTGTTGCAACACAGACAGGTAATATTATCTTGATGGTGGCAAATCTCGGACAAAATGATTTTCACTTTTTTATCACTAAATTATTTTCTATTTTCTTTTTTTCATTGGTTTTTTGGTTGGTATTGTGATTAAAGAACGTGCAGTAACAGCTTTTTGGCGTCTATATGCATTATGTCCCCTTTTACTTTCTACGATGTTTATTCCTTTTGTTGAAAATGTAAACCACAATATCTGGGTAGCTTTATTAGCCTTTAGCACAGGTATTTTAATGTTGACATTTTCAGGAAGTCGCATTGAATCGGAACCATATACTATCTTAATGACTTCTGGTAATTATCGGAAAATGCTACAATTTTGGTATGAGTATATTGTTAATCGTCAGAGAACGGCTATGCAAAAAAGACGAGCTATCAATTATTCACTGGTAGTTCTAGCATTTATTATTGGAGCATTGGTAGCTGCAATAGTTTACGATATTTTTGCATATAGAGCTATTTTAGGTGTGACGATAACGCTTTTAATTATTATGATTCATTATACGATTGAAATTATTAAGAACGATTTAACGTTACATAATGTT

SEQ ID NO: 8614 - protein, 230 aa, Streptococcus agalactiae
MRRDDIIMPQDGRKMAVLLGFIGGFIDVYSHMQFHSLVATQTGNIILMVANLGQNDFHFFITKLFSIFFFSIGFLVGIVIKERAVTAFWRLYALCPLLLSTMFIPFVENVNHNIWVALLAFSTGILMLTFSGSRIESEPYTILMTSGNYRKMLQFWYEYIVNRQRTAMQKRRAINYSLVVLAFIIGALVAAIVYDIFAYRAILGVTITLLIIMIHYTIEIIKNDLTLHNV

SEQ ID NO: 8615 - protein, 870 aa, Streptococcus agalactiae
ATGTCTAAAAAAATTAAGAATTTTATACTATTAAATATTGGATCTCTAATTGTTGCATTTGGTTTCAACGCTTTCTTTCTTCATAATCATATTGTCACGGGGGGGATTAGTGGTTTGGCAGTTAGTTTTCATGAAGTATTTGGTTGGGATTCTGCTTTTTTTATTATGATTATCAATATTCCATTGCTCCTTCTTTGCTACTTTGGCTTAGGTAAACAAACCTTTTTAAAAACTGTCTATGGTTCTTGGATTTTTCCTGTTTTTATTAAGTTAACACAAAGTGTACCAACTTTGACCCACAACCCACTCCTCGCAGCACTTTTTGGAGGTGTTATTGTAGGATGTGGTTTGGGGATTGTTTTTTGGAGCGACTCTTCAACTGGTGGAACGGGGATTATCATTCAATTCTTAGGAAAATATACTCCTATAAGCCTTGGACAAGGGGTTATATTGATTGATGGACTTGTTACAATTGTTGGTTTCCTAGCTTTTGACAGTGATACGGTTATGTTTTCTATTATTGGGTTGATAACTATTAGTTATATTATTAATGCTATCCAAACTGGATTTACAACCTTAAGCACTGTCTTAATCGTTTCTCAAGAGCACCAAAAAATTAAGACATATATCAATACTGTCGCAGATAGAGGAGTAACAGAAATTCCCGTTAAAGGGGGATATTCTGGAACTAATCAAATCATGCTTATGACAACTATTGCTGGTTATGAGTTTGCTAAATTACAAGAGGCAATAGCAGAAATTGACGAAACAGCCTTCATAACAGTAACTCCAACATCACAAGCTTCTGGACGTGGATTTAGTCTTCAAAAAAATCATGGACGTCTTGATGAAGACATTCTTATGCCAATG

SEQ ID NO: 8616 - protein, 290 aa, Streptococcus agalactiae; identical to SEQ ID NO: 2

SEQ ID NO: 8617 - protein, 1617 aa, Streptococcus agalactiae
TTGCTTACAGTTTCAGATGTTTCACTACGTTTTAGTGATCGCAAATTATTTGATGAAGTTAACATTAACTTTACAGCAGGAAATACCTATGGTCTTATCGGAGCAAATGGCGCTGGTAAATCAACTTTCCTTAAAATTTTAGCTGGTGATATTGAACCAACAACAGGACATATTGCACTTGGCCCAGATGAACGCCTTTCTGTACTTCGCCAAAATCATTTTGATTATGAAGATGAGCGCGTCATTGATGTCGTTATCATGGGTAATGAAACACTTTATAGTATCATGAAAGAAAAGGATGCTATCTACATGAAAGAAGATTTTTCTGATGAAGATGGTGTTCGCGCTGCGGAATTAGAAGGAGAATTTGCTGAACTCGGTGGATGGGAGGCTGAAAGTGAGGCTTCTCAATTACTCCAAAATCTAAATATTTCAGAAGAGCTTCATTATCAAAATATGAGTGAACTAGCTAATGGAGACAAAGTTAAAGTTCTCCTTGCAAAAGCTCTCTTTGGTAAACCAGATGTACTTCTCCTTGACGAGCCTACCAATGGACTTGATATCCAGTCTATTACTTGGTTAGAAGATTTCTTGATTGACTTTGAAAATACAGTTATTGTAGTTTCCCACGACCGTCATTTCTTGAATAAAGTATGTACACATATGGCTGACCTTGATTTTGGAAAAATTAAACTGTTCGTCGGTAACTATGATTTCTGGAAAGAATCATCAGAATTAGCAGCTCGTTTACAAGCTGATCGTAATGCTAAAGCAGAAGAAAAAATTAAACAACTTCAAGAATTCGTTGCACGATTTTCAGCGAATGCTTCAAAATCAAAACAAGCAACTTCTCGTAAAAAAATGCTTGATAAAATTGAACTTGAAGAGATTGTACCATCAAGCCGTAAATACCCATTCGTTAACTTTAAAGCCGAACGCGAAATGGGAAATGATTTATTGACCGTTGAAAATCTCTCTGTCACTATTGATGGGGAAAAAATCCTTGATAATATCAGTTTCATTCTTCGTCCTGGTGATAAAACTGCACTTATTGGACAAAATGATATCCAAACTACTGCACTTATTCGAGCATTGATGGGGGATATCGAATATGAAGGAACAATCAAATGGGGAGTAACAACTAGTCGTTCTTACCTTCCAAAAGACAATTCACGAGATTTTGCTTCTGGCGAGTCAATCTTAGAATGGCTTCGTCAATTTGCTAGTAAAGAAGAAGACGATAATACCTTCTTACGTGGTTTCCTAGGTCGTATGCTTTTCTCTGGAGATGAGGTTAACAAATCTGTTAATGTCTTATCTGGGGGTGAAAAAGTACGCGTTATGCTTTCGAAATTAATGCTATTAAAATCTAATGTTCTTGTTCTTGATGATCCAACAAACCACTTAGATTTGGAATCTATTTCAAGTCTCAACGATGGACTAAAAGATTTCAAAGAATCTATTATTTTTGCAAGTCATGACCACGAGTTTATTCAAACTTTAGCGAACCATATTATTGTTCTTTCTAAAAACGGAGTTATCGATCGTATCGATGAAACTTACGATGAATTTCTTGAAAATACCGAAGTACAAGCTAAGGTCGCTCAACTCTGGAAA

SEQ ID NO: 8618 - protein, 539 aa, Streptococcus agalactiae; identical to SEQ ID NO: 4

SEQ ID NO: 8619 - protein, 2577 aa, Streptococcus agalactiae
ATGACAATTAACCACTATAAGCTTCGTATACCTTACTATACAATAAGCTTTCTACTTCCCTTCATAATCATAGTCTGTATCCTCTTTACTAAGAATATTTATTGGGGAAGTCCAACAACCATATTAGCAAGCGATGGCTTTCATCAATATGTTATCTTTAATCAAGCATTAAGAAATATTCTTCATGGTTCAAACAGCTTATTCTATACCTTTACAAGCGGTTTAGGTTTAAATTTTTATGCTCTGAGTAGTTACTATTTGGGAAGTTTTTTATCCCCAATAGTTTATTTCTTTAACCTAAAAAATATGCCTGATGCTATCTACCTTTTAACAATATGTAAAATAGGGTTGATAGGTTTGTCAATGTTTGTCACTCTTTGTAAACGTCATTGTAAAGTTAATCGTGTCTTACTTTTAGTAATTTCTACTTGCTATAGCTTAATGAGTTTCTCAATTAGCCAAATTGAAATTAATATGTGGCTAGATGTATTTATTCTAATTCCCCTTGTTGTTTTAGGAGTTGATCAGCTACTATGGGAAAGAAAACCTATACTTTATTTCCTCTCTCTGACAGCCTTATTCATCCAAAACTATTATTTTGGTTTTATGACTGCCATCTTTACTAGCCTTTACTTCATCGTACAAATAACCCGTAATACTGATAGTAAGGTTGCATTTAAACAATTTCTTCATTTTACCTTTTTATCTCTTTTAGCTGGTATGACTAGTAGCATTATGATTTTGCCAACTTATTTTGATTTAACTACTCATGGTGAAAAGTTGACAAAGGTATCGAAGATGTTTACAGAAAATTCTTGGTACATGGATTTGTTTGCTAAAAATATGATTGGAGCCTATGATACAACAAAATTTGGCTCTATTCCTATGATTTATGTAGGTTTACTTCCTTTACTCCTTTCTTTACTTTACTTTACAATAAAGGAAGTTCCTCGAAGGACTAGATTAGCATATGGATTTTTAATAATATTTGTTATTGCTAGTTTTTATATAACACCTCTAGATTTATTTTGGCAAGGGATGCATGCTCCAAATATGTTTCTCCATCGCTACTCTTGGGTACTTTCAGTACTTATCTGTCTGCTAGCTGCTGAATGCCTTGAGTATTTAGACAACATTTCTTGGAAAAAGATTTTAGGGGTCAATTTAATTTTAGTAAGTGGTTTCATAATCACGTTTTTATTTAAAAAGCATTATCATTACCTTAATCTTGAATTACTTCTTTTAACCTTAACTTTCCTCTCAGCTTATATTATTCTAACTATTAGTTTTGTCAGTAAGCAAATCCCTAAATTAGTTTTTTATCCCTTTCTTATTGGTTTTGTTGTATTAGAGATGACATTAAACACCTTTTACCAACTAAATAGTCTTAACGATGAATGGATATTTCCATCTAGGCAAGGATATGCTAAATATAATCACAGCATTAGCAAACTTGTCAGAAAGACTGAGAGAAATAACTCTACATTCTTCCGTACAGAGCGCTGGTTAGGACAAACCGGCAACGACTCTATGAAATATAATTATAATGGTATTTCACAATTTTCATCTATTAGAAATCGTTCTTCAAGTCAAGTGCTTGATAGACTTGGCTTTAAATCAGATGGTACAAATTTAAATTTACGTTATCAAAATAATACTTTGATCGCAGATAGTCTATTTGGTGTGAAGTATAACCTTACAGAATATCCTTTTGATAAATTTGGTTTTATCAAAAAAGCTCAAGATAAACAAACCATTCTTTACAAAAATCAGTTTGCCAGTCAATTAGCTATACTAACGAATCAAGTATATCAAGATAAACCATTTACTGTGAATACTTTGGATAATCAGACAACTCTTTTAAATCAATTAAGTGGTTTGAAAGAGACGTATTTTGAGCATCTTATTCCAAATAGCGTTTCTGGGCAAACCACTCTTAATAAACAAGTATTTGTTAAAAAGAATAAACAAGGGAATACTGAAATTACCTATAACATAACTATCCCTAAAAACAGTCAGTTATATGTTAGTATGCCGTTTATAAATTTTAATAATGAGGAAAATAAAATTGTTCAAATCTCCGTTAATAATGGACCATTTGTACCTAATACTCTTGATAATGCTTATTCATTTTTTAATATTGGTTCCTTTGCTGAAAACAGTCGTATCAAAGTAAAATTTCAATTTCCACACAATGATCAAGTTTCTTTCCCAATTCCTCACTTTTATGGGCTCAAGTTAGAAGCTTATCAAAAAGCTATGACTGTTATTAATAAACGAAAAGTAAAAGTAAGAACTGATCACAATAAAGTTATTGCTAATTATACAAGTCCTAATAGAAGTTCTCTTTTCTTCACTATTCCCTATGATAGGGGTTGGAAAGCTTATCAAAATAATAAAGAAATAAAAATTTTCAAAGCTCAGAAAGGTTTTATGAAAATAAATATTCCTAAAGGAAAAGGCAAAGTAACATTAATTTTTATCCCTTACGGCTTTAAATTTGGGGTAGGCCTATCTATTACTGGAATAGTATTATTTACTGTCTATTATTTTAAATTTGGAAAAAATAAAATAGGA

SEQ ID NO: 8620 - protein, 859 aa, Streptococcus agalactiae; identical to SEQ ID NO: 6

SEQ ID NO: 8621 - protein, 476 aa, Streptococcus agalactiae
ATGAAATTAAAAATAATTACAGTTGGAAAATTGAAAGAGAAATACCTTAAAGAAGGTGTTGCAGAGTATCAGAAACGTCTGAATCGCTTTTCTAAATTGAGACAATTGAGCTAGCTGATGAAAAGACACCTGATAAAGCTAGTATATCTGAAAATCAAAGAATTTTAGATATAGAAGGGGAACGTATTTTGAGTAAAATAGGTGAGAGGGATTATGTCATTGGTTTAGCTATAGAAGGGAAACAATTGCCATCTGAATCATTTAGCCATCTAATCGATCAAAAAATGATATCCGGCTACTCTACTATTACTTTTGTTATTGGTGGTAGTTTGGGTTTATCTCAAAAAGTGAAAAAACGTGCTGATTATTTAATGAGTTTTGGACTGTTAACCTTACCTCATCAACTTATGAAATTAGTCTTGATGGAACAAATTTATCGTGCTTTTATGATTCGTCAAGGCACTCCTTACCACAAA

SEQ ID NO: 8622 - protein, 159 aa, Streptococcus agalactiae; identical to SEQ ID NO: 8

SEQ ID NO: 8623 - protein, 1227 aa, Streptococcus agalactiae
GTGAAAAAAAAATTAGTCTCATCACTTCTAAAGTGTTCTCTAATCATTATTGTTAGCTTTGCTGGTGGAGCATTTGCTAGTTTTGTCATGAATCATAATGACAATATTCCAAATGGTGGTGTCACTAAAACTAGTAAAGTAAATTATAATAACATAACGCCTACAACAAAAGCTGTTAAAAAGGTACAAAATAGTGTTGTTTCTGTTATCAATTATAAACAACAAGAGAGTCGTTCTGACCTATCAGACTTCTATAGTCATTTTTTTGGTAATCAGGGGGGCAACACTGATAAGGGCTTACAAGTTTACGGTGAAGGCTCTGGAGTCATCTATAAAAAAGATGGTAAAAATGCCTATGTTGTCACTAATAACCACGTCATTGATGGGGCTAAACAAATTGAAATTCAACTAGCTGATGGCTCAAAAGCAGTTGGGAAACTTGTTGGGTCAGATACCTACTCTGATTTAGCCGTCGTCAAAATTCCATCAGATAAGGTTTCAAATATTGCAGAATTTGCTGATTCATCAAAACTCAACATTGGTGAAACTGCTATAGCGATCGGAAGCCCTCTTGGAACTGAGTATGCAAATTCTGTAACTCAAGGTATTGTATCTAGTTTAAAAAGAACTGTAACAATGACTAATGAAGAAGGACAAACAGTTTCTACAAATGCTATCCAGACTGATGCTGCTATCAATCCTGGTAATTCAGGTGGAGCACTTATCAATATTGAAGGACAGGTTATTGGAATTAATTCTAGTAAAATTTCTTCTACATCAAATCAAACCTCAGGACAATCGTCAGGAAATAGCGTTGAAGGTATGGGATTTGCCATTCCTTCAAATGATGTTGTTAAGATTATCAATCAACTTGAGAGTAACGGACAAGTAGAGAGACCTGCTCTAGGTATTTCTATGGCTGGATTAAGTAATTTACCATCCGATGTTATTAGTAAACTGAAAATCCCAAGTAATGTTACTAATGGTATTGTAGTAGCATCTATCCAATCTGGCATGCCAGCTCAAGGCAAACTAAAGAAATACGATGTCATTACTAAAGTTGACGATAAAGAAGTAGTATCTCCAAGTGATTTACAAAGTTTACTCTATGGCCACCAGGTAGGGGATTCCATAACAGTAACCTTTTATCGTGGTGAAAATAAACAAACAGTCACTATAAAACTTACTAAAACTAGTAAAGATTTAGCTAAACAACGAGCAAATAAC

SEQ ID NO: 8624 - protein, 409 aa, Streptococcus agalactiae; identical to SEQ ID NO: 10

SEQ ID NO: 8625 - protein, 771 aa, Streptococcus agalactiae
ATGGAATATTTAGAAACGATCAACATCAATCATATTGCTCCAAATCCGTATCAACCTCGCCTAGAATTTAATACAAAAGAACTAGAAGAATTAGCCAACTCTATTAAAATTAATGGCCTTATCCAACCCATTATTGTAAGACCGTCAGCAGTCTTTGGTTACGAACTGGTAGCCGGAGAACGACGGCTAAGAGCCGCAAAGTTAGCTAAATTGGAAAGTATACCTGCAATTATAAAATCCTATAATAATGATGATAGTATGCAATTAGCTATTGTCGAAAATTTACAACGATCTAATTTGTCACCTATTGAAGAGGCTAAAGCCTACTCTCAACTTCTACAAAAGAAAAGTATGACACATGAAGAGTTAGCAAAATATATGGGAAAATCTCGTCCCTATATATCAAATACGATACGACTACTAAATTTACCGCCACTAATTACTTCAGCTATTGAAGAAGGAAAACTTTCCTCTGGTCATGCGCGTGCACTACTCAGTCTACCAGATGCTAGTCAACAGAAAGATTGGTATCAGAGAATCCTCACTGAAGATATTAGTGTAAGACGACTAGAGAAGTTATTAAAACAAGAAAAGAAAACAAATCATAAGTCACTTCAAAATAAAGATGTCTTTCTAAAACATCAAGAAAATGAGTTAGCTCAATTTCTAGGTAGCAAAGTGAAACTTACTATTAATAAAGATGGTGCTGGCAATATAAAGATTGCTTTCGCTAACCAAGAAGAATTAAACAGAATTATCAACACTCTAAAA

SEQ ID NO: 8626 - protein, 257 aa, Streptococcus agalactiae; identical to SEQ ID NO: 12

SEQ ID NO: 8627 - protein, 1359 aa, Streptococcus agalactiae
ATGACGGAAAACGAACAACTATTTTGGAATAGAGTACTAGAGCTATCTCGTTCTCAAATAGCACCAGCAGCTTATGAATTTTTTGTTCTAGAGGCTAGACTCCTCAAAATTGAACATCAAACTGCAGTTATTACTTTAGATAACATTGAAATGAAAAAGCTATTCTGGGAACAAAATTTGGGGCCTGTTATCCTAACAGCTGGTTTTGAAATTTTCAATGCTGAAATTACAGCTAACTATGTCTCAAACGATTTACATTTACAAGAAACTAGTTTTTCTAACTACCAGCAATCTAGCAATGAAGTAAATACTTTACCAATTAGAAAAATCGACTCTAACCTTAAAGAGAAATATACTTTTGCTAATTTTGTTCAAGGAGATGAAAATAGATGGGCTGTTTCAGCATCAATTGCTGTAGCTGATAGTCCTGGCACGACTTATAATCCTCTATTTATCTGGGGGGGACCTGGTCTAGGAAAGACGCATCTACTAAATGCTATTGGAAATCAAGTCTTAAGAGATAATCCAAACGCGAGGGTTTTATACATCACTGCTGAGAATTTTATTAATGAATTTGTCAGTCATATTCGTTTAGATTCGATGGAAGAATTAAAAGAAAAGTTTCGCAACTTAGACTTACTCCTGATTGATGATATTCAGTCGCTTGCTAAGAAAACCTTAGGGGGGACCCAAGAGGAGTTCTTCAATACTTTCAATGCTTTACATACAAACGATAAACAAATCGTATTGACCAGTGACCGAAATCCAAATCAATTAAATGATCTAGAAGAACGTCTAGTCACGCGCTTTAGTTGGGGACTCCCAGTAAATATCACACCACCTGATTTTGAAACACGAGTTGCTATTTTAACCAATAAAATTCAAGAATATCCTTATGATTTTCCTCAAGATACCATTGAATACTTAGCAGGAGAATTTGATTCCAACGTACGTGAATTAGAAGGAGCCTTGAAAAATATTAGTCTAGTTGCTGACTTTAAGCATGCTAAAACTATTACAGTAGATATAGCTGCAGAAGCTATCAGAGCACGTAAAAATGATGGTCCTATTGTTACTGTCATTCCTATAGAAGAAATTCAAATACAAGTTGGTAAATTCTATGGCGTAACTGTAAAAGAGATAAAAGCAACTAAAAGAACACAAGATATTGTCCTTGCAAGACAGGTAGCCATGTACTTAGCTCGTGAGATGACAGATAACAGTCTCCCAAAAATAGGTAAAGAATTTGGGGGACGAGATCACTCAACTGTTCTCCACGCTTATAATAAAATAAAAAATATGGTTGCTCAAGATGACAACTTACGAATTGAGATAGAAACTATCAAAAATAAAATCAGA

SEQ ID NO: 8628 - protein, 453 aa, Streptococcus agalactiae; identical to SEQ ID NO: 14

SEQ ID NO: 8629 - protein, 1134 aa, Streptococcus agalactiae
ATGATTCATTTTTCAATAAATAAAAATTTCTTCTTGCATGCTCTAACGGTAACCAAACGAGCTATTAGTCATAAAAATGCGATTCCAATCCTTTCAACTGTTAAAATAGAAGTGACTAGGGATGCTATCATTTTAACGGGGTCAAATGGACAAATTTCAATTGAAAATACTATTCCTGCTTCAAATGAAAATGCAGGTTTACTAGTAACGAATCCAGGCTCTATTTTGTTAGAAGCTGGTTTCTTTATTAATATTATTTCAAGTTTACCAGATGTAACTTTAGAATTTACAGAGATTGAACAACATCAAATTGTTCTTACTAGTGGAAAATCAGAGATTACTTTGAAAGGTAAGGATGTCGATCAATACCCTCGTCTGCAGGAAATGACAACAGATACTCCATTAACATTAGAAACTAAACTGTTAAAATCAATTATTAATGAAACTGCTTTTGCTGCTAGCCAACAAGAAAGCCGTCCAATCTTAACAGGTGTTCATTTGGTTATCAGTCAAAATAAATACTTTAAGGCTGTTGCGACAGATTCACACCGTATGAGTCAACGCACTTTCCAATTAGAGAAATCGGCTAATAATTTTGATTTGGTTGTTCCAAGTAAATCCCTTCGAGAATTTTCGGCTGTTTTTACAGATGATATTGAAACTGTAGAGGTTTTCTTCTCAGATAGTCAAATGTTATTTAGAAGTGAAAATATCAGCTTCTATACACGTTTGCTTGAAGGAAACTACCCTGATACTGATCGCCTCCTAACTAATCAGTTTGAAACCGAAATTATCTTTAATACAAATGCTTTACGCCATGCTATGGAACGTGCTTATTTAATTTCGAATGCAACTCAGAACGGTACTGTTCGTTTAGAAATTCAAAATGAGACAGTCTCAGCTCATGTAAACTCTCCAGAAGTTGGTAAAGTTAATGAGGAATTGGATACTGTTAGTCTTAAAGGTGATAGTTTAAATATTAGCTTTAATCCAACTTACCTAATTGAATCTTTAAAAGCAGTAAAAAGCGAAACAGTTACGATTCGATTTATTTCTCCAGTACGTCCATTTACTTTGACACCTGGTGAAGATACTGAAGATTTCATCCAATTAATAACTCCTGTTCGTACTAAC

SEQ ID NO: 8630 - protein, 378 aa, Streptococcus agalactiae; identical to SEQ ID NO: 16

SEQ ID NO: 8631 - protein, 348 aa, Streptococcus agalactiae
TTGGGTAGTTTTCTTATTCTAAGATATGCTATAATGATGAGTAATATGACTCTATATATAATAGCTAACCCCCATGCTGGTAATAAAAATGCCTCCACTATTGTTGGTAAAATTCAGGAGCTTTATCATACTGAAGATATTTCTGTGTTCTATACAGAACAGAAAGATGATGAAAAAAAACAAGTCATTAATATACTAAGGTCTTTTAAAGAAAGTGATCATCTAATGATTATAGGAGGAGATGGTACCTTATCAAAAGTAATGACTTATCTCCCCCAACATATTCCGTGCGCTTATTATCCTGTTGGTTCGGGAAATGATTTTGCCAGAGCTTTGAATACAACCACC

SEQ ID NO: 8632 - protein, 116 aa, Streptococcus agalactiae
MGSFLILRYAIMMSNMTLYIIANPHAGNKNASTIVGKIQELYHTEDISVFYTEQKDDEKKQVINILRSFKESDHLMIIGGDGTLSKVMTYLPQHIPCAYYPVGSGNDFARALNTTT

SEQ ID NO: 8633 - protein, 182 aa, Streptococcus agalactiae
ATGAATTTTTCATTTTTACCACAATATTGGTCCTATTTTAATTATGGTGTGATGGTAACCATTATGATTTCACATGTGTTGTTTTTTTTGGAACTATTATAGGTGTGTTAATTGCTTTAGTAAAGCGTACTAATTTACATTTTCTCACAATATTAGCTAATTTCTATGNNNNNTTAATTAAT

SEQ ID NO: 8634 - protein, 61 aa, Streptococcus agalactiae
  VARIANT 57, 58: Xaa = Any Amino Acid
MNFSFLPQYWSYFNYGVMVTIMISTCVVFFGTIIGVLIALVKRTNLHFLTILANFYXXLIN

SEQ ID NO: 8635 - protein, 227 aa, Streptococcus agalactiae
ATGGAATCACATTTAGTGAGAATCATCAATCGCCTCGAATTAATGGCGACTGATGGTGGTAATTTAAAACGTAATTTTGAACGTGAAGGTGTTGTTGTAGCAGAAGTATCTTTTAGTAATGACCCTGAAAACGGTCCTGTTTTCACATTACGTGATGTAGAAGCGCGTGAATCATATTCATTTGACAGCATTGACCTTATCGCAATGGAAATTTACGATTTATTATC

SEQ ID NO: 8636 - protein, 76 aa, Streptococcus agalactiae
  VARIANT 76: Xaa = Any Amino Acid
MESHLVRIINRLELMATDGGNLKRNFEREGVVVAEVSFSNDPENGPVFTLRDVEARESYSFDSIDLIAMEIYDLLX

SEQ ID NO: 8637 - protein, 179 aa, Streptococcus agalactiae
ATGATTATAGGGGGATTATATATGAAATTTTTTGAAGAAAATTATTCACAAGAAATACCTACTCGTATCAAAAATTTAAGAAAAAAATACAATATTACACAAAGCGAACTAGGCAATGCAGGTCAAGTTAGTCAAGTTGAAAGTGGTAAGCGACCATTACGAGTTCGATGGGTAGTTAT

SEQ ID NO: 8638 - protein, 60 aa, Streptococcus agalactiae
MIIGGLYMKFFEENYSQEIPTRIKNLRKKYNITQSELGNAGQVSQVESGKRPITSSMGSY

SEQ ID NO: 8639 - protein, 336 aa, Streptococcus agalactiae
ATGAAAAAAGATAGTATCTGTCAAGTGGATGTTATAAATCAACAAAATGTTACAACCGCAACGAACTACCTTGAAAAGGAAAAAGTCCAAAAATCACTTCGCATTTTATCAAAATTTACCGATAATAAACAGATAAATATCATCTTTTATCTCCTTGCCGTCGAAGAACTCTGTGTCTGCGATATAGCCTGTTTATTAAATCTCAGTATGGCATCTGCCTCCCACCATCTTCGTAAACTAGCCAATCAAAACATCTTGGACACTAGAAGAGAGGGGAAAATTATATATTATTTTATAAAAGATGAGGAAATCAGAGATTTTTTTAATCAACTAGGA

SEQ ID NO: 8640 - protein, 112 aa, Streptococcus agalactiae
MKKDSICQVDVINQQNVTTATNYLEKEKVQKSLRILSKFTDNKQINIIFYLLAVEELCVCDIACLLNLSMASASHHLRKLANQNILDTRREGKIIYYFIKDEEIRDFFNQLG

SEQ ID NO: 8641 - protein, 611 aa, Streptococcus agalactiae
ATGATTCAAAATGTTGTTACTTCAATAATCCTGTATTCTGGGACAGCCGTAGACTTACTTATTATCCTAATGTTATTTTTGCCAAAAGAAAAAGCAGAAAAGACATCATTAACATCTATTTAGGACAATTTCTAGGCTCTGTTAGTCTAATATTCCTAAGTTTGCTTTTTGCATTTGTCTTAAATTATATTCCTAGTAAAGAGATTTTAGGTTTACTCGGTTTGATTCCAATTTTCCTAGGCCTAAAAGTTTTGCTTTTAGGAGATTCTGATGGAGAAGCTATTGCAAAAGATGGTTTGCGAAAAGACAATAAAAACCTGATTTTTCTAGTCGCTATGATTACTTTTGCAAGTTGTGGCGCTGACAATATTGGTGTCTTTGTCCCATATTTTACCACCTTAAATTTAGCGAATTTGATAGTGACTTTACTTACTTTTCTAGTCATGATTTATCTCTTGGTTTTTTCTGCACAAAAATTAGCACAAGTCCCTTCTGTTGGAGAAACTTTGGAAAAATATAGCAGATGGTTTATTGCCGTTGTCTATTTAGGATTGGGGATGTATATCCTGATTGAAAACAACAGCTTTGACATGCTATGGGCTGTGTTAGGC

SEQ ID NO: 8642 - protein, 204 aa, Streptococcus agalactiae
MIQNVVTSIILYSGTAVDLLIILMLFFAKRKSRKDIINIYLGQFLGSVSLIFLSLLFAFVLNYIPSKEILGLLGLIPIFLGLKVLLLGDSDGEAIAKDGLRKDNKNLIFLVAMITFASCGADNIGVFVPYFTTLNLANLIVTLLTFLVMIYLLVFSAQKLAQVPSVGETLEKYSRWFIAVVYLGLGMYILIENNSFDMLWAVLG

SEQ ID NO: 8643 - protein, 147 aa, Streptococcus agalactiae
ATGCGCGTAAATATTACACTTGAACATAAAGAATCTGGTGAACGCTTGTACCTTACTTCAAAAAACAAACGTAACACTCCAGACCGTCTTCAATTGAAAAAATACTCACCAAAACTTCGTAAACACGTTGTTTTCACTGAGGTTAAG

SEQ ID NO: 8644 - protein, 49 aa, Streptococcus agalactiae; identical to SEQ ID NO: 3808

SEQ ID NO: 8645 - protein, 180 aa, Streptococcus agalactiae
ATGGCAGTACCTGCACGTCACACTTCAAAAGCGAAGAAAAACAAACGTCGTACACACTACAAATTGACAGCTCCATCTGTACAATTCGACGAAACTACTGGAGATTACTCACGTTCACACCGTGTATCACTCAAAGGATACTACAAAGGACGTAAAATCGCTAAAGCTAACGAAGCTAAA

SEQ ID NO: 8646 - protein, 60 aa, Streptococcus agalactiae; identical to SEQ ID NO: 3806

SEQ ID NO: 8647 - protein, 1491 aa, Streptococcus agalactiae
TTGGTTCCTCAAGACCCAACTGACGAGCCAGCTAGTGAGCTTCTTAAACGTATCAAAGCGGAAAAAGAAAACCTCATTGCTGATGGCAAAATCAAGCGAGATAAAAAAGAAACAGAGCTTTTTCGAGGTGCTGACGGGAAACCTTATGAGAAGTTATCAGACGGGACGATTAAGGAAGTGGAAGTGCCCTATGATATTCCAGCTAGTTGGGAATGGGTGAGGTTGCGAAATATATCTTCGTTGAGTTTTTTCCCTAATATATCTGGAGATAAAATTCCGAATTATAGTTGGGTTTTAGATATGGAAGATATAGAAAAAGAAACTGGAAGATTAGTTCGAAAAAACTATAAAACAGAAAAATCATCTTATAAAAGCAATAAAGTATATTTTTCTAAGGATACTGTTTTATATGCTAAGCTACGCCCCAACCTAAAGAAAGTTATCATTTCTGACGAAGATGGTTTTGCAACAACCGAACTTATTCCGATTAAAATTTTTGGGGGTATTTCAGCAGAGTATATGAGATACTGTATGATTTCTCCATCTTATTATTTCAACATCATCAAATCGGTTTATGGTGTTAAAATGCCAAGAGTAAATGCTACGTTTCTAAATTCAACTCTCCTCCCCCTCCCGCCTCTCTCTGAACAGAAACGGATTGTGGAGCAAATCGAACGTGCCTTGGAAAAGGTAGATGCATATTCCGAAAGTTACAATAAACTTCAAGAATTGGACAAATCCTTTCCAGATAAGTTGAAAAAATCTATTCTTCAATATGCGATGCAAGGTAAGTTGGTTCCTCAAGACCCTAACGATGAACCCGTTGAGGTTTTGCTTGAAAAAATCCAAGCTGAAAAGCAAAAACTCTATGAGGAAGGTAAACTCAAGAAGAAAGATTTGGCAGAAATAGTGGTGACAAAAGGAGATGATAACTCTCCTTATGGGAAGATACCCAAAAATTGGTCTTTTCTTACCATAAAAGATATTTTTTCAATAACCACAGGATTATCGTATAAGAAAACTGATCTAGCCATCACAAAAAATGGTGTCAGAATTATTCGTGGAGGAAATATCAACCCATTATCCTTTAAAATATTAGATAATGATTACTACATTGATCCAAAATTTATCACTTCAGAAACAGTCTATTTGAAACGAAATCAGCTATTAACACCTGTTTCAACATCTTTAGAACATATTGGAAAATTTGCTAGAATTGATAAAGATTATCCCAATACCGCTGCTGGTGGATTTGTATTTCAATTAACACCTTTTGTTTCATCAGATGTATTGTCAAAATATCTATTATTTAGCCTGTCATCACCAATCTTTTATGAACAATTGAAATCAATTACAAAGCTATCTGGACAGGCTTTATATAATATTCCTAAAACAAAATTAAACGAACTCCTTGTTCCCCTAGCTCCTGAAACAGAGCAAAAACGCATTAGTCAGAGAGTTGAGCAACTTTTTGAAAAAGTAAATCAACTT

SEQ ID NO: 8648 - protein, 497 aa, Streptococcus agalactiae
MVPQDPTDEPASELLKRIKAEKENLIADGKIKRDKKETELFRGADGKPYEKLSDGTIKEVEVPYDIPASWEWVRLRNISSLSFFPNISGDKIPNYSWVLDMEDIEKETGRLVRKNYKTEKSSYKSNKVYFSKDTVLYAKLRPNLKKVIISDEDGFATTELIPIKIFGGISAEYMRYCMISPSYYFNIIKSVYGVKMPRVNATFLNSTLLPLPPLSEQKRIVEQIERALEKVDAYSESYNKLQELDKSFPDKLKKSILQYAMQGKLVPQDPNDEPVEVLLEKIQAEKQKLYEEGKLKKKDLAEIVVTKGDDNSPYGKIPKNWSFLTIKDIFSITTGLSYKKTDLAITKNGVRIIRGGNINPLSFKILDNDYYIDPKFITSETVYLKRNQLLTPVSTSLEHIGKFARIDKDYPNTAAGGFVFQLTPFVSSDVLSKYLLFSLSSPIFYEQLKSITKLSGQALYNIPKTKLNELLVPLAPETEQKRISQRVEQLFEKVNQL

SEQ ID NO: 8649 - protein, 173 aa, Streptococcus agalactiae
ATGTTTTTACCACTAATTTCTACGGCTGGAAATTCAAAAGATGCTATAAAAGGCAAAACACTAAATAGCACCAGTATTTCAGAGTTATTGATACCTATTTCAATTATCGGGAAATGAAAAAAATTGTATCTAAAGTTGATTTACTTTTTCAAAAAGTTGCTCAACTCTCTGAC

SEQ ID NO: 8650 - protein, 58 aa, Streptococcus agalactiae
MFLPLISTAGNSKDAIKGKTLNSTSISELLIPISNYREMKKIVSKVDLLFQKVAQLSD

SEQ ID NO: 8651 - protein, 852 aa, Streptococcus agalactiae
TTGAATTCAAAACTTTCATTGAAATTGACTATTTTATCGATTTCTATCTTTTTGATGTCTCACTTAGCAATTGCTCCTGCAATTCCTAAATTGTATGCCTTTTACCATACTCAAAATCCTCATATTGGACTAGCTTCAGTAGAGAGTTTAGTTACTATTCCAGCTATGATGATTACTATTTTTGTTATTTTGAGTAATTTTGTAGTCACAAAACTTGGCAAAAAAAACACGGTCTTACTTGGTTTATGTTTAATCTTAATATCTGGGTTTATCTCATTTTTTACAAGTAATTTTTCACTTGCGATGGCTAGTCGACTACTTTTGGGTATTGGTATTGGTCTCTATAATTCGCTATCAATTAGTATCATAACGGATTTATATGAGGCTGATGAGAGAGCCAGTATGATTGGTCTTAGAACAGCATCACTTAATATCGGTAAAGCCTTAACTACATTTATTGTTGGATTGGTTTTAGCTATTGGTGTGAATTATATTTATTTGGTTTACCTTCTGGTTATTCCTGTTTTCTTTTTCTTTTGGAAAAATGTTCCAGAGGTTGAAAATCAAACACATACCCTTAAAGCTAGTACAACATTTGATACTAAAGCGGCTTTGTTGATGTTCATCACGTTCTTAGTAGGTATTGCTTATATAGGAGCAACTGTCAAAATTCCAACCTTACTAGTGACAAAATATCACTACGCGACGAGCTTCTCTAGTAATATGTTAACTCTCCTTGCTTTTAGTGGTATTTTAGTTGGATCTATATTTGGAAAATTAGTTAAAGTATTCCAAGAGAAGACGCTATTAATCATGATTCTAGCTATGGGAATTTGTGCTATTTGCTTTAGC

SEQ ID NO: 8652 - protein, 285 aa, Streptococcus agalactiae
MNSKLSLKLTILSISIFLMSHLAIAPAIPKLYAFYHTQNPHIGLASVESLVTIPAMMITIFVILSNFVVTKLGKKNTVLLGLCLILISGFISFFTSNFSLAMASRLLLGIGIGLYNSLSISIITDLYEADERASMIGLRTASLNIGKALTTFIVGLVLAIGVNYIYLVYLLVIPVFFFFWKNVPEVENQTHTLKASTTFDTKAALLMFITFLVGIAYIGATVKIPTLLVTKYHYATSFSSNMLTLLAFSGILVGSIFGKLVKVFQEKTLLIMILAMGIVCAICFS

SEQ ID NO: 8653 - protein, 717 aa, Streptococcus agalactiae
ATGCGTTTAGATAAATTATTAGGTCAGGCAGGATTTGGGTCTAGAAATCAGGTTAAGAAATTAATTCGTTCTAGGCAAGTTTCTGTAGATGGTCAAATTGTTACAAAGGATAATGTTATTGTAGATAGTGGTCTACAATCGATTTTTGTAGGAAAAGAGAGAGTCTGCCTAAAAGAAAGTTCTTATTACCTTCTTTATAAGCCATCAGGAGTTGTTTCAGCAGTTAGAGATTCAGAACATAAAACAGTCATAGACTTAATTAGCGAAAAAGATAGGGTGGAGGGATTGTATCCGATTGGTCGTCTAGATCGTGATACGGAAGGGCTTTTAATAATCACGAATAATGGTCCACTAGGTTACCGAATGTTACATCCAAAACACCACGTTGCAAAAACGTATTATGTTGAAGTAAATGGTTTCTTGGAAAGAGATGCTATTACCTTTTTTGAAGAAGGAGTTGTATTTGACGATGGAACAAAGTGTAAACCAGCTGAATTAACAATTGATACGGCTAATAATGACAAAAGTACCGCAAGAATAACTATCACAGAAGGGAAATTTCACCAAGTAAAAAAGATGTTTCTTGCATATGGCGTTAAAGTTATATACTTGAGGCGTATTTCTTTTGGTGACTTGAGGCTTGATATGAATTTGAAACCAGGTCAGTATCGTAGATTGAGAGATTCAGAGGCAGCTATCTTAAAAAGGTATTTAGAT

SEQ ID NO: 8654 - protein, 239 aa, Streptococcus agalactiae
MRLDKLLGQAGFGSRNQVKKLIRSRQVSVDGQIVTKDNVIVDSGLQSIFVGKERVCLKESSYYLLYKPSGVVSAVRDSEHKTVIDLISEKDRVEGLYPIGRLDRDTEGLLIITNNGPLGYRMLHPKHHVAKTYYVEVNGFLERDAITFFEEGVVFDDGTKCKPAELTIDTANNDKSTARITITEGKFHQVKKMFLAYGVKVIYLRRISFGDLRLDMNLKPGQYRRLRDSEAAILKRYLD

SEQ ID NO: 8655 - protein, 438 aa, Streptococcus agalactiae
ATGGAGAATCCTCTTCAAAAAGCACGAATACTTGTTAATCAACTTGAAAAGTATTTAGATCGTTATGCAAAAGAGTATGATGTTGAACATTTAGCGGGTCCACAAGGACACTTAGTGATGCATCTCTATAAACATCCTGACAAGGATATGTCTATAAAAGATGCTGAAGAAATTTTACACATCTCTAAGTCTGTAGCTTCTAATTTGGTAAAACGGATGGAAAAAAATGGATTTATTGCGATTGTTCCATCTAAGACAGATAAGCGTGTGAAATACCTTTATTTGACTCATCTAGGTAAACAAAAGGCTACACAATTTGAAATTTTCTTAGAAAAATTGCACAGTACCATGTTAGCAGGTATTACTAAAGAAGAGATACGTACTACCAAAAAGGTTATTAGAACATTAGCTAAAAATATGGCGATGGAAGATTTTGAT

SEQ ID NO: 8656 - protein, 146 aa, Streptococcus agalactiae
MENPLQKARILVNQLEKYLDRYAKEYDVEHLAGPQGHLVMHLYKHPDKDMSIKDAEEILHISKSVASNLVKRMEKNGFIAIVPSKTDKRVKYLYLTHLGKQKATQFEIFLEKLHSTMLAGITKEEIRTTKKVIRTLAKNMAMEDFD

SEQ ID NO: 8657 - protein, 1815 aa, Streptococcus agalactiae
ATGTTTAATATTTTCAAGCGACTCAATGGTAAAGAATGGTTGATGATTGTGGCGAGTACTATATTAGTGTGTCTAGCGGTTTGGATGGACCTAAAGACTCCAGAATATATGTCTGATATCACACGTATGTTGCAAACTAAAGGTACAAAGTTAGAGGCTCTTTGGGATCCTGGACTAAAAATGCTTGCCTTTTCATTTGGTAGTTTTTTAGTAGCAGTAATGGTAGGTTTTTTAGGTGCTAGGACAGCAGCTAGTTTTACTAGTCGATTACGTTCAGATATTTTTAACCATGTGATGGATTATTCTGATGCAGAAATTAAGCGATTTTCTATCCCCTCTCTATTAACGCGCACAACTAACGACTTGACTCAGCTACAGATCCTTATTGTAATGGGAATGCAGGTTGTTACCCGTGGACCAATTATGGCAATATGGGCTTTGACTAAAATTTGGGGTAAAAGCGATCAATGGACTGGGGCAGTTGGAGTAGCGGTTATTATCGTTATGATATTACTTAGCGTTCTACTCTTACTCGCTTTTCCGAGACAACGTCAAATCCAAGGTTTTACAGATGCGCTTAATGCAACTACTAGAGAGGCACTCTCTGGTGTTAGAGTTATTCGTGCCTACAATGCTGAAAAGTATCAAACAGATAAGTTCAAACGTGAAAATGACGATTTAACAAAATTGAACCTTTTTGTTTATAGATTGATGTCGCTTATGAATCCTGTGATGACAGTGGTTTCATCTGGATTGACTTTAGCTATTTATTGGATTGGCTCTTATTTGATTAATGATATCTCTGTGCCTAAAGTTACAGGAACAAGTGTATCTGTATTGGCTGCTAAATCAGCTATCACTGATCGAGTGGATCTTTTTTCAAACATGGTTGTTTTTTCATCTTATGCTATGCAAGTTGTTATGGGATTTATGATGATGGTAGCTATTTTTATCATCATGCCTCGTGCTTTAGTATCGGCTAGACGTATTAATGAGGTACTAACTTTAGCCCCAACAGTAACTTTTAAAGAAAATAGTCATATTCAAAGTGCACAAAAAGGTCAAATTGAGTTTCAAGATGTGTCATTTCATTATAGTAAAGATTCTGAAGCGGTTATTGAACATGTATCTTTCAAAGCAGATACTGGTCAGACAGTGGCATTTATTGGGTCTACAGGTTCTGGAAAATCCACTTTAGTCAATTTAGTTCCACGTTTTTATGACGCCACAGAGGGGGCAATTAAACTTGATGGCATTGATATAAAGGAATACTCTCACAATGATTTGAATAATAAAATTGGCTATATTCCACAGAAAGCTGTTCTCTTTAGTGGGACAGTACGTTCTAATATGATTTTGGGAGAGAGTGGCAGGGAGGAACTTAGTGATGAAGAAATTTGGCAAGCACTCGAATTAGCGCAAGCTAAAGAATTTATCGAGGCTAAAGAAAAAGGATTAGATACAGAAGTCGCTCAAGGTGGTAGTAACTTTTCAGGAGGACAAAAACAACGCTTGGCAATTGCACGTGCTTTAGCACGTCACCCTGAAATTCTCATTTTTGATGACTCATTTTCAGCGTTAGATTATAAAACAGATCATATTTTACGCCATGAGGTGAAAGAAAAAACAGCTGCTATGACGAAATTAATTGTCGCTCAACGCATTTCAACTATCATGGATGCTGATCTCATTTTAGTGCTAGATCAAGGTAAAGTTGTTGGGCAAGGAACACATAAGGAATTGTTATCAAATAATGAAGTGTATCAAGAGATAGCTTATTCTCAATTGTCTAAGGAGGAATTGGAAAATGAAAAC

SEQ ID NO: 8658 - protein, 605 aa, Streptococcus agalactiae
MFNIFKRLNGKEWLMIVASTILVCLAVWMDLKTPEYMSDITRMLQTKGTKLEALWDPGLKMLAFSFGSFLVAVMVGFLGARTAASFTSRLRSDIFNHVMDYSDAEIKRFSIPSLLTRTTNDLTQLQILIVMGMQVVTRGPIMAIWALTKIWGKSDQWTGAVGVAVIIVMILLSVLLLLAFPRQRQIQGFTDALNATTREALSGVRVIRAYNAEKYQTDKFKRENDDLTKLNLFVYRLMSLMNPVMTVVSSGLTLAIYWIGSYLINDISVPKVTGTSVSVLAAKSAITDRVDLFSNMVVFSSYAMQVVMGFMMMVAIFIIMPRALVSARRINEVLTLAPTVTFKENSHIQSAQKGQIEFQDVSFHYSKDSEAVIEHVSFKADTGQTVAFIGSTGSGKSTLVNLVPRFYDATEGAIKLDGIDIKEYSHNDLNNKIGYIPQKAVLFSGTVRSNMILGESGREELSDEEIWQALELAQAKEFIEAKEKGLDTEVAQGGSNFSGGQKQRLAIARALARHPEILIFDDSFSALDYKTDHILRHEVKEKTAAMTKLIVAQRISTIMDADLILVLDQGKVVGQGTHKELLSNNEVYQEIAYSQLSKEELENEN

SEQ ID NO: 8659 - protein, 1752 aa, Streptococcus agalactiae
ATGAAAACTAAATCACAAAAAACGTCTTTTTTCTCTAATTTGTCTCCGTACCTCAAAGGTTACAAACTTCTTTTTGCGTTAGCAATTGTGTTAGCAACTTTATCAAGCTTGACAACAGTTATAGGACCAGACCGTCTTAAAGAGATGACGGATCTTATGGTAAAAGGCTTGGCTGGTAATATTGACTTAGCCAAAATCGGTCATATTGCAGGGCAATTGGCAGTATTATATGTTTTAGGTGCATTAGTATCCTATCTAGCAAGTTTTATTGTAACGACTATTATTCAAAAATTTGCTCAAGGCATGCGCAATGCTATTGCTGATAAAATCAATAAAATACCTTTGAGTTATTTTGATAGCCATACTCAAGGTGATACTTTATCTCGTGTTACAAATGATGTGGATTTGATGACACAGTCTTTTAACCAAAGTTTAGTTACTATGGTTGCATCTACAGTATTATTGATTGGTTCATTAATTATGATGTTCAAAACAGATTGGCATTTAGCAACAACGGCGATTATATCGGTATTTTCAGGATTCGCTCTTTCTTCAATCATTATGGTGAAGAGTCAGCCTTTATTTAAAAAGCAACAGATGAATTTGGCTAATATATCTGGATATGTAGAAGAAATTTACTCAGGACATAACATTGTTACTAGTCATAACGCAAGACAGCAGGCTAAGTCAGATTTTCAACTATTAAATGATAAACTTCACAGTTCCATGTGGAAATCACAATTTTTCTCTGGAATTATGATGCCTCTGATGCAGTTTATTGGTAATTTTGGTTATGTGATGGTGTGTGTGGTTGGTGCCATGTTAGCTATCAAAGGAACAATTACTATGGGTACAATTGTTGCTTTTATGACCTATGTTCGTATTTTTACACAGCCTATTGGTCAGATTGCTCAAGGAATTACACAATTACAGTCTGCTAGTGCAGCCATGGGACGTGTTTTTGAATTTTTAAATGAAACAAATATGCAAGAGGATAAGCACAAAGTGTTAAATCTTCCTAAGTTTAAGGGGTATGTGTCCTTTGAACATGTCAAGTTTGGTTATAGTGATAACAAGACTATTATTCATGACTTTACTTCGGAGGCACAGCCTGGTCAGAAAGTTGCTATTGTAGGACCAACTGGCGCAGGTAAAACGACAATTGTTAATTTATTGATGCGTTTTTATGATGTTAATTCAGGTAGTATTTCCATAGATGACATCAATATCCAAGACATGAAACGTAGTCAAGTTCATGATGCTTTCTCGATGGTTCTTCAAGATATATGGTTGTTTGAGGGAACTATTAAAGAAAATTTGATTTTTAATCAGACGACAATCAGTGACGATGAGGTTCAAGAAGCTGCTAAGGCAGTCGGTGTACATCATTTTATAATGACACTACCTAAAGGGTATGATATTGTCCTTGATGACGCTGTGACATTGTCAGTTGGACAAAAGCAATTATTAACCATTGCTCGAGCTCTTTTGAAAAATTCTCCCTTACTTATCTTAGATGAAGCAACTTCATCTGTTGATACACGTACAGAAGAGTTAATTCAAAAAGCTATGGACAAACTTATGGAAGGAAGAACATCATTTGTTATCGCACATCGTTTATCAACGATTAAAAACGCAGATTTGATTTTGGTCATGAAAGATGGGAATATCATTGAGCAAGGCAGTCATGATGTTTTGATGTCTCAAAGTGGTTTTTATGCTGATCTGTATAATTCTCAATTCGAATCAGCT

SEQ ID NO: 8660 - protein, 584 aa, Streptococcus agalactiae
MKTKSQKTSFFSNLSPYLKGYKLLFALAIVLATLSSLTTVIGPDRLKEMTDLMVKGLAGNIDLAKIGHIAGQLAVLYVLGALVSYLASFIVTTIIQKFAQGMRNAIADKINKIPLSYFDSHTQGDTLSRVTNDVDLMTQSFNQSLVTMVASTVLLIGSLIMMFKTDWHLATTAIISVFSGFALSSIIMVKSQPLFKKQQMNLANISGYVEEIYSGHNIVTSHNARQQAKSDFQLLNDKLHSSMWKSQFFSGIMMPLMQFIGNFGYVMVCVVGAMLAIKGTITMGTIVAFMTYVRIFTQPIGQIAQGITQLQSASAAMGRVFEFLNETNMQEDKHKVLNLPKFKGYVSFEHVKFGYSDNKTIIHDFTSEAQPGQKVAIVGPTGAGKTTIVNLLMRFYDVNSGSISIDDINIQDMKRSQVHDAFSMVLQDIWLFEGTIKENLIFNQTTISDDEVQEAAKAVGVHHFIMTLPKGYDIVLDDAVTLSVGQKQLLTIARALLKNSPLLILDEATSSVDTRTEELIQKAMDKLMEGRTSFVIAHRLSTIKNADLILVMKDGNIIEQGSHDVLMSQSGFYADLYNSQFESA

SEQ ID NO: 8661 - protein, 624 aa, Streptococcus agalactiae
ATGGAAACAAATATTTATGGAGATTATGGTCGATATCTACCATTAATTTTAGAAGATTTCAGCCAGCGTATACAATTAGAAAATGATAAAGCTAAGGTTGAAACAGGCTATAAATTGTACGAACATATCATTGGTCGTATTAAGACATCAGATAGTATGATAGAGAAATGTCGTCGTAAACAGTTACCTGTAACAGTAGATTCTGCACTAAAAGCTATTAGAGATAGTATTGGAGTCCGTATTATTTGTGGTTTTGTTAACGATATTTATCAAATTGTAGAACGTATTAAGTCATTTGATGATTGTCGTATTGTAGTTGAAAAAGACTATATCCAGCATGTTAAGCCAAATGGGTATCGCTCTTACCATGTGATTTTAGAAATTGATACTCCCTATCCAGACTGTTTGGGTAATTCAGAAGGTAAATATTACATTGAGATTCAGTTACGTACAATTGCGCAAGATTCTTGGGCTAGTTTAGAACATCAGATGAAATACAAGCATGATATTGAAAATCCCGAACGAATTGTAAGAGAATTAAAACGTTGTGCTGATGAAATGGCATCTGTTGATTTAACGATGCAAACGATTCGTCAATTGATAGAGAGTGGAACAAAGAAGGAA

SEQ ID NO: 8662 - protein, 208 aa, Streptococcus agalactiae
METNIYGDYGRYLPLILEDFSQRIQLENDKAKVETGYKLYEHIIGRIKTSDSMIEKCRRKQLPVTVDSALKAIRDSIGVRIICGFVNDIYQIVERIKSFDDCRIVVEKDYIQHVKPNGYRSYHVILEIDTPYPDCLGNSEGKYYIEIQLRTIAQDSWASLEHQMKYKHDIENPERIVRELKRCADEMASVDLTMQTIRQLIESGTKKE

SEQ ID NO: 8663 - protein, 661 aa, Streptococcus agalactiae
ATGAGAGTATTAATTGCAGAAGATGAAGAACAGATGTCACGTGTCCTTAGTACGGCAATTAGTCACCAAGGTTATGTTGTTGATGTCGCCTACGATGGTCAGACTGCTATTGATTTAGCTAATCAAAATGCATATGATGTCATGGTTATGGATGTCATGATGCCTGTTAAAACAGGTGTTGAGGCTGTCAAAGAAATTAGACAATCAGGAAATAAATCTCACATTATTATGCTAACAGCCATGGCAGAAATTGATGATAGAGTAACAGGTCTAGATGCTGGTGCAGATGATTATTTAACAAAACCCTTCTCTCTAAAAGAATTATTAGCAAGGCTTCGCTCTATGTCCCGAAGATTGGAAGATTTCACACCTAATGTATTGTCATTGGGAAGAGTAACCTTATCAGTCGGTGAACAAGAGTTGCAATGTGAAAACACTATTCGTCTAGCGGGTAAAGAAGCTAAAATGTTAGCATTTTTCATGTGAACCATGATAAAGAATATCTACACAACAACTTTTCGAACATGTCTGGGGAGCAGATAAGGACCAAGAAGATGTAGATGAGGGATACGTCTTTATCTATGTTTCTTATTTGAGACAAAAATTGCAGGCAATTAGTGCTAACTTTGGAGATTATTGGTCAAGAAGGTANNNNNTTAAT

SEQ ID NO: 8664 - protein, 221 aa, Streptococcus agalactiae
  VARIANT 162, 218, 219, 220: Xaa = Any Amino Acid
MRVLIAEDEEQMSRVLSTAISHQGYVVDVAYDGQTAIDLANQNAYDVMVMDVMMPVKTGVEAVKEIRQSGNKSHIIMLTAMAEIDDRVTGLDAGADDYLTKPFSLKELLARLRSMSRRLEDFTPNVLSLGRVTLSVGEQELQCENTIRLAGKEAKMLAFFMXNHDKELSTQQLFEHVWGADKDQEDVDEGYVFIYVSYLRQKLQAISANFGDYWSRRXXXN

SEQ ID NO: 8665 - protein, 138 aa, Streptococcus agalactiae
ATGCGCATTTTGCTTGACAAATATATCTTTTATGTGTATAATATAAGTATAGAAAGTGAGGTAACAATCGTTCCAATGCACAATAAAGACCTTGGTAAGGGTCTTGAAGATACTATCTTAAAACAAGCGGGTTTGAAA

SEQ ID NO: 8666 - protein, 46 aa, Streptococcus agalactiae
MRILLDKYIFYVYNISIESEVTIVPMHNKDLGKGLEDTILKQAGLK

SEQ ID NO: 8667 - protein, 375 aa, Streptococcus agalactiae
ATGTTAGTTTATCCAGCTATATTCACACAAGACTCAGATTATATCATGGTTACATTTCCAGATGTCCCTGAAGCAATCACTCAAGGTGAAGACTTTCAAGAAGCTTACGAAATGGCTGTCGAAGTCTTAGGTTTTGCCCTTGAGGATTATACTGACTATCCAAAGGCGAGCTCCGTTTCTGATTTAAAAGAACAGTATCTTGGTTCTGATATTGCTTTAATTGGCATTGATATGATTGCCTACATGAAAAAATATCACTCTAAGAAGGTACGCAAAAACGTGACTATTCCTGAGTGGTTGAACAACGCAGCCGAAGATAAAAACCTCAACTTTTCTCAAGTCCTTACTGAAGCACTTGAATTAAAATTACAAGCA

SEQ ID NO: 8668 - protein, 125 aa, Streptococcus agalactiae
MLVYPAIFTQDSDYIMVTFPDVPEAITQGEDFQEAYEMAVEVLGFALEDYTDYPKASSVSDLKEQYLGSDIALIGIDMIAYMKKYHSKKVRKNVTIPEWLNNAAEDKNLNFSQVLTEALELKLQA

SEQ ID NO: 8669 - protein, 213 aa, Streptococcus agalactiae
GTGATTATTGCGCCCATTTTAGGTTTGCCAGTTATTTTAGTTGCTGCTTTAGGCTATACTAGCGTTTTTGGGAGTGCAACGAATACTCTGTTAGGTCCTATCTTAATAGGTGGCGAAGTCTTTGGCTTTGCCAACACTCCTTATTTTGTTATTGTATGTCTTGTTGCTTACTCCATATCACATGCTCATACGATTTATAGTGCTCAATCTAGA

SEQ ID NO: 8670 - protein, 71 aa, Streptococcus agalactiae
MIIAPILGLPVILVAALGYTSVFGSATNTLLGPILIGGEVFGFANTPYFVIVCLVAYSISHAHTIYSAQSR

SEQ ID NO: 8671 - protein, 381 aa, Streptococcus agalactiae
TTGCTTCCAATTCATTGTGCTAAGAAACCTTATGAGAAGTTGGCAGATGGAACTATCCAAGAAGTTGAAGTACCATATGAGATACCAGAGAGTTGGAACTGGGTGAAATTAAGAAATATTGGTAGTATTACCTCTGGAGGCACGCCAAAATCTTCTGAACCTTCCTACTATGGTGGGAATATCACTTGGATAACTCCAGCAGATATGGGAAAACAGCAAAATAATAAGTTTTTTGCTAAATCATCGAAAAAAATTACTGAATTAGGTTTACAAAAATCTTCTGCTCAACTAATTTCAAAAAACTCTATTGTTTATTCTAGTCGAGCTCCAATCGGACATATAAATATTGTTACTGAAGACTACACTACAAATCAAGGTTGG

SEQ ID NO: 8672 - protein, 127 aa, Streptococcus agalactiae
MLPIHCAKKPYEKLADGTIQEVEVPYEIPESWNWVKLRNIGSITSGGTPKSSEPSYYGGNITWITPADMGKQQNNKFFAKSSKKITELGLQKSSAQLISKNSIVYSSRAPIGHINIVTEDYTTNQGW

SEQ ID NO: 8673 - protein, 1431 aa, Streptococcus agalactiae
ATGAATCAAACCCTATCCCACTACCAGTTCTCACCAGAGACTCAATACTTGGACAGGAAATCTGCACGTAAAAAGCCGTCTGAACTTCTTAAACACCTGATTGCCTTTGCTAATGCAGATGGTGGCCAGCTGGTAATCGGTATTGAGGACGACAAGCAAAATAACATCATTACTGGCTTCAAAGATGGCAGAGCCTATCCCATTGATGACTTCAAAAAGATTGACCGTGAGATGCGTGATACTCCTTTGGACTTATCTTTTGAAGAAATCCCTGTGCGAAACCATAAGGGTGAAGACGATGTGATTTTGGTTATCTCAGTTGAATTATCTTCAAATCGAGTGATTGCTGCGCCTAATGATGAAGTTTACCTGCGTCAAGGGGATGAAACGGTAAAATTAAGTTATGAACAACGAACTCAGCTCAGCTATGATAAAGGACAACGTTTCTTTGAGGATGAAGTTGTGGCTGATGCGACCTTGGAAGACATCGATGATGACCTGGTTCAGGACTTCAAAAATCGCTTTGATATTGCAGACCGTTCCACCGAGGAAATTCTCAAAGCTCGGCGTTTTCTGGTCAATGGAAAATTGACCAAGGCTGCTATCTTGCTTTTTGGCAAATACCCTTCAGCTTTCTTCCCTCAAGCTCGTGTTCGCTTCCAACGGTTTGATGGCACGGACATGGGGACAGGTAGTAGCTTTAATGTCATTAAGGAAGTGACCTTTGATGATGCTCTACCAACCCTGATTATCAAGGCTCGTGATTTTATTCGTACCCAGCTGCGTGAGTTCCAATATCTGGATGACAATGGGCAATTTCAAATTTTGCCTGAATATCCAGAATTTGCCTGGTTTGAAGGTGTTGTCAATGCTGTTACTCACCGTGATTACTCTGTCTATGGCGACCATATTCGTGTTCTTATGTTTGATGACCGACTGGAAATTCATAGCCCAGGGAAATTGCCAAATATCGTCACCGTTGACAATATTAAGCATGAACGGTTTTCAAGAAATCCTCGGATTGCCAGAACCCTGACGGAGTTTGGATGGGTCCGTGAGATGAATGAAGGTGTGAAACGGATTTACTCAGAGATGGAATCAGCCTTTCTCCATGAACCAAAATACTCTGAACCTGGGAACAAGGTTATTCTGACGCTTGAAAATAATATTGTCAGCCGACACCTACGGACCCAAGATAGTTTGGAGAAACAGTTTACTGATTTTGGAGACCTCAATGCCGATGAGCAATTGTTGATCCATTACATGTACAATTCAGGAGAGAAGATGACAACTGCAAAAGCCATTGAACTGACAGGAAGAAGTCGTAAGTTTATTGTAAAAACGATGAAAAAATTACAAGAATTGGGTATGGTTGACTGGTATGGTGCCAATAAAAATGACAGAAATCAATACTATACTTTAACGAAAAAT

SEQ ID NO: 8674 - protein, 477 aa, Streptococcus agalactiae
MNQTLSHYQFSPETQYLDRKSARKKPSELLKHLIAFANADGGQLVIGIEDDKQNNIITGFKDGRAYPIDDFKKIDREMRDTPLDLSFEEIPVRNHKGEDDVILVISVELSSNRVIAAPNDEVYLRQGDETVKLSYEQRTQLSYDKGQRFFEDEVVADATLEDIDDDLVQDFKNRFDIADRSTEEILKARRFLVNGKLTKAAILLFGKYPSAFFPQARVRFQRFDGTDMGTGSSFNVIKEVTFDDALPTLIIKARDFIRTQLREFQYLDDNGQFQILPEYPEFAWFEGVVNAVTHRDYSVYGDHIRVLMFDDRLEIHSPGKLPNIVTVDNIKHERFSRNPRIARTLTEFGWVREMNEGVKRIYSEMESAFLHEPKYSEPGNKVILTLENNIVSRHLRTQDSLEKQFTDFGDLNADEQLLIHYMYNSGEKMTTAKAIELTGRSRKFIVKTMKKLQELGMVDWYGANKNDRNQYYTLTKN

SEQ ID NO: 8675 - protein, 333 aa, Streptococcus agalactiae; identical to SEQ ID NO: 8367

SEQ ID NO: 8676 - protein, 111 aa, Streptococcus agalactiae; identical to SEQ ID NO: 3660

SEQ ID NO: 8677 - protein, 567 aa, Streptococcus agalactiae
ATGGAACTCTTAAAAACACCCATCTTTGGTATTTGCTTTTCTTTAATACTTATTGATATTGAGCGTTTACCCAAGCATGCTGAAAAGATAGTCATTGAGACTGAAGCCAAAGCTCATAATAAATTATTGTGTTACCGCTATTTTTATATTTATGGTGAAGACGGGCAAAAAATAATAACGATTTCATCTGCTTTTGTCTTAATGGATTTTAAAACACGGAAGATTCATCCTGTTCTTGATGATATTACTTCAATTTACCAATCCCAAAGAATCAAAAAAGTTATTCGAGGGCCGAAATATCATCCCATTGGAGATAGTAAGGTTAAACAATACCATGTTCGTTATTTTGATTTAGATATGAATGGACATGTTAATAATAGTAAGTACCTAGAATGGATGTATGATGTGTTGGACTTAGATTTTCTAAGTAGCCACATTCCTAAAAAAATTGATTTAAAATATATTAAGGAAATCCAATATGGTACGGATATTAAGTCTCATTGGTATCAAGATGGTCTTGTGACACGTCATGATATTATTGGGTGGCGATGCTATTCATGCTCAAGC

SEQ ID NO: 8678 - protein, 189 aa, Streptococcus agalactiae
MELLKTPIFGICFSLILIDIERLPKHAEKIVIETEAKAHNKLLCYRYFYIYGEDGQKIITISSAFVLMDFKTRKIHPVLDDITSIYQSQRIKKVIRGPKYHPIGDSKVKQYHVRYFDLDMNGHVNNSKYLEWMYDVLDLDFLSSHIPKKIDLKYIKEIQYGTDIKSHWYQDGLVTRHDIIGWRCYSCSS

SEQ ID NO: 8679 - protein, 291 aa, Streptococcus agalactiae
TTGCTAACTGCTAAAATATCAAAGGTAGAGTGGGTTGACTCTTTTGGGGCTTTGATGATAAGCATGATTGGTTTTATGTTTGTCCCCTCAGGAATATCAGTAGCAGCGAACCTTGATATCTTAAAAGCTGAAGGCTTGCAACTAGTTGCTGTTATTACAATCTCAACTGTTGTTATGTTAGTAGTGGTAGCATACGTTGCACGATTAATACTTGCTATCAGAGAACTCAGTGTCACAGATTTATTTAAAAAGATATTACCTAACCACTATAGTAAGAAAGTAGAGGAAAAA

SEQ ID NO: 8680 - protein, 97 aa, Streptococcus agalactiae
MLTAKISKVEWVDSFGALMISMIGFMFVPSGISVAANLDILKAEGLQLVAVITISTVVMLVVVAYVARLILAIRELSVTDLFKKILPNHYSKKVEEK

SEQ ID NO: 8681 - protein, 237 aa, Streptococcus agalactiae
GTGAGTGGTGGACTAGCCGTGAGAGATTTTAGAGGGAATTTTTATAAAGCCAAATCTTTTACACCATCTGAGTTAGCTGATTTGAACTATAATTTTGATCAATGTGGCTTTCCCAAGGAAGAAGAAGAGATTTTGGAACCGCTGGAACTTATTCAAAACTATCAGCAAGAAAGAGCGGCTTTGAACCAAAAAATAGATGCTGTTTTGGCAGATATTTTAGAGCTTTTGGAGGAGAAC

SEQ ID NO: 8682 - protein, 79 aa, Streptococcus agalactiae
MSGGLAVRDFRGNFYKAKSFTPSELADLNYNFDQCGFPKEEEEILEPLELIQNYQQERAALNQKIDAVLADILELLEEN

SEQ ID NO: 8683 - protein, 1157 aa, Streptococcus agalactiae
ATGACCCCAGAACAACTAAAAGCTAGTATCTTACAGAGAGCGATGGAGGGGAAATTGGTTCCTCAAGACCCAACTGACGAGCCAGCTAGTGAGCTTCTTAAACGTATCAAAGCGGAAAAAGAAAACCTCATTGCTGATGGCAAAATCAAGCGAGATAAAAAAGAAACAGAGCTTTTTCGAGGTGCTGACGGGAAACCTTATGAGAAGTTGGCAGATGGAACTATCCAAGAAGTTGAAGTACCATATGAGATACCAGAGAGTTGGAACTGGGTGAAATTAAGAAATATTGGTAGTATTACCTCTGGAGGCACGCCAAAATCTTCTGAACCTTCCTACTATGGTGGGAATATCACTTGGATAACTCCAGCAGATATGGGAAAACAGCAAAATAATAAGTTTTTTGCTAAATCATCGAAAAAAATTACTGAATTAGGTTTACAAAAATCTTCTGCTCAACTAATTTCAAAAAACTCTATTGTTTATTCTAGTCGAGCTCCAATCGGACATATAAATATTGTTACTGAAGACTACACTACAAATCAAGGTTGTAAATCAATAACACCTCTACTTGTTGATTTAATTTTTTTATATTGGTTACTACAGTTTAGAACCAAAGATATTATTTTACGTTCTTCAGGGACAACATTTAAGGAAATATCAGCATCAGGTTTTGGAGATACACTTCTCCCCCTCCCTCCCCTCGCTGAGCAAAAACGGATTGTCGCTCAAATCGAAAAAGCATTAGCAAAAGTAGACGAGTATGCAGAAAGTTACAATAAACTACAACAACTAGACAAAGAATTTCCAGATAAACTGAAGAAATCTATCCTCCAATACGCCATGCAAGGTAAGCTAGTAGCTCAAAGTCCAGATGATGAACCTGTTGAAGTCTTGCTTGAAAAAATCAAAGCTGAAAAGCAAAAACTCTATGAGGAAGGTAAACTCAAGAAGAAAGATTTGGAAGAGCTTGTGGTAAAAAGGAGATGATAACTCTCCTTATGAAGATACCCAAAAATTGGTCTTTTCTTACCATAAAAGATATTTTTTCAATAACCACAGGATTATCGTATAAGAAAACTGATCTAGCCATCACCAAAAATGGTGTCAGAATTATTCGTGGAAGGAATATCAACCCAATATCCTTTAAAATANNNNNT

SEQ ID NO: 8684 - protein, 387 aa, Streptococcus agalactiae
  VARIANT 335, 386, 387: Xaa = Any Amino Acid
MTPEQLKASILQRAMEGKLVPQDPTDEPASELLKRIKAEKENLIADGKIKRDKKETELFRGADGKPYEKLADGTIQEVEVPYEIPESWNWVKLRNIGSITSGGTPKSSEPSYYGGNITWITPADMGKQQNNKFFAKSSKKITELGLQKSSAQLISKNSIVYSSRAPIGHINIVTEDYTTNQGCKSITPLLVDLIFLYWLLQFRTKDIILRSSGTTFKEISASGFGDTLLPLPPLAEQKRIVAQIEKALAKVDEYAESYNKLQQLDKEFPDKLKKSILQYAMQGKLVAQSPDDEPVEVLLEKIKAEKQKLYEEGKLKKKDLEELVVTKGDDNSPYXKIPKNWSFLTIKDIFSITTGLSYKKTDLAITKNGVRIIRGRNINPISFKIXX

SEQ ID NO: 8685 - protein, 794 aa, Streptococcus agalactiae
ATGAAAGACTTTGAATTACATTTACGAAAGCTGGATTAGCTGAAAACACCATACGGTCTTACCTGTATGGTGTTCGCTTTTTTTTGGAACATTATGAGTTAAAAATAGAAGATTTATTTGAATATAAAGGATATTTACTGGATAATTTCAAACCTAAAACCGTTAATCTGCGATTGCAGGGGCTTAATAAATACCTTGTTTTTATTGGACACGATGATTTGAAATTAAAATTTGTTAAAATCCAGCAGAAACCATTTTTAGAAGATGTTATCAGCCATGCAGATTATCTCTTTCTGAAACGGAGTTTGAAAAAAGATGATAACTTAAAATGGCATTTTGTAGTTTGGTTTCTAGGAGCAACAGGAGCTCGTGTTAGTGAATTGATAAAATTAAAAGTAGAACATGTGGAGGTCGGTTATTTTGATATTTACTCAAAGGGGGGTAAAATGCGACGACTCTACATCCCTAAAAAATTACGTGACAGTTGTCAGAAATGGCTTGATACTGAAAATCGCCAAAGCGGGTACCTTTTCCTTAATAAATTTAGTCAGCCGATTACAGCTAGAGGGATCGCCCAACAACTAAAAAACTATGCTGTAAAATATCAACTCAATACCAAGGTCGTCTATCCTCATTCCTTTAGACACCTATTTGCCAAAAATTTTCTTGCCAAATACAATGACATTGCCCTACTAGCAGATTTGATGGGACATGAAAGCATCGAAACAACTCGTATCTACCTTAGAAAAACAGCGACAGAGCAACAAGCTATTATAGATAGGGTTGTTAATTGG

SEQ ID NO: 8686 - protein, 265 aa, Streptococcus agalactiae
MKDFELHLRKAGLAENTIRSYLYGVRFFLEHYELKIEDLFEYKGYLLDNFKPKTVNLRLQGLNKYLVFIGHDDLKLKFVKIQQKPFLEDVISHADYLFLKRSLKKDDNLKWHFVVWFLGATGARVSELIKLKVEHVEVGYFDIYSKGGKMRRLYIPKKLRDSCQKWLDTENRQSGYLFLNKFSQPITARGIAQQLKNYAVKYQLNTKVVYPHSFRHLFAKNFLAKYNDIALLADLMGHESIETTRIYLRKTATEQQAIIDRVVNW

SEQ ID NO: 8687 - protein, 728 aa, Streptococcus agalactiae
ATGGTTTATTCTGATTTATCACGCAAGACAGTTACACCAAAGGAGTTGCGGATTATCTTTTTAACCAAACAAATGAATTTAATAAGAATTTTGGTGGAACAAGTGGAAGAGGTATTGTTGAAGCTACTAAAGCGTTTGGCTATGTTGTGACTCATTTAGCAAGTCAAAATGCTATAAAAGAAGCTTTGAAAGCAGGTCATCATGTTGTTGCTGCTGTACAAAATAATAAATTCAGTCCTTGGGGACCTCAATACAGTCACGAAATTGTATTGAGAGGTAGTTCAAATGGCAATACGTATGTTTATGATCCGTATAACCGTGATAACAATGGTTTTTACAGTGTTGACCGCATTTGGAATGAACAGTCACGAGATAGTATTGATACTGCTGGTGTAGGTGTACCGTTTTTCTCAATTATGACTAAAGATATGGCTAATGCCTTAACTAAGCAGTCACAAGCTTTAGCAAGTCAACAAGTTGCTCAAAGACAATTAAATGATGCACAAGCTAAAGCAATAGGTCTTAATGCAGTAACTATGCAGACACCGATTGCACAAGCTAATTTGATTAAAGCACAGTCTAATTTAAAAGATGCTCCAGATGCACTCACTAAAGCACAAGAAGCAGTTAAATTAGCTAAATCAGATAATGGGTTAAAAACAGCTGACTTAATAAAAGCAGAGTCTAAATTAACAGATGCTCAAAAAGCATTAGCAGATGCACAGGTT

SEQ ID NO: 8688 - protein, 243 aa, Streptococcus agalactiae
MVYSDLSRKTVTPKEVADYLFNQTNEFNKNFGGTSGRGIVEATKAFGYVVTHLASQNAIKEALKAGHHVVAAVQNNKFSPWGPQYSHEIVLRGSSNGNTYVYDPYNRDNNGFYSVDRIWNEQSRDSIDTAGVGVPFFSIMTKDMANALTKQSQALASQQVAQRQLNDAQAKAIGLNAVTMQTPIAQANLIKAQSNLKDAPDALTKAQEAVKLAKSDNGLKTADLIKAESKLTDAQKALADAQV

SEQ ID NO: 8689 - protein, 93 aa, Streptococcus agalactiae
TTGACTGGTCTTGATGAGCATGGTCAGAAAATTCAACAAAAGGCTGAAGAAAGCAGCATTACACCACAGGGATATGTTGATGGCATGNNNNNT

SEQ ID NO: 8690 - protein, 31 aa, Streptococcus agalactiae
  VARIANT 30, 31: Xaa = Any Amino Acid
MTGLDEHGQKIQQKAEESSITPQGYVDGMXX

SEQ ID NO: 8691 - protein, 405 aa, Streptococcus agalactiae
GTGACACCAAAACCAGTACCGGATAAAGATAAATATGATCCAACAGGAGGGGAAACAACAGTACCCCAAGGGACACCAGTTTCAGATAAAGAAATCACAGACTTAGTTAAGATTCCAGATGGCTCAAAAGGGGTTCCGACAGTTGTTGGTGATCGTCCAGATACTAACGTTCCTGGAGATCATAAAGTAACGGTTGATGTAACTTATCCAGATGGAACAAAGGATACAGTAGAAGTAACGGTTCATGTGACACCAAAACCAGTACCGGATAAAGATAAATATGATCCAACAGGAGGGGAAACAACAGTACCCCAAGGGACACCAGTTTCAGATAAAGAAATCACAGACTTAGTTAAGATTCCAGATGGCTCAAAAGGGGTTCCGACAGTTGTTGGNNNNNTTAAT

SEQ ID NO: 8692 - protein, 135 aa, Streptococcus agalactiae
  VARIANT 133, 134: Xaa = Any Amino Acid
MTPKPVPDKDKYDPTGGETTVPQGTPVSDKEITDLVKIPDGSKGVPTVVGDRPDTNVPGDHKVTVDVTYPDGTKDTVEVTVHVTPKPVPDKDKYDPTGGETTVPQGTPVSDKEITDLVKIPDGSKGVPTVVGXXN

SEQ ID NO: 8693 - protein, 1020 aa, Streptococcus agalactiae
GTGACACCAAAACCAGTACCGGATAAAGATAAATATGATCCAACAGGAGGGGAAACAACAGTACCCCAAGGGACACCAGTTTCAGATAAAGAAATCACAGACTTAGTTAAGATTCCAGATGGCTCAAAAGGGGTTCCGACAGTTGTTGGTGATCGTCCAGATACTAACGTTCCTGGAGATCATAAAGTAACGGTTGATGTAACTTATCCAGATGGAACAAAGGATACAGTAGAAGTAACGGTTCATGTGACACCAAAACCAGTACCGGATAAAGATAAATATGATCCAACAGGAGGGGAAACAACAGTACCCCAAGGGACACCAGTTTCAGATAAAGAAATCACAGACTTAGTTAAGATTCCAGATGGCTCAAAAGGGGTTCCGACAGTTGTTGGTGATCGTCCAGATACTAACGTTCCTGGAGATCATAAAGTAACGGTTGATGTAACTTATCCAGATGGAACAAAGGATACAGTAGAAGTAACGGTTCATGTGACACCAAAACCAGTACCGGATAAAGATAAATATGATCCAACAGGGGGGGAAACAACAGTACCCCAAGGGACACCAGTTTCAGATAAAGAAATCACAGACTTAGTTAAGATTCCAGATGGCTCAAAAGGGGTTCCGACAGTTGTTGGTGATCGTCCAGATACTAACGTTCCTGGAGATCATAAAGTAACGGTTGATGTAACTTATCCAGATGGAACAAAGGATACAGTAGAAGTAACGGTTCATGTGACACCAAAACCAGTACCGGATAAAGATAAATATGATCCAACAGGAGGGGAAACAACAGTACCCCAAGGGACACCAGTTTCAGATAAAGAAATCACAGACTTAGTTAAGATTCCAGATGGCTCAAAAGGGGTTCCGACAGTTGTTGGTGATCGTCCAGATACTAACGTTCCTGGAGATCATAAAGTAACGGTTGATGTAACTTATCCAGATGGAACAAAGGATACAGTAGAAGTAACGGTTCATGTGACACCAAAACCAGTACCGGNNNNNTTAATTAAT

SEQ ID NO: 8694 - protein, 340 aa, Streptococcus agalactiae
  VARIANT 336, 337: Xaa = Any Amino Acid
MTPKPVPDKDKYDPTGGETTVPQGTPVSDKEITDLVKIPDGSKGVPTVVGDRPDTNVPGDHKVTVDVTYPDGTKDTVEVTVHVTPKPVPDKDKYDPTGGETTVPQGTPVSDKEITDLVKIPDGSKGVPTVVGDRPDTNVPGDHKVTVDVTYPDGTKDTVEVTVHVTPKPVPDKDKYDPTGGETTVPQGTPVSDKEITDLVKIPDGSKGVPTVVGDRPDTNVPGDHKVTVDVTYPDGTKDTVEVTVHVTPKPVPDKDKYDPTGGETTVPQGTPVSDKEITDLVKIPDGSKGVPTVVGDRPDTNVPGDHKVTVDVTYPDGTKDTVEVTVHVTPKPVPXXLIN

SEQ ID NO: 8695 - protein, 672 aa, Streptococcus agalactiae
ATGCAAGGTAAGCTAGTAGCTCAAAGTCCAGATGATGAACCTGTTGAAGTCTTGCTTGAAAAAATCAAAGCTGAAAAGCAAAAACTCTATGAGGAAGGTAAACTCAAGAAGAAAGATTTGGAAGAGCTTGTGGTAACAAAAGGAGATGATAACTCTCCTTATAAGGAAGTGCCGTACAACATTCCAAAAAGCTGGGAATGGGTAAGGTTAGGTAATATATCTTCGTTGAATTTTTTTTCTAGTATATCTGGAGATAAGATTCCAAATGATAGCTGGGTTTTAGATATGGAAGATATAGAAAAAGAGACCGGAAGATTAGTTAGAAAAAACTATAAAACAGAAAAGTCGTCTTATAAAAGTAATAAAATATCTTTTTCTAAAGACACTATTTTATATGCTAAATTACGGCCCAATCTAAAGAAAGTTATCATTTCTGACGAAAACGGTTTCGCGACAACAGAACTTCTTCCGATTAAAGTTTTTGGGAATATTTCGCTAGATTACATAAGATACTGTATGATTTCACCGTTTTATTATTTTAATATTATCCAGTCGGTTTATGGTGTTAAAATGCCAAGGGTAAGTTCTGGTTTTCTAAATTCAACTCTCCTCCCCCTCCCGCCTCTCACCGAACAACAGCGTATTGTTTCTAAAATTCTCAAGTCTNNNNNT

SEQ ID NO: 8696 - protein, 224 aa, Streptococcus agalactiae
  VARIANT 223, 224: Xaa = Any Amino Acid
MQGKLVAQSPDDEPVEVLLEKIKAEKQKLYEEGKLKKKDLEELVVTKGDDNSPYKEVPYNIPKSWEWVRLGNISSLNFFSSISGDKIPNDSWVLDMEDIEKETGRLVRKNYKTEKSSYKSNKISFSKDTILYAKLRPNLKKVIISDENGFATTELLPIKVFGNISLDYIRYCMISPFYYFNIIQSVYGVKMPRVSSGFLNSTLLPLPPLTEQQRIVSKILKSXX

SEQ ID NO: 8697 - protein, 402 aa, Streptococcus agalactiae
ATGAAATTGGGTTTAAAAGATGTATTATTGATTGCTTTATTAGCGGTTGTTCTGGGCGTTGTTTACTTTGGAGCAGGCTATATTTCAAATGCTTTTGTACCTTTTGTAGGTCCTATAGCGCATGAAGTTATTTATGGTATTTGGTTTGTGGCAGGTCCAATGGCTCTTTATATATTGAGGAAACCAGGAACCGCTATTGTAGCAGAATTGTTAGCTGCTTTGATAGAGGTTTTAATTGGATCAATTTATGGACCAAGTGTACTCGTTATTGGTACCCTTCAAGGTTTAGGGTCAGAATTAGGCTTTACGCTGTTTAGGTATCATAATTACAAGTTGCCAGCTTTTATATTGTCTGCTATTTTGACATCAATTTTTAGTTTTGCATGGAGTTTTTATNNNNNT

SEQ ID NO: 8698 - protein, 134 aa, Streptococcus agalactiae
  VARIANT 133, 134: Xaa = Any Amino Acid
MKLGLKDVLLIALLAVVLGVVYFGAGYISNAFVPFVGPIAHEVIYGIWFVAGPMALYILRKPGTAIVAELLAALIEVLIGSIYGPSVLVIGTLQGLGSELGFTLFRYHNYKLPAFILSAILTSIFSFAWSFYXX

SEQ ID NO: 8699 - protein, 207 aa, Streptococcus agalactiae
ATGTTCTGGTTTTGGACTGGAACAGCGGATGGAAATCACGAAGTGTTAGCTAAAGCATCTGCAGCTCAATCCATTTTTCTTTTTATGCCAAGGTTTATAGGGGCGACTATAATTGGCGGTGTTATTGCTTTGTTGCTACTTCAGGGATTAAAGCGGGTTCCTGTATTTATGACAATACAAGCATTATTTAAAGGAGAAAAAGTAAAA

SEQ ID NO: 8700 - protein, 69 aa, Streptococcus agalactiae
MFWFWTGTADGNHEVLAKASAAQSIFLFMPRFIGATIIGGVIALLLLQGLKRVPVFMTIQALFKGEKVK

SEQ ID NO: 8701 - protein, 862 aa, Streptococcus agalactiae
ATGTCCAACAGAGGGGAAACAACAGTACCCCAAGGGACACCAGTTTCAGATAAAGAAATCACAGACTTAGTGATTTCCAGATGGCTCAAAAGGGGTTCCGACAGTTGTTGGTGATCGTCCAGATACTAACGTTCCTGGAGATCATAAAGTAACGGTTGATGTAACTTATCCAGATGGAACAAAGGATACAGTAGAAGTAACGGTTCATGTGACACCAAAACCAGTACCGGATAAAGATAAATATGATCCAACAGGAGGGGAAACAACAGTACCCCAAGGGACACCAGTTTCAGATAAAGAAATCACAGACTTAGTTAAGATTCCAGATGGCTCAAAAGGGGTTCCGACAGTTGTTGGTGATCGTCCAGATACTAACGTTCCTGGAGATCATAAAGTAACGGTTGATGTAACTTATCCAGATGGAACAAAGGATACAGTAGAAGTAACGGTTCATGTGACACCAAAACCAGTACCGGATAAAGATAAATATGATCCAACAGGAGGGGAAACAACAGTACCCCAAGGGACACCAGTTTCAGATAAAGAAATCACAGACTTAGTTAAGATTCCAGATGGCTCAAAAGGGGTTCCGACAGTTGTTGGTGATCGTCCAGATACTAACGTTCCTGGAGATCATAAAGTAACGGTTGATGTAACTTATCCAGATGGAACAAAGGATACAGTAGAAGTAACGGTTCATGTGACACCAAAACCAGTACCGGATAAAGATAAATATGATCCAACAGGAGGGGAAACAACAGTACCCCAAGGGACACCAGTTTCAGATAAAGAAATCACAGACTTAGTTAAGATTCAGATGGCTCAAAGGGTTCCGACAGTTGTTGGTGATCGTCCANNNNNT

SEQ ID NO: 8702 - protein, 288 aa, Streptococcus agalactiae
  VARIANT 287, 288: Xaa = Any Amino Acid
MSNRGETTVPQGTPVSDKEITDLVRFPDGSKGVPTVVGDRPDTNVPGDHKVTVDVTYPDGTKDTVEVTVHVTPKPVPDKDKYDPTGGETTVPQGTPVSDKEITDLVKIPDGSKGVPTVVGDRPDTNVPGDHKVTVDVTYPDGTKDTVEVTVHVTPKPVPDKDKYDPTGGETTVPQGTPVSDKEITDLVKIPDGSKGVPTVVGDRPDTNVPGDHKVTVDVTYPDGTKDTVEVTVHVTPKPVPDKDKYDPTGGETTVPQGTPVSDKEITDLVKIQMAQRVPTVVGDRPXX

SEQ ID NO: 8703 - protein, 324 aa, Streptococcus agalactiae
GTGAATACTTTGGATAATCAGACAACTCTTGTAAATCAATTAAGTGGTTTGAAAGAGACGTATTTCGAGCATCTTATTCCAAATAGCGTTTCTGGGCAATCCACTCTTAATAAACAAGTATTTGTTAAAAAGAATAATCAAGGGAATACTGAAATTACCTATAGCATAGCTATCCCTAAAAGCAGTCAGTTATATGTTAGTATGCCGTTTATAAATTTTAATAATGAGGAAAATAAAATTGTTCAAATCTCCGTTAATAATGGACCATTTGTGCGTAATACTCTTGATAATGCTTATTCATTTTTTAATATTGGTTCCNNNNNT

SEQ ID NO: 8704 - protein, 108 aa, Streptococcus agalactiae
  VARIANT 107, 108: Xaa = Any Amino Acid
MNTLDNQTTLVNQLSGLKETYFEHLIPNSVSGQSTLNKQVFVKKNNQGNTEITYSIAIPKSSQLYVSMPFINFNNEENKIVQISVNNGPFVRNTLDNAYSFFNIGSXX

SEQ ID NO: 8705 - protein, 174 aa, Streptococcus agalactiae
ATGGCATTAGCCATGAAACAAATGCATGGCGATATTTCGGCTGCTCAAACAGGTATTCTTTTTGTAGGTCTAATCTATGTCGTTGTGGCGACGGTTATTAAGTTCGTAGGAAATTCATGGGTTGATAAGATTTTGCCACCAATAATCATTGGACCTATGATAATGGTAATGGGT

SEQ ID NO: 8706 - protein, 58 aa, Streptococcus agalactiae
MALAMKQMHGDISAAQTGILFVGLIYVVVATVIKFVGNSWVDKILPPIIIGPMIMVMG

SEQ ID NO: 8707 - protein, 141 aa, Streptococcus agalactiae
GTGACTGGATTCCCAGAAATGATGGACGGTCGTGTTAAGACCCTCCACCCAAACATTCACGGTGGGCTTCTGGATCGTCGCGACGTTGACAGCCACCTTCAGGCTGCTAAGGTCGACAATATTGAGTTGATTGACNNNNNT

SEQ ID NO: 8708 - protein, 47 aa, Streptococcus agalactiae
  VARIANT 46, 47: Xaa = Any Amino Acid
MTGFPEMMDGRVKTLHPNIHGGLLDRRDVDSHLQAAKVDNIELIDXX

SEQ ID NO: 8709 - protein, 105 aa, Streptococcus agalactiae
ATGGCTCAAAAGGGGTTCCGACAGTTGTTGGTGATCGTCCCAGATACTAACGTTCCTGGAGATCATAAAGTAACGGTTGATGTAACTATCCAGCTTCCANNNNNT

SEQ ID NO: 8710 - protein, 35 aa, Streptococcus agalactiae
  VARIANT 34, 35: Xaa = Any Amino Acid
MAQKGFRQLLVIVPDTNVPGDHKVTVDVTIQLPXX

SEQ ID NO: 8711 - protein, 411 aa, Streptococcus agalactiae
GTGACACCAAAACCAGTACCGGATAAAGATAAATATGATCCAACAGGAGGGGAAACAACAGTACCCCAAGGGACACCAGTTTCAGATAAAGAAATCACAGACTTAGTTAAGATTCCAGATGGCTCAAAAGGGGTTCCGACAGTTGTTGGTGATCGTCCAGATACTAACGTTCCTGGAGATCATAAAGTAACGGTTGATGTAACTTATCCAGATGGAACAAAGGATACAGTAGAAGTAACGGTTCATGTGACACCAAAACCAGTACCGGATAAAGATAAATATGATCCAACAGGAGGGGAAACAACAGTACCCCAAGGGACACCAGTTTCAGATAAAGAAATCACAGACTTAGTTAAGATTCCAGATGGCTCAAAAGGGGTTCCGACAGTTGTTGGTGATCGTCCCAGATAC

SEQ ID NO: 8712 - protein, 137 aa, Streptococcus agalactiae
MTPKPVPDKDKYDPTGGETTVPQGTPVSDKEITDLVKIPDGSKGVPTVVGDRPDTNVPGDHKVTVDVTYPDGTKDTVEVTVHVTPKPVPDKDKYDPTGGETTVPQGTPVSDKEITDLVKIPDGSKGVPTVVGDRPRY

SEQ ID NO: 8713 - protein, 174 aa, Streptococcus agalactiae
ATGGATTTGGTCGGCCACCTTATTGACCATCCACGTTTCCAAAAACTCGAAGCTATTGACCAACATCATCACTCAACTCGCTTAGAGCATTCTATAAATGTTAGGTATACCAGTTATAAAATTGCTAACAAGTTTGGCTGGGATGCGAGTACCACTGCTCGAGGNNNNNTTAAT

SEQ ID NO: 8714 - protein, 58 aa, Streptococcus agalactiae
  VARIANT 56, 57: Xaa = Any Amino Acid
MDLVGHLIDHPRFQKLEAIDQHHHSTRLEHSINVRYTSYKIANKFGWDASTTARGXXN

SEQ ID NO: 8715 - protein, 105 aa, Streptococcus agalactiae
TTGATTGGTTTCATCTCAAGTTTGGTTGGTGGATTGGTTAGTATGATAGTTATGATGGTGACTGGCACTACTGTCATTTTACCAGGGGTCGNNNNNTTAATTAAT

SEQ ID NO: 8716 - protein, 35 aa, Streptococcus agalactiae
  VARIANT 31, 32: Xaa = Any Amino Acid
MIGFISSLVGGLVSMIVMMVTGTTVILPGVXXLIN

SEQ ID NO: 8717 - protein, 264 aa, Streptococcus agalactiae
TTGGGCGATGGTGTTATTTATCGGCCTGAACATTCAAATCCACGAACAGAAATTCAAATTATCCAAAAGAATGGACAACTTGCTGAATTATCAAGCTTATCACCGATTGTAAAAGCATTAACTGGATCTAATTATGGTGATCAACGTTTTTATTTTCCAAAAGAAATGTTGACATTAGATAGCCTATTTTCAAGTACAAAAGAAGAATTTCAATCTTATATCACAAATGAGCATTTGACACTCACGAAAGATAATAGCCATTCA

SEQ ID NO: 8718 - protein, 88 aa, Streptococcus agalactiae
MGDGVIYRPEHSNPRTEIQIIQKNGQLAELSSLSPIVKALTGSNYGDQRFYFPKEMLTLDSLFSSTKEEFQSYITNEHLTLTKDNSHS

SEQ ID NO: 8719 - protein, 489 aa, Streptococcus agalactiae
ATGACACTCTTTTTAATTATGATGGAGCGAGCGGGGTTAATCATATTATTAGCCTATGCCTTTGTGCATATCCCCTTTATAAAACAAACTTTGAAGCAACCCGAATTAAAAAAACACCAGTATATTCTGCTTATCTTATTTAGCTTATTTGCTATTATTTCTAATTTTACAGGGGTAGAAATTCAGTCAGATTTATCTATCATTCCACAAACTCTTAATCATATAGCAGATCAATCATCGGTTGCCAACACACGTGTTTTAACCATTGGTGTATCAGGTCTAATCGGTGGCCCCATAGTCGGTATTATAGTTGGTCTCTTATCTGTATTCGTTAGGTACTTGCAAGGAGGATTAGCCCCTCATATTTATGTCATTTCTTCCTTACTAATTGGTTTATGCTCTGGGTTATCAGGCAATTATCTTCGTAAAAATTATAATAAAATTCGTGTTTTAGATGCAATGGTTGTTGGTTTCGNNNNNTTAATTAAT

SEQ ID NO: 8720 - protein, 163 aa, Streptococcus agalactiae
  VARIANT 159, 160: Xaa = Any Amino Acid
MTLFLIMMERAGLIILLAYAFVHIPFIKQTLKQPELKKHQYILLILFSLFAIISNFTGVEIQSDLSIIPQTLNHIADQSSVANTRVLTIGVSGLIGGPIVGIIVGLLSVFVRYLQGGLAPHIYVISSLLIGLCSGLSGNYLRKNYNKIRVLDAMVVGFXXLIN

SEQ ID NO: 8721 - protein, 834 aa, Streptococcus agalactiae
ATGTCATTTAAAGATTTTATTTTTAACCCATACATTCAGAGGGCTCTCGATGAGTTAAAATTCGTCGATCCAACTGATGTTCAAGCTAAATGGATTCCAGTTGTTCGTTCAGGCCGCGATCTTGTGGGGGAATCGAAAACTGGTTCTGGTAAAACCCACACCTTTTTACTTCCTATTTTTGAGAAGCTAGATGAAAGTAGTAATGATGTTCAAGTTGTTATTACTGCACCAAGTAGAGAGTTGGCAACACAAATTTATCAGGCAACTAAACAAATTGCTGAGCATTCAGAGCAAGAAATACGGGTGGTTAACTATGTTGGTGGTACTGACAAATTACGTCAAATTGAAAAGTTGAAAGTAAGCCAACCTCATATTGTCATTGGAACCCCAGGACGTATTTATGATTTGGTGAAGTCAGGTGATTTAGCTATTCATAAGGCGCATACTTTTGTGGTTGATGAAGCAGATATGACTCTGGATATGGGATTCCTTGATACCGTTGATAAGATTGCAGGGTCTTTACCCAAGGATGTCCAAATTTTAGTCTTTTCAGCAACGATTCCACAAAAATTACAGCCATTTTTAAAGAAATATTTGACCAATCCTGTAATGGAAAAAATCAAAACAGCAACAGTTATCACTGATACCATCGATAACTGGCTTTTGTCCACTAAAGGACGTGATAAAAATGCACAAATTTTGGAACTCTCTAAACTAATGCAGCCTTACCTTGCAATGATATTTGTTAATACGAAAGAGCGTGCAGACGAATTACACTCGTATCTTTCTAGTAATGGCTTAAAAGTAGCTAAAATTCATGGTGGNNNNNTTAAT

SEQ ID NO: 8722 - protein, 278 aa, Streptococcus agalactiae
  VARIANT 276, 277: Xaa = Any Amino Acid
MSFKDFIFNPYIQRALDELKFVDPTDVQAKWIPVVRSGRDLVGESKTGSGKTHTFLLPIFEKLDESSNDVQVVITAPSRELATQIYQATKQIAEHSEQEIRVVNYVGGTDKLRQIEKLKVSQPHIVIGTPGRIYDLVKSGDLAIHKAHTFVVDEADMTLDMGFLDTVDKIAGSLPKDVQILVFSATIPQKLQPFLKKYLTNPVMEKIKTATVITDTIDNWLLSTKGRDKNAQILELSKLMQPYLAMIFVNTKERADELHSYLSSNGLKVAKIHGGXXN

SEQ ID NO: 8723 - protein, 540 aa, Streptococcus agalactiae
GTGACACCAAAACCAGTACCGGATAAAGATAAATATGATCCAACAGGAGGGGAAACAACAGTACCCCAAGGGACACCAGTTTCAGATAAAGAAATCACAGACTTAGTTAAGATTCCAGATGGCTCAAAAGGGGTTCCGACAGTTGTTGGTGATCGTCCAGATACTAACGTTCCTGGAGATCATAAAGTAACGGTTGATGTAACTTATCCAGATGGAACAAAGGATACAGTAGAAGTAACGGTTCATGTGACACCAAAACCAGTACCGGATAAAGATAAATATGATCCAACAGGAGGGGAAACAACAGTACCCCAAGGGACACCAGTTTCAGATAAAGAAATCACAGACTTAGTTAAGATTCCAGATGGCTCAAAAGGGGTTCCGACAGTTGTTGGTGATCGTCCAGATACTAACGTTCCTGGAGATCATAAAGTAACGGCTGATGTAACTTATCCAGATGGAACAAAGGATACAGTAGAAGTAACGGTTCATGTGACACCAAAACCAGTACCGGATAAAGATAAATATGANNNNNTTAAT

SEQ ID NO: 8724 - protein, 180 aa, Streptococcus agalactiae
  VARIANT 177, 178, 179: Xaa = Any Amino Acid
MTPKPVPDKDKYDPTGGETTVPQGTPVSDKEITDLVKIPDGSKGVPTVVGDRPDTNVPGDHKVTVDVTYPDGTKDTVEVTVHVTPKPVPDKDKYDPTGGETTVPQGTPVSDKEITDLVKIPDGSKGVPTVVGDRPDTNVPGDHKVTADVTYPDGTKDTVEVTVHVTPKPVPDKDKYXXXN

SEQ ID NO: 8725 - protein, 384 aa, Streptococcus agalactiae
GTGGCGGAGCGACACGCCAGGCGGCTGCTGAGTACACATCGCCGTGTGCGCGTGTACCGCGAGGAGCTGCAGAGCGCCGTAGAAGAAGTGGGCGATGTGGCACAGATGCTGCAGCGTCACCAGACTGTACAGGATGCGTTGCGAGTGGAATTGAAGGACTTGGACGCCCAAATAGAACGATTGGTTCGTGAAAGGCAGCTATGTGAGCTGCAGCTGAGTCAGGAGGACGAGGCGCGGCAACGGGATGAGGTGAAGCTTCGCGATGCGAAGGAGCGGGTGAATGTTCTCCGCTCGACCATAGACACCATCACGCAGGAGTCGCTGGCAGGTTACGTCGTGCTGCGTCAGCTGGTGCCGAACCTGAACGTGGAAAACTACGTCGCA

SEQ ID NO: 8726 - protein, 128 aa, Streptococcus agalactiae
MAERHARRLLSTHRRVRVYREELQSAVEEVGDVAQMLQRHQTVQDALRVELKDLDAQIERLVRERQLCELQLSQEDEARQRDEVKLRDAKERVNVLRSTIDTITQESLAGYVVLRQLVPNLNVENYVA

SEQ ID NO: 8727 - protein, 654 aa, Streptococcus agalactiae
ATGGACTCCGCAGTGCCTGACCACACGAAGCCGCGCCGCTGCAATTGGCAAAGACTTCTTTTCTCCTCCCCGTTGTTTTTGATTGTCAGAGGCATCCTCGTCGTAGAGGACGAGGTGAATGGCGTACGCGTCATGGCTGTCGTGTTCCAGCGAGGCCGGCACACCCCGCTCCTGCATGAAAATGGAATCTCGAATTATTGCGGCGTCGCGAAAGACGTCGTTGTCTTTGCCCTGAGCAAAACGCACAACAAGTGGCATCACCGTCCTCTTCTGCAAAAAAAAAAAAAGAAAAAAAAAATGGATGGTAAACGCAAAAAATACAAGAAAAAAAACCACAAAAAAAGAAAAAGAAGACAAGACTTCTTCTCGATGCTGTTGTCCGGCCCATTGGAAACTGGCGTCATTCCAATCCATACTTTGACAGCATCCTTTCAATCCCGCAAACCTCCCGCTGCAGTCGTTCCACCTTCTTTACATCAATACCTGCCTTTTCGTATAAGTGTACTCGACGGCGGTGAGCCACCGTGTCGAGCATCGTCTCCCACGTCAACTCCCGTGCGTAGTAACAGTGAAAGACGATGCCCGCCCACACGACGGTGTAGCCAAGAAAGTAAGTCATCGGCTCCACAAGTTCCAATCAAACANNNNNTTAAT

SEQ ID NO: 8728 - protein, 218 aa, Streptococcus agalactiae
  VARIANT 215, 216, 217: Xaa = Any Amino Acid
MDSAVPDHTKPRRCNWQRLLFSSPLFLIVRGILVVEDEVNGVRVMAVVFQRGRHTPLLHENGISNYCGVAKDVVVFALSKTHNKWHHRPLLQKKKKKKKMDGKRKKYKKKNHKKRKRRQDFFSMLLSGPLETGVIPIHTLTASFQSRKPPAAVVPPSLHQYLPFRISVLDGGEPPCRASSPTSTPVRSNSERRCPPTRRCSQESKSSAPQVPIKXXXN

SEQ ID NO: 8729 - protein, 141 aa, Streptococcus agalactiae
ATGTTTGGAGCTTTAATTGCTTCAGGAATATATGTCGCTTTAGTTGCTGGCATTTTTTCTAAAGTTGCAAATTTCTTTCCTCCAATTGATAACAGGATCACTTATTACTACAATTGGGTTGACATTANNNNNTTAATTAAT

SEQ ID NO: 8730 - protein, 47 aa, Streptococcus agalactiae
  VARIANT 43, 44: Xaa = Any Amino Acid
MFGALIASGIYVALVAGIFSKVANFFPPIDNRITYYYNWVDIXXLIN

SEQ ID NO: 8731 - protein, 702 aa, Streptococcus agalactiae
GTGACACCAAACCAGGTACCGGATAAAGATAAATATGATCCAACAGGAGGGGAAACAACAGTACCCCAAGGGACACCAGTTTCAGATAAAGAAATCACAGACTTAGTTAAGATTCCAGATGGCTCAAAAGGGGTTCCGACAGTTGTTGGTGATCGTCCAGATACTAACGTTCCTGGAGATCATAAAGTAACGGTTGATGTAACTTATCCAGATGGAACAAAGGATACAGTAGAAGTAACGGTTCATGTGACACCAAAACCAGTACCGGATAAAGATAAATATGATCCAACAGGAGGGGAAACAACAGTACCCCAAGGGACACCAGTTTCAGATAAAGAAATCACAGACTTAGTTAAGATTCCAGATGGCTCAAAAGGGGTTCCGACAGTTGTTGGTGATCGTCCAGATACTAACGTTCCTGGAGATCATAAAGTAACGGTTGATGTAACTTATCCAGATGGAACAAAGGATACAGTAGAAGTAACGGTTCATGTGACACCAAAACCAGTACCGGATAAAGATAAATATGATCCAACAGGAGGGGAAACAACAGTACCCCAAGGGACACCAGTTTCAGATAAAGAAATCACAGACTTAGTTAAGATTCCAGATGGCTCAAAAGGGGTTCCGACAGTTGTTGGTGATCGTCCAGATACTAACGTTCCTGGAGATCATAAAGTAACGGTTGNNNNNTTAATTAAT

SEQ ID NO: 8732 - protein, 234 aa, Streptococcus agalactiae
  VARIANT 230, 231: Xaa = Any Amino Acid
MTPNQVPDKDKYDPTGGETTVPQGTPVSDKEITDLVKIPDGSKGVPTVVGDRPDTNVPGDHKVTVDVTYPDGTKDTVEVTVHVTPKPVPDKDKYDPTGGETTVPQGTPVSDKEITDLVKIPDGSKGVPTVVGDRPDTNVPGDHKVTVDVTYPDGTKDTVEVTVHVTPKPVPDKDKYDPTGGETTVPQGTPVSDKEITDLVKIPDGSKGVPTVVGDRPDTNVPGDHKVTVXXLIN

SEQ ID NO: 8733 - protein, 192 aa, Streptococcus agalactiae
ATGGGAGAATTGGAGAACACTTTGAAAGCTCAATATCCACATTTATCAATCGCACAATCTGCTCCTTACTTTATTGAAATAATGGCTCCAGGTATTGAAAAAGGAAAATCTGCTAAAACTTTAGCAGACTATTTAGATATTTCTCTTGCAGACTCTATTGCGTTTGGTGATAACTATANNNNNTTAATTAAT

SEQ ID NO: 8734 - protein, 64 aa, Streptococcus agalactiae
  VARIANT 60, 61: Xaa = Any Amino Acid
MGELENTLKAQYPHLSIAQSAPYFIEIMAPGIEKGKSAKTLADYLDISLADSIAFGDNYXXLIN

SEQ ID NO: 8735 - protein, 564 aa, Streptococcus agalactiae
GTGACACCAAAACCAGTACCGGATAAAGATAAATATGATCCAACAGGAGGGGAAACAACAGTACCCCAAGGGACACCAGTTTCAGATAAAGAAATCACAGACTTAGTTAAGATTCCAGATGGCTCAAAAGGGGTTCCGACAGTTGTTGGTGATCGTCCAGATACTAACGTTCCTGGAGATCATAAAGTAACGGTTGATGTAACTTATCCAGATGGAACAAAGGATACAGTAGAAGTAACGGTTCATGTGACACCAAAACCAGTACCGGATAAAGATAAATATGATCCAACAGGAGGGGAAACAACAGTACCCCAAGGGACACCAGTTTCAGATAAAGAAATCACAGACTTAGTTAAGATTCCAGATGGCTCAAAAGGGGTTCCGACAGTTGTTGGTGATCGTCCAGATACTAACGTTCCTGGAGATCATAAAGTAACGGTTGATGTAACTTATCCAGATGGAACAAAGGATACAGTAGAAGTAACGGTTCATGTGACACCAAAACCAGTACCGGATAAAGATAAATATGATCCAACAGGAGGGGAAACAACACTTCCANNNNNT

SEQ ID NO: 8736 - protein, 188 aa, Streptococcus agalactiae
  VARIANT 187, 188: Xaa = Any Amino Acid
MTPKPVPDKDKYDPTGGETTVPQGTPVSDKEITDLVKIPDGSKGVPTVVGDRPDTNVPGDHKVTVDVTYPDGTKDTVEVTVHVTPKPVPDKDKYDPTGGETTVPQGTPVSDKEITDLVKIPDGSKGVPTVVGDRPDTNVPGDHKVTVDVTYPDGTKDTVEVTVHVTPKPVPDKDKYDPTGGETTLPXX

SEQ ID NO: 8737 - protein, 699 aa, Streptococcus agalactiae
ATGGAAGCCCAAAAACATATGGATGATTATCGTAAGGCAATGGAGAAGCTTCACAAGCAATTTCCTATTTTCTTATCGCCAACGACCGCAAGTTTAGCCCCTCTAAATACAGATCCATATGTAACAGAGGAAGATAAAAGAGCGATTTATAATATGGAAAACTTGAGCCAAGAAGAAAGAATTGCTCTCTTTAATCGCCAGTGGGAGCCTATGTTGCGTAGAACACCTTTTACACAAATTGCTAATATGACAGGACTCCCAGCTATCAGTATCCCGACTTACTTATCTGAGTCTGGTTTACCCATAGGGACGATGTTAATGGCAGGTGCAAACTATGATATGGTATTAATTAAATTTGCAACTTTCTTTGAAAAACATCATGGTTTTAATGTTAAATGGCAAAGAATAATAGATAAAGAAGTGAAACCATCTACTGGCCTAATACAGCCTACTAACTCCCTCTTTAAAGCTCATTCATCATTAGTAAATTTAGAAGAAAATTCACAAGTTACTCAAGTATCTATCTCTAAAAAATGGATGAAATCGTCTGTTAAAAATAAACCATCCGTAATGGCATATCAAAAAGCACTTCCTAAAACAGGTGATACAGAATCAAGCCTATCTCCAGTTTTAGTAGTAACCCTTTTATTAGCTTGTTTTAGCTTTGTAACAAAAAGATCAGAAAAGTTGATTGTAATG

SEQ ID NO: 8738 - protein, 233 aa, Streptococcus agalactiae
MEAQKHMDDYRKAMEKLHKQFPIFLSPTTASLAPLNTDPYVTEEDKRAIYNMENLSQEERIALFNRQWEPMLRRTPFTQIANMTGLPAISIPTYLSESGLPIGTMLMAGANYDMVLIKFATFFEKHHGFNVKWQRIIDKEVKPSTGLIQPTNSLFKAHSSLVNLEENSQVTQVSISKKWMKSSVKNKPSVMAYQKALPKTGDTESSLSPVLVVTLLLACFSFVTKRSEKLIVM

SEQ ID NO: 8739 - protein, 1243 aa, Streptococcus agalactiae
ATGTTCTCAAGCGTATTCGCTGACCAAGTCGGCGTCCAAGTTATAGGCGTCAATGACTTTCATGGTGCACTTGACAATACTGGAACAGCAAATATGCCTGACGGAAAAGTTACTAATGCTGGCACTGCTGCTCAATTAGATGCTTATATGGATGATGCTCAAAAAGATTTCAAACAAACTAACCCTAATGGTGAAAGCATTAGAGTTCAAGCTGGTGATATGGTTGGAGCAAGTCCAGCTAACTCAGGGCTTCTTCAAGATGAACCAACCGTTAAAACATTTAATGCAATGAATGTTGAGTATGGCACATTAGGTAACCATGAATTTGATGAAGGTTTGGCAGAATACAATCGTATCGTTACTGGAAAGGCCCCTGCTCCAGATTCTAATATAAATAATATTACGAAATCATACCCACACGAAGCTGCAAAACAAGAAATTGTAGTGGCAAACGTTATTGATAAAGTTAACAAACAAATCCCTTACAATTGGAAACCTTACACTATTAAAAATATTCCTGTAAATAACAAAAGTGTGAACGTTGGCTTTATCGGAATCGTTACCAAAGACATCCCAAACCTTGTCTTACGTAAAAATTATGAACAATATGAATTTTTAGATGAAGCTGAAACAATCGTTAAATACGCCAAAGAATTACAAGCTAAAAATGTCAAGGCTATTGTAGTCCTTGCTCATGTACCTGCAACAAGCAAGGATGATATTGCTGAAGGTGAAGCAGCAGAAATGATGAAAAAAGTCAATCAACTCTTCCCTGAAAATAGCGTAGATATTGTCTTTGCTGGACACAATCATCAATATACAAATGGTCTTGTTGGTAAAACTCGTATTGTACAAGCGCTCTCTCAAGGAAAAGCCTATGCTGATGTACGTGGTGTCCTAGATACTGATACACAAGATTTCATTGAAACCCCTTCAGCTAAAGTAATTGCAGTTGCTCCTGGTAAAAAAACAGGTAGTGCCGATATTCAAGCCATTGTTGACCAAGCTAATACTATCGTTAAACAAGTAACAGAAGCTAAAATTGGTACTGCCGAGTAAGTGGCATGATTACGCGTTCTGTTGTTCAAGATATGTTAGTCCTGTAGGCAGCCTCATCACAGAGGCTCAACTAGCAATTGCTCGAAAAAGCTGGCCAGATATCGATTTTGCCATGACAAATAATGGTGGCATTCGTGCTGACTTACTCATCAAACCAGATGGAACAATCANNNNNTTAATTAAT

SEQ ID NO: 8740 - protein, 415 aa, Streptococcus agalactiae
  VARIANT 352, 411, 412: Xaa = Any Amino Acid
MFSSVFADQVGVQVIGVNDFHGALDNTGTANMPDGKVTNAGTAAQLDAYMDDAQKDFKQTNPNGESIRVQAGDMVGASPANSGLLQDEPTVKTFNAMNVEYGTLGNHEFDEGLAEYNRIVTGKAPAPDSNINNITKSYPHEAAKQEIVVANVIDKVNKQIPYNWKPYTIKNIPVNNKSVNVGFIGIVTKDIPNLVLRKNYEQYEFLDEAETIVKYAKELQAKNVKAIVVLAHVPATSKDDIAEGEAAEMMKKVNQLFPENSVDIVFAGHNHQYTNGLVGKTRIVQALSQGKAYADVRGVLDTDTQDFIETPSAKVIAVAPGKKTGSADIQAIVDQANTIVKQVTEAKIGTAXVSGMITRSVVQDNVSPVGSLITEAQLAIARKSWPDIDFAMTNNGGIRADLLIKPDGTIXXLIN

SEQ ID NO: 8741 - protein, 93 aa, Streptococcus agalactiae
ATGGAAAAATTCAAACAAGAAATTAAGAATATTGGTTCAAATAAGTTAGCCTATTCAATAGACCTTAATAATCAAAAAANNNNNTTAATTAAT

SEQ ID NO: 8742 - protein, 31 aa, Streptococcus agalactiae
  VARIANT 27, 28: Xaa = Any Amino Acid
MEKFKQEIKNIGSNKLAYSIDLNNQKXXLIN

SEQ ID NO: 8743 - protein, 231 aa, Streptococcus agalactiae
TTGGAGAAACAGTTTACTGATTTTGGAGACTTCAATGCCGATGAGCAATTGTTGATCCATTACATGTACAATTCAGGAGAGAAGATGACAACTGCAAAAGCCATTGAACTGACAGGAAGAAGTCGTAAGTTTATTGTAAAAACGATGAAAAAATTACAAGAATTGGGTATGGTTGACTGGTATGGTGCCAATAAAAATGACAGAAATCAATACTATACTTTAACGAAAAAT

SEQ ID NO: 8744 - protein, 77 aa, Streptococcus agalactiae
MEKQFTDFGDFNADEQLLIHYMYNSGEKMTTAKAIELTGRSRKFIVKTMKKLQELGMVDWYGANKNDRNQYYTLTKN

SEQ ID NO: 8745 - protein, 657 aa, Streptococcus agalactiae
GTGACACCAAAACCAGTACCGGATAAAGATAAATATGATCCAACAGGAGGGGAAACAACAGTACCCCAAGGGACACCAGTTTCAGATAAAGAAATCACAGACTTAGTTAAGATTCCAGATGGCTCAAAAGGGGTTCCGACAGTTGTTGGTGATCGTCCAGATACTAACGTTCCTGGAGATCATAAAGTAACGGTTGATGTAACTTATCCAGATGGAACAAAGGATACAGTAGAAGTAACGGTTCATGTGACACCAAAACCAGTACCGGATAAAGATAAATATGATCCAACAGGAGGGGAAACAACAGTACCCCAAGGGACACCAGTTTCAGATAAAGAAATCACAGACTTAGTTAAGATTCCAGATGGCTCAAAAGGGGTTCCGACAGTTGTTGGTGATCGTCCAGATACTAACGTTCCTGGAGATCATAAAGTAACGGTTGATGTAACTTATCCAGATGGAACAAAGGATACAGTAGAAGTAACGGTTCATGTGACACCAAAACCAGTACCGGATAAAGATAAATATGATCCAACAGGAGGGGAAACAACAGTACCCCAAGGGACACCAGTTTCAGATAAAGAAATCACAGACTTAGTTAAGATTCCAGATGGCTCAAAAGGGGTTCCGACAGTTGTTGGTGATCGTCCAGAATAC

SEQ ID NO: 8746 - protein, 219 aa, Streptococcus agalactiae
MTPKPVPDKDKYDPTGGETTVPQGTPVSDKEITDLVKIPDGSKGVPTVVGDRPDTNVPGDHKVTVDVTYPDGTKDTVEVTVHVTPKPVPDKDKYDPTGGETTVPQGTPVSDKEITDLVKIPDGSKGVPTVVGDRPDTNVPGDHKVTVDVTYPDGTKDTVEVTVHVTPKPVPDKDKYDPTGGETTVPQGTPVSDKEITDLVKIPDGSKGVPTVVGDRPEY

SEQ ID NO: 8747 - protein, 147 aa, Streptococcus agalactiae
TTGGCTGATGTTGGTCTCGTTGGCTTCCCATCAATTGGGAAGTCCACGCTACTTAGTGTTGTTTCAGCAGCAAAGCCTAAAATTGGTGCCTATCATTTTACGACAATTGTCCCTAATTTAAGGATGGTTCGTACAACATCANNNNNT

SEQ ID NO: 8748 - protein, 49 aa, Streptococcus agalactiae
  VARIANT 48, 49: Xaa = Any Amino Acid
MADVGLVGFPSIGKSTLLSVVSAAKPKIGAYHFTTIVPNLRMVRTTSXX

SEQ ID NO: 8749 - protein, 294 aa, Streptococcus agalactiae
TTGGATTTCTCAAAAGAAATCTGCTATAATGAACGTGAATTAAATAATATTAAGGAGCTTGTTCACATGATTAAAGAACTAAAAGAATTTTTATTTAAGGGTAATGTTTTAGACCTTGCTGTTGCTGTTATTTTAGGTGCAGCTTTTAATGCTATCATCACTTCACTTGTTAAAGACGTTATTACACCGCTTATCCTTAATCCTGTATTAAAAGCTGCTGGCGTTTCAAATATCGCACAGCTTTCATGGAATGGTGTTGCTTACGGTAATTTCTTAAGTGCAGTNNNNNTTAAT

SEQ ID NO: 8750 - protein, 98 aa, Streptococcus agalactiae
  VARIANT 96, 97: Xaa = Any Amino Acid
MDFSKEICYNERELNNIKELVHMIKELKEFLFKGNVLDLAVAVILGAAFNAIITSLVKDVITPLILNPVLKAAGVSNIAQLSWNGVAYGNFLSAVXXN

SEQ ID NO: 8751 - protein, 669 aa, Streptococcus agalactiae
TTGGCAATTGATAAAGAAAAAATTTCTGAAATCAAGAACAGTGTTAACATTGTTGATGTCATCGGTGAAGTTGTCGGTTTGACAAAAACAGGACGCAATCATCTTGGTTTATGCCCATTTCATAAAGAAAAAACGCCATCTTTTAATGTTATCGAAGATAGGCAGTTTTTTCATTGTTTTGGTTGTGGTCGCTCTGGTGATGTCTTTAAATTTGTGGAAGATTACCAACATATTAGTTTTTTAGATAGTGTACAAGTTCTAGCTGAACGTTCAGGAATACCTCTAGATACTAATTTTAAGGGGCAAGTTCCTAAAAAACCTAAAGCTAATCAGTCGCTTTTAGATATTCATAGAGTTGCTTCGGGATTTTACCATGCCTATTTAATGACAACTAATGATGGTGAACGCGCTAGACAATACCTTGCCGAGCGCGGAGTGACAGAGGACTTAATTAAACATTTTCAAATAGGATTATCGCCGGGAGGGCAGGATTTTCTATATCGTCGTCTGGCAAAAGAGTTTGATGAAAAAACTTTGATGTCTTCTGGTTTGTTCAATTATTCAGAAAATAGCAATCAGTTTTACGATTCATTTAATAATAGAATTATGTTTCCGTTAACTAATGATATTGGTGAAGTCATTGCGTTTTCAGGACNNNNNTTAATTAAT

SEQ ID NO: 8752 - protein, 223 aa, Streptococcus agalactiae
  VARIANT 219, 220: Xaa = Any Amino Acid
MAIDKEKISEIKNSVNIVDVIGEVVGLTKTGRNHLGLCPFHKEKTPSFNVIEDRQFFHCFGCGRSGDVFKFVEDYQHISFLDSVQVLAERSGIPLDTNFKGQVPKKPKANQSLLDIHRVASGFYHAYLMTTNDGERARQYLAERGVTEDLIKHFQIGLSPGGQDFLYRRLAKEFDEKTLMSSGLFNYSENSNQFYDSFNNRIMFPLTNDIGEVIAFSGXXLIN

SEQ ID NO: 8753 - protein, 546 aa, Streptococcus agalactiae
GTGACACCAAAACCAGTACCGGATAAAGATAAATATGATCCAACAGGAGGGGAAACAACAGTACCCCAAGGGACACCAGTTTCAGATAAAGAAATCACAGACTTAGTTAAGATTCCAGATGGCTCAAAAGGGGTTCCGACAGTTGTTGGTGATCGTCCAGATACTAACGTTCCTGGAGATCATAAAGTAACGGTTGATGTAACTTATCCAGATGGAACAAAGGATACAGTAGAAGTAACGGTTCATGTGACACCAAAACCAGTACCGGATAAAGATAAATATGATCCAACAGGAGGGGAAACAACAGTACCCCAAGGGACACCAGTTTCAGATAAAGAAATCACAGACTTAGTTAAGATTCCAGATGGCTCAAAAGGGGTTCCGACAGTTGTTGGTGATCGTCCAGATACTAACGTTCCTGGAGATCATAAAGTAACGGTTGATGTAACTTATCCAGATGGAACAAAGGATACAGTAGAAGTAACGGTTCATGTGACACCAAAACCAGTACCGGATAAAGATAAATATGATCNNNNNTTAATTAAT

SEQ ID NO: 8754 - protein, 182 aa, Streptococcus agalactiae
  VARIANT 178, 179: Xaa = Any Amino Acid
MTPKPVPDKDKYDPTGGETTVPQGTPVSDKEITDLVKIPDGSKGVPTVVGDRPDTNVPGDHKVTVDVTYPDGTKDTVEVTVHVTPKPVPDKDKYDPTGGETTVPQGTPVSDKEITDLVKIPDGSKGVPTVVGDRPDTNVPGDHKVTVDVTYPDGTKDTVEVTVHVTPKPVPDKDKYDXXLIN

SEQ ID NO: 8755 - protein, 792 aa, Streptococcus agalactiae
ATGATCCACCAGGAGGGGAAACAACCAGTCCCCCAAGGGACACCAGTTTCAGATAAAGAAATCACAGACTTAGTTAAGATCCCAGATGGCTCAAAAGGGGTTCCGACAGTTGTTGGTGATCGTCCAGATACTAACGTTCCTGGAGATCATAAAGTAACGGTTGATGTAACTTATCCAGATGGAACAAAGGATACAGTAGAAGTAACGGTTCATGTGACACCAAAACCAGTACCGGATAAAGATAAATATGATCCAACAGGAGGGGAAACAACAGTACCCCAAGGGACACCAGTTTCAGATAAAGAAATCACAGACTTAGTTAAGATTCCAGATGGCTCAAAAGGGGTTCCGACAGTTGTTGGTGATCGTCCAGATACTAACGTTCCTGGAGATCATAAAGTAACGGTTGATGTAACTTATCCAGATGGAACAAAGGATACAGTAGAAGTAACGGTTCATGTGACACCAAAACCAGTACCGGATAAAGATAAATATGATCCAACAGGAGGGGAAACAACAGTACCCCAAGGGACACCAGTTTCAGATAAAGAAATCACAGACTTAGTTAAGATTCCAGATGGCTCAAAAGGGGTTCCGACAGTTGTTGGTGATCGTCCAGATACTAACGTTCCTGGAGATCATAAAGTAACGGTTGATGTAACTTATCCAGATGGAACAAAGGATACAGTAGAAGTAACGGTTCATGTGACACCAAAACCAGTACCGGATAAAGATAAATATGATCCAACAGGAGGGGAAACAACAGTACCCCAAGGGANNNNNTTAATTAAT

SEQ ID NO: 8756 - protein, 264 aa, Streptococcus agalactiae
  VARIANT 260, 261: Xaa = Any Amino Acid
MIHQEGKQPVPQGTPVSDKEITDLVKIPDGSKGVPTVVGDRPDTNVPGDHKVTVDVTYPDGTKDTVEVTVHVTPKPVPDKDKYDPTGGETTVPQGTPVSDKEITDLVKIPDGSKGVPTVVGDRPDTNVPGDHKVTVDVTYPDGTKDTVEVTVHVTPKPVPDKDKYDPTGGETTVPQGTPVSDKEITDLVKIPDGSKGVPTVVGDRPDTNVPGDHKVTVDVTYPDGTKDTVEVTVHVTPKPVPDKDKYDPTGGETTVPQGXXLIN

SEQ ID NO: 8757 - protein, 558 aa, Streptococcus agalactiae
TTGGGTTTAAATCATATTGACCTTGTTCAAAATCTAGGTATTGGTGGCTGTGTGCAGACAGGATACTTATACGCTAATCGTAATCATTACGATGTTGCCGTTCAATTTGATGGTGATGGTCAACATGATATTAGAAGCATTGAAGATGTTGTTATGCCAATCTTAAATGACGAAGCAGATTTTGTTATTGGTTCTCGCTTTGTTGATAAAAAACATCAAAATTTTCAATCGACAGCAATGAGGCGTCTTGGCATAAATTTAATATCTGCTGCTATAAAATTAACGACGGGACACAAAGTCTATGATACAACAAGTGGTTATAGGGCAGCCAACGCGGCGCTAATAGCTTATTTATCGTGTCATTATCCAGTACAATACCCAGAGCCTGAATCAACTGCTCGGATTTTGAAAAAAGGCTATCGTTTGAAGGAAGTCACAGCTAATATGTTTGAACGTGAGGCAGGTACTTCAAGTATAAGTTCCCTAAAATCGATTTTTTATATGACGGATGTTTTAACATCAATTATTATTGCAGGGTTTATTAAGGAGGATGATAAA

SEQ ID NO: 8758 - protein, 186 aa, Streptococcus agalactiae
MGLNHIDLVQNLGIGGCVQTGYLYANRNHYDVAVQFDGDGQHDIRSIEDVVMPILNDEADFVIGSRFVDKKHQNFQSTAMRRLGINLISAAIKLTTGHKVYDTTSGYRAANAALIAYLSCHYPVQYPEPESTARILKKGYRLKEVTANMFEREAGTSSISSLKSIFYMTDVLTSIIIAGFIKEDDK

SEQ ID NO: 8759 - protein, 296 aa, Streptococcus agalactiae
ATGAGTTTAGCATTGCAAATTGAAATGTTTATTTTAGCCATTGTCCTACTTTATATGATTATAAGAATGGTTAATAAAAACACATTTTCTGTTAAACGTTCTTTACCTTGGCTATTAGTTGGTTTAATTCTAGTCTTTATTAGTGATTTCCCTGGGGTGGTCTCATTTATCGCTCATCACCTTGGATTCGCTTTACGATGAATTTCTTGGTATTTGGGGCTATTTTATTTCTGGTTTGGTTAGAAATATTTGATACTAGTAGCAATACCCAAAGAGATGAGCAAATNNNNNTTAAT

SEQ ID NO: 8760 - protein, 99 aa, Streptococcus agalactiae
  VARIANT 96, 97, 98: Xaa = Any Amino Acid
MSLALQIEMFILAIVLLYMIIRMVNKNTFSVKRSLPWLLVGLILVFISVFPWGGLIYRSSPWIRFTMNFLVFGAILFLVWLEIFDTSSNTQRDEQXXXN

SEQ ID NO: 8761 - protein, 567 aa, Streptococcus agalactiae
GTGACACCAAAACCAGTACCGGATAAAGATAAATATGATCCAACAGGAGGGGAAACAACAGTACCCCAAGGGACACCAGTTTCAGATAAAGAAATCACAGACTTAGTTAAGATTCCAGATGGCTCAAAAGGGGTTCCGACAGTTGTTGGTGATCGTCCAGATACTAACGTTCCTGGAGATCATAAAGTAACGGTTGATGTAACTTATCCAGATGGAACAAAGGATACAGTAGAAGTAACGGTTCATGTGACACCAAAACCAGTACCGGATAAAGATAAATATGATCCAACAGGAGGGGAAACAACAGTACCCCAAGGGACACCAGTTTCAGATAAAGAAATCACAGACTTAGTTAAGATTCCAGATGGCTCAAAAGGGGTTCCGACAGTTGTTGGTGATCGTCCAGATACTAACGTTCCTGGAGATCATAAAGTAACGGTTGATGTAACTTATCCAGATGGAACAAAGGATACAGTAGAAGTAACGGTTCATGTGACACCAAAACCAGTACCGGATAAAGATAAATATGATCCAACAGGAGGGGAAACAACAGTACCCCAANNNNNT

SEQ ID NO: 8762 - protein, 189 aa, Streptococcus agalactiae
  VARIANT 188, 189: Xaa = Any Amino Acid
MTPKPVPDKDKYDPTGGETTVPQGTPVSDKEITDLVKIPDGSKGVPTVVGDRPDTNVPGDHKVTVDVTYPDGTKDTVEVTVHVTPKPVPDKDKYDPTGGETTVPQGTPVSDKEITDLVKIPDGSKGVPTVVGDRPDTNVPGDHKVTVDVTYPDGTKDTVEVTVHVTPKPVPDKDKYDPTGGETTVPQXX

SEQ ID NO: 8763 - protein, 159 aa, Streptococcus agalactiae
TTGATTAGACGTAATCGTGAGCAAGAGCAATACATTAAAGATTTAGAAGAGAAAATCGCTTACTTCAACGAAATGAAGGAATCGTTAAGTCAATCAGTTATTTTAGAAATTATTACCTACATGAAGCTATTACTGAAGAGCAATTCGAAGTACTCCTAT

SEQ ID NO: 8764 - protein, 53 aa, Streptococcus agalactiae
MIRRNREQEQYIKDLEEKIAYFNEMKESLSQSVILEIITYMKLLLKSNSKYSY

SEQ ID NO: 8765 - protein, 378 aa, Streptococcus agalactiae
GTGACAAAAATGAATTTCATAGTGAAAAACATCTATTTTAAACATCTAAGTCGAGTTAATCCATTTGACACAGCAGTAGTTACTATCGGATCTTTTGATGGTAAAGGTTCTGCTAATGTGATCAAAGATAGTGTAACCTTAGAAGGTGATGTGCGCGTGATGTCTGAAGAGACACGAGGTGTTGTTGAGGAGGAATTTAAGCGTATTCTAGATGGAATAGCACAAACTTATGGTGTTAGTTATCAGTTAGACTATCAGAATGATTATCCTGTTTTAGTTAATAACAGTGAAGTGACACAGAAAGTTGCAAATAGTTTAAAATCTGTTGCTATAAAGGAAATTTTAGACGTCATTGATTGCGATCCTCAAACGCCAACC

SEQ ID NO: 8766 - protein, 126 aa, Streptococcus agalactiae
MTKMNFIVKNIYFKHLSRVNPFDTAVVTIGSFDGKGSANVIKDSVTLEGDVRVMSEETRGVVEEEFKRILDGIAQTYGVSYQLDYQNDYPVLVNNSEVTQKVANSLKSVAIKEILDVIDCDPQTPT

SEQ ID NO: 8767 - protein, 174 aa, Streptococcus agalactiae
ATGGAAACATATACTCTATCGAATACTCTTAACATTCCTAAAATTGGTTTTGGGACATGGCAACTAACTGAAGGTGAAGAAGCTTATAAGGCAGTGACTCATGCTTTAAAAGTTGGTTATACTCATATTGATACTGCTCAGATTTATGCAACGAACACAGTGTTGGACGTGCTA

SEQ ID NO: 8768 - protein, 58 aa, Streptococcus agalactiae
METYTLSNTLNIPKIGFGTWQLTEGEEAYKAVTHALKVGYTHIDTAQIYATNTVLDVL

SEQ ID NO: 8769 - protein, 114 aa, Streptococcus agalactiae
TTGGATGCTGTTGCTGTAACATATGGTCCGGGATTAGTAGGATCCTTATTGGTAGGTATGGCTGCAGCAAAAGCTTTCGCTTGGGCAAATAAATTACCTCTAATNNNNNTTAAT

SEQ ID NO: 8770 - protein, 38 aa, Streptococcus agalactiae
  VARIANT 35, 36, 37: Xaa = Any Amino Acid
MDAVAVTYGPGLVGSLLVGMAAAKAFAWANKLPLXXXN

SEQ ID NO: 8771 - protein, 131 aa, Streptococcus agalactiae
TTGACCAGTTCCTCTTCTGAGAAGTTAAATAACTATTTTTGGAAATCTATAGAAGAAGGAGATTTTTCAAATACGACTTTTGCCTTAGCCTATATGAAAAACGAGACTATGATGCGANNNNNTTAATTAAT

SEQ ID NO: 8772 - protein, 44 aa, Streptococcus agalactiae
  VARIANT 40, 41: Xaa = Any Amino Acid
MTSSSSEKLNNYFWKSIEEGDFSNTTFALAYMKNDDYDAXXLIN

SEQ ID NO: 8773 - protein, 90 aa, Streptococcus agalactiae
ATGGAGCTCAATACCAAAAGCGCAGAATACAGCTATCATGTAGATGGTAAGACTGGACAAATCCTTGAGCGGGACATGGATAATAATGGC

SEQ ID NO: 8774 - protein, 30 aa, Streptococcus agalactiae
MELNTKSAEYSYHVDGKTGQILERDMDNNG

SEQ ID NO: 8775 - protein, 96 aa, Streptococcus agalactiae
ATGGAATTATCACGTGAAGAAGCTAATACTCGAGAAACTGTCACAGCTTATAGAGAATATAAGCAAGTCATTTCAAATATTTCAGATGCTGAAGAA

SEQ ID NO: 8776 - protein, 32 aa, Streptococcus agalactiae
MELSREEANTRETVTAYREYKQVISNISDAEE

SEQ ID NO: 8777 - protein, 465 aa, Streptococcus agalactiae
ATGAATGTGGTTTTAAAACAGCGAATTCCTTTAAAAATTAAACGAATGGGAATTAATGGTGAAGGAATAGGTTTTTATAAAAAAACACTAATCTTTGTTCCAGGGGCTCTTAAGGGAGAAGAGGTGTTTTGTCAGATTTCTTCTGTTAGACGTAATTTTGCAGAAGCTAAACTGTTAAAGATAAATAAAAAGTCTAAAAATAGGGTAGATCCCGCTTGTTCTATTTATAAAGAATGTGGGGGATGCCAAATAATGCACCTTCAATATGATAAGCAGCTAGAGTTTAAAACGGATGTTATTCGACAGGCTCTAATGAAATTTAAACCAGAGGGATATGAGAATTATGAAATCCGTAAAACGATAGGTATGCCGGAACCTGAACACTATCGTGCTAAATTACAATTTCAAGTGCGTTCGTTTGGAGGGAATGTGAGGGCAGGTTTATATGCACAAGGGACANNNNNT

SEQ ID NO: 8778 - protein, 155 aa, Streptococcus agalactiae
  VARIANT 154, 155: Xaa = Any Amino Acid
MNVVLKQRIPLKIKRMGINGEGIGFYKKTLIFVPGALKGEEVFCQISSVRRNFAEAKLLKINKKSKNRVDPACSIYKECGGCQIMHLQYDKQLEFKTDVIRQALMKFKPEGYENYEIRKTIGMPEPEHYRAKLQFQVRSFGGNVRAGLYAQGTXX

SEQ ID NO: 8779 - protein, 306 aa, Streptococcus agalactiae
ATGCAAATTTATTTACCAACTCGAGTTCTTACTACTATCGGACACAGCCCTATCACAGCCATCTTAGTTATGATGTTGCTTGCTTTCATTTTGTCATTGTGTAGTGAAGCTGACGCTTTTATAGGTGCTTCTTTATTATCAACCTTTGGAATCGCGCCAGTAATGGCTTTCCTTTTAATTGGACCCATGATTGATATTAAGAATTTAATGATGATGGTAAATTCTTTTAAAACAAGGTTTATTGTCCAATTCATTAGTGTATCTTCTATTATTATTATCATCTATTGTCTATTTGTGGGGGTAATA

SEQ ID NO: 8780 - protein, 102 aa, Streptococcus agalactiae
MQIYLPTRVLTTIGHSPITAILVMMLLAFILSLCSEADAFIGASLLSTFGIAPVMAFLLIGPMIDIKNLMMMVNSFKTRFIVQFISVSSIIIIIYCLFVGVI

SEQ ID NO: 8781 - protein, 119 aa, Streptococcus agalactiae
ATGTCAGATGCGGATTTAGAGATAATCTTACAAAATCCTAGGGTTATTCGTCATCGTCTAAAACTTTTCTCAACACGACAAAATGCTAGGTCAATTATATTATTCAGAAAGAATTAATA

SEQ ID NO: 8782 - protein, 40 aa, Streptococcus agalactiae
MSDADLEIILQNPRVIRHRLKLFSTRQNARSIILIQKELI

SEQ ID NO: 8783 - protein, 171 aa, Streptococcus agalactiae
ATGTCTTATGGGGAATATGCATCCACACCAGCCGATGTTGGAGCAAAGTTATCGGCTGAGCTGCTCAAAGATTGGTTCTGCAGCTTTTATGAGGGCTTTCAAAAAGATGCTAAAATTTGGTTCCCCTATGAGGACTCAGCACTTCTAGAGCTCCCATNNNNNTTAATTAAT

SEQ ID NO: 8784 - protein, 57 aa, Streptococcus agalactiae
  VARIANT 53, 54: Xaa = Any Amino Acid
MSYGEYASTPADVGAKLSAELLKDWFCSFYEGFQKDAKIWFPYEDSALLELPXXLIN

SEQ ID NO: 8785 - protein, 111 aa, Streptococcus agalactiae
GTGGGGAGGCCAGAAAATGAGCGCCAAGTCCATGATGCTGAAGAAGCTCAAGGACAAGGCGAGGAAGATCGAGGAGGCCAAGAAGAAGGAAATCTCCGCCAAGCTGTGAGG

SEQ ID NO: 8786 - protein, 37 aa, Streptococcus agalactiae
MGRPENERQVHDAEEAQGQGEEDRGGQEEGNLRQAVR

SEQ ID NO: 8787 - protein, 114 aa, Streptococcus agalactiae
ATGTCAGATTTATCAGCTTTTGAAGGTAGAATTGCCTTTGAAAAGGCTGATATTATTGAGAAGTTTGAAAATGCTGTTACGATAATGTTTGCACGTTATGATTTTGTTCGAAAA

SEQ ID NO: 8788 - protein, 38 aa, Streptococcus agalactiae
MSDLSAFEGRIAFEKADIIEKFENAVTIMFARYDFVRK

SEQ ID NO: 8789 - protein, 231 aa, Streptococcus agalactiae
TTGCTTCCAATTCATTGTGCTAAGAAACCTTATGAGAAGTTATCAGACGGGACGATTAAGGAAGTGGAAGTGCCCTATGATATTCCAGCTAGTTGGGAATGGGTGAGGTTGCGAAATATATCTTCGTTGAGTTTTTTCCCTAATATATCTGGAGATAAAATTCCGAATTATAGTTGGGTTTTAGATATGGAAGATATAGAAAAAGAAACTGGAAAATTAGTTCGAAAAAAC

SEQ ID NO: 8790 - protein, 77 aa, Streptococcus agalactiae
MLPIHCAKKPYEKLSDGTIKEVEVPYDIPASWEWVRLRNISSLSFFPNISGDKIPNYSWVLDMEDIEKETGKLVRKN

SEQ ID NO: 8791 - protein, 450 aa, Streptococcus agalactiae
ATGAATCAAACCCTATCCCACTACCAGTTCTCACCAGAGACTCAATACTTGGACAGGAAATCTGCACGTAAAAAGCCGTCTGAACTTCTTAAACACCTGATTGCCTTTGCTAATGCAGATGGTGGCCAGCTGGTAATCGGTATTGAGGACGACAAGCAAAATAACATCATTACTGGCTTCAAAGATGGCAGAGCCTATCCCATTGATGACTTCAAAAAGATTGACCGTGAGATGCGTGATACTCCTTTGGACTTATCTTTTGAAGAAATCCCTGTGCGAAACCATAAGGGTGAAGACGATGTGATTTTGGTTATCTCAGTTGAATTATCTTCAAATCGAGTGATTGCTGCGCCTAATGATGAAGTTTACCTGCGTCAGGGGGATGAAACGGTAAAATTAAGTTATGAAACACGAACTCAGCTCAGCTATGATAAAGGGGACACGTTTCTT

SEQ ID NO: 8792 - protein, 150 aa, Streptococcus agalactiae
MNQTLSHYQFSPETQYLDRKSARKKPSELLKHLIAFANADGGQLVIGIEDDKQNNIITGFKDGRAYPIDDFKKIDREMRDTPLDLSFEEIPVRNHKGEDDVILVISVELSSNRVIAAPNDEVYLRQGDETVKLSYETRTQLSYDKGDTFL

SEQ ID NO: 8793 - protein, 585 aa, Streptococcus agalactiae
TTGGAGGAGTTTCCGTATGCTATCCGACTAGTTGCAGAAGTTTTAGAATCAAACGGTTCATCATCTCAGGCTTCTATATGTGCTGGAACGCTTGCTCTTATGGCAGGTGGTGTGCCTATAAAAGCTCCGGTTGCTGGTATTGCCATGGGACTCATATCAGATGGAACAAACTACACAGTCCTTACTGATATTCAAGGATTAGAAGACCATTTTGGCGATATGGACTTTAAGGTTGCGGGTACACGTGAAGGGATTACAGCACTTCAAATGGATATTAAAATTGAAGGTATTACCCCTCAAATTTTGGAAGAAGCTCTTGCGCAAGCTAAAAAAGCACGCTTTGAAATTCTTGATGTCCTTCATGGAGCTATCGCAGAGCCACGTCCACAATTAGCACCAACGGCACCTAAGATTGATATGATAAAAATCGATGTTGATAAGATTAAAGTTGTCATCGGTAAAGGCGGCGAAACTATCGATAAAATCATCGCTGAAACAGGTGTTAAGATTGATATTGATGAAGAAGGAAATGTATCTATCTTCTCTAGTGATCAGGCTGCTATTGATCGTANNNNNTTAATTAAT

SEQ ID NO: 8794 - protein, 195 aa, Streptococcus agalactiae
  VARIANT 191, 192: Xaa = Any Amino Acid
MEEFPYAIRLVAEVLESNGSSSQASICAGTLALMAGGVPIKAPVAGIAMGLISDGTNYTVLTDIQGLEDHFGDMDFKVAGTREGITALQMDIKIEGITPQILEEALAQAKKARFEILDVLHGAIAEPRPQLAPTAPKIDMIKIDVDKIKVVIGKGGETIDKIIAETGVKIDIDEEGNVSIFSSDQAAIDRXXLIN

SEQ ID NO: 8795 - protein, 651 aa, Streptococcus agalactiae
GTGCAGTTTGATATTTTAAATTGGGGTGCTTTGACAATTGGCACAAACGAAGTTAAGGACAAAAAACTGACATTGGAATGGACTGGTCAAGACACTAAGTTAGCTCGTATTTTGTCAATTGCTAATAATTTTGATGCAGAAATCGAATTTGAAACTCAATTACACAACAATCACACGTTTAAAGCGTTTATTGTAAATGTGTACAAGGAATACGAAGAGGGCGTGTCCTATGGCGTAGGTCGTGACCGCAGCGACATAGTGTTGAGATATCAAAAAAATGTAACTGGTATCACTAAAAAATTAGACAAGCGCCAGATTTACAACGCCATACGCCCGTATGGCAAAAAGACAGTCAAAGGCGAGCGCGTTATTTCTAATCCTGTAACTCGCAAAGTCACTAAAACAGTTGGGTCAAATCGTACATATTTAGGCGGAGACCTCAAATATTATGGTCATACAATCAAAAAAGCTAACGTACAATCTATTATTAACTACGCGGTGCAGTATAATATTTTGCCGAGTGGAATCATATGTCAACTGTACTTAGAAAGTCTTTGGGGTGATTCAGCAGTTGGTAAACGTGACAATAACTGGGCAGGTATAAGCGGCGGAGCACAGACACGCCCTAGTGGAGTAAAAGTCACTNNNNNT

SEQ ID NO: 8796 - protein, 217 aa, Streptococcus agalactiae
  VARIANT 216, 217: Xaa = Any Amino Acid
MQFDILNWGALTIGTNEVKDKKLTLEWTGQDTKLARILSIANNFDAEIEFETQLHNNHTFKAFIVNVYKEYEEGVSYGVGRDRSDIVLRYQKNVTGITKKLDKRQIYNAIRPYGKKTVKGERVISNPVTRKVTKTVGSNRTYLGGDLKYYGHTIKKANVQSIINYAVQYNILPSGIICQLYLESLWGDSAVGKRDNNWAGISGGAQTRPSGVKVTXX

SEQ ID NO: 8797 - protein, 516 aa, Streptococcus agalactiae
ATGACTTTTGCAGAATTGCAGACAAAAATGCAAATAACAAAAACAACAAAACAAGGCGTTAAATATACATTTCGCAATGCAGAAGATATTTTTACACACTTTAAAACACTAAATAGCGGGTGGGAGTTAACGGTATCTGACGAATTGGTGGAATTGATCGGCAGAATTTTTATCAAAGCAACAGCAACAGCTAGACTTGGTGATGAACAACACCAAGCGACAAGATATGCTGAGTTGGACAGTGTGCCTGTTTTAAATACTAAAGACTATAAAACAGGAGAACCTAAACAAATACAACAAATGCAAGTTCCGCAATGGACTGGTGCAGTGAGTTCGTACGCAGGTAAGTATGCCTTGCAAGGGCTGTTTGGAATTGGTGAGGAAGATGTAGATGCGATTGTTACAGAAGATACGCAACGCAAAGAACAAAAAACCTCCCGACCGACAACCTCTAAAACTCCTAAAATAAGCAATATCCAAGTCGAGAAAAACAAGTCTGATTTAAANNNNNTTAAT

SEQ ID NO: 8798 - protein, 172 aa, Streptococcus agalactiae
  VARIANT 169, 170, 171: Xaa = Any Amino Acid
MTFAELQTKMQITKTTKQGVKYTFRNAEDIFTHFKTLNSGWELTVSDELVELIGRIFIKATATARLGDEQHQATRYAELDSVPVLNTKDYKTGEPKQIQQMQVPQWTGAVSSYAGKYALQGLFGIGEEDVDAIVTEDTQRKEQKTSRPTTSKTPKISNIQVEKNKSDLXXXN

SEQ ID NO: 8799 - protein, 144 aa, Streptococcus agalactiae
TTGGACGAAACAAAAATACCTTTTGAATACATGCAAGAAAAAGTTGAATACAAACCAAAAAAAGATGAAATCTCAAAAGTTTTAAAATCTGGAATTGATATATCTGGAGTTCAACTAATCGAAACAGAAAGTTTACAGGTGAAG

SEQ ID NO: 8800 - protein, 48 aa, Streptococcus agalactiae
MDETKIPFEYMQEKVEYKPKKDEISKVLKSGIDISGVQLIETESLQVK

SEQ ID NO: 8801 - protein, 1341 aa, Streptococcus agalactiae
ATGAAAAAAAGAATATTATCAGCAGTCCTTGTGAGTGGAGTAACTCTTGGAACTGCTGCCGTAACAGTAAACGCTGATGACTTTGACTCGAAAATTGCTGCTACTGATTCAGTAATCAATACTTTATCAGGGCAACAAGCAGCAGCACAAAACCAGGTGACTGCTATTAAAGGACAAGTTGGTGCTTTAGAGTCTCAACAATCAGAATTAGAAGCGCAAAATGCTCAACTTGAGGCTGTATCTCAGCAGTTAGGTCAAGAGATTCAAACTCTTTCTAATAAAATTGTTGCACGTAACGAATCTTTGAAAAAGCAAGTTCGTAGTGCTCAAAAGGGTAACTTGACTAACTATATTAATACTATTTTAAATTCGAAATCAGTATCTGATGCTGTTAATCGTGTTGTTGCTATTCGTGAGGTTGTTTCAGCTAATGAAAAGATGTTAGCACAACAAGAGGCTGACAAAGCGGCCTTAGAAGCTAAACAAATTGAAAATCAAAATGCTATAAATACTGTAGCAGCTAACAAGCAAGCTATCGAAAATAATAAAGCAGCCTTAGCAACACAAAGAGCACAATTAGAAGCAGCTCAATTAGAGTTATCTGCTCAATTGACTACAGTCCAAAATGAAAAAGCATCTTTAATTCAGGCAAAAGCACAAGCTGAGGAAGCTGCGCGTAAGGCAGCTGAAGCACAAGCAGCAGCTGAAGCGAAAGCACAAGCTGAAGCGAAAGCACAAGCTGAGTCTGTAGCACAAGCACAGGCAGCAGCACAAGTTGAGTCTGCCACAGCTCCTACTGAAACAGTTCAAACACAACCGAGAACTGAAATAAAGCCTTCTAATCTTACGGCTACTTCTTCGGCAACTACTGTTGCTAAAACTACAGCTACAGCTACTAATGAGCCAAAAGTTGCTCAACCTTCTGTAGTAACTAAAGCAGTTGAAGCACCTAAAGCAGTTGTTTCTTCAACACCTAGATCGGTATCAAAACCTGTTGTCAGAAGTTATGATTCAAGTAACACATACCCAATGGGACAATGTACTTGGGGAGCTAAGTCAATGGCTTCTTGGGTTGGTAACTATTGGGGAAATGCTAATCAGTGGGGTGCTAGTGCACGTGCAGCTGGTTATTCTGTAGGAACTACCCCTCGTGTTGGTGCAGTAGCTGTTTGGCCATATGATGGTGGTGGTTACGGGCACGTTGCAGTAGTAACGTCAGTGGCTAACAATTCATCTATCCAAGTTATGGAATCAAACTATGCTGGAAATATGAGCATTGGCAATTACCGTGGTTCATTTAACCCTAGTGCTTCTGGCTCTGTTTACTATATTTACCCAAAT

SEQ ID NO: 8802 - protein, 447 aa, Streptococcus agalactiae
MKKRILSAVLVSGVTLGTAAVTVNADDFDSKIAATDSVINTLSGQQAAAQNQVTAIKGQVGALESQQSELEAQNAQLEAVSQQLGQEIQTLSNKIVARNESLKKQVRSAQKGNLTNYINTILNSKSVSDAVNRVVAIREVVSANEKMLAQQEADKAALEAKQIENQNAINTVAANKQAIENNKAALATQRAQLEAAQLELSAQLTTVQNEKASLIQAKAQAEEAARKAAEAQAAAEAKAQAEAKAQAESVAQAQAAAQVESATAPTETVQTQPRTEIKPSNLTATSSATTVAKTTATATNEPKVAQPSVVTKAVEAPKAVVSSTPRSVSKPVVRSYDSSNTYPMGQCTWGAKSMASWVGNYWGNANQWGASARAAGYSVGTTPRVGAVAVWPYDGGGYGHVAVVTSVANNSSIQVMESNYAGNMSIGNYRGSFNPSASGSVYYIYPN

SEQ ID NO: 8803 - protein, 966 aa, Streptococcus agalactiae
ATGTCTTATTCTAATTTAAAATTGTTTGCACTGTCATCAAACAAAGAACTAGCGAAAAAAGTGTCTCAGACGATTGGAATTCCGCTAGGTCAATCGACAGTTCGCCAATTTTCTGATGGTGAGATTCAAGTTAATATTGAAGAGTCTATTCGTGGCCATCATGTTTTTATTTTACAATCAACAAGCTCACCAGTTAATGATAATTTGATGGAAATTTTAATTATGGTTGACGCTTTAAAGCGTGCTAGTGCGGAGTCTGTTAGTGTGGTAATGCCTTACTATGGGTATGCTCGTCAAGATCGCAAGGCACGTTCTCGTGAACCTATTACTTCGAAACTCGTTGCGAACATGCTAGAAGTTGCTGGTGTTGATCGTCTTTTAACAGTTGATTTACATGCAGCTCAAATTCAGGGATTCTTTGATATTCCCGTTGATCACCTTATGGGGGCTCCCCTTATTGCAGATTACTTTGATCGTCAGGGATTGGTTGGTGATGATGTTGTTGTCGTTAGTCCTGATCATGGTGGTGTAACACGTGCACGTAAGCTGGCACAGTGTTTAAAGACACCGATTGCTATCATTGATAAGCGCCGTAGTGTTACTAAAATGAATACATCTGAAGTAATGAATATTATTGGTAATATCAAAGGTAAAAAATGTATTTTAATTGATGATATGATTGATACTGCAGGTACTATTTGCCATGCTGCAGACGCTTTAGCTGAAGCAGGGGCAACAGCTGTTTATGCTTCATGTACTCACCCTGTTTTATCAGGGCCGGCTTTGGATAATATTCAAAATTCAGCTATTGAAAAATTAATTGTGTTAGATACGATTTACCTCCCTGAAGAACGTTTGATTGATAAGATTGAACAAATTTCAATTGCGGAATTGATTGGTGAAGCTATTATCCGTATTCACGAGAAACGTCCTTTATCACCATTATTTGAAATGAATAAACTAAAA

SEQ ID NO: 8804 - protein, 322 aa, Streptococcus agalactiae; identical to SEQ ID NO: 54

SEQ ID NO: 8805 - protein, 1173 aa, Streptococcus agalactiae
ATGACATTAGAGAAACGATTTAATAAGTACTTAGATAGAATAGAGGTCTCCTTAATTCGTCAGTTTGATCAATCTATTTCAGATATACCTGGAATGGTAAAATTAACTCTTGGAGAACCAGATTTTACCACTCCTGATCATGTTAAAGAAGCAGCTAAATCAGCTATTGATGCGAATCAATCGTATTACACTGGTATGAGCGGTTTATTAGCTCTAAGGCAAGCTGCTGCAGATTTTGCAAAGGATAAATATAATCTTACTTATAATCCTGATAGTGAGATCTTGGTTACGATAGGTGCCACAGAAGCTCTGTCTGCATCTCTTATAGCTATTTTAGAAGCTGGTGATGTTGTTCTATTACCCGCCCCCGCTTATCCAGGATATGAGCCAATAGTTAACCTTGTAGGAGCTGATATCGTAGAAATTGATACTAGAGAAAATGACTTTAGACTAACTCCTGAAATGTTAGAAACGGCTATTATCCAACAAGGTGAAAAATTAAAGGCTGTTTTACTTAATTATCCTACTAACCCTACAGGTATTACCTATTCAAGGCAAGAAATTGCTGCATTAGCTGAAGTCTTTAAAAAATATGATATTTTTGTTATTAGTGATGAAGTTTATTCTGAGTTAACTTACACTGGTCAGCAGCATGTTTCAATTGCAGAATATTTACCTAACCAAACTATCTTAATTAATGGCTTATCAAAATCACATGCTATGACTGGTTGGAGAGTTGGATTGGTGTATGCTCCTGAAGCATTTACTGCTCAAATCATTAAAAGTCATCAATACATGGTGACAGCTGCTAGTACTATTTCGCAATTTGCTGGGGTAGAAGCCTTATCTGTGGGTAAAAATGATACGTTACCTATGCGTCAAGAATATATTAAACGTAGAGATTATATCATTGATAAAATGTCTAAACTTGGTTTCAAAATAATTAAACCGAGTGGCGCTTTTTATATCTTTGCTAAAATACCTGATAGTTATCCACAGGATTCTTTTAAGTTTTGTCAGGATTTTGCTTATCAACAAGCAGTAGCTATTATTCCAGGGGTGGCTTTTGGTAAATATGGTGAAGGATATATACGTCTTTCTTATGCTGCTAGTATGGAAGTTATTGAAACAGCAATGGCTAGATTGAAAGTTTTTATGGAATCATATGAGGGT

SEQ ID NO: 8806 - protein, 391 aa, Streptococcus agalactiae
MTLEKRFNKYLDRIEVSLIRQFDQSISDIPGMVKLTLGEPDFTTPDHVKEAAKSAIDANQSYYTGMSGLLALRQAAADFAKDKYNLTYNPDSEILVTIGATEALSASLIAILEAGDVVLLPAPAYPGYEPIVNLVGADIVEIDTRENDFRLTPEMLETAIIQQGEKLKAVLLNYPTNPTGITYSRQEIAALAEVFKKYDIFVISDEVYSELTYTGQQHVSIAEYLPNQTILINGLSKSHAMTGWRVGLVYAPEAFTAQIIKSHQYMVTAASTISQFAGVEALSVGKNDTLPMRQEYIKRRDYIIDKMSKLGFKIIKPSGAFYIFAKIPDSYPQDSFKFCQDFAYQQAVAIIPGVAFGKYGEGYIRLSYAASMEVIETAMARLKVFMESYEG

SEQ ID NO: 8807 - protein, 729 aa, Streptococcus agalactiae
TTGTATAATCGTAATTATCGTGAAGATGATAAATTAGTTAAAATCTTTACGGAGACTGAGGGAAAAAGGATGTTTTTTGTAAAGCATGCTTCAAAGTCAAAATTCAATGCTGTGCTCCAACCTTTGACTATTGCTCATTTTATTTTAAAAATTAATGATAATGGTCTTTCTTATATTGATGATTATAAAGAAGTTTTAGCATTTCAAGAAATTAATTCAGACTTGTTTAAGTTGTCATATGCGAGTTATATTACTTCTTTGGCTGATGTGGCTATTAGTGATAATGTAGCGGATGCTCAATTATTTATTTTCCTAAAGAAAACGTTAGAATTGATTGAGGACGGTTTAGATTATGAGATTCTAACGAATATTTTTGAAGTACAACTACTAGAGAGGTTCGGTGTTGCTTTAAATTTTCATGATTGTGTTTTTTGTCATAGGGCAGGATTACCTTTTGATTTTTCACACAAATATTCTGGATTATTATGTCCAAACCATTATTATAAAGACGAGAGAAGAAACCACCTAGATCCTAATATGCTATACTTAATCAATCGTTTTCAGTCAATTCAATTTGATGATTTACAAACAATTTCTGTGAAACCTGAGATGAAACTTAAAATTCGTCAATTTTTGGACATGATTTACGATGAATATGTAGGGATTCATCTTAAAAGTAAAAAATTTATTGATGATTTGTCTAGTTGGGGAAGTATTATGAAATCAGAT

SEQ ID NO: 8808 - protein, 243 aa, Streptococcus agalactiae
MYNRNYREDDKLVKIFTETEGKRMFFVKHASKSKFNAVLQPLTIAHFILKINDNGLSYIDDYKEVLAFQEINSDLFKLSYASYITSLADVAISDNVADAQLFIFLKKTLELIEDGLDYEILTNIFEVQLLERFGVALNFHDCVFCHRAGLPFDFSHKYSGLLCPNHYYKDERRNHLDPNMLYLINRFQSIQFDDLQTISVKPEMKLKIRQFLDMIYDEYVGIHLKSKKFIDDLSSWGSIMKSD

SEQ ID NO: 8809 - protein, 849 aa, Streptococcus agalactiae
ATGAAAAAAACATTATACATTACCAATAAACTCTTTTTTGCTAACTGGTTTGTGCCAGTTATTGGTGCAGTTCTAATTCAAGTTATCGGCATCATTGTAAGCAGACGCCTTGTAGTAAAATTGCTACCTGATGATTATAAATTCAATTTATACATTGCGCTTTTACTATTTGTTCCTATTTTGGCAAGTATTTTACTATTTTTAATCTATTTCCAAAAAAGGGATTTTACTTCCTTGGGATTTACTAAAGATAATAATGTTTTAACAACGATCTCAGGATTTATTACTGGTAGTTTACTGATGTTTTTTATTTATATTTGCCACTGGTTATCAGGTTTTGTGGAAATTTCTTCCAGCAATTCCTTTTCTTTTGGACCTTTTTTCTTTTTATTTCTTGCATACTTTATCCAAAGCTTGACAGAGGAAATTTTATTTAGAGGATATGTTATGACAACAGTTACCAAATTTAAAGGTAGTTTTGCAGGTGTTTTATGCAATTCTATGTTGTTTTCCTTTATCCACTTTAGAAACTATGGTATCACAGCAATAGCACTTTTTAATTTATTTTTACTTGGTATTATTTTTTCTATTCTTTTTAATATGACCCAAAATATTCTTTTTGTTACAGGAGTTCATACTACATGGAATTTTACTATGGGATGTGTATTAGGTAATAAGGTTAGTGGGGGGTATTCTCCTGTTTCTCTTTTTAGAATTACTGAAAATTCTAGCTTTGCTCTTTGGAATGGTGGGGATTTTGGTTTTGAAGGGGGAGTACTATGTTCTTTGATATTAGTAGGTTGTTTAGCATACTTTTCTTTGGAAAGAGTGAGAGTATCTGTTAGATAT

SEQ ID NO: 8810 - protein, 283 aa, Streptococcus agalactiae
MKKTLYITNKLFFANWFVPVIGAVLIQVIGIIVSRRLVVKLLPDDYKFNLYIALLLFVPILASILLFLIYFQKRDFTSLGFTKDNNVLTTISGFITGSLLMFFIYICHWLSGFVEISSSNSFSFGPFFFLFLAYFIQSLTEEILFRGYVMTTVTKFKGSFAGVLCNSMLFSFIHFRNYGITAIALFNLFLLGIIFSILFNMTQNILFVTGVHTTWNFTMGCVLGNKVSGGYSPVSLFRITENSSFALWNGGDFGFEGGVLCSLILVGCLAYFSLERVRVSVRY

SEQ ID NO: 8811 - protein, 990 aa, Streptococcus agalactiae
ATGAAGAAAATTGCTGTAGATGCTATGGGTGGAGATTACGCTCCCAAAGCTATTGTAGAGGGTGTTAATCAAGCTATTTCAGATTTTAGTGATATTGAAGTACAACTCTATGGCGATCAGAAAAAAATTGAGAAATATTTAACAGTAACGGAGCGAGTTAGTATTATTCATACTGAAGAAAAAATTAATTCTGATGATGAGCCTGCTAAAGCTGTTCGTCGTAAAAAACAGTCTTCGATGGTCTTAGGAGCTAAGGCAGTCAAAGATGGTGTTGCACAGGCCTTTATTTCTGCAGGGAATACAGGAGCTTTATTAGCTGCTGGTTTGTTTGTAGTAGGACGTATAAAAGGTGTTGATCGACCAGGCTTAATGTCAACTATACCTACGTTAGATGGTGTGGGTTTTGATATGCTTGATTTAGGAGCTAATGCAGAAAACACAGCTTCTCATCTTCATCAATATGCTATTTTAGGGTCGTTTTATGCAAAAAATGTCCGTGGTATTGAAGTTCCTCGTGTAGGTCTCTTAAATAACGGAACGGAAGAAACAAAAGGCGATTCTCTTCATAAAGAAGCCTATGAACTGTTAGCAGCAGAGCCTTCTATTAATTTTATTGGAAATATTGAAGCACGTGATTTGATGTCAAGTGTAGCAGATGTTGTTGTCACTGATGGTTTTACTGGAAATGCTGTTCTAAAGACAATGGAAGGTACAGCTATGAGTATTATGGGAAGCCTAAAATCTTCAATTAAATCAGGTGGCGTGAAAGCTAAATTAGGAGCACTTCTATTAAAAGATAGCCTATATCAGCTAAAAGATAGTATGGACTATTCAAGCGCGGGTGGTGCGGTTCTTTTTGGTTTAAAAGCTCCAATAGTAAAATGCCATGGATCAAGTGATTCTAAAGCTGTTTATTCTACTTTGAAGCAAGTTCGTACAATGTTGGAAACTCAAGTAGTTGATCAATTAGTTGATGCCTTTACAGATGAA

SEQ ID NO: 8812 - protein, 330 aa, Streptococcus agalactiae
MKKIAVDAMGGDYAPKAIVEGVNQAISDFSDIEVQLYGDQKKIEKYLTVTERVSIIHTEEKINSDDEPAKAVRRKKQSSMVLGAKAVKDGVAQAFISAGNTGALLAAGLFVVGRIKGVDRPGLMSTIPTLDGVGFDMLDLGANAENTASHLHQYAILGSFYAKNVRGIEVPRVGLLNNGTEETKGDSLHKEAYELLAAEPSINFIGNIEARDLMSSVADVVVTDGFTGNAVLKTMEGTAMSIMGSLKSSIKSGGVKAKLGALLLKDSLYQLKDSMDYSSAGGAVLFGLKAPIVKCHGSSDSKAVYSTLKQVRTMLETQVVDQLVDAFTDE

SEQ ID NO: 8813 - protein, 192 aa, Streptococcus agalactiae
ATGCCTTTACAGATGAATAGGAGTGAACTCATGTCAAGAGATGAAGTTTTTGAAAAGATGCTGGAATTATTAAGGCAGCAACTTGGTGACCCACAGTTAGATATCACACCAGAGTCATCGTTACATGATGATTTAGCAATTGACTCTATCGCTTTAACAGAGTTTATTATCATTTGGAAGATGTGTTTCATC

SEQ ID NO: 8814 - protein, 64 aa, Streptococcus agalactiae
MPLQMNRSELMSRDEVFEKMLELLRQQLGDPQLDITPESSLHDDLAIDSIALTEFIIIWKMCFI

SEQ ID NO: 8815 - protein, 93 aa, Streptococcus agalactiae
TTGGAAGATGTGTTTCATCTAGAGATTCCAGATGAGGCTGTCGAACACATGTCAAGCGTCCAACAACTATTAGATTATATCATTGAACATAAG

SEQ ID NO: 8816 - protein, 31 aa, Streptococcus agalactiae
MEDVFHLEIPDEAVEHMSSVQQLLDYIIEHK

SEQ ID NO: 8817 - protein, 702 aa, Streptococcus agalactiae
GTGAATAACCAGCTTATTTATACAGGAAAAGCGAAAGATATTTATAGTACAAAAGATGAAAATGTGATTAGAACGGTCTATAAAGACCAAGCTACTATGTTGAATGGAGCTCGTAAGGAGACTATTGATGGCAAGGGAGCACTAAATAATCAGATTTCATCTCTTATTTTTGAGAAATTAAATATGGCTGGTGTGGTGACACATTATATTGAGCAAATTTCAAAAAACGAACAATTGAATAAAAAAGTTGATATTATTCCACTTGAGGTGGTATTACGGAATGTGACAGCAGGCTCATTTTCAAAACGTTTTGGAGTGGAAGAAGGACGCGTTCTTGAAACTCCAATTGTGGAATTTTACTACAAAAATGATGATCTGAATGATCCTTTTATCAATGATGAGCATATGAAGTTTTTGGGTATTGTTAATGATGAGGAGATTGCTTATCTGAAAGGAGAGACTCGCCGTATTAATGAACTCTTGAAAGATTGGTTTGCTCAGATTGGGCTTAACTTGATTGACTTCAAGTTGGAGTTCGGATTTGACAAGGATGGCAAAATCATCTTGGCTGATGAGTTCTCACCTGACAACTGCCGTCTATGGGATGCTGAAGGAAATCATATGGACAAGGATGTTTTTCGTAGAGATCTTGGTAGCTTGACCGATGTCTATCAAGTTGTACTTGAGAAGTTGATAGCATTG

SEQ ID NO: 8818 - protein, 234 aa, Streptococcus agalactiae
MNNQLIYTGKAKDIYSTKDENVIRTVYKDQATMLNGARKETIDGKGALNNQISSLIFEKLNMAGVVTHYIEQISKNEQLNKKVDIIPLEVVLRNVTAGSFSKRFGVEEGRVLETPIVEFYYKNDDLNDPFINDEHMKFLGIVNDEEIAYLKGETRRINELLKDWFAQIGLNLIDFKLEFGFDKDGKIILADEFSPDNCRLWDAEGNHMDKDVFRRDLGSLTDVYQVVLEKLIAL

SEQ ID NO: 8819 - protein, 3798 aa, Streptococcus agalactiae
TTGGGCTTACTGAAATCTCAATTTCAGATATCCTCCTATTTTTCAGTCGCTCCCTTGTCGGACTTGGTATCTTATATGAATAAACGTATTTTTGTTGAGAAAAAGGCTGACTTTGACATTAAATCGGCTAGTCTTGTGAAAGAGTTGACGCATAATCTACAACTGACTTCTTTGAAGGATTTGCGTATTGTGCAGGTCTATGATGTCTTCAATTTGGCTGAGGATTTGCTGGCGCGTGCTGAGAAGCATATTTTCTCTGAGCAGGTGACAGACTGTCTTTTGACGGAAACTGAAATCACTGCGGAGCTTGATAAGGTTGCCTTCTTTGCCATTGAGGCGCTTCCTGGTCAATTTGACCAACGTGCTGCTAGTTCGCAAGAATCTTTGCTATTGCTTGGAAGTGACAGTCAGGTTAAGGTCAATACAGCCCAGCTTTACTTGGTCAATAAGGATATTGCAGAAGCAGAGCTTGAAGCCGTTAAGAACTATCTTTTGAATCCTGTTGATTCACGTTTCAAGGACATTACCTTGCCGCTTGAAGAGCAGGCTTTCTCTGTGTCTGATAAGACAATCCCTAGTCTTGATTTCTTTGAAACTTATAAGGCTGACGATTTTGCGGCCTATAAGGCAGAGCAGGGCTTGGCTATGGAGGTCGATGATCTTCTCTTCATCCAAGATTATTTCAAATCAATCGGGCGTGTGCCAACTGAGACTGAGTTGAAAGTTTTGGATACTTACTGGTCAGACCACTGCCGTCACACAACCTTTGAAACTGAGTTGAAAAACATCGACTTTTCAGCTTCTAAATTCCAAAAACAATTGCAGGCGACTTATGACAAATATATCGCCATGCGTGATGAACTTGGTCGTTCTGAAAAGCCGCAGACACTTATGGATATGGCGACTATCTTTGGTCGTTATGAACGTGCCAATGGACGACTGGATGATATGGAAGTCTCAGATGAAATCAATGCCTGCTCAGTTGAAATTGAAGTAGATGTTGATGGTGTAAAAGAGCCTTGGCTCCTCATGTTTAAGAATGAGACTCACAATCACCCAACAGAAATTGAGCCATTTGGTGGCGCAGCAACTTGTATCGGTGGTGCCATTCGTGACCCGTTGTCAGGACGTTCATACGTTTATCAGGCTATGCGTATTTCAGGCGCAGGCGATATTACGACTCCGATTGCGGAAACACGTGCTGGTAAATTGCCGCAACAGGTTATTTCTAAAACTGCGGCGCACGGCTATTCTTCATATGGTAACCAGATTGGGCTTGCGACAACTTATGTGCGTGAGTACTTTCACCCTGGCTTTGTAGCCAAACGCATGGAGCTTGGAGCTGTGGTTGGTGCTGCACCTAAGGAAAATGTGGTTCGTGAAAAACCAGAAGCAGGCGATGTGGTCATCTTGCTCGGTGGTAAAACAGGTCGTGACGGTGTCGGCGGTGCGACAGGTTCATCTAAGGTTCAAACGGTTGAATCTGTGGAAACAGCTGGCGCAGAGGTACAAAAAGGGAATGCCATCGAAGAACGTAAGATTCAACGCCTTTTCCGTAATGGTAATGTCACTCGCCTAATCAAGAAATCAAATGACTTCGGTGCAGGTGGTGTCTGTGTTGCCATCGGTGAATTGGCTGACGGTCTTGAAATCGATTTGGACAAGGTACCGCTTAAATACCAAGGTCTTAATGGTACTGAAATTGCAATCTCAGAATCACAAGAGCGTATGTCAGTCGTTGTTCGTCCTAGTGACGTGGATACCTTCATCGCAGCCTGCAACAAGGAAAATATCGATGCCGTTGTGGTTGCTACTATTACTGCAAAACCAAACCTTGTCATGACTTGGGATGGTGAAACAATTGTTGACTTGGAACGCCGTTTCCTTGATACCAACGGTGTCCGTGTCGTTGTTGATGCTAAAGTCGTTGACAAAGACTTGACAGTTCCAGAGGTACGCACAACATCAGCAGAGACACTTGAAGCGGATACGCTTAAGGTCTTGTCTGACCTCAACCACGCTAGTCAAAAAGGTCTCCAAACTATCTTTGACTCATCTGTTGGTCGCTCAACCGTTAACCACCCAATCGGTGGCCGTTACCAAATCACACCAACAGAAAGCTCTGTTCAAAAATTGCCAGTTCAACACGGTGTCACAACAACTGCATCTGTTATGGCTCAAGGTTACAATCCTTATATTGCAGAATGGTCACCTTACCACGGTGCTGCCTATGCTGTCATTGAAGCGACAGCTCGCTTGGTAGCAACGGGTGCTGACTGGTCTCGTGCACGTTTCTCTTACCAAGAGTATTTCGAGCGTATGGATAAACAGGCAGAGCGTTTTGGTCAGCCAGTATCAGCTCTTCTTGGTTCTATTGAGGCTCAGATTCAACTTGGATTGCCATCAATCGGCGGTAAGGACTCTATGTCTGGTACTTTCGAAGAATTGACAGTACCGCCAACCTTGGTAGCTTTCGGTGTGACAACAGCGGACAGCCGCAAGGTTCTCTCTCCTGAGTTTAAAGCGGCTGGTGAGAATATCTACTACATTCCAGGTCAAGCTATTTCAGAAGATATTGATTTTGACCTTATCAAGGCTAACTTTAGCCAGTTCGAGACTATTCAAGCTCAACATAAGATTACTGCTGCTTCAGCTGTTAAATACGGTGGTGTCCTAGAAAGTCTTGCTCTCATGACTTTTGGTAACCGTATCGGGGCCTCTGTTGAAATTGCAGAGCTTGACAGTAGCTTGACAGCTCAACTCGGAGGCTTTGTCTTTACATCAGCTGAGGAAATTGCTGACTCGGTGAAAATCGGTCAAACTCAGGCAGCCTTTACACTTACTGTCAATGGAAATGACCTTGCTGGGGCAAGCCTTCTATCAGTCTTCGAAGGCAAATTGGAAGAGGTTTACCCAACAGAGTTTGAACAGGCAGACGCTCTTGAAGAAGTTCCTGCTGTGGTATCAGATACTGTTATCAAGGCTAAGGAAACAATTGAAAAACCAGTGGTTTACATTCCAGTCTTCCCTGGTACCAACTCAGAATATGATTCAGCTAAGGCCTTTGAACAGGTTGGAGCTAGTGTCAACTTGGTAGCATTTGTAACCTTGAATGAGGCTGCTATTGCTGACTCAGTTGACACAATGGTCGCTAATATTGCTAAGGCAAATATCATCTTCTTTGCTGGAGGATTCTCAGCAGCGGATGAACCAGATGGGTCTGCTAAGTTTATCGTCAATATCTTGCTTAACAAGAAGGTTCGCGCAGCTATTGACAGCTTCATCGAAAAAGGTGGCCTTATCATCGGTATCTGTAATGGTTTCCAAGCCCTTGTCAAATCAGGTCTTCTTCCATACGGAAACTTCGAGGAAGCTGGTGAGACAAGTCCAACCCTCTTCTATAACGATGCCAACCAGCACGTTGCCAAGATGGTTGAGACTCGTATCGCAAATACCAACTCACCTTGGTTGGTAGGAGTTGAGGTCGGCGATATTCATGCCATCCCAGTTTCACACGGTGAAGGTAAATTTGTTGTCAGCGCTTCTGAATTTGCAGAGCTAAGAGACAATGGTCAAATCTGGAGCCAATATGTGGACTTTGACGGACAACCATCTATGGATTCTAAATACAATCCAAATGGCTCTGTCAATGCCATCGAAGGGATTACCAGCAAGAATGGTCAAATCATCGGTAAGATGGGGCACTCAGAACGCTGGGAAGACGGCCTCTTCCAAAATATCCCTGGTAACAAAGACCAAGCCTTGTTTGCTAGTGCAGTAAAATATTTTACAGGAAAA

SEQ ID NO: 8820 - protein, 1266 aa, Streptococcus agalactiae
MGLLKSQFQISSYFSVAPLSDLVSYMNKRIFVEKKADFDIKSASLVKELTHNLQLTSLKDLRIVQVYDVFNLAEDLLARAEKHIFSEQVTDCLLTETEITAELDKVAFFAIEALPGQFDQRAASSQESLLLLGSDSQVKVNTAQLYLVNKDIAEAELEAVKNYLLNPVDSRFKDITLPLEEQAFSVSDKTIPSLDFFETYKADDFAAYKAEQGLAMEVDDLLFIQDYFKSIGRVPTETELKVLDTYWSDHCRHTTFETELKNIDFSASKFQKQLQATYDKYIAMRDELGRSEKPQTLMDMATIFGRYERANGRLDDMEVSDEINACSVEIEVDVDGVKEPWLLMFKNETHNHPTEIEPFGGAATCIGGAIRDPLSGRSYVYQAMRISGAGDITTPIAETRAGKLPQQVISKTAAHGYSSYGNQIGLATTYVREYFHPGFVAKRMELGAVVGAAPKENVVREKPEAGDVVILLGGKTGRDGVGGATGSSKVQTVESVETAGAEVQKGNAIEERKIQRLFRNGNVTRLIKKSNDFGAGGVCVAIGELADGLEIDLDKVPLKYQGLNGTEIAISESQERMSVVVRPSDVDTFIAACNKENIDAVVVATITAKPNLVMTWDGETIVDLERRFLDTNGVRVVVDAKVVDKDLTVPEVRTTSAETLEADTLKVLSDLNHASQKGLQTIFDSSVGRSTVNHPIGGRYQITPTESSVQKLPVQHGVTTTASVMAQGYNPYIAEWSPYHGAAYAVIEATARLVATGADWSRARFSYQEYFERMDKQAERFGQPVSALLGSIEAQIQLGLPSIGGKDSMSGTFEELTVPPTLVAFGVTTADSRKVLSPEFKAAGENIYYIPGQAISEDIDFDLIKANFSQFETIQAQHKITAASAVKYGGVLESLALMTFGNRIGASVEIAELDSSLTAQLGGFVFTSAEEIADSVKIGQTQAAFTLTVNGNDLAGASLLSVFEGKLEEVYPTEFEQADALEEVPAVVSDTVIKAKETIEKPVVYIPVFPGTNSEYDSAKAFEQVGASVNLVAFVTLNEAAIADSVDTMVANIAKANIIFFAGGFSAADEPDGSAKFIVNILLNKKVRAAIDSFIEKGGLIIGICNGFQALVKSGLLPYGNFEEAGETSPTLFYNDANQHVAKMVETRIANTNSPWLVGVEVGDIHAIPVSHGEGKFVVSASEFAELRDNGQIWSQYVDFDGQPSMDSKYNPNGSVNAIEGITSKNGQIIGKMGHSERWEDGLFQNIPGNKDQALFASAVKYFTGK

SEQ ID NO: 8821 - protein, 1452 aa, Streptococcus agalactiae
ATGACATACGAAGTAAAATCTCTAAATGAAGAATGTGGAGTCTTTGGTATCTGGGGGCATCCTCAGGCAGCTCAAGTCACTTACTTTGGGCTTCATAGCCTTCAACATCGCGGTCAAGAAGGTGCTGGTATTGTTTCGAATGATAATGGGAAACTCTATGGTTATCGAAATGTTGGGCTCCTTTCTGAAGTTTTTAAGAATCAATCTGAATTAGATAATTTAACTGGGAATGCGGCTATTGGACATGTTCGGTATGCTACTGCAGGTTCTGCAGATATTCGCAATATTCAGCCTTTTCTTTATAAATTTCATGACGGGCAATTTGCTTTATGCCATAATGGTAATTTGACAAATGCTATTTCTTTAAGGAAAGAATTAGAAAAGCAAGGTGCAATTTTCAATGCCTCCTCAGATACTGAAATTTTGATGCACTTGATTCGTCGAAGCCATAACCCAAGTTTTATGGGGAAGGTAAAAGAAGCTTTAAGCACTGTAAAGGGAGGCTTCGCCTATCTACTGATGACAGAAGATAAATTAATTGCTGCTCTTGACCCTAATGCCTTTCGTCCTTTGTCAATTGGACAAATGCAAAATGGTGCTTGGGTTATTTCCAGTGAGACCTGTGCTTTTGAGGTGGTAGGCGCAAAATGGGTTAGAGATGTTGAACCTGGCGAAGTTATCCTTATAGACGATAGTGGTATTCAATGTGATCGTTATACTGATGAAACGCAACTGGCAATTTGTTCGATGGAATATGTCTATTTTGCAAGGCCGGATTCAACTATACATGGTGTTAATGTTCATACGGCTCGAAAAAATATGGGAAAGCGTCTTGCACAAGAATTTAAACAGGATGCTGATATTGTAATTGGTGTCCCAAATTCGTCCTTATCGGCTGCTATGGGCTTTGCTGAAGAATCCGGATTACCAAATGAGATGGGTCTTGTAAAAAATCAGTATACGCAGCGAACCTTTATTCAACCGACACAAGAATTAAGGGAACAAGGTGTTCGAATGAAACTATCAGCGGTATCTGGTGTTGTCAAAGGAAAGCGCGTTGTTATGATTGATGACTCAATTGTAAGAGGAACGACTTCTAGAAGGATTGTCGGATTATTAAGAGAAGCAGGAGCTAGTGAAGTACATGTTGCTATAGCTAGTCCAGAATTAAAGTATCCTTGTTTTTATGGTATTGATATTCAAACAAGACGAGAATTAATTTCAGCAAATCACGCTGCTGACGAAGTGTGTGATATTATTGGCGCAGATAGTCTGACTTATCTCTCACTAGATGGGTTGATTGAATCAATTGGACTCGAAACAAAAGCACCAAATGGTGGTTTATGCGTAGCTTACTTTGATGGACATTATCCAACGCCGCTTTATGATTATGAAGAAGAATACCTCAGAAGTTTAGAAGAAAAAACAAGTTTTTATATTCAAAAAGTGAAA

SEQ ID NO: 8822 - protein, 484 aa, Streptococcus agalactiae
MTYEVKSLNEECGVFGIWGHPQAAQVTYFGLHSLQHRGQEGAGIVSNDNGKLYGYRNVGLLSEVFKNQSELDNLTGNAAIGHVRYATAGSADIRNIQPFLYKFHDGQFALCHNGNLTNAISLRKELEKQGAIFNASSDTEILMHLIRRSHNPSFMGKVKEALSTVKGGFAYLLMTEDKLIAALDPNAFRPLSIGQMQNGAWVISSETCAFEVVGAKWVRDVEPGEVILIDDSGIQCDRYTDETQLAICSMEYVYFARPDSTIHGVNVHTARKNMGKRLAQEFKQDADIVIGVPNSSLSAAMGFAEESGLPNEMGLVKNQYTQRTFIQPTQELREQGVRMKLSAVSGVVKGKRVVMIDDSIVRGTTSRRIVGLLREAGASEVHVAIASPELKYPCFYGIDIQTRRELISANHAADEVCDIIGADSLTYLSLDGLIESIGLETKAPNGGLCVAYFDGHYPTPLYDYEEEYLRSLEEKTSFYIQKVK

SEQ ID NO: 8823 - protein, 1020 aa, Streptococcus agalactiae
ATGTCTGAAAAAAATGCTTATGCAAAATCTGGTGTTGATGTTGAAGCTGGTTATGAAGTGGTTGAAAGAATAAAAAAACACGTTGCTCGTACAGAACGTGCGGGAGTCATGGGAGCTCTAGGTGGTTTTGGTGGGATGTTTGACTTGTCACAAACAGGTGTTAAAGAACCTGTCTTGATTTCAGGGACTGACGGTGTCGGAACAAAACTCATGCTTGCTATCAAGTACGACAAGCACGACACAATCGGTCAAGACTGTGTTGCCATGTGTGTCAATGATATTATTGCAGCAGGTGCAGAGCCCCTTTACTTCCTTGACTATGTAGCGACTGGTAAAAACGAACCTGCCAAATTGGAACAGGTTGTCGCTGGCGTTGCAGAAGGTTGTGTTCAAGCAGGAGCAGCACTCATTGGAGGTGAGACCGCTGAAATGCCTGGGATGTATGGCGAAGATGATTATGACCTTGCTGGCTTTGCTGTTGGTGTGGCTGAAAAATCTCAAATCATCGACGGTTCAAAAGTAAAAGAAGGAGATATTCTTCTTGGACTGGCTTCAAGTGGTATCCACTCAAATGGTTATTCATTGGTGCGTCGTGTCTTTGCTGACTACACTGGTGATGAGGTGCTTCCAGAGCTTGAAGGCAAACAACTCAAGGATGTTCTTCTTGAGCCAACTCGTATCTATGTTAAAGCAGCTCTGCCATTGATCAAGGAAGAACTGGTCAACGGTATCGCCCACATCACAGGTGGTGGTTTTATCGAGAATGTTCCTCGTATGTTTGCCGATGATTTGGCTGCGGAAATCGATGAGGATAAGGTGCCAGTACTTCCGATTTTCAAGGCGCTTGAAAAATATGGTGACATCAAGCACGAAGAAATGTTTGAAATCTTCAATATGGGTGTCGGTCTTATGCTAGCTGTTAGTCCTGAAAATGTTAACCGCGTCAAAGAGCTCTTGGACGAACCAGTTTATGAAATTGGTCGTATCATCAAGAAGGCTGATGCTAGTGTGGTGATTAAA

SEQ ID NO: 8824 - protein, 340 aa, Streptococcus agalactiae
MSEKNAYAKSGVDVEAGYEVVERIKKHVARTERAGVMGALGGFGGMFDLSQTGVKEPVLISGTDGVGTKLMLAIKYDKHDTIGQDCVAMCVNDIIAAGAEPLYFLDYVATGKNEPAKLEQVVAGVAEGCVQAGAALIGGETAEMPGMYGEDDYDLAGFAVGVAEKSQIIDGSKVKEGDILLGLASSGIHSNGYSLVRRVFADYTGDEVLPELEGKQLKDVLLEPTRIYVKAALPLIKEELVNGIAHITGGGFIENVPRMFADDLAAEIDEDKVPVLPIFKALEKYGDIKHEEMFEIFNMGVGLMLAVSPENVNRVKELLDEPVYEIGRIIKKADASVVIK

SEQ ID NO: 8825 - protein, 546 aa, Streptococcus agalactiae
ATGAAAATCGCTGTTTTTGCTTCTGCTAATGGTTCCAACTTTCAGGTCATAGCAGAGCAGTTTCCAGTTAGTTTTGTCTTTTCAGATCATCGTGATGCCTATGTTTTAGAGCGTGCTCAGAACTTAGCCATTCCAAGCTTCGCTTTTGAACTCAAAGAGTTTGAGAATAAGGCGGCTTACGAGCAAGCCGTCGTTGATTTGTTGGACAAACACGAGATTGACTTGGTCTGTCTGGCGGGCTACATGAAGATTGTCGGAGAAACCTTGCTCTCAGCCTATGAAGGGCGTATCATCAATATTCACCCAACCTATCTGCCTGAATTTCCAGGTGCTCACGGTATCAAGGATGCTTGGGAGGCAGGTGTTGACCAGTCTGGTGTGACCATCCATTGGGTGGACTCTGGTGTGGATACCGGTCAGGTCATCCAACAAGTGCACGTGCCACGCCTAGCAGATGATAGTCTAGAAAGCTTTGAAACCCGCATCCACGAAACCGAATACCAACTCTACCCAGCTGTCTTAGATAGCTTGGGCATAAAGAGAAAA

SEQ ID NO: 8826 - protein, 182 aa, Streptococcus agalactiae
MKIAVFASANGSNFQVIAEQFPVSFVFSDHRDAYVLERAQNLAIPSFAFELKEFENKAAYEQAVVDLLDKHEIDLVCLAGYMKIVGETLLSAYEGRIINIHPTYLPEFPGAHGIKDAWEAGVDQSGVTIHWVDSGVDTGQVIQQVHVPRLADDSLESFETRIHETEYQLYPAVLDSLGIKRK

SEQ ID NO: 8827 - protein, 750 aa, Streptococcus agalactiae
ATGAAACTAGTGAAAAATTTAGAGATAGTAGAGTCTATTTTTGGTGATTGGGACGAGACCATAATCTGGTCGTGTGTCCAAGGTATTATGGGAGAAGTTTTTGTAGATAGTTTAGACCAACCAAAATCTTCTTTGGCAAAATTGGGAAGGAAATCATCTTTTGGTTTTCTAGCAGGTCAGCCTACTTTATTTCTACTAGAAGTTTGCTCTGGGGAGGATATTATCCTTGTTCCTCAGCATAAAGGATGGTCAGATTTGATTGAATCAACTTATGGTCAGAATGCTCATTCTTTTAAGCGTTATGCGACGAAAAAAGATACTTTGTTTGAGCGAAGTAGGTTAGAGAAGTTTGTTACTCAGTTGCCAAATGGTTTTGAATTACGTGCTATTGATGAGAAAGTTTACAACTCTTGCTTAGAAAAGGAATGGTCACAGGATTTAGTAGCAAATTACGCTACTTATCAGTACTATAAAAAACAAGGTATAGGTTATGTTGTATATTATCAGGGGAATATCATTGCAGGAGCTTCATCTTATTCAACCTATAAAAATGGGATTGAGATAGAAGTAGATACGCATCCAGATTTTCGTCGGCGTGGTTTAGCAACAATAGTTGCAGCTCAGTTAATACTAACTTGTTTAGATAAGGGAATTTATCCTAGCTGGGATGCTCATACAAGGACTTCATTGAATTTATCTGAAAAACTCGGTTATGAATTTTCTCATGAATACATAGCCTATGAAATAGAT

SEQ ID NO: 8828 - protein, 250 aa, Streptococcus agalactiae; identical to SEQ ID NO: 80

SEQ ID NO: 8829 - protein, 1545 aa, Streptococcus agalactiae
ATGACTAAACGTGCTTTAATCTCAGTTTCTGACAAATCAGGAATTATTGACTTTGCAAAAGAATTGAAAAACTTGGGTTGGGATATTATCTCAACTGGTGGGACTAAGGTTGCCCTTGATGATGCTGGTGTTGAGACCATTGCCATCGACGATGTGACTGGATTCCCAGAAATGATGGACGGTCGTGTTAAGACCCTCCACCCAAACATTCACGGTGGGCTTCTGGCTCGTCGCGACGCTGACAGCCACCTTCAGGCTGCTAAGGACAACAATATTGAGTTGATTGACCTCGTGGTTGTCAACCTCTATCCCTTCAAGGAGACCATCCTTCGCCCAGACGTGACCTACGATTTGGCGGTGGAAAATATCGACATCGGCGGTCCATCAATGCTTCGCTCAGCTGCTAAAAACCACGCTAGCGTAACCGTTGTGGTTGATTCAGCTGACTATGCCACTGTTTTGGGAGAATTGGCTGACGCTAGTCAGACGACATTTAAAACTCGTCAACGCTTGGCAGCTAAGGCCTTCCGTCATACGGCAGCCTACGACGCTTTGATTGCTGAGTACTTCACAGCTCAAGTGGGAGAGGCTAAGCCTGAAAAATTGACCATCACTTATGACCTTAAACAGGCTATGCGTTACGGAGAAAATCCACAGCAAGACGCTGATTTCTACCAAAAAGCCTTACCAACAGACTACTCAATCGCTTCAGCTAAACAGCTCAATGGAAAAGAATTGTCCTTCAATAATATCCGTGATGCTGATGCAGCAATCCGTATTATCCGCGATTTCAAAGACAGTCCAACGGTTGTTGCCCTCAAACACATGAACCCATGTGGTATCGGACAGGCTGATGATATTGAGACAGCTTGGGATTACGCTTATGAAGCTGATCCAGTTTCAATCTTTGGTGGAATTGTTGTCCTTAACCGTGAAGTTGACGCAGCGACAGCTGAGAAGATGCACCCTATCTTCTTGGAAATCATCATCGCACCATCATACTCAGAAGAAGCGCTAGCTATTCTCACAAATAAAAAGAAAAACTTGCGTATCCTTGAGTTGCCGTTTGATGCCCAAGCTGCCAGCGAAGTGGAAGCTGAGTACACTGGCGTAGTTGGTGGACTTTTGGTGCAAAACCAAGACGTTGTGGCTGAAAATCCATCTGACTGGCAAGTGGTGACAGACCGCCAGCCAACAGAACAAGAGGCGACTGCCCTTGAGTTTGCCTGGAAGGCTATCAAGTATGTTAAGTCTAACGGGATTATTATTACTAACGATCACATGACGCTTGGACTCGGTGCAGGTCAAACCAACCGTGTCGGCTCAGTCAAGATTGCTATCGAGCAGGCTAAGGACCACCTTGACGGTGCCGTTCTAGCATCAGATGCCTTCTTCCCATTTGCGGACAACATTGAAGAAATCGCTGCCGCAGGGATCAAAGCAATCATCCAACCAGGTGGTTCAGTTCGTGACCAAGAATCTATTGACGCCGCAAACAAACATGGCTTGACCATGATCTTCACAGGCGTGAGACATTTTAGACAT

SEQ ID NO: 8830 - protein, 515 aa, Streptococcus agalactiae; identical to SEQ ID NO: 82

SEQ ID NO: 8831 - protein, 897 aa, Streptococcus agalactiae
TTGAATAAATGGTTAGTTAAGGCAAGTTCCTTAGTTGTTTTAGGTGGTATGGTTTTATCTGCGGGTTCCCGAGTTTTAGCGGATACTTATGTCCGTCCAATTGATAATGGTAGAATTACAACAGGTTTCAATGGTTATCCTGGACATTGTGGGGTGGATTATGCTGTTCCGACTGGAACGATTATTAGGGCAGTGGCAGATGGTACTGTGAAATTTGCAGGAGCTGGAGCCAACTTTTCTTGGATGACAGACTTAGCAGGAAATTGTGTCATGATTCAACATGCGGATGGAATGCATAGTGGTTACGCTCATATGTCACGTGTGGTGGCTAGGACTGGGGAAAAAGTCAAACAAGGAGATATCATCGGTTACGTAGGAGCAACTGGTATGGCGACGGGACCTCACCTTCATTTTGAATTTTTACCAGCTAACCCTAATTTTCAAAATGGTTTCCATGGACGTATCAATCCAACGTCACTAATTGCTAATGTTGCGACCTTTAGTGGAAAAACGCAAGCATCAGCTCCAAGCATTAAGCCATTACAATCAGCTCCTGTACAGAATCAATCTAGTAAATTAAAAGTGTATCGAGTAGATGAATTACAAAAGGTTAATGGTGTTTGGTTAGTCAAAAATAACACCCTAACGCCGACTGGGTTTGATTGGAACGATAATGGTATACCAGCATCAGAAATTGATGAGGTTGATGCTAATGGTAATTTGACAGCTGACCAGGTTCTTCAAAAAGGTGGTTACTTTATCTTTAATCCTAAAACTCTTAAGACTGTAGAAAAACCCATCCAAGGAACAGCTGGTTTAACTTGGGCTAAGACACGCTTTGCTAATGGTAGTTCAGTTTGGCTTCGCGTTGACAACAGTCAAGAACTGCTTTACAAA

SEQ ID NO: 8832 - protein, 299 aa, Streptococcus agalactiae; identical to SEQ ID NO: 4372

SEQ ID NO: 8833 - protein, 1302 aa, Streptococcus agalactiae
ATGAAAATGAATAAAAAGGTACTATTGACATCGACAATGGCAGCTTCGCTATTATCAGTCGCAAGTGTTCAAGCACAAGAAACAGATACGACGTGGACAGCACGTACTGTTTCAGAGGTAAAGGCTGATTTGGTAAAGCAAGACAATAAATCATCATATACTGTGAAATATGGTGATACACTAAGCGTTATTTCAGAAGCAATGTCAATTGATATGAATGTCTTAGCAAAAATAAATAACATTGCAGATATCAATCTTATTTATCCTGAGACAACACTGACAGTAACTTACGATCAGAAGAGTCATACTGCCACTTCAATGAAAATAGAAACACCAGCAACAAATGCTGCTGGTCAAACAACAGCTACTGTGGATTTGAAAACCAATCAAGTTTCTGTTGCAGACCAAAAAGTTTCTCTCAATACAATTTCGGAAGGTATGACACCAGAAGCAGCAACAACGATTGTTTCGCCAATGAAGACATATTCTTCTGCGCCAGCTTTGAAATCAAAAGAAGTATTAGCACAAGAGCAAGCTGTTAGTCAAGCAGCAGCTAATGAACAGGTATCACCAGCTCCTGTGAAGTCGATTACTTCAGAAGTTCCAGCAGCTAAAGAGGAAGTTAAACCAACTCAGACGTCAGTCAGTCAGTCAACAACAGTATCACCAGCTTCTGTTGCCGCTGAAACACCAGCTCCAGTAGCTAAAGTAGCACCGGTAAGAACTGTAGCAGCCCCTAGAGTGGCAAGTGTTAAAGTAGTCACTCCTAAAGTAGAAACTGGTGCATCACCAGAGCATGTATCAGCTCCAGCAGTTCCTGTGACTACGACTTCACCAGCTACAGACAGTAAGTTACAAGCGACTGAAGTTAAGAGCGTTCCGGTAGCACAAAAAGCTCCAACAGCAACACCGGTAGCACAACCAGCTTCAACAACAAATGCAGTAGCTGCACATCCTGAAAATGCAGGGCTCCAACCTCATGTTGCAGCTTATAAAGAAAAAGTAGCGTCAACTTATGGAGTTAATGAATTCAGTACATACCGTGCGGGAGATCCAGGTGATCATGGTAAAGGTTTAGCAGTTGACTTTATTGTAGGTACTAATCAAGCACTTGGTAATAAAGTTGCACAGTACTCTACACAAAATATGGCAGCAAATAACATTTCATATGTTATCTGGCAACAAAAGTTTTACTCAAATACAAACAGTATTTATGGACCTGCTAATACTTGGAATGCAATGCCAGATCGTGGTGGCGTTACTGCCAACCACTATGACCACGTTCACGTATCATTTAACAAA

SEQ ID NO: 8834 - protein, 434 aa, Streptococcus agalactiae; identical to SEQ ID NO: 88

SEQ ID NO: 8835 - protein, 588 aa, Streptococcus agalactiae
ATGCCTCTTTTAGCTTTGGCAGCTCAAGAAGCAGGAGCGGTTGGTATAAGAGCCAATAGTGTCCGCGACATTAAGGAAATTCAAGAGGTTACTAATTTACCTATCATCGGCATTATTAAACGTGAATATCCTCCACAAGAACCATTTATCACTGCTACGATGACAGAGGTGGATCAATTAGCTAGTTTAGATATTGCAGTAATAGCCTTAGATTGTACACTTAGAGAGCGTCATGATGGTTTGAGTGTAGTTGAGTTTATTCAAAAGATAAAAAGGAAATATCCTGAACAGTTGTTAATGGCTGATATAAGTACTTTTGAAGAAGGCAAAAATGCTTTTGAAGCAGGAGTTGATTTTGTGGGTACAACTCTATCTGGATACACAGATTACAGCCGCCAAGAAGAAGGACCGGATATAGAACTCCTTAATAAGCTCTGTCAAGCCGGTATAGATGTGATTGCGGAAGGTAAAATTCATACTCCTAAGCAGGCTAATGAAATTAATCATATAGGTGTTGCAGGAATTGTAGTTGGTGGTGCTATCACTAGACCAAAAGAAATAGCGGAGCGTTTCATCTCAGGACTTAGT

SEQ ID NO: 8836 - protein, 196 aa, Streptococcus agalactiae; identical to SEQ ID NO: 90

SEQ ID NO: 8837 - protein, 1314 aa, Streptococcus agalactiae
ATGAGTATCAAAAAAAGTGTGATTGGTTTTTGCCTCGGAGCTGCAGCATTATCAATGTTTGCTTGTGTAGACAGTAGTCAATCTGTTATGGCTGCCGAGAAGGATAAAGTCGAAATTACGTGGTGGGCTTTTCCAACCTTTACTCAAGAAAAGGCTAAGGATGGAGTAGGTACTTATGAGAAAAAAGTCATCAAGGCTTTTGAAAAGAAAAATCCTAATATAAAAGTAAAACTAGAGACAATTGATTTCACATCTGGACCTGAAAAAATCACTACAGCGATTGAAGCAGGGACAGCACCTGATGTGCTTTTTGATGCACCAGGACGAATTATTCAATATGGTAAAAATGGTAAATTAGCAGATTTGAATGATTTATTTACAGACCAATTTATTAAGGATGTCAATAATAAGAATATCATTCAAGCTTCTAAGTCTGGCGATAAAGCCTACATGTATCCAATAAGTTCTGCCCCATTTTATATGGCGTTCAATAAAAAAATGCTTAAAGATGCAGGAGTTTTGAAACTCGTAAAAGAAGGTTGGACTACTAGTGATTTTGAAAAAGTACTAAAAGCACTAAAAAATAAAGGCTATACACCAGGTTCATTCTTTGCAAACGGGCAAGGAGGAGATCAAGGACCACGTGCATTTTTTGCTAATCTTTATAGTGCTCCAATAACAGATAAAGAAGTAACAAAATATACCACTGACACTAAAAATTCTGTAAAATCAATGAAAAAAATAGTTGAATGGATTAAGAAAGGCTACTTGATGAATGGGTCTCAGTATGATGGCTCAGCTGACATTCAAAACTTTGCCAATGGACAAACTGCTTTCACTATCCTATGGGCTCCAGCTCAACCCAAAACTCAAGCAAAATTATTAGAGTCAAGTAAAGTGGATTACCTTGAAGTGCCATTCCCATCAGAAGATGGAAAACCAGATTTAGAATACCTTGTTAATGGTTTTGCGGTCTTTAATAATAAAGATGAAAACAAAGTAAAAGCCTCTAAGAAATTTATCACTTTTATTGCTGACGATAAAAAATGGGGACCAAAAGATGTTATACGTACAGGTGCTTTCCCAGTTAGAACATCATTTGGAGATCTTTATAAAGGTGATAAACGTATGATGAAGATTTCAAAATGGACTCAATATTATTCACCATATTACAACACTATCGATGGATTTTCTGAAATGAGAACCTTATGGTTCCCAATGGTTCAATCTGTATCCAATGGTGACGAAAAACCAGCAGATGCTTTGAAAGACTTTACTCAAAAAGCAAATGATACCATTAAAAAAGCAGCTAAA

SEQ ID NO: 8838 - protein, 438 aa, Streptococcus agalactiae; identical to SEQ ID NO: 4378

SEQ ID NO: 8839 - protein, 884 aa, Streptococcus agalactiae
ATGCGTACTAATAAGTTAAAGATGAGGGAAACGATGATAGCTTATGCTTTTCTAGCACCTATTCTCTTATTTTTCTTAATTTTTGTTTTTGCACCGATGGTTATGGGCTTTGTCACTAGTTTTTTTAATTATTCTATGACACAGTTCACTTTTATTGGGTTAGCTAATTACAATCGTATGTTTCATGATTCTATTTTCATGAAATCCTTGATAAATACAGTAATCATTGTGATTGGCTCTGTGCCAGTAGTGGTTTTCTTCTCACTTTTTGTTGCTGCCAATACTTATGAAAAAAATGTTTTTTCACGCTCTTTCTACCGTTGTGTCTTCTTCTTGCCAGTAGTAACTGGTAGTGTTGCAGTTACAGTTGTTTGGAAATGGATTTATGACCCTATGTCCGGAATTTTAAATTACATCTTGAAATCAGGTCATGTCATTGAACAGAATATTAGCTGGCTTGGGGATAAGCACTGGGCATTGCTTGCTATTATTATTATTTTGCTAACGACCTCAGTTGGTCAACCTATTATTCTATATATTGCGGCGATGGGAAATATTGATAATTCTCTTTGCGAAGCTGCGCGTGTTGATGGAGCCAATGAAATGCAAGTTTTTTGGCAAATTAAATGGCCGAGTCTCTTACCAACTACACTCTATATTGCAGTTATAACAACAATTAATTCATTTCAATGTTTTGCCTTAATCCAGCTCCTAACATCTGGTGGACCAAATTATTCAACAAGCACTTTGATGTATTATCTTTATGAAAAAGCCTTTAAACTATCAGAATATGGCTATGCTAATACTATGGGAGTATTCCTAGCAGTAATGATTGCTTTAATAAGTTTTGCTCAATTTAAGATCTTAGAAATGATGTGGAATAT

SEQ ID NO: 8840 - protein, 295 aa, Streptococcus agalactiae
  VARIANT 290: Xaa = Any Amino Acid
MRTNKLKMRETMIAYAFLAPILLFFLIFVFAPMVMGFVTSFFNYSMTQFTFIGLANYNRMFHDSIFMKSLINTVIIVIGSVPVVVFFSLFVAANTYEKNVFSRSFYRCVFFLPVVTGSVAVTVVWKWIYDPMSGILNYILKSGHVIEQNISWLGDKHWALLAIIIILLTTSVGQPIILYIAAMGNIDNSLCEAARVDGANEMQVFWQIKWPSLLPTTLYIAVITTINSFQCFALIQLLTSGGPNYSTSTLMYYLYEKAFKLSEYGYANTMGVFLAVMIALISFAQFKILXNDVEY

SEQ ID NO: 8841 - protein, 828 aa, Streptococcus agalactiae; identical to SEQ ID NO: 4381

SEQ ID NO: 8842 - protein, 276 aa, Streptococcus agalactiae; identical to SEQ ID NO: 96

SEQ ID NO: 8843 - protein, 441 aa, Streptococcus agalactiae
ATGATTTACGATCATTTATTGAATTTAACGCATTATAAAGATATTAATCCTAATTTAGATTTAGCGATTGATTATCTACTAAGTCATGATTTAAGGAATTTAGATATAGGCACCTATCATATTAGCCCAGAAGTGATACTCATGGTCCAATCAAATCAACTTAGTGAGTCATTTGATCATATTTTTGAATACCATAAAAAATACCTTGATATACATTATGTCATTGAAGGACATGAAGTTATCAAATTGGGAAAAGGTGATAAGGTAGAGGTGGAGGAATACTTAGGCGATATAGGATTTATCAAGTGCTCAGAAGAGACTTCTTTTGATTTGAGAGATAATTATATAGCCTTCTTTTTCCCAGAAGAAGCTCATCAGCCAAATGGTATGGGAAGTCTAGGTAATTATGTCAAAAAAGGGGTATTGAAAGTGTTAATGGCG

SEQ ID NO: 8844 - protein, 147 aa, Streptococcus agalactiae; identical to SEQ ID NO: 98

SEQ ID NO: 8845 - protein, 660 aa, Streptococcus agalactiae
GTGAAAAAAGCAAATCAATTAATAGCAGCGATTTTTGATGTTAACAACCCCTTTATGCAAGGTTGCAATGTTGTTTTTGATCTGGCATTACTAAACCTTCTCTTTATGATAACTTGCCTACCATTGGTAACTATTGGTGCTGCTAAAATTAGTTTGTATCGAACGTTGTGGCAAAAATTAGAAGGTGATCAGACAAATCTTTTAATATTGTATATAAAACACCTAAAAAAAGAGTGGTTCCAAGGTATGCTTTTAGGTTTGGTTGAACTAAGTATTTTGGTTGTGATCATATTTGATTTAACAATTCTTCATTATCAAATAGGTTTCATTGTGTCTTTCTTGAAGATAACTTGTTACGCCTTTTTGTTATTGACTGTGATGACGAGCATATACCTATTTCCTATGGCTGCCCGCTACGAAATGTCTCTTTTAGATACCGTGAAAAAGAGCTTTATAATGGCATGTTTAAACTTGAAATGGACTGGTGTATTGATGTTTTTATTAATCATGACTTGGTTTATTATGGTGCAGTCTAGTCTCTTATTTATGCTTACAGTGTCAGCTATATTTATTTTTGCTTATACCGCCTTTGCTTACTTTAAAATTATTATTTTACAAAAACAATTTGCCTATTTCAGCAAACAACAAGGAGATTATCAA

SEQ ID NO: 8846 - protein, 220 aa, Streptococcus agalactiae; identical to SEQ ID NO: 100

SEQ ID NO: 8847 - protein, 915 aa, Streptococcus agalactiae
ATGAAAGATTTACAAAAATATCAAGGAATTATTCCTGCATTTTATGCTTGCTATGATGATAAGGGTGATATTTGTCCCGAACGAGTAAAAGCCCTGACCAATTATTTTATTGATAAAGGTGTTCAAGGACTTTATGTTAATGGTTCATCCGGAGAATGTATTTACCAAAGTGTAGCAGATCGTAAACTTGTACTGGAAAATGTTATGTCCGTTGCTAAGGGTAAACTAACAGTAATAGCGCATGTGGCATGTAATAATACTAAGGATAGCGTAGAGTTGGCTATGCATGCTGAAGCTATAGGTGTTGATGCTATTGCAGCAATTCCACCAATTTATTTTCGATTACCAGAGTATGCCATAGCAGATTATTGGAATACTATTAGTCAAGCAGCACCACAAACTGATTTTATTATTTACAATATTCCTCAATTGGCAGGGGTTGCTTTGACATCGGATTTATATCGAAAAATGTTACAAAATCCGCAAGTAATTGGTGTTAAAAATTCTTCCATGCCAGTTCAAGACATTCAGAATTTTGTGGCTATTGGAGGAGAAAATCATATTGTTTTTAATGGTCCAGATGAACAATTTTTGGGTGGTCGTCTCATGGGAGCCGCTGCAGGTATTGGTGGTACCTATGGCGTAATGCCAGAATTATACTTGACTTTAAATCAGTTAATTGTTGATAAAGATTTAGAAAAAGCGCGTGAACTTCAATTTACAATTAACGATATTATCACAAAGCTTTGTTCGGGTCATGGTAATATGTATGCTGTGATCAAAGCTGTATTGGAAATCAATGAGCAACTAACTATAGGTTCCGTTCGGTTACCTTTAGCATCTGTAACAGAAGAAGATAAACCTATTATTAAAGAGGCAGCAGAAATGATTAGACATGCTAAAAAACAGTTTTGT

SEQ ID NO: 8848 - protein, 305 aa, Streptococcus agalactiae; identical to SEQ ID NO: 102

SEQ ID NO: 8849 - protein, 879 aa, Streptococcus agalactiae
ATGACCAGAACAGTAGCAATTGATATTGGCGGTACAATGATTAAGCATGGCATTGTGGATAATTTAGGTTGTATTGTTGAGGCAAGTGAGCTTGCCACAGAAGCCTACAAAGGTGGTCCAGGCATTTTACAAAAAGTTTGTCAAATTATCGATAACTATCTAGCAGAAGGGAGCATTGATGGAATTGCTATCTCATCTGCTGGCATGGTAGATCCAGATGAAGGATGTATATTTTACTCTGGTCCTCAAATTCCAAACTATGCTGGGACACAATTTAAGAAAGTTTTAGAAGACACTTATCAAGTACGCACAGAAATTGAAAATGATGTTAATTGTGCAGGATTAGCTGAAGCTGTCTCAGGTAGTGCCAAAGATAGTTCAATAGCGCTTTGTCTTACTATTGGAACAGGTATTGGTGGTTGTCTGATTATTGATAAAACAGTTTTTCATGGCTTTAGTAATTCTGCTTGTGAAGTTGGCTATATGCACCTTTCAGATGGTGATTTTCAAGATTTAGCCTCTACAACTGCACTGATTGCTGATGTTGCCAAAGCGCATGGAGATGAAATTAGCCGATGGGATGGACGTCGTATTTTTCAGGAGGCTAAAAAAGGCAATGAAAAATGTATTGCAAGTATAGACCGTATGATAAACTACCTTGGCCAAGGAATCGCTAATATGGTTTATGTGGTAAATCCTGAAAAAGTTGTTTTAGGTGGTGGAATCATGGCTCAAAAAGATTATTTACAAGATAAACTTAGTGAATCTTTGAAACGAAATCTTGTGACAAGTCTTGCTGAAAAAACAGCAATAGTCTTTGCACAACACGAAAACCAAGCTGGTATGCTAGGAGCTTACTACCATTTTAAAAACAGGGGG

SEQ ID NO: 8850 - protein, 293 aa, Streptococcus agalactiae; identical to SEQ ID NO: 104

SEQ ID NO: 8851 - protein, 975 aa, Streptococcus agalactiae
ATGATTGAAACAATGTCGCTAGATGACATGAGAGAATACCTAGGTCAAGACCAAATTCCCGAGGATTTTGATGACTTCTGGAAAAAACAAACAATGAAATATCAAGGGAATATTGAGTATCGTCTAGACAAAAAAGATTTCAATATTACTTTTGCACAAGCTTATGATCTTCATTTTAAAGGCAGCAATAACTCTATTGTCTATGCCAAATGTTTATTCCCTAAAACAAATAAACCCTATCCTGTAGTTTTTTATTTTCATGGTTACCAAAACCAAAGTCCTGACTGGAGTGACCAACTTAATTATGTAGCAGCAGGTTACGGCGTTGTTTCAATGGATGTTCGAGGTCAAGCTGGACAGTCTCAAGACAAGGGGCATTTTGATGGCATTACAGTTAAGGGCCAGATTGTGCGAGGAATGATCTCAGGACCAAATCATCTTTTTTATAAAGACATTTATCTTGATGTTTTCCAATTGATTGATATCATTGCTACATTAGAGAGTGTTGATAGTAATCAACTTTATAGTTATGGCTGGTCTCAAGGTGGAGCACTTGCTTTGATAGCTGCAGCTCTTAATCCCAAAATCGTCAAGACCGTTGCTGTTTACCCATTTTTGTCAGACTTTAGACGAGTATTAGATTTAGGGGGTGTCAGTGAGCCCTATGATGAACTCTTCCGCTATTTTAAATATAGTGATCCTTTTCATAAAACAGAGAATAATGTGTTAAAAACTTTGGCTTATATTGATGTTAAAAATTTTGCACATAGGATTTCTTGCCCCGTTGTTTTACTAACAGCCTTAAAAGATGATATTTGTCCTCCATCAACTCAATTTGCCATTTTTAATCGTCTGACATCAACTAAAAAGCATCTTTTATTACCAGATTATGGACATGATCCAATGACAGTGCAAGTAAAAGACCATATTTTTGATCAACTGACAGGAAGTCAATTTACAAAGCAAAAAATCGAG

SEQ ID NO: 8852 - protein, 325 aa, Streptococcus agalactiae; identical to SEQ ID NO: 106

SEQ ID NO: 8853 - protein, 801 aa, Streptococcus agalactiae
ATGACTATTTATGACCAAATTGAGTCTGCTCTTGATTTAATGACTGATTTAGAACGTGAAATTGCTTGTTATTTTATGGGGCAGCCCATTTCAAAAGACGCTCTTGCTTCTACCATTGTCACTAAGCAACTACACATTTCACAAGCAGCCTTAACGCGTTTTGCTAAAAAATGTGGGTTTAAAGGCTATCGTGAATTTGTTTTTGAATATTTAAAAAGCCATGAGACCATCAGTCAACAATTATACGGTCTTCAAAATGACAACACTAAGAAAGTATTTATGAATTATCAAGAGATGATTTCTAAATCTGCTGATATTATTGATGAAGAACAGCTTCTAGAAGTATCACATATGATTGAGCAAGCTGATCGTGTTTATTTTTATGGCAAAGGGAGCTCATCGCTAGTAGCTAAAGAATTTAAAATACGCCTTATGAGGCTGGGAGTGATTTGTGAGGCTCTGGATGATACAGATAGTTTCTCATGGACTAATAGTATTGTTAATGATAGATGCCTCGTCATTGCCTTCTCACTTTCTGGGAACACCAACTCTGTTATTGGTGCCTTAAAAATCGCAAGTTGTCACGGAGCTAAAACCGTTCTATTTACAAAACAACCTCACACAATTGACTATGCTTTTGACAAGATTATTCAGGTGGCTTCTGCTAGGCATTTAGACTACGGCAATAGAATTTCGCCTCAGATCCCAATGTTAATCATGGTAGATATTATCTATGCACAATTTTTAGATATTAATAAAATAGAAAAAGAGCGAATTTTTAGAGAAACCATTATTCAACGC

SEQ ID NO: 8854 - protein, 267 aa, Streptococcus agalactiae; identical to SEQ ID NO: 108

SEQ ID NO: 8855 - protein, 1263 aa, Streptococcus agalactiae
ATGAAATTGCTTGTTGTTGGTTCTGGTGGTCGTGAGCATGCGATTGCTAAGAAGTTGTTAGCGTCTAAGGATGTGGATCAGGTTTTTGTGGCACCTGGTAATGATGGTATGACCTTGGATGGTCTAGACTTGGTAAATATCGGAATTTCCGAACATTCTAGACTGATTGACTTTGTTAAGGAGAATGAGATTGCTTGGACCCTTATTGGTCCTGATGATGCGCTAGCAGCTGGTATCGTTGATGGTTTTAATAGTGCTGGACTCAGAGCATTTGGTCCAACCAAGGCAGCCGCGGAGCTAGAGTGGTCAAAAGACTTTGCCAAGGAAATCATGGTCAAATACAATGTTCCAACAGCAGCCTATGGCACATTTTCAGATTTTGAAAAAGCTAAAGCCTACATCGAAGAGCAGGGCGCACCAATCGTGGTCAAGGCTGACGGATTGGCGTTAGGCAAGGGCGTGGTCGTGGCTGAAACCGTTGAGCAGGCGGTAGAGGCGGCGCAAGAGATGCTTTTGGACAACAAGTTTGGCGACTCGGGTGCGCGCGTGGTTATCGAGGAATTCTTGGATGGTGAAGAGTTCTCCCTTTTCGCCTTCGCTAATGGCGATAAGTTCTACATCATGCCGACAGCTCAGGATCACAAGCGTGCCTATGATGGTGACAAGGGGCTAAATACCGGTGGTATGGGTGCCTATGCGCCAGTTCCCCACCTGCCTCAGAGCGTGGTGGATACAGCAGTTGAGACTATCGTTAAGCCTGTCCTTGAAGGCATGATTGCCGAAGGGCGTCCTTATCTAGGTGTCCTCTATGCTGGGCTTATCCTGACGGCTGATGGCCCTAAGGTTATCGAGTTCAACTCACGTTTTGGTGACCCTGAAACTCAGATTATCCTCCCTCGCCTGACTTCCGATTTCGCTCAGAACATCGACGACATCATGATGGGCATCGAGCCTTACATCACTTGGCAGAAGGACGGCGTGACTCTGGGCGTTGTCGTTGCCTCAGAAGGCTATCCGCTCGATTACGAGAAAGGTGTGCCACTGCCTGAAAAGACCGACGGCGACATCATCACCTACTATGCGGGAGCTAAGTTTGCGGAAAATAGCAAAGCACTGCTCTCAAACGGAGGACGTGTCTACATGCTTGTCACCACAGAAGACAGCGTCAAAGCAGGGCAGGACAAAATCTATACCCAACTCGCCCAACAAGACACAACAGGCCTCTTCTACCGAAACGACATCGGAAGCAAAGCTATTAAGGAA

SEQ ID NO: 8856 - protein, 421 aa, Streptococcus agalactiae; identical to SEQ ID NO: 110

SEQ ID NO: 8857 - protein, 582 aa, Streptococcus agalactiae
GTGGGTACGTCTTCGAAATCAAAGATTTCGGACTTACCGCATATTTTTCTACGAAAATTTTCGACAAGTCGAAACGTCCCTTTGTATCTTAATATTATGCAACCAATTATTTCTATTATCATGGGTTCCAAATCCGACTGGACAACCATGCAAAAAACGGCTGAAGTTCTAGATAACTTTGGCATTGCTTACGAGAAGAAAGTCGTCTCTGCCCACCGTACGCCAGACCTCATGTTCAAGCATGCTGAGGAGGCGCGTGGTCGTGGTATCAAGATTATCATCGCTGGAGCAGGTGGAGCAGCCCACTTGCCGGGTATGGTAGCAGCTAAAACAACCCTGCCTGTTATCGGTGTGCCTGTCAAATCACGTGCCCTCTCAGGTTTGGATTCGCTCTACTCTATTGTGCAGATGCCTGGTGGTGTGCCTGTGGCGACCATGGCTATCGGAGAAGCAGGAGCGACTAACGCTGCCCTGACAGCCCTCCGTATCCTCTCTATCGAGGATCAAAATCTGGCTGATGCGCTAGCTCATTTCCATGAGGAACAAGGAAAAATCGCAGAGGAGTCAAGCAATGAACTCATT

SEQ ID NO: 8858 - protein, 194 aa, Streptococcus agalactiae; identical to SEQ ID NO: 112

SEQ ID NO: 8859 - protein, 1089 aa, Streptococcus agalactiae
ATGAACTCATTTAAGACCATTGGGATTATTGGTGGTGGTCAGCTGGGGCAGATGATGGCGATTGCGGCTATCTACATGGGCCACAAGGTCATTACGCTGGATCCAGCTAGCGACTGCCCTGCCTCCCGCGTTAGCGAGGTGATTGTGGCACCTTACGATGATGTTGAGGCTTTGGGAACATTAGCTGCGCGTTGCGATGTTTTGACCTATGAGTTTGAGAATGTCGATGCCGATGGTCTGGATGCCGTTGTGTCAGCTGGTCAGCTACCGCAGGGGACTGATCTGCTCCGCATTTCTCAAAACCGTATCTTTGAAAAAGACTTTCTGGCAAATAAGGCTGGCGTGACTGTCGCTCCCTATAAGGTGGTGACATCTAGCCTTGACCTAGAGGGGCTTGACTTGACCAAGACCTATGTCCTCAAGACAGCGACAGGTGGTTATGACGGTCATGGGCAAAAGGTTATCCGCTCAGCAGAAGACCTGCCAGAGGCGCAGCAATTAGCCAACTCAGCTCAGTGTGTCTTGGAAGAGTTTGTCAACTTCGACCTTGAAATATCAGTCATCGTGTCTGGAAATGGTCAGGATGTGACGGTCTTTCCCGTTCAGGAAAATATCCACCGCAACAATATCCTGTCAAAAACCATCGTACCAGCTCGCATCTCAGACCAACTAGCTGACAAGGCTAAGGAAATGGCTGTGCAGATTGCCAAGAAACTCCAGCTATCAGGAACCCTCTGTGTGGAAATGTTTGCGACCGCAGATGACATCATCGTCAATGAAATTGCCCCACGTCCCCACAACTCAGGGCACTACTCTATCGAAGCCTGCGACTTTTCACAGTTTGACACCCACATCTTGGGCGTACTGGGCGCACCGCTTCCGCCAATCAAACTCCATGCTCCAGCCGTTATGTTCAATGTCCTAGGACAACATGTCCAGCAGGCAATTGACCATGTTGCCCAAAACCCTAGCGCCCACCTCCACATGTATGGTAAACTAGAAGCAAAACATAACCGCAAAATGGGACACGTGACGGTGTTTAGCGATGTACCTGATGAGGTGGAAGAGTTTGAAGAAAGGATGGATTTC

SEQ ID NO: 8860 - protein, 363 aa, Streptococcus agalactiae
MNSFKTIGIIGGGQLGQMMAIAAIYMGHKVITLDPASDCPASRVSEVIVAPYDDVEALGTLAARCDVLTYEFENVDADGLDAVVSAGQLPQGTDLLRISQNRIFEKDFLANKAGVTVAPYKVVTSSLDLEGLDLTKTYVLKTATGGYDGHGQKVIRSAEDLPEAQQLANSAQCVLEEFVNFDLEISVIVSGNGQDVTVFPVQENIHRNNILSKTIVPARISDQLADKAKEMAVQIAKKLQLSGTLCVEMFATADDIIVNEIAPRPHNSGHYSIEACDFSQFDTHILGVLGAPLPPIKLHAPAVMFNVLGQHVQQAIDHVAQNPSAHLHMYGKLEAKHNRKMGHVTVFSDVPDEVEEFEERMDF

SEQ ID NO: 8861 - protein, 1368 aa, Streptococcus agalactiae
ATGAATAGAATAATAAACAGGGATATTTTACCTAGAATTTCAAAGATTTCTAAAAATAATAAAGAGAAAGATTTACTATCTATAGCTTATATTACTTGGCTAATCTTTATAATATTTGCTTTGGGAGTAGTTACAGTTAATGATTTAAAACCGATGTTTAATCAATTAATAGTAAACCTCTTAAATATTTATTATTATATGGAAGCCTTCATATTGGGTATGGACAGCTATTTACAATATAACCTTCCATACAGTTTTGATTTTTGGAGTATTTTTGTAGAGGCTATAAATTTATTTGTAAAAGTATTTTTAATTGCTTTTATTCCTTCTGTTATTAGAAAAGTATTGAAAAAAGAAAGTTTTTTCAATGAAGTTGTTATTTTACTAGGAGCGATTGTTACTATATTAGAGATATTGATAGTAGTGGGACTAATACTTTTATTAATTGCTTTTGTTTCAATAGGTAAGAATCGTGTTTATAATTTTGTTCAAAATTTAAACTACTTTGAAGAAGTGATTTGGAATTATTTTGAAGAAAATCCGGTTAAAATAAAAGAAAAATCATTGATTATTAAATTTTTACTTACTATTTCTTTTGTTTTTGTAATTGATTTTGCAATGGTTAGATTGTTGAATTTTAATATAAAATTTTCTACAATATTAGCTTGTTCTGCTATTTTATTAGCATGGTTATACCAAAATAAGTCTGTTACAGAACCCTTCCTATTAAAAAAGTTAGTTATCTATTTTATTTTTTTCATTGCCACTTTAATTGGTAATTTAAAAAATGAGTTGTCAATCTTAGAAACACCATTACTTTTTATTAGTATATTTTTTACTATGGATAGAATTATTGCTCTATCTAAAGAAATGCGTGATTTGATTATATCTAAGAGTATTTTATTTTATTATGATCATGAAAATATAAAGCCATCAATATTACTTAGTGAGATAAAAGAAATTAAGTATCTTGAAAATGTAGATATTGGAGAACTTGAACTTGTTAGGCAAATGGTAATTAGGTTGCGTCTAGAGTTAGAGGAAGAATTTTTGATTTTATCAGATATATATATGAAAAATGGCTATGAAAAATATATACAATTTGTTCAAGGAAATGTTTATTTTATCAACTTAGAATTGGATAAAATTCCCAACTACACTAACTTGAAATTAATACTAGAATCAATATTTGATCATAATAATCAAAAGATATTTATACCTAAACTTTATGAGGAATACATATACATCTTAATTTCTTTAGGAGAAGTTGAAAAAGCTAAAGAAATATTAAAAGAAGTGTCGGATTATTTAACTGAAGAATCTTTGAATTATTTTGAAAAAGAATATGATAAAGCTAAGGGTAGTAAT

SEQ ID NO: 8862 - protein, 456 aa, Streptococcus agalactiae
MNRIINRDILPRISKISKNNKEKDLLSIAYITWLIFIIFALGVVTVNDLKPMFNQLIVNLLNIYYYMEAFILGMDSYLQYNLPYSFDFWSIFVEAINLFVKVFLIAFIPSVIRKVLKKESFFNEVVILLGAIVTILEILIVVGLILLLIAFVSIGKNRVYNFVQNLNYFEEVIWNYFEENPVKIKEKSLIIKFLLTISFVFVIDFAMVRLLNFNIKFSTILACSAILLAWLYQNKSVTEPFLLKKLVIYFIFFIATLIGNLKNELSILETPLLFISIFFTMDRIIALSKEMRDLIISKSILFYYDHENIKPSILLSEIKEIKYLENVDIGELELVRQMVIRLRLELEEEFLILSDIYMKNGYEKYIQFVQGNVYFINLELDKIPNYTNLKLILESIFDHNNQKIFIPKLYEEYIYILISLGEVEKAKEILKEVSDYLTEESLNYFEKEYDKAKGSN

SEQ ID NO: 8863 - protein, 1296 aa, Streptococcus agalactiae
ATGATCGAACGTTATTCACGCCCTGAGATGGCGGCAATTTGGACAGAGGAAAATAAATACCGTGCTTGGTTGGAGGTCGAGATTTTGGCTGACGAGGCATGGGCTGAGTTGGGTGAGATTCCTAAGGAGGATGTGGCTAAGATTCGTGAGAAGGCGGATTTTGACATTGACCGCATTCTTGAGATTGAGCAGGACACGCGTCACGATGTGGTGGCTTTCACTCGTGCGGTTTCTGAGACGCTTGGTGAGGAGCGCAAGTGGGTGCACTACGGTTTGACGTCGACTGACGTGGTGGACACTGCCTACGGTTACCTCTACAAGCAGGCTAACGATATTATCCGTCGTGACCTTGAGAATTTCACAAATATTGTGGCTGATAAGGCTAAGGAGCACAAGTTCACCATCATGATGGGTCGTACCCACGGTGTTCACGCTGAGCCAACGACTTTCGGTCTTAAGTTGGCGACCTGGTACAGCGAGATGAAACGTAATATTGAGCGTTTTGAACATGCTGCCGCAGGTGTGGAAGCTGGTAAGATTTCAGGTGCCGTTGGTAACTTTGCTAACATTCCTCCATTTGTGGAACAATATGTTTGTGACAAATTGGGCATCCGTCCGCAAGAGATTTCAACACAGGTTCTTCCACGTGACCTCCACGCAGAATATTTTGCAGTGCTTGCAAGCATTGCAACTTCTATCGAACGTATGGCGACAGAGATTCGTGGTCTGCAAAAATCAGAACAACGTGAAGTTGAAGAATTCTTTGCCAAAGGTCAGAAAGGTAGCTCTGCTATGCCTCACAAACGCAACCCAATCGGTTCAGAGAACATGACTGGGCTAGCGCGCGTGATTCGTGGTCACATGGTGACGGCTTATGAGAACGTGGCACTTTGGCACGAGCGTGATATTTCGCACTCATCTGCTGAGCGTATCATCACACCTGACACAACGATCTTGATTGACTACATGCTCAACCGTTTTGGCAATATCGTTAAGAACTTGACTGTCTTCCCGGAAAATATGATGCGCAATATGGAATCAACTTTTGGTTTGATTTATAGTCAACGTGTTATGCTCAAATTGATTGAAAAAGGAATGACACGAGAAGAAGCTTATGACTTAGTTCAACCTAAGACAGCTTATTCCTGGGACAATCAAGTGGATTTCAAACCACTTTTAGAAGAAGACACCAAAGTTACCTCTTGTCTTACACAGGAAGAAATTGATGAACTATTTAATCCGATTTATTACACAAAACGTGTTGATGATATTTTTGAAAGACTAGGATTAGAAAAA

SEQ ID NO: 8864 - protein, 432 aa, Streptococcus agalactiae; identical to SEQ ID NO: 122

SEQ ID NO: 8865 - protein, 909 aa, Streptococcus agalactiae
ATGTTAAAACATTTTGGTAGTAAAGTAAGAAATTTGAGAGTAACTAGAAATATTACTCGCGAAGATTTTTGTGGTGATGAAACTGAGTTATCTGTAAGACAATTAGCTAGGATTGAAAGTGGACAGTCAATTCCAAACTTGACTAAAGCTCACTACATAGCTAAACAATTGAATGTAAAATTGGATATTTTAACAGGAGGAGAGAGCTTAGAATTACCTAAACGGTATAAAGAGTTGAAGTATTTGATTTTAAGAATTCCAACTTATGCAGATGCTGAACGATTAAAATTAAGAGAATGTCAGTTTGATCATATTTTCGAAGAATTCTATGATAATCTTCCAGAAGACGAGTGCTTAGCAATTGACAGTTTACAAGCTAAATTTGAAGTCTATCAAACAGGAGACATTAATTTTGGTGTGGAGGTTTTATGCGAATGCTTTGATAAAGTAAAATATAAAGAAAAATATACTCTTAATGATTTGATTATCATAGATTTGTTTTTAACTTGTGCAGTTGTATCTAAATTTAACAATAGAGCATTTACTAAAGAAGTATTTCAAACTATATGTAAAACTTTGATAAGTCAGAACCACAAACTTACAGCAGAAGATTTGTTTTGGTTTAATCATGTACTCCTGAATTGTGTATTTGTTGGACTTTGTTTAAATAGTGAAGAGTGTCTTGCAGAAATGTTAGAAGTTAGCCGACAAACGATGGTGTCAACACATGATTTTCATAAAATGCCTTTATATTTTATGTACCAATGGAAATACTTCATTACAATTGACAATGATATAAAGTCTGCAGAAAATGCTTACCAACAATCAATTATGTTTTCAAAAATGATTGATGACAAGCATCTAATTAAAAAATTAGAATTGGAGTGGCAAGAAGATATAACAGGACAT

SEQ ID NO: 8866 - protein, 303 aa, Streptococcus agalactiae; identical to SEQ ID NO: 124

SEQ ID NO: 8867 - protein, 954 aa, Streptococcus agalactiae
TTGGTAGAACGTACACTTCGTCCGCAGTATTTAAGAGAGTATATTGGACAAGATAAGGTTAAAGATCAGCTAAAAATATTTATTGAAGCTGCTAAATTGCGTGATGAGTCATTGGATCATGTGTTATTATTTGGCCCTCCTGGTTTAGGGAAAACAACCATGGCATTTGTAATTGCTAATGAGTTGGGTGTCAATCTCAAACAAACATCAGGTCCCGCAATTGAAAAATCAGGGGATTTAGTAGCCATTTTAAATGATTTAGAACCAGGTGATGTTCTTTTTATTGATGAAATTCATCGTATGCCGATGGCGGTTGAAGAGGTACTTTATAGTGCAATGGAAGACTTCTATATTGACATTATGATCGGTGCAGGAGAAACTAGTAGAAGTGTTCATCTAGATTTGCCGCCCTTTACCTTAATTGGTGCAACGACACGTGCAGGTATGTTATCTAATCCCTTACGTGCTCGCTTTGGTATTACAGGGCATATGGAGTATTATGAAGAAAATGATTTGACAGAAATTATTGAGCGTACAGCAGACATTTTTGAAATGAAAATTACTTATGAAGCTGCTTCTGAATTAGCGCGTCGCAGTCGTGGAACGCCACGTATCGCTAACCGTTTATTGAAACGTGTTCGAGATTATGCTCAAATCATGGGAGATGGTTTGATAGATGACAATATTACAGATAAAGCATTAACGATGTTAGATGTTGATCACGAGGGGCTTGATTACGTCGATCAAAAAATCTTAAGAACCATGATTGAAATGTATAATGGAGGTCCTGTTGGTTTAGGAACTCTATCCGTTAATATTGCTGAAGAACGAGATACTGTTGAAGACATGTACGAACCTTATTTAATTCAAAAAGGTTTTATTATGCGTACCCGTACCGGTCGTGTAGCTACGGATAAGGCATATGAACATTTAGGTTATCAGCGATTTGATAAA

SEQ ID NO: 8868 - protein, 318 aa, Streptococcus agalactiae; identical to SEQ ID NO: 4410

SEQ ID NO: 8869 - protein, 435 aa, Streptococcus agalactiae
ATGAAGAAAGTCTGTTTTGTTTGTCTTGGAAATATCTGCCGTAGCCCGATGGCTGAGTTTGTTATGGCGAATTTAGATAAGGAGGATAGCCTCTTGGTTGAGAGTCGTGCGACTTCAACATGGGAGCATGGAAATCCTATACATAGGGGAACGCAAGCGATTTTGCAGCGTTATCAAATTCCTTACATTAACGATAAAGGGTCACAACCTATTTCTAAAGACGATTTAGCATATTTTGATTATATCATCGGTATGGATGAGCAAAATGTCAAGGATTTAAAAGCTCTATCACAAGGAACCTATGATGATAAGATTAGTCTTTTTTGTGATGGTGGTGTTCCTGATCCATGGTATACTGGTGATTTTGAGGAAACCTATCGTCTAGTCAATGATGGCTGTAAACAGTGGTTAACGCTAATAAATAATAGTAGAGAT

SEQ ID NO: 8870 - protein, 145 aa, Streptococcus agalactiae; identical to SEQ ID NO: 128

SEQ ID NO: 8871 - protein, 378 aa, Streptococcus agalactiae
ATGAAGAATTTTAAAATAACACGAACTCATCTAGAAATATTATCTTTGATAATTATTGTTGTTTTTGGTTTATCAGTATTTACCTTAACGACTTCTAGTCAAGGAGTCTTTAGCTATGATGGCGGCAAGATAAAATATGTGGGCTCTATTGTTAATCACCATATGACTGGTAAAGGTAAATTAACCTATGAGAATGGGGATTACTATAAGGGCGATTTTGTAAATGGAGTCTTTGAAGGGAAAGGAACATTTGTTTCAGTTCATGGCTGGTCTTATACAGGTGACTTTAAAAAAGGTCAACCTGATGGACAAGGTCGCCTCAATGCTAAAAATAAGAAAGTCTATAAGGGGACATTTAAACAGGGGATTTATCAAAAA

SEQ ID NO: 8872 - protein, 126 aa, Streptococcus agalactiae; identical to SEQ ID NO: 130

SEQ ID NO: 8873 - protein, 1775 aa, Streptococcus agalactiae
ATGAGAATAAAATGGTTTTCTTTGGTACGTATAACAGGACTACTACTTGTTTTACTTTACCATTTCTTTAAGAATAGTTTTCCAGGAGGATTTGTTGGCGTTGACATCTTCTTTACATTTTCTGGTTTTCTGATTACGGCCTTATTGATTGATGAATTTTCTAAAACGAAAAAAATTGATTTTGTTAGTTTTTGTCGTAGACGTTTTTACCGTATTTTCCCACCATTAGTATTGATGGTTTTGGTGACAATACCTTTTGTATTTCTGGTTAAAAGCGATTTTAGAGCAAGTATTGGCTCTCAAATTATGACTGCTTTAGTTTTACCAGCAACTTTTACGAAATCTTGACTGGTGGTAACTACGAAAGTCAATTTATCCCTCACTTATTTGTGCATACCTGGAGTCTTTCTATTGAAGTCCATTTTTATGTTTTATGGGGCTTAACGGTATGGCTCTTATCGAAAAGATCAAAAGATCAAAAGCAATTGAGGGGGACTTTGTTCCTTATTTCCATGGGAATTTTTGGAGTCAGCTTCCTTACCATGTTTGTTAGAGCCTTTTTCGTTGATAATTTTTCAACGATATATTTCTCTACATTATCACATATATTTCCGTTCTTTTTAGGAGCGATGGTGGCTACAATATCTGGTATTCGAGAGATTACCGGACGATTCAAGAAAAATATCAAAAATCTGACTTTGAAGCATAATTTAATCATGATGGGTAGTGCTTTTGCTGGTCTAATGATTTTAACTTTTGCACTTGATTTTGATAATCGGCTAACATATCTTTTTGGTTTTGTATTGTCTAGCATTTTTGCTAGTGTAATGATTTACAATGCACGTATTTTACACGAGCATACACCAGATATTTCAGAACCTTTTGTGATTACTTATCTTGCTGATATCAGTTACGGTATGTACCTTTTTCATTGGCCATTTTATATTATTTTTAGTCGTTTATCCCCAAACTGGATAGCTGTTATTTTGACAGTAGTATTATCAGCAGTCTTCTCAACATTATCATTTTATATCATTGAACCTTTTATTTTAGGTAGAAAACCTAAATTCCTTGATTATGAATTTGACTTGTTGCCTTACAAAAAGTGGTTATTTAGTATCGGAGGGGTACTAACTCTTATTACTGTAGTGACAATGTTGACAGCTCCAAGTATAGGTAGTTTTGAGACAGAATTATTGCAGAATTCGTTACAACAAGCTAGAACAAATACTAACCGAACACATACACTAGCCGCAGGGGATGCAGGTGCTCTTAGTGATGTGACAGTAATCGGAGATTCAGTTGCCTTAAGGTCAAGTGCTGCTTTTAATAAATTGTTACCAGAAGTACAATTAGATGCTGCGGTGAGTCGTAATTTTAGTAAATCATTTGATATTTTTGAAAACCGTATTCAAAATAAAGCCTTGTCCAAAATTGTTGTTTTGGCAGTTGGTGTGAATTCATTAGATAACTACAAGACAGACTTGAGCCAATTTATTAAATCTTTGCCTAAGGGACACCGTTTGATTATAGTAACACCTTATAATGCTAAAAATATGAGTCAAGTTACGACAGTGCGTGATTATGAACTCTCGCTAATGAAAAAATATAATTACATAACGGTTGCTGACTGGTATAAGGTTGCGACAGAACATCCAGAAATCTGGGGAAATACAGATGGTGTGCATTATAGTGATAGCGATACTACAGGGGCTGATTTATATGTTAGTAACGTCAAAAAAGCTATTCAAAAATCAGCTCAACGAGCTGCAAAA

SEQ ID NO: 8874 - protein, 592 aa, Streptococcus agalactiae
  VARIANT 107: Xaa = Any Amino Acid
MRIKWFSLVRITGLLLVLLYHFFKNSFPGGFVGVDIFFTFSGFLITALLIDEFSKTKKIDFVSFCRRRFYRIFPPLVLMVLVTIPFVFLVKSDFRASIGSQIMTALXFTSNFYEILTGGNYESQFIPHLFVHTWSLSIEVHFYVLWGLTVWLLSKRSKDQKQLRGTLFLISMGIFGVSFLTMFVRAFFVDNFSTIYFSTLSHIFPFFLGAMVATISGIREITGRFKKNIKNLTLKHNLIMMGSAFAGLMILTFALDFDNRLTYLFGFVLSSIFASVMIYNARILHEHTPDISEPFVITYLADISYGMYLFHWPFYIIFSRLSPNWIAVILTVVLSAVFSTLSFYIIEPFILGRKPKFLDYEFDLLPYKKWLFSIGGVLTLITVVTMLTAPSIGSFETELLQNSLQQARTNTNRTHTLAAGDAGALSDVTVIGDSVALRSSAAFNKLLPEVQLDAAVSRNFSKSFDIFENRIQNKALSKIVVLAVGVNSLDNYKTDLSQFIKSLPKGHRLIIVTPYNAKNMSQVTTVRDYELSLMKKYNYITVADWYKVATEHPEIWGNTDGVHYSDSDTTGADLYVSNVKKAIQKSAQRAAK

SEQ ID NO: 8875 - protein, 2640 aa, Streptococcus agalactiae
ATGACTGAAAAAACTAAAGCAGTAGAAACTACAGATGTTGCTCTTGCAATTGATACATTGGTTCAAAATGGTTTAAAAGCACTTGATGAGATGCGTCAACTTAATCAAGAACAAGTTGATTATATTGTAGCTAAAGCTTCTGTTGCAGCCTTGGATGCCCATGGAGAACTTGCTCTTCATGCAGTAGAAGAAACTGGTCGTGGTGTCTTTGAAGATAAAGCGACAAAAAATTTATTTGCATGTGAACACGTCGTTAACAACATGCGTCATACAAAGACAGTGGGAGTTATTGAAGAAGACGATGTCACAGGCTTGACATTAATTGCTGAACCAGTGGGAGTTGTCTGTGGTATCACGCCAACAACCAACCCAACTTCAACTGCTATTTTCAAGTCATTAATCTCTCTTAAAACACGTAATCCAATTATTTTTGCCTTCCACCCATCAGCACAAGAATCATCAGCACATGCAGCACGTATTGTTCGTGATGCTGCTATTGCTGCTGGAGCTCCTGAAAATTGTGTCCAATGGATTGAACAACCATCAATTGATGCAACTAATGCTTTGATGAACCATGATGGTATTGCCACTATCCTTGCGACAGGTGGTAATGCGATGGTTAAAGCTGCCTACTCATGTGGGAAACCTGCCCTTGGTGTAGGTGCTGGGAATGTTCCAGCTTATGTTGAAAAATCAGCTAATATCCGACAAGCCGCTCACGATATTGTTATGTCTAAATCATTTGATAACGGTATGGTATGTGCATCAGAACAGGCTGTTATTATTGATAAAGAAATTTATAAAGAATTTGTTGAAGAATTTAAATCTTATCATACCTATTTCGTTAATAAGAAAGAAAAAGCTCTTCTTGAAGAATTCTGTTTTGGTGCAAAAGCAAATAGCAAAAACTGTGCTGGTGCAAAATTAAATCCAAATATTGTTGGAAAATCAGCAGTTTGGATTGCTGAACAAGCTGGATTTACTGTTCCAGAAGGAACAAATATTCTTGCCGCAGAATGTACTGAAGTTAGTGAAAAAGAACCTTTGACACGTGAAAAACTATCACCTGTTATTGCAGTATTGAAAGCTGAATCTACAGAAGATGGTGTTGAAAAAGCTCGTCAAATGGTTGAGTTTAATGGTCTAGGGCACTCAGCTGCTATTCATACAAAAGATGCAGACTTAGCTCGTGAATTTGGAACTAGAATTCGTGCTATCCGTGTTATTTGGAATTCTCCTTCTACTTTTGGTGGTATTGGGGATGTTTACAATGCTTTCTTGCCATCATTGACTCTTGGTTGTGGTTCGTATGGACGTAACTCAGTTGGTGATAACGTTAGTGCTATAAATCTCTTGAATATCAAAAAAGTAGGAAGACGTAGAAATAATATGCAATGGTTTAAAGTCCCTTCAAAAACATACTTCGAACGTGATTCTATTCAATATTTGCAAAAATGTCGCGATGTTGAACGTGTCATGATTGTTACAGATCACGCCATGGTTGAGCTTGGTTTCTTGGATCGTATCATTGAACAACTTGATCTTCGTCGCAATAAAGTTGTTTATCAGATTTTTGCTGAAGTAGAACCAGATCCAGACATTACAACAGTAATGAAAGGAACAGATTTGATGCGTACCTTCAAACCAGACACTATTATTGCATTAGGTGGTGGTTCTCCTATGGATGCTGCGAAAGTTATGTGGCTCTTCTATGAACAACCAGAAGTTGATTTCCATGACCTCGTTCAAAAATTCATGGATATCCGTAAACGTGCGTTCAAATTCCCAGAACTTGGTAAGAAAACAAAATTTGTTGCTATTCCAACAACTTCTGGAACAGGTTCTGAAGTGACACCATTTGCCGTTATCTCTGACAAAGCAAATAATCGTAAATATCCAATCGCTGATTATTCATTAACACCAACTGTAGCTATCGTTGATCCGGCCCTTGTTATGACTGTTCCTGGTTTTATTGCGGCTGATACGGGTATGGATGTATTGACACATGCAACAGAGGCTTATGTTTCACAGATGGCAAATGATTATACAGACGGACTTGCTCTTCAAGCAATTAAAATTGTGTTTGACTACTTAGAACGCTCAGTAAAAGATGCTGATTTTGAAGCACGTGAAAAGATGCACAATGCGTCAACTATGGCAGGTATGGCTTTCGCCAATGCATTCTTAGGTATTTCTCACTCAATGGCGCATAAAATTGGCGCACAATTCCATACCGTACACGGACGTACAAATGCAATTCTTTTGCCGTATGTTATCCGCTATAATGGAACTCGTCCAGCTAAAACAGCAACATGGCCTAAGTACAATTACTATCGTGCTGACGAAAAGTATCAAGATATCGCTAAATTACTCGGCTTACCAGCAGCAACACCAGAAGAAGCTGTCGAATCATATGCAAAAGCTGTGTATGACCTTGGAACACGTTTAGGTATTAAGATGAATTTCCGCGACCAAGGCATTGATGAAAAAGAATGGAAAGAAAAATCTCGTGAACTAGCTTTCTTAGCATATGAAGATCAATGTTCACCAGCAAATCCACGCCTTCCGATGGTAGATCACATGCAAGAAATCATCGAAGATGCTTATTATGGTTATGAGGAACGTCCAGGACGTCGTAAG

SEQ ID NO: 8876 - protein, 880 aa, Streptococcus agalactiae
MTEKTKAVETTDVALAIDTLVQNGLKALDEMRQLNQEQVDYIVAKASVAALDAHGELALHAVEETGRGVFEDKATKNLFACEHVVNNMRHTKTVGVIEEDDVTGLTLIAEPVGVVCGITPTTNPTSTAIFKSLISLKTRNPIIFAFHPSAQESSAHAARIVRDAAIAAGAPENCVQWIEQPSIDATNALMNHDGIATILATGGNAMVKAAYSCGKPALGVGAGNVPAYVEKSANIRQAAHDIVMSKSFDNGMVCASEQAVIIDKEIYKEFVEEFKSYHTYFVNKKEKALLEEFCFGAKANSKNCAGAKLNPNIVGKSAVWIAEQAGFTVPEGTNILAAECTEVSEKEPLTREKLSPVIAVLKAESTEDGVEKARQMVEFNGLGHSAAIHTKDADLAREFGTRIRAIRVIWNSPSTFGGIGDVYNAFLPSLTLGCGSYGRNSVGDNVSAINLLNIKKVGRRRNNMQWFKVPSKTYFERDSIQYLQKCRDVERVMIVTDHAMVELGFLDRIIEQLDLRRNKVVYQIFAEVEPDPDITTVMKGTDLMRTFKPDTIIALGGGSPMDAAKVMWLFYEQPEVDFHDLVQKFMDIRKRAFKFPELGKKTKFVAIPTTSGTGSEVTPFAVISDKANNRKYPIADYSLTPTVAIVDPALVMTVPGFIAADTGMDVLTHATEAYVSQMANDYTDGLALQAIKIVFDYLERSVKDADFEAREKMHNASTMAGMAFANAFLGISHSMAHKIGAQFHTVHGRTNAILLPYVIRYNGTRPAKTATWPKYNYYRADEKYQDIAKLLGLPAATPEEAVESYAKAVYDLGTRLGIKMNFRDQGIDEKEWKEKSRELAFLAYEDQCSPANPRLPMVDHMQEIIEDAYYGYEERPGRRK

SEQ ID NO: 8877 - protein, 792 aa, Streptococcus agalactiae
TTGAGGGTTGGTGATCGTGTCTCTATTGCATGGTTCTTTGAAGGGTGCGGTCATTGCGAATACTGTACTACAGGACGTGAGACACTTTGTCGTAGTGTTAAAAATGCTGGATACAGTGTTGATGGTGGTATGAGTGAATACGCTATTGTTACCGCGGACTATGCGGTTAAGGTTCCTGAGGGATTAGACCCAGCTCAAGCATCATCAATCACTTGTGCTGGAGTAACAACATACAAGGCTATCAAAGAAGCTGGAGCTGCTCCTGGTCAGTGGATTGCAGTGTATGGTGCAGGTGGTCTTGGAAACTTAGCAGTCCAATATGCAAAAAAAGTATTCAATGCTCATGTTGTAGCTGTTGATATTAACGCAGATAAACTTCAATTAGCTAAAGAGGTTGGAGCAGATTTGACAGTTAATGGCAAAGAAATAAAAGATGTTGCGGCATATATTCAAGAAAAGACAGGCGGTTGTCATGGAGTGGTTGTGACTGCTGTTTCTAAAGTTGCGTTTAATCAGGCGATTGACAGCGTTCGTGCTGGAGGTACAGTGGTAGCTGTCGGTCTTCCATCAGAATATATGGAATTGAGTATTGTAAAAACAGTACTTGATGGGATTCGTGTGGTTGGTTCCTTAGTTGGAACTCGTAAAGACTTAGAAGAAGCCTTCGCATTTGGAGCAGAAGGCTTGGTAGTACCGGTGGTTGAAAAAGTGCCTGTGGATACAGCTCCTCAAGTATTCGATGAAATGGAAAGAGGATTGATTCAAGGACGTAAAGTTCTTGACTTTACAAAG

SEQ ID NO: 8878 - protein, 264 aa, Streptococcus agalactiae
MRVGDRVSIAWFFEGCGHCEYCTTGRETLCRSVKNAGYSVDGGMSEYAIVTADYAVKVPEGLDPAQASSITCAGVTTYKAIKEAGAAPGQWIAVYGAGGLGNLAVQYAKKVFNAHVVAVDINADKLQLAKEVGADLTVNGKEIKDVAAYIQEKTGGCHGVVVTAVSKVAFNQAIDSVRAGGTVVAVGLPSEYMELSIVKTVLDGIRVVGSLVGTRKDLEEAFAFGAEGLVVPVVEKVPVDTAPQVFDEMERGLIQGRKVLDFTK

SEQ ID NO: 8879 - protein, 1486 aa, Streptococcus agalactiae
ATGGCAATAGTATATCAATCAACACGTGATGCTAGTAATAAAGTGACAGCTAGTCAAGCGATTCTAAAGGGATTACTGACGATGGAGGACTCTTTACCCCCATCACATTTCAAAAGTTGATTTAGATTTCACTAAACTTAAGGATGCTTCCTACCAAGAAGTGGCTAAACTCGTTTTGTCAGCTTTTTTTGATGATTTTACTGAACAAGAATTGGATTACTGTATTAGTCAAGCTTATGATACTAAATTTGATACAAGTGAAATAGCCCCGATAGTAAAGATTGGAGACCGGTATCACCTTGAATTATTTCACGGTCCTACAATTGCATTTAAAGATATGGCTTTATCCATTCTTCCTTATTTGCTAACAACAGCAGCCAAAAAACAAGGGGTTGATAATAAAATCGTTATTTTAACAGCAACATCAGGTGACACTGGCAAGGCAGCGATGGCAGGTTTTGCAGATGTTCCAGGAACTGAGATTATTGTCTTTTATCCTAAAAATGGTGTTAGTTATATCCAAGAATTGCAGATGATAACACAAGCCGGACAAAATACTCATGTTGTTGCGATTGAAGGAAATTTTGATGATGCACAGACTTCAGTTAAAGAAATGTTCAATAATTCCCTTCTTCGATTAAAATTATCACAGCAGCATATGCAGTTATCATCAGCCAATTCAATGAACATCGGTCGCCTTGTTCCTCAAATTGTTTACTATATATATGCATATGCTCAATTAGTTAAGTCAAAGGAAATCTCAATTGGTCAACCAATTAATTTTAGTGTACCTACAGGAAATTTTGGTAATATTTTAGCAGCATATTATGCTAGTCAAATTGGATTACCTGTTACCAAACTCATTTGTGCCTCAAATGATAATAACGTTCTAACAGATTTTTTTAAGACACAAACCTACGATAAAAATCGAGAATTTAAAGTGACATCAAGTCCCTCTATGGATATTTTGGTCTCCTCTAATCTAGAACGATTAATCTTTCACCTTTTAGGCGATGATGCAGAAACGACTAAAAAATTAATGGAAGATTTAGTGACTACTGGGGAGTATGCCTTAGAGGCTAGGCAAGCAAATATTTTAGAGAGCTTTGTAGCGGGATTTGCGACAGAACAATTTGTTGAATTAGACATCAAACATTTATTTGACCAGTATCAGTATATAGAGGATCCGCATACAGCTGTAGCATCAGCTGTTTATCAAGCTTATCAGACAGAAACTAAAGATCAAACTCCAGCAGTAATTGTGTCAACAGCAAGTCCTTATAAGTTCCCGTGTGTTGTTACAAAGGCTATTACAAATAAAGAAGAGATACAGGATTTCGCTGCTATTTCAATCTTAAACGATTTGTCAGGTGTTTCTTTACCTAAGGCGGTTACAGATCTACAAAAGGCCGAAGTAATCCATAGAACGGTAGTACCTACCTCAAATATGCGAGAAACGGTTGAAGAGTGTCTAGGTTTGAAACAA

SEQ ID NO: 8880 - protein, 496 aa, Streptococcus agalactiae
  VARIANT 26, 38: Xaa = Any Amino Acid
MAIVYQSTRDASNKVTASQAILKGLXDDGGLFTPITFXKVDLDFTKLKDASYQEVAKLVLSAFFDDFTEQELDYCISQAYDTKFDTSEIAPIVKIGDRYHLELFHGPTIAFKDMALSILPYLLTTAAKKQGVDNKIVILTATSGDTGKAAMAGFADVPGTEIIVFYPKNGVSYIQELQMITQAGQNTHVVAIEGNFDDAQTSVKEMFNNSLLRLKLSQQHMQLSSANSMNIGRLVPQIVYYIYAYAQLVKSKEISIGQPINFSVPTGNFGNILAAYYASQIGLPVTKLICASNDNNVLTDFFKTQTYDKNREFKVTSSPSMDILVSSNLERLIFHLLGDDAETTKKLMEDLVTTGEYALEARQANILESFVAGFATEQFVELDIKHLFDQYQYIEDPHTAVASAVYQAYQTETKDQTPAVIVSTASPYKFPCVVTKAITNKEEIQDFAAISILNDLSGVSLPKAVTDLQKAEVIHRTVVPTSNMRETVEECLGLKQ

SEQ ID NO: 8881 - protein, 1236 aa, Streptococcus agalactiae
ATGATTGAAAATATCTTACAAATGCTCATGGGAGTAGTTGATAATTATCTAGTGGCTCAGTTAGGTGTTGTAGCAGTATCAGGTGTTTCAGTTGCTAATAATATAATTACTATTTATCAAGCTATTTTTATAGCTTTAGGGGCGAGTATAGCAAGTCTATTGGCCAAGTCGTTAGCAGGTAGTAAGAAGGATGATGCAATTTCAGTATGTTCTCAAGCCATTTTTCTAACATTACTGATAGGGGCAGTATTAGGAATTATCTCGATTGTTTTTGGACAAACTTTCTTTAAACTTTTAGGGACAACAAAAAGTGTCGCACAAGTTGGTGGTTTATATTTAGCAATTGTGGGTGGAGGTGTTGTTACTTTAGGAATGTTAACCACCCTAGGCTCATTTTTACGTGTGCAAGGGCAACCTCGTTTACCAATGTATGTCAGTATTTTTGTCAATTTCCTCAATGCAGTCTTATCAGGTTTTGCTATTTTTGAGTGGCGCTATGGTTTGGTCGGAGTGGCAGTATCAACTCTTATCGCAAGATTAATTGGTATTTGTATCCTTGCGAAGTATCTTCCTATTAAAAAGATAATAAAAAGAATGACTTGGAAAATCAGTGCACAAATTTGGAATCTTGCCTTACCATCAGCAGGAGAACGTCTGATGATGCGAGCTGGAGATGTTGTTATAGTTGCTATTGTTGTTCAGTTAGGTACAAATGTTGTAGCGGGAAATGCTATTGGAGAAACCTTGACACAATTTAATTATATGCCAGGACTTGGCATCGCAACTGCTACAATTATCCTAACTGCAAAATATGTAGGACAAAAAAACAGAGAATCTATAGAAGAAACTATTCAAAGTTCGTATTATATTGGCTTAGTTCTAATGATCCTTATATCAAGTTTTATGCTTCTTGCAGGCAAACCATTGACACAGTTATTTACAAATAATCCTTCTGCCATTAAAGGAAGTTTGATTGTTATTTTGCTATCTTTCGTAGGAGTACCTGCTACTATTGGGACCTTGGTTTATACAGCAGCTTGGCAAGGATTAGGAAATGCTAAACTCCCATTTTACACAACGACTATAGGCATGTGGTTAATCAGAGTAGTTCTTGGTTATTTATTAGGAATAGTTTTTGAATTAGGTTTGCTTGGGGTTTGGATGGCTACGATAGCAGACAATATCTTTAGGTGGCTGTTTTTGAAAGTTCACTATCATCGATATATTCAAAAAATG

SEQ ID NO: 8882 - protein, 412 aa, Streptococcus agalactiae
MIENILQMLMGVVDNYLVAQLGVVAVSGVSVANNIITIYQAIFIALGASIASLLAKSLAGSKKDDAISVCSQAIFLTLLIGAVLGIISIVFGQTFFKLLGTTKSVAQVGGLYLAIVGGGVVTLGMLTTLGSFLRVQGQPRLPMYVSIFVNFLNAVLSGFAIFEWRYGLVGVAVSTLIARLIGICILAKYLPIKKIIKRMTWKISAQIWNLALPSAGERLMMRAGDVVIVAIVVQLGTNVVAGNAIGETLTQFNYMPGLGIATATIILTAKYVGQKNRESIEETIQSSYYIGLVLMILISSFMLLAGKPLTQLFTNNPSAIKGSLIVILLSFVGVPATIGTLVYTAAWQGLGNAKLPFYTTTIGMWLIRVVLGYLLGIVFELGLLGVWMATIADNIFRWLFLKVHYHRYIQKM

SEQ ID NO: 8883 - protein, 306 aa, Streptococcus agalactiae
ATGGCAAACAAAAAAATCCGTATCCGTTTGAAAGCGTACGAACACCGTACACTTGATACAGCGGCAGAAAAAATCGTTGAAACTGCAACACGTACAGGTGCTACAGTTGCTGGACCAGTTCCGCTTCCAACTGAACGCAGTCTTTACACAATTATTCGTGCGACTCACAAATATAAAGATTCTCGCGAACAGTTTGAAATGCGTACACACAAACGTTTGGTAGACATCATCAACCCAACACAAAAAACTGTTGATGCTTTGATGAAACTTGATCTTCCAAGTGGTGTCAACGTAGAAATCAAACTT

SEQ ID NO: 8884 - protein, 102 aa, Streptococcus agalactiae; identical to SEQ ID NO: 142

SEQ ID NO: 8885 - protein, 624 aa, Streptococcus agalactiae
ATGACAAAAGGAATCTTAGGGAAAAAAGTGGGAATGACTCAAATCTTCACTGAATCAGGCGAATTCATCCCTGTTACTGTCATTGAAGCAACTCCAAACGTTGTGCTTCAAGTTAAAACTGTTGAAACAGACGGTTACGAAGCAGTTCAGGTTGGTTTTGATGACAAACGTGAAGTATTGAGTAACAAACCTGCCAAAGGCCATGTTGCAAAAGCAAACACAGCTCCTAAGCGCTTCATTCGTGAATTCAAAAACATTGAAGGCTTAGAAGTTGGTGCAGAATTATCTGTAGAACAATTTGAAGCTGGTGATGTTGTTGACGTCACAGGGACATCAAAAGGTAAAGGTTTCCAAGGTGTTATCAAACGCCATGGTCAATCACGTGGTCCTATGGCTCACGGTTCTCGTTACCATCGTCGTCCAGGTTCTATGGGACCTGTTGCGCCTAACCGCGTTTTCAAAAACAAACGCTTGGCAGGACGTATGGGTGGTAACCGTGTAACAGTTCAAAACCTTGAAATTGTACAAGTTATCCCAGAGAAAAACGTTGTCCTCATCAAAGGTAACGTACCAGGTGCTAAGAAATCTCTTATCACTATCAAATCAGCAGTTAAAGCTGCTAAA

SEQ ID NO: 8886 - protein, 208 aa, Streptococcus agalactiae; identical to SEQ ID NO: 144

SEQ ID NO: 8887 - protein, 621 aa, Streptococcus agalactiae; identical to SEQ ID NO: 4445

SEQ ID NO: 8888 - protein, 207 aa, Streptococcus agalactiae; identical to SEQ ID NO: 146

SEQ ID NO: 8889 - protein, 294 aa, Streptococcus agalactiae
ATGAATTTGTATGACGTAATCAAAAAACCTGTTATCACTGAGAAATCAATGGTTGCTCTTGAAGCAGGGAAATATACATTTGAAGTTGACACACGTGCACACAAACTTTTGATCAAACAAGCTGTTGAAGCTGCATTTGACGGAGTAAAAGTTGCAAGTGTAAACACTGTGACAGTTAAACCCAAAGCAAAACGTGTTGGTCGTTACACAGGTTTCACTTCAAAAACTAAAAAAGCTATTATCACTCTTACAGCTGATTCAAAAGCAATCGAGTTGTTTGCTGCTGAAGCTGAA

SEQ ID NO: 8890 - protein, 98 aa, Streptococcus agalactiae; identical to SEQ ID NO: 148

SEQ ID NO: 8891 - protein, 831 aa, Streptococcus agalactiae
GTGGGTATTAAAGTTTATAAACCAACGACAAATGGCTGTCGTAATATGACTTCTTTGGATTTTGCAGAAATCACTACAAACACTCCTGAGAAATCATTGCTTGTTTCACTAAAGAATAAAGCAGGACGTAACAACAACGGACGTATTACTGTTCGTCACCAAGGTGGTGGACACAAACGTCATTACCGTTTGATTGACTTCAAACGTAATAAAGATGGTGTTGAAGCAGTTGTTAAAACAATTGAATACGATCCAAATCGTACTGCAAATATTGCTCTTGTACACTATACTGATGGTGTTAAAGCTTACATCCTTGCGCCTAAAGGCCTTGAAGTAGGTCAACGCATTATTTCTGGTCCAGAAGCAGACATCAAAGTTGGTAACGCACTTCCGCTTGCTAACATTCCAGTCGGTACAGTTATCCATAATATTGAATTGCAACCAGGTAAAGGTGCTGAATTGATTCGTGCCGCTGGTGCTTCTGCTCAAGTACTTGGTCAAGAAGGTAAATATGTTCTTGTTCGCCTTCAATCAGGTGAAGTACGTATGATCCTTGGTACTTGCCGTGCAACAATTGGTACTGTTGGTAATGAACAGCAATCACTTGTTAACATTGGTAAAGCAGGACGTAATCGTTGGAAAGGTGTTCGCCCTACAGTTCGTGGTTCTGTAATGAACCCTAACGATCACCCACACGGTGGTGGTGAAGGTAAAGCACCAGTTGGTCGTAAAGCACCATCTACTCCATGGGGTAAACCTGCGCTTGGACTTAAAACTCGTAATAAGAAAGCTAAATCAGACAAACTTATTGTTCGTCGTCGTAACCAAAAA

SEQ ID NO: 8892 - protein, 277 aa, Streptococcus agalactiae
MGIKVYKPTTNGCRNMTSLDFAEITTNTPEKSLLVSLKNKAGRNNNGRITVRHQGGGHKRHYRLIDFKRNKDGVEAVVKTIEYDPNRTANIALVHYTDGVKAYILAPKGLEVGQRIISGPEADIKVGNALPLANIPVGTVIHNIELQPGKGAELIRAAGASAQVLGQEGKYVLVRLQSGEVRMILGTCRATIGTVGNEQQSLVNIGKAGRNRWKGVRPTVRGSVMNPNDHPHGGGEGKAPVGRKAPSTPWGKPALGLKTRNKKAKSDKLIVRRRNQK

SEQ ID NO: 8893 - protein, 276 aa, Streptococcus agalactiae; identical to SEQ ID NO: 4451

SEQ ID NO: 8894 - protein, 92 aa, Streptococcus agalactiae; identical to SEQ ID NO: 152

SEQ ID NO: 8895 - protein, 342 aa, Streptococcus agalactiae
ATGGCAGAAATTACTTCAGCTAAAGCAATGGCTCGTACAGTGCGTGTTTCACCTCGTAAAACACGTTTAGTACTTGATCTTATCCGTGGTAAGAATGTTGCTGACGCAATCGCAATCTTAAAATTCACTCCAAACAAAGCAGCTCGTGTTATTGAGAAAACTCTTAACTCAGCAATTGCAAATGCAGAAAACAACTTTGGTTTGGAAAAAGCAAACTTGGTAGTATCTGAAACATTCGCTAACGAAGGACCAACAATGAAACGTTTCCGTCCACGTGCGAAAGGTTCAGCTTCACCAATCAACAAACGTACAACTCACGTAACTGTAGTTGTATCAGAAAAA

SEQ ID NO: 8896 - protein, 114 aa, Streptococcus agalactiae; identical to SEQ ID NO: 154

SEQ ID NO: 8897 - protein, 624 aa, Streptococcus agalactiae
ATGCGTGTCGGAATCATCCGTGACTGGGATGCGAAATGGTATGCTGAAAAAGAATACGCGGATTACCTTCATGAAGATCTTGCAATCCGTAAATTCATTAATAAAGAATTAGCTGACGCATCAGTTTCAACTATTGAAATTGAACGTGCAGTAAACAAAGTTATTGTTTCACTTCACACTGCTAAACCAGGTATGGTTATCGGTAAAGGTGGAGCAAACGTTGACGCTCTTCGTGGTCAACTTAACAAATTAACTGGAAAACAAGTACACATCAACATCATTGAAATCAAACAACCTGATTTAGATGCTCACCTTGTTGGTGAAAATATTGCTCGTCAATTAGAGCAACGTGTTGCTTTCCGTCGTGCTCAAAAACAAGCAATCCAACGTACAATGCGTGCAGGAGCTAAAGGTATTAAAACTCAAGTTTCTGGTCGTTTGAACGGTGCTGATATCGCTCGTGCTGAAGGTTATTCAGAAGGAACTGTTCCGCTTCACACGCTTCGTGCTGATATCGACTATGCTTGGGAAGAAGCTGACACAACTTATGGTAAACTTGGCGTTAAAGTTTGGATTTACCGTGGAGAAGTTCTTCCAGCTCGTAAAAACACTAAAGGAGGCAAA

SEQ ID NO: 8898 - protein, 208 aa, Streptococcus agalactiae; identical to SEQ ID NO: 156

SEQ ID NO: 8899 - protein, 411 aa, Streptococcus agalactiae; identical to SEQ ID NO: 4457

SEQ ID NO: 8900 - protein, 137 aa, Streptococcus agalactiae; identical to SEQ ID NO: 158

SEQ ID NO: 8901 - protein, 255 aa, Streptococcus agalactiae; identical to SEQ ID NO: 4459

SEQ ID NO: 8902 - protein, 85 aa, Streptococcus agalactiae; identical to SEQ ID NO: 4460

SEQ ID NO: 8903 - protein, 204 aa, Streptococcus agalactiae; identical to SEQ ID NO: 4461

SEQ ID NO: 8904 - protein, 68 aa, Streptococcus agalactiae; identical to SEQ ID NO: 160

SEQ ID NO: 8905 - protein, 258 aa, Streptococcus agalactiae; identical to SEQ ID NO: 4463

SEQ ID NO: 8906 - protein, 86 aa, Streptococcus agalactiae; identical to SEQ ID NO: 162

SEQ ID NO: 8907 - protein, 366 aa, Streptococcus agalactiae; identical to SEQ ID NO: 4465

SEQ ID NO: 8908 - protein, 122 aa, Streptococcus agalactiae; identical to SEQ ID NO: 164

SEQ ID NO: 8909 - protein, 303 aa, Streptococcus agalactiae; identical to SEQ ID NO: 4467

SEQ ID NO: 8910 - protein, 101 aa, Streptococcus agalactiae; identical to SEQ ID NO: 166

SEQ ID NO: 8911 - protein, 540 aa, Streptococcus agalactiae
ATGGCAAATCGCTTAAAAGAAAAATATACTAATGAAGTTGTTCCTGCGTTGACAGAAAAATTTAACTATTCATCTGTTATGGCTGTGCCAAAAGTTGAGAAAATCGTTCTTAACATGGGTGTTGGTGATGCTGTATCAAACGCTAAAAATCTTGAGAAAGCTGCTGCTGAGTTAGCACTTATTTCAGGTCAAAAACCACTTATTACTAAAGCTAAGAAATCAATCGCTGGCTTCCGTCTTCGTGAAGGTGTAGCGATCGGTGCAAAAGTTACCCTGCGCGGTGAACGTATGTACGAATTCTTGGATAAATTAGTTTCTGTTTCACTTCCACGTGTACGTGACTTCCATGGTGTTCCAACGAAATCATTTGATGGACGTGGAAACTACACTCTTGGAGTTAAAGAACAATTGATCTTCCCAGAAATCAACTTTGATGACGTTGATAAAGTACGTGGTCTTGATATCGTTATCGTTACTACTGCTAACACTGATGAAGAGTCACGTGAATTGCTAAAAGGCCTTGGAATGCCTTTTGCAAAG

SEQ ID NO: 8912 - protein, 180 aa, Streptococcus agalactiae; identical to SEQ ID NO: 168

SEQ ID NO: 8913 - protein, 396 aa, Streptococcus agalactiae
ATGGTTATGACTGACCCAATTGCAGACTTTTTAACTCGTATTCGTAATGCTAACCAAGTAAAACATGAAGTGTTAGAAGTACCTGCATCAAACATTAAAAAAGGGATTGCTGATATCCTTAAACGTGAAGGTTTTGTAAAAAACGTTGAAGTTATTGAAGATGACAAACAAGGCATCATCCGTGTGTTCCTTAAATATGGACAAAATGGTGAACGTGTTATCACTAACTTGAAACGTATTTCAAAACCAGGTCTTCGTGTTTATACTAAACATGAAGATATGCCTAAAGTTCTTAACGGACTTGGTATTGCAATTGTATCAACTTCTGAAGGTCTTTTGACTGACAAAGAAGCTCGCCAAAAAAATATTGGTGGAGAAGTACTTGCATATATTTGG

SEQ ID NO: 8914 - protein, 132 aa, Streptococcus agalactiae
MVMTDPIADFLTRIRNANQVKHEVLEVPASNIKKGIADILKREGFVKNVEVIEDDKQGIIRVFLKYGQNGERVITNLKRISKPGLRVYTKHEDMPKVLNGLGIAIVSTSEGLLTDKEARQKNIGGEVLAYIW

SEQ ID NO: 8915 - protein, 534 aa, Streptococcus agalactiae
ATGTCACGTATTGGTAATAAAGTAATTACATTGCCTGCAGGTGTTGAAATCATTAACAAGGATAATGTTGTTACTGTAAAAGGACCTAAAGGCCAACTCACTCGTGAGTTTAATAAAAATATTGGAATCACTGTTGAAGGGACTGAAGTAACAGTTACTCGTCCTAACGACTCAAAAGAAATGAAAACAATTCATGGTACAACTCGTGCGAACTTGAACAACATGGTTGTTGGTGTTTCTGAAGGTTTCAAAAAAGCTCTTGAAATGCGCGGTGTTGGTTACCGTGCACAACTTCAAGGATCAAAACTTGTTCTTTCTGTTGGTAAGTCTCACCAAGACGAAGTTGAAGCTCCAGAAGGTGTTACTTTTGAAGTGCCAACTCCAACAACAATCAACGTAATCGGTATCAACAAAGAAAGCGTTGGACAAACTGCTGCTTACGTTCGTAGCTTACGTTCACCAGAACCATATAAAGGTAAAGGTATTCGTTACGTTGGTGAATTCGTACGCCGTAAAGAAGGTAAAACAGGTAAA

SEQ ID NO: 8916 - protein, 178 aa, Streptococcus agalactiae; identical to SEQ ID NO: 174

SEQ ID NO: 8917 - protein, 354 aa, Streptococcus agalactiae; identical to SEQ ID NO: 4475

SEQ ID NO: 8918 - protein, 118 aa, Streptococcus agalactiae; identical to SEQ ID NO: 176

SEQ ID NO: 8919 - protein, 492 aa, Streptococcus agalactiae
ATGGCATTTAAAGATAATGCAGTAGAACTTGAAGAGCGCGTTGTTGCGATTAACCGCGTTACAAAAGTTGTTAAAGGTGGACGTCGTCTACGTTTTGCAGCTCTTGTAGTTGTTGGTGACCGTAATGGTCGTGTTGGTTTTGGTACAGGTAAAGCTCAAGAAGTACCAGAAGCTATTCGCAAAGCTGTTGAAGCTGCTAAGAAAAACATGGTTGAAGTTCCTATGGTCGGTACAACAATTCCTCACGAAGTTCGTTCAGAATTTGGTGGAGCGAAAGTATTGTTGAAACCAGCTGTTGAGGGTGCTGGGGTTGCCGCTGGGGGTGCTGTTCGTGCCGTCATCGAATTAGCAGGTATTGCAGATATTACATCTAAATCACTTGGTTCAAACACTCCAATCAACATTGTTCGCGCAACTGTTGAGGGCTTGAAACAATTAAAACGTGCAGAAGAAGTTGCTGCTTTACGTGGCATTTCTGTTTCTGACTTAGCA

SEQ ID NO: 8920 - protein, 164 aa, Streptococcus agalactiae
MAFKDNAVELEERVVAINRVTKVVKGGRRLRFAALVVVGDRNGRVGFGTGKAQEVPEAIRKAVEAAKKNMVEVPMVGTTIPHEVRSEFGGAKVLLKPAVEGAGVAAGGAVRAVIELAGIADITSKSLGSNTPINIVRATVEGLKQLKRAEEVAALRGISVSDLA

SEQ ID NO: 8921 - protein, 321 aa, Streptococcus agalactiae
TTGTTCTGGTTTGCGACCGATTGGAGACTTAGTCAAAGTAATTTTAATTTGAGCCATTATAATCCCCTTTCTTATGCTAAGTCAGAAACAGAAATGCCACGTAAAGCAGCAACTTCTTCTGCACGTTTTAATTGTTTCAAGCCCTCAACAGTTGCGCGAACAATGTTGATTGGAGTGTTTGAACCAAGTGATTTAGATGTAATATCTGCAATACCTGCTAATTCGATGACGGCACGAACAGCACCCCCAGCGGCAACCCCAGCACCCTCAACAGCTGGTTTCAACAATACTTTCGCTCCACCAAATTCTGAACGAACTTCG

SEQ ID NO: 8922 - protein, 107 aa, Streptococcus agalactiae
MFWFATDWRLSQSNFNLSHYNPLSYAKSETEMPRKAATSSARFNCFKPSTVARTMLIGVFEPSDLDVISAIPANSMTARTAPPAATPAPSTAGFNNTFAPPNSERTS

SEQ ID NO: 8923 - protein, 177 aa, Streptococcus agalactiae
ATGGCTCAAATTAAAATTACTTTGACTAAGTCTCCAATCGGTCGCAAACCAGAACAACGTAAAACAGTTGTTGCCCTTGGACTTGGTAAATTAAACTCTTCAGTTGTTAAGGAAGATAATGCTGCCATCCGTGGTATGGTTAACGCTATCTCTCACTTAGTAACTGTTGAAGAAGCT

SEQ ID NO: 8924 - protein, 59 aa, Streptococcus agalactiae; identical to SEQ ID NO: 180

SEQ ID NO: 8925 - protein, 438 aa, Streptococcus agalactiae
ATGAAACTTCATGAATTAAAACCTGCAGAAGGATCACGTAAAGTCCGCAATCGTGTGGGTCGCGGTACATCTTCAGGTAATGGTAAAACTTCTGGACGTGGTCAAAAAGGACAAAAAGCGCGTAGTGGTGGTGGAGTACGCCTTGGTTTTGAAGGTGGACAAACTCCATTGTTCCGTCGTATGCCAAAACGTGGGTTCTCAAACATCAATGCAAAAGAATATGCTCTTGTGAACCTTGACCAATTAAATGTCTTTGAAGATGGTACTGAAGTAACTCCAGTTGTTCTTAAAGAAGCTGGAATCGTGCGTGCTGAAAAATCAGGCGTTAAAATTCTTGGTAATGGTGAATTAACTAAGAAATTGTCTGTTAAAGCAGCTAAATTTTCTAAATCTGCTGAAGCAGCTATCACTGCTAAAGGTGGTTCAATCGAAGTCATC

SEQ ID NO: 8926 - protein, 146 aa, Streptococcus agalactiae; identical to SEQ ID NO: 182

SEQ ID NO: 8927 - protein, 1302 aa, Streptococcus agalactiae
ATGTTTTTAAAATTACTTAGAGATGCACTCAAAGTAAAGATGGTAAGAAATAAAATTTTATTTACTATCTTTATCCTTCTTGTATTTCGTATCGGAACGCATATCACAGTACCGGGCATCAATGTTAAGAGTTTAGAACAAATGGGTGAACTTCCATTTCTAAATATGCTTAACTTAGTTAGTGGTAATGCAATGAGAAACTTTTCGGTATTCTCTATGGGAGTTAGCCCTTACATTACTGCGTCTATTGTTGTTCAGTTACTTCAAATGGATATTCTTCCGAAGTTTGTTGAATGGGGAAAACAAGGAGAGGTAGGTCGTCGTAAGCTTAACCAAGCTACACGTTATATTTCTTTGTTCCTTGCATTCGTACAATCAATTGGTATTACTGCTGGTTTTAACACTCTATCAAGTGTTGCTTTAGTTAAAACTCCGAATGTACAAACATATTTGCTTATTGGTGCAATCCTTACAACAGGTAGTATGGTGGTTACTTGGCTAGGTGAACAAATTACTGATAAGGGATTCGGAAATGGAGTGTCTATGATTATCTTTGCGGGTATCATTTCTTCCATTCCAAGTGCAATTACAACTATCTACGAAGATTTCTTTGTAAATGTACGCTCTTCAGCAATTACAAATTCTTACATCTTTGTCGGGATCCTTATCGTAGCAGTATTAGCAATTGTATTTTTTACAACATTTATTCAACAAGCTGAATACAAAATTCCAATCCAATATACAAAACTTGTTCAAGGAGCTCCTACAAGTTCATATCTTCCTCTAAAAGTAAATCCAGCTGGTGTTATTCCCGTTATCTTTGCTAGCTCGATTACAACAATTCCAAGTACGATTATTCCTTTCTTTCAAAATGGCAAAGAAATTCCTTGGCTTACTAAACTCCAAGAATTACTTAATTATCAAACCCCAGTCGGTATGATTATCTATGCTATCTTGATTATTCTGTTCTCTTTCTTCTATACTTTTGTACAAGTAAACCCTGAAAAGACAGCAGAGAATCTTCAAAAAAATTCGTCCTACATTCCAAGTATTCGACCAGGACGAGAAACAGAAGAATATATGTCATCGCTATTGAAAAAATTAGCAACAATTGGTTCAGTATTTCTAGCATTTATTTCCTTGTTACCAATTATTGCTCAACAAGCGTTGCATTTGTCATCAAGTATTGCGTTAGGTGGGACAAGCTTACTCATTTTGATTGCAACGGGTATTGAAGGTATGAAACAACTCGAGGGCTATCTTTTGAAGAGACGCTATGTTGGATTCATGAATACAACAGAA

SEQ ID NO: 8928 - protein, 434 aa, Streptococcus agalactiae; identical to SEQ ID NO: 4486

SEQ ID NO: 8929 - protein, 171 aa, Streptococcus agalactiae
ATGAATCTTTTAATTATGGGTTTGCCTGGTGCTGGTAAAGGTACTCAAGCAGCTAAGATCGTTGAAGAATTTGGTGTTGCTCACATCTCAACAGGGGATATGTTCCGCGCCGCAATGGCTAATCAAACCGAAATGGGACGTTTAGCTAAAAGTTATANNNNNTTAATTAAT

SEQ ID NO: 8930 - protein, 57 aa, Streptococcus agalactiae
  VARIANT 53, 54: Xaa = Any Amino Acid
MNLLIMGLPGAGKGTQAAKIVEEFGVAHISTGDMFRAAMANQTEMGRLAKSYXXLIN

SEQ ID NO: 8931 - protein, 636 aa, Streptococcus agalactiae; identical to SEQ ID NO: 4487

SEQ ID NO: 8932 - protein, 212 aa, Streptococcus agalactiae; identical to SEQ ID NO: 186

SEQ ID NO: 8933 - protein, 216 aa, Streptococcus agalactiae; identical to SEQ ID NO: 4489

SEQ ID NO: 8934 - protein, 72 aa, Streptococcus agalactiae; identical to SEQ ID NO: 188

SEQ ID NO: 8935 - protein, 363 aa, Streptococcus agalactiae
ATGGCTCGTATTGCTGGAGTTGATATTCCAAATGACAAACGTGTAGTAATTTCACTTACTTATGTATACGGAATTGGTCTTTCTACATCTAAAAAAATCTTAGCAGCTGCAGGTATTTCTGAAGATATCCGCGTTAAAGATTTGACACCAGATCAAGAGGACGCTATCCGTCGTGAAGTTGATGCAATCAAAGTTGAAGGTGACCTACGTCGTGAGGTAAACTTGAATATTAAACGTTTGATGGAAATCGGTTCATACCGTGGAATCCGTCACCGTCGTGGACTTCCTGTCCGTGGACAAAATACTAAAAATAACGCTCGCACTCGTAAAGGTAAAGCTGTTGCGATTGCAGGTAAGAAAAAA

SEQ ID NO: 8936 - protein, 121 aa, Streptococcus agalactiae; identical to SEQ ID NO: 190

SEQ ID NO: 8937 - protein, 291 aa, Streptococcus agalactiae
ATGATTACAGATGTGCATGGTAACGCTCTTGCATGGTCATCAGCTGGTGCTCTTGGATTTAAAGGTTCTCGTAAATCTACTCCATTTGCTGCTCAAATGGCTGCTGAAGCTGCTGCTAAATCTGCACAAGAACACGGTCTTAAAACTGTTGAAGTTACTGTAAAAGGTCCTGGTTCAGGTCGTGAATCTGCTATCCGTGCCCTTGCTGCAGCTGGTCTTGAAGTAACTGCAATTCGTGATGTGACTCCTGTACCACATAATGGTGCTCGTCCTCCAAAACGTCGTCGTGTA

SEQ ID NO: 8938 - protein, 97 aa, Streptococcus agalactiae
MITDVHGNALAWSSAGALGFKGSRKSTPFAAQMAAEAAAKSAQEHGLKTVEVTVKGPGSGRESAIRALAAAGLEVTAIRDVTPVPHNGARPPKRRRV

SEQ ID NO: 8939 - protein, 936 aa, Streptococcus agalactiae
ATGATTGAGTTTGAAAAACCAATAATAACAAAAATTGATGAAAATAAAGATTACGGCAGATTTGTCATCGAACCACTAGAACGTGGCTACGGTACAACTCTAGGAAACTCTCTTCGTCGTGTGCTTCTGTCTTCACTTCCAGGTGCAGCAGTCACATCAATCAAAATTGATGGAGTATTACACGAATTTGATACTATCCCAGGTGTACGTGAAGATGTGATGCAAATCATCCTTAATGTAAAAGGACTTGCTGTGAAATCTTACGTCGAAGACGAAAAGATTATCGAACTAGACGTTGAAGGTCCTGCAGAAATTACTGCCGGAGATATTTTAACAGATAGTGATATCGAAATTGTAAACCCTGACCATTATCTTTTCACAATTGCTGAAGGTCACAGTTTGAAAGCAACAATGACAGTTGCTAAAAACCGAGGTTATGTTCCAGCAGAAGGAAATAAAAAAGATGATGCACCAGTGGGAACATTGGCTGTAGATTCAATCTATACACCAGTGAAAAAAGTTAATTATCAAGTTGAACCTGCTCGTGTAGGTAGTAACGATGGCTTTGATAAATTAACTATTGAAATCATGACAAATGGCACAATCATTCCTGAGGATGCTCTTGGTCTTTCAGCTCGCGTCTTAATTGAACACTTAAACTTGTTTACTGATTTAACAGAGGTTGCTAAAGCAACTGAAGTAATGAAGGAAACAGAGAAAGTGAACGATGAGAAAGTGCTTGACCGGACAATTGAGGAACTTGATTTGTCAGTGCGCTCATATAACTGTTTAAAACGTGCTGGAATTAATACAGTATTTGATTTAACAGAAAAAACTGAGCCTGAAATGATGAAAGTCCGAAACTTAGGACGTAAGAGTCTTGAAGAAGTTAAAATCAAACTTGCCGATCTAGGTCTTGGATTAAAAAACGATAAA

SEQ ID NO: 8940 - protein, 312 aa, Streptococcus agalactiae; identical to SEQ ID NO: 194

SEQ ID NO: 8941 - protein, 384 aa, Streptococcus agalactiae
ATGGCTTACCGTAAACTAGGACGCACTAGCTCACAACGTAAGGCAATGCTTCGTGATTTGACAACCGATCTTATTATCAACGAATCAATTGTAACTACTGAAGCACGTGCTAAAGAAATCCGTAAAACAGTTGAAAAAATGATTACTCTAGGTAAACGTGGTGATTTACATGCTCGTCGTCAAGCTGCTGCTTATGTACGTAATGAAATTGCATCAGAAAACTATGATGAAGCTTCTGATAAATATACATCAACAACAGCTCTTCAAAAACTTTTTGACGACATCGCACCTCGTTATGCTGAACGTAACGGAGGATACACTCGTATTCTTAAAACAGAACCACGCCGTGGCGATGCTGCCCCAATGGCAATTATTGAATTAGTA

SEQ ID NO: 8942 - protein, 128 aa, Streptococcus agalactiae
MAYRKLGRTSSQRKAMLRDLTTDLIINESIVTTEARAKEIRKTVEKMITLGKRGDLHARRQAAAYVRNEIASENYDEASDKYTSTTALQKLFDDIAPRYAERNGGYTRILKTEPRRGDAAPMAIIELV

SEQ ID NO: 8943 - protein, 291 aa, Streptococcus agalactiae
TTGACATGGGAAGTTTATTTTCTAAGAAAAGAGAGCATGATGAAAAAATATGTAAAATGGTTAATTCCCATATCTATTATTGGGATGTTACTAGCAGGCTGTCAAATGAATAGTGAATCTAAAAGTCAGTCAAACGAAGTAAAAAATAGCAAACAGTCAGCAGTAAAGAAAGGTAAAAAAGTAATAAAAAAAGAACAAGTAGCTTATCTCAAAAAGCATGAAAAAGAATTAACTGAATATGTCAAAATCCAGATATTAGTGAAATTAAGTATGATTGGAATAGTGTGCGCA

SEQ ID NO: 8944 - protein, 97 aa, Streptococcus agalactiae
MTWEVYFLRKESMMKKYVKWLIPISIIGMLLAGCQMNSESKSQSNEVKNSKQSAVKKGKKVIKKEQVAYLKKHEKELTEYVKIQILVKLSMIGIVCA

SEQ ID NO: 8945 - protein, 177 aa, Streptococcus agalactiae
GTGCGCATAGTGGAAGCTAGTAGTGGAACCCCTCAAGGCGGAGAGCAACTATTATTAATTTTGGGTTATGCAAATGGCAGTGAATTAACCAATTTTACTCTAAATTTCACATTGGGTGATAATCAAATGCCTAATATTGACTCAGTTGGCTCAGATAATTTATCAACTATTGAAGAT

SEQ ID NO: 8946 - protein, 59 aa, Streptococcus agalactiae; identical to SEQ ID NO: 202

SEQ ID NO: 8947 - protein, 168 aa, Streptococcus agalactiae
ATGGCAGAAAGTGCTAATACAGGTCGATCGAATTCTTTTGTTTTAGAAGAATTAACTGAATTTCAAAGAGAAAAGTTAAAAAATGGGGAGTCAGTTAAGTTTAATTTTTCTAAAGATGTTAAGAAAGAAAATAAGGTTATCGAAGGAGGGCACCCCCAAGTCATAGGG

SEQ ID NO: 8948 - protein, 56 aa, Streptococcus agalactiae; identical to SEQ ID NO: 204

SEQ ID NO: 8949 - protein, 549 aa, Streptococcus agalactiae
ATGACTAAAATTTATCATATGATTTTATGTAATTCTGATATAATGAAGATTTTAGCTATAATAAAATCTCTTCCACTGAATGATTGTTGGCTGTGTGCTGGCACATTGAGAAACTTTGTATGGAATAAACTTTCTGGAATAAATGAGACATTGACATCAGATATTGATGTTGTATTTTTTGATAAAAATATTTCTTATGAAGAAACGGTGGTATTAGAACAACAATTAAAGGATAACTATCCACAGTACGATTGGGAACTTAAAAATGAATTTTACATGAACACTCATTCTCCTAATACCCCAAAGTATACTAGCTCTAAAGATGCTATTTCAAAATTTCCTGAAAAGTGTACTGCAGTGGGAGCAAGGTTAGATGATAGAAATCAACTCGAACTTTACCTCCCTTATGGTGAAGAGGAAATATTAAATTTCATTGTTAGTCCTACGCCATATTTTGAAGAGGATCTATTACGTTATAATGTTTATTTGAAGCGAGTGGATAAGAAGAAATGGAATAATATTTGGCCTCGTTTAACAATCATAAAAAAA

SEQ ID NO: 8950 - protein, 183 aa, Streptococcus agalactiae; identical to SEQ ID NO: 206

SEQ ID NO: 8951 - protein, 417 aa, Streptococcus agalactiae
ATGAAAATGACAGTCTATTTTGATGGTAATTTTTGGTTGGGTTTGATTGAGTACGATGATGATGGTGATTACAAAGTTTTTCGGTATTTTTTTGGAAAAGAACCTAAAGATGATGATGTTTTTAATTTTATAAATCATAAACTTAATGATTTGATAAAAAAATATGAGTTTGTTAAAACGGATATTTCTCTAAAGCGTACGAATGAACACAAAAAAAGTCCTAAAAGAATGCAAAGAGAAATTAATAGAGAAAAACGTAAGCCAGTAGTATCTACAAAAGCGCAATTGGCGATGAAAACTATTCATATGAGTATAAAAAACGAACGTCAATTAAGTCAGAAATGTAAGAAAAATGAGTTAAGAAAACATCGGTACCAATTAAAACAAGAAAAACGTTACCAAAAGAAAAAAGGACAT

SEQ ID NO: 8952 - protein, 139 aa, Streptococcus agalactiae; identical to SEQ ID NO: 208

SEQ ID NO: 8953 - protein, 432 aa, Streptococcus agalactiae
ATGAAGCTGAGAAGAAATTATTTTGTTCAACTTTGGGAATATGATGATTGGATTCAAGAAGGACGTATTGTACTTTTTAGGTTGCTTGAAGAGCATCCGTATTTATTGGATAATGAAAGCAAACTATTCATTTACTTTAAAACAAAATTTTCAAATTATTTAAACGATGTATTAAGACACCAAGATTGTCAAAAGCGACAATTTAATAAAATGCCTTATGAAGAAATAAGTGAAGTTAGTCACTATGTTAAGAGTAAAGGACTAGTTTTAGATGACTATATTGCTTATCGTGATACTTTAACAAAAGTGGAAGAAACTTTGTCAGATATTGATAAAGAAAAATTTGAAAAACTGATTAGTGGTGAACGTTTTGCGGGGAAGAAACAATTCATACGAGATATTCAACCTTTTTTCAATGCTTTTAAAGCGGAT

SEQ ID NO: 8954 - protein, 144 aa, Streptococcus agalactiae; identical to SEQ ID NO: 210

SEQ ID NO: 8955 - protein, 690 aa, Streptococcus agalactiae
ATGAGTAAAGTTCGTTTATATATCGCTCGTCATGGTAAAACAATGTTTAATACAATTGGTCGCGCTCAGGGGTGGAGTGATACTCCTTTAACTACTTTTGGAGAACTCGGGATTAAAGAGCTTGGTTTGGGACTAAAGGCTTCAAATATTAGTTTTAAAGAGGCTTTTTCTAGTGATAGTGGACGTACTTTACAAACTATGGAAATTATTCTCAGGGAAGTGCAACAAGAAAATATTCCCTATACGAGAGATAAACGAATCCGCGAGTGGTGCTTTGGTAGTTTGGATGGAGGATATGATGGCGACCTTTTTAATGGCGTTCTGCCTCGAGTTTCAAACGGAGATATGAGCCATTTGACACACGAAGAAATTGCTAATTTGATTTGTCAAGTTGATACGGCTGGCTGGGCAGAACCGTGGGCAATATTGAGTAACCGTATTCTGTCAGGCTTCACTGCTATAGCTAAAAAAATAGAGGATATTGGGGGAGGTAATGCGATTGTTGTCAGTCATGGGATGACTATTGCGACTTTTTTATGGTTAATCGACCATAGTACCCCTCGTAGTTTAGGCTTAGATAATGGTAGTGTCTCAGTCGTTGATTTTGAAGATGGAACATTTTCTATTCAATCTATTGGGGATATGTCCTATCGAGAAAAAGGAAGAGAAATTTTAGAAAAAACATTGCAA

SEQ ID NO: 8956 - protein, 230 aa, Streptococcus agalactiae; identical to SEQ ID NO: 212

SEQ ID NO: 8957 - protein, 750 aa, Streptococcus agalactiae; identical to SEQ ID NO: 4511

SEQ ID NO: 8958 - protein, 250 aa, Streptococcus agalactiae; identical to SEQ ID NO: 214

SEQ ID NO: 8959 - protein, 573 aa, Streptococcus agalactiae; identical to SEQ ID NO: 4513

SEQ ID NO: 8960 - protein, 191 aa, Streptococcus agalactiae; identical to SEQ ID NO: 216

SEQ ID NO: 8961 - protein, 1080 aa, Streptococcus agalactiae
ATGTGTAAGAGTGCTAATTTCAGAAAGACCGAGAGGGGTGATGTTTTTGTGATTACACAACGTCAAAATGATATTTTGAATTTAATCGTTGAGTTATTTACACAAACTCATGAACCAGTAGGGTCTAAAGCTTTACAGAGAACGATTGATTCTAGTAGCGCCACTATTCGTAATGATATGGCAAAACTAGAGAAGTTGGGGTTATTGGAAAAAGCACACACTTCTAGTGGACGGATGCCGAGTCCAGCTGGTTTTAAGTATTTTGTAGAGCACTCCCTTAGACTAGATAGTATTGATGAGCAAGATATTTATCATGTTATAAAAGCTTTTGACTTTGAAGCATTCAAATTAGAAGACATGCTTCAAAAAGCTAGTCATATTTTATCGGAGATGACGGGCTATACATCCGTTATTTTAGATGTGGAGCCAGCTCGTCAACGTTTGACAGGGTTTGATGTTGTTCAGCTTAGCAACCATGATGCTCTAGCAGTCATGACTTTAGATGAATCTAAGCCAGTGACAGTGCAGTTTGCTATTCCAAGAAACTTTTTGACACGTGACTTGATAGCATTTAAAGCTATCGTAGAGGAGCGCTTGCTGGATGGTAGTGTCATAGATATTCATTATAAGTTGAGGACAGAAATTCCTCAGATCGTTCAGAAGTATTTTGTAACTACGGATAATGTTTTACAACTATTTGATTATGTTTTTTCAGAGCTGTTTCTGGAAACGGTATTTGTAGCTGGCAAGGTAAATTCTTTAACGTATTCAGATCTATCAACGTATCAGTTTTTGGATAATGAGCAGCAAGTAGCGATTTCTTTGAGGCAAAGTCTGAAAGAGGGTGAGATGGCTTCTGTCCAAGTGGCAGATAGTCAAGAAGCCGCACTTGCAGATGTGTCAGTTTTAACTCACAAATTTTTGATTCCTTACCGTGGATTTGGACTCCTGAGTTTGATTGGTCCTATTGATATGGATTATCGTAGGTCTGTTAGTTTGGTAAACATTATCGGAAAGGTATTGGCTGCTAAATTAGGTGATTATTATCGATACCTAAATTCTAACCATTATGAAGTTCAC

SEQ ID NO: 8962 - protein, 360 aa, Streptococcus agalactiae
MCKSANFRKTERGDVFVITQRQNDILNLIVELFTQTHEPVGSKALQRTIDSSSATIRNDMAKLEKLGLLEKAHTSSGRMPSPAGFKYFVEHSLRLDSIDEQDIYHVIKAFDFEAFKLEDMLQKASHILSEMTGYTSVILDVEPARQRLTGFDVVQLSNHDALAVMTLDESKPVTVQFAIPRNFLTRDLIAFKAIVEERLLDGSVIDIHYKLRTEIPQIVQKYFVTTDNVLQLFDYVFSELFLETVFVAGKVNSLTYSDLSTYQFLDNEQQVAISLRQSLKEGEMASVQVADSQEAALADVSVLTHKFLIPYRGFGLLSLIGPIDMDYRRSVSLVNIIGKVLAAKLGDYYRYLNSNHYEVH

SEQ ID NO: 8963 - protein, 570 aa, Streptococcus agalactiae
ATGGCAGTATTCAATAAGTTATTTAAAAGGAGGCACTCAGTGTCAGAAGAAATTAAAAAAGACGATTTACAGGAAGAAGTGGAAGCCACTGAAACTGAAGAGACAGTTGAGGAAGTTATTGAAGAAATTCCTGAAAAATCAGAGTTAGAACTCGCAAACGAGCGTGCTGATGAGTTTGAAAATAAATACTTGCGAGCTCATGCAGAAATGCAGAATATACAACGTCGCTCTAGTGAAGAACGTCAACAACTTCAACGCTATCGTTCTCAGGATCTGGCAAAAGCAATCTTACCATCGCTTGACAATCTAGAACGTGCCTTGGCTGTTGAAGGGTTGACAGATGATGTTAAAAAAGGTTTAGAAATGACTCGTGATAGCCTTATTCAAGCACTAAAGGAAGAAGGCGTAGAAGAAGTAGAAGTCGACTCATTTGACCACAACTTTCATATGGCAGTTCAGACTCTCCCAGCCGATGATGAACATCCAGCCGATAGCATTGCAGAAGTCTTTCAAAAGGGATATAAATTGCACGAGCGTCTGCTAAGACCAGCGATGGTAGTTGTCTATAAC

SEQ ID NO: 8964 - protein, 190 aa, Streptococcus agalactiae; identical to SEQ ID NO: 220

SEQ ID NO: 8965 - protein, 1827 aa, Streptococcus agalactiae
ATGTCTAAAATTATTGGTATTGACTTAGGTACAACAAACTCAGCAGTAGCAGTTCTTGAAGGGACTGAATCAAAAATCATTGCTAACCCAGAAGGCAATCGTACAACTCCTTCAGTAGTATCATTCAAAAATGGTGAAATTATCGTGGGTGATGCTGCAAAACGTCAAGCGGTAACAAATCCAGATACTGTTATCTCTATCAAATCAAAGATGGGAACTTCTGAAAAAGTTTCTGCAAATGGTAAAGAATATACTCCTCAAGAAATTTCAGCAATGATTCTTCAATACCTTAAAGGTTATGCTGAAGACTATCTTGGAGAAAAAGTAGAAAAAGCAGTTATTACTGTTCCAGCTTACTTCAACGATGCACAACGTCAGGCAACTAAAGACGCTGGTAAAATTGCAGGTCTTGAAGTAGAACGTATCGTTAACGAACCAACAGCAGCCGCACTTGCTTATGGTATGGACAAGACTGACAAGGATGAAAAAATCTTAGTTTTTGACCTTGGTGGTGGTACATTTGACGTATCAATCCTTGAATTAGGTGATGGTGTCTTCGACGTTCTTGCAACAGCAGGTGATAACAAACTTGGTGGTGACGACTTTGACCAGAAAATTATTGATTTCTTGGTAGAAGAATTCAAGAAAGAAAATGGTATTGATCTTTCTCAAGACAAAATGGCTCTTCAACGCTTGAAAGATGCTGCTGAAAAAGCTAAAAAAGACCTTTCAGGTGTAACTCAAACTCAAATTTCATTACCGTTCATCACTGCTGGTTCTGCTGGTCCTCTTCACTTGGAGATGAGCTTATCACGTGCTAAATTTGACGATCTCACTCGTGACCTTGTTGAACGTACGAAAACTCCAGTTCGTCAAGCTCTTTCAGATGCAGGCTTGTCATTGTCAGAAATTGATGAAGTTATCCTCGTTGGTGGATCAACACGTATCCCAGCAGTTGTTGAAGCTGTAAAAGCTGAAACTGGTAAAGAACCAAATAAATCTGTTAACCCTGATGAAGTGGTTGCTATGGGTGCTGCTATCCAAGGTGGTGTTATCACTGGGGATGTGAAAGACGTTGTACTTCTTGACGTAACACCATTGTCACTTGGTATCGAAACAATGGGTGGTGTCTTCACTAAATTGATCGACCGCAACACAACAATCCCAACATCTAAATCACAAGTCTTCTCAACAGCAGCAGACAACCAACCAGCCGTTGATATCCATGTTCTTCAAGGTGAACGCCCAATGGCAGCAGATAACAAAACACTCGGTCGCTTCCAATTGACTGATATCCCAGCTGCACCTCGTGGAATCCCACAAATTGAAGTAACATTTGATATCGATAAAAATGGTATTGTATCTGTTAAAGCTAAAGATCTCGGTACTCAAAAAGAACAACACATTGTTATCCAATCTAATTCAGGATTAACTGATGAAGAAATTGATAAAATGATGAAAGATGCTGAAGCAAATGCTGAAGCAGATGCAAAACGTAAAGAAGAAGTTGATCTTAAAAATGAAGTTGACCAAGCCATCTTTGCAACAGAAAAAACTATTAAAGAAACTGAAGGCAAAGGCTTTGATACAGAACGTGATGCAGCGCAATCAGCACTTGATGAGTTGAAAAAAGCTCAAGAATCAGGTAACCTTGACGACATGAAAGCTAAACTTGAAGCTCTTAACGAAAAAGCACAAGCTCTTGCAGTTAAACTTTACGAACAAGCGGCTGCAGCACAACAAGCAGCTCAAGGGGCTGAAGGTGCACAATCAGCTGATTCATCAAGCAAGGGTGATGATGTTGTAGATGGCGAATTCACTGAGAAA

SEQ ID NO: 8966 - protein, 609 aa, Streptococcus agalactiae; identical to SEQ ID NO: 222

SEQ ID NO: 8967 - protein, 1137 aa, Streptococcus agalactiae
ATGAACAATACAGAATTTTATGATCGTCTTGGCGTTTCAAAAGATGCTTCTCAGGACGAAATAAAAAAAGCTTACCGTAGGATGTCTAAGAAATACCATCCAGATATTAATAAGGAGACGGGAGCAGAGGAAAAATATAAAGAGGTTCAAGAAGCTTATGAAACCTTGAGTGATACACAAAAACGTGCTGCCTATGATCAATATGGCGCTGCTGGGGCAAATGGCGGTTTTGGTGGCTTCGATGGTGGCGGTTTTGGTGGCTTCGATGGTGGTGGCTTTGGTGGTTTTGAAGACATCTTCTCAAGCTTTTTTGGTGGAGGAGGGATGCGCAATCCTAATGCACCACGTCAAGGAGATGACCTACAATATCGTGTTAATTTAAGTTTTGAAGAAGCTATCTTTGGAGCTGAAAAAGAAGTATCTTATAATCGGGAGTCATCATGTCATACTTGTTCAGGAAGTGGAGCTAAGCCAGGTACTAGCCCTGTGACTTGTCAAAAGTGTCATGGTTCGGGTGTGATTAATGTTGATACACAAACACCTCTAGGAACAATGCGTCGCCAAGTGACTTGTGATGTTTGTCAGGGTAGTGGTCAAGAAATCAAAGAGAAATGTCCAACATGTCATGGAACTGGTCATGAGAAGAAGACGCATAAAGTATCAGTTAAAATACCTGCAGGAGTTGAAACTGGGCAACAAATTCGTTTAACAGGACAAGGTGAAGCTGGCTTCAATGGTGGTCCTTATGGTGATCTCTTTGTTATTATTAACGTTCTCCCAAGCCAACAGTTTGAGCGTAATGGATCAACAATTTATTATACTTTGAATATTAGCTTTGTCCAAGCTGCTTTGGGTGATACAATTGATATACCTACTGTCCATGGAGCGGTAGAAATGTCAATTCCTGCTGGTACTCAGACAGGAAAAACGTTTCGTCTTCGCGGAAAAGGTGCCCCTAAACTTCGAGGGGGTGGACAAGGTGATCAGCATGTTACTGTTAACATCGTAACTCCTACTAAATTGAATGATGCTCAAAAAGAGGCATTGCACGCTTTTGCAGAGGCAAGTGGAGATAAGATGGTACATCCGAAGAAGAAAGGTTTCTTTGATAAAGTCAAAGATGCTTTAGATGTTGAT

SEQ ID NO: 8968 - protein, 379 aa, Streptococcus agalactiae; identical to SEQ ID NO: 224

SEQ ID NO: 8969 - protein, 1245 aa, Streptococcus agalactiae
ATGGTAACCAAAGTTGAAGAGATTCGCTCATATTTGATAGCTTCTATACAAAATGGTAAGTTGGCTCCAGGAGATCGCCTACCATCTATAAGACAGTTAGCTAATCAATTTTCCTGTAACAAAGATACAGTGCAACGAGTTTTGATGGAATTGCGTTTTGATAATTATATCTATGCAAAGCCTAGGTCAGGCTATTACGTCTTTGATTCTCATCAAGAGGAAGTTGAAGAAGGGGTTAGTTTACCAAACTCTGAGATTGCAAATATAGCTTATGATGATTTTAGATTGTGTTTGAATGAGACCCTTATTGGTAGGGAAGATTACCTTTTCAATTATTACTATCGTCAAGAAGGTCTTCTTGATTTAAGTAAAGCAGTGGCTAAATTAATGGAAGAAACAGGGGTCTATGTTCCCCTTGATGATATTGTTATTACGGCTGGTACTCAACAGGCATTATTTATTTTGACACAGGTTACCTTTCCAAATCGAAAATCTCGAGTTTTAATAGAAGAACCGACCTATCCTCGTATGATTGAACTAATCAAAACACAAAATTTACCCTATGAAACTATTTCTCGAGGTACTCATGGAATTGATTTTCAGCGTTTAGAGGAGATTTTCCAGACACAATCAATTAAGTTTTTTTATGTTATACCTCGCATGCATAATCCTTTGGGAACATCCTATAATCCGGTAGAGATGAAAAGATTAATAGAGATGGCAGAGAAGTATGATGTTTATATTGTGGAAGATGACTATATGTCTGATTTTGCAAGTCAGTCACCATTACATTATTATGATACTCACGGGCGTGTTATTTATCTAAAATCTTTTTCAAAGGCTATTTTCCCTGCTTTAAGATTAGCTGCGATTTGTTTACCACAAGCTTTAAAATCAACATTTATGGCTTACAAGAAGTTGATGGATTATGATACTAATCTGATTTTACAAAAAGCATTAGCGCTTTATATTGAAAATGGCCTTTATGCTAAGAATAGTCAATATTTGAAATATCGTTATCAGAAAGACCTTGCAAATTCAAAATCTATTTTAGCTGATCACCCTAATCTACCCTCATATAGTTTACATCACGATAGTGTATTATTTGATTGTTCGAAACTCGATAACTTTAAAATATTACGGCAATACGGCGATACTTTGGAAAATTATTTTTGTCAAAAATCGCATCAATCTCTCTTACAAGTAAAAAATGATTCCTGCTTAAAGCAGTTCTTGGGATCGTTG

SEQ ID NO: 8970 - protein, 415 aa, Streptococcus agalactiae; identical to SEQ ID NO: 226

SEQ ID NO: 8971 - protein, 774 aa, Streptococcus agalactiae
ATGACAAGGTATAAGGCACAGATTTCTTATGATGGTTCAGCTTTTTCAGGCTTCCAAAGACAACCAAATTGTAGGACAGTTCAAGAAGAAATTGAGAGAACTCTTAAGCGCCTAAATAGCGGGAACGATGTGATAATCCATGGTGCTGGTCGCACAGATGTTGGTGTTCATGCTTATGGACAAGTTATCCATTTTGATTTACCACAGGCGCGTGATGTAGAAAAATTACGCTTTGGTTTAGATACACAGTGTCCAGACGATATTGATATTGTCAAAGTAGAGCAAGTGTCTGATGATTTTCATTGTCGATATGATAAACACATTAAAACTTATGAGTTTTTAGTGGATATCGGTAGGCCGAAAAATCCTATGATGAGAAACTATGCAACACATTACCCTTATCCTGTCATTATTGAGCTTATGCAAGAAGCTATTAAAGATTTAGTAGGTACCCATGACTTTACAGGCTTTACTGCTTCAGGTACGAGTGTAGAAAATAAAGTACGTACTATTTTTGATGCGAAAATTCAGTTTGAAGCGTCTAAAAATCTTTTAATTTTTACCTTTACAGGAAATGGTTTTTTGTATAAACAGGTGCGTAATATGGTTGGTACCCTGCTAAAAATTGGTAATGGACGCATGCCTATTAGCCAAATCAAAACAATTTTACAGGCTAAAAATCGGGATTTAGCAGGTCCAACTGCGGCAGGAAATGGTTTATATTTGAAGGAGATTATTTATGAAGACGAGGAATGTTTTAGCAATTTCAGGAAA

SEQ ID NO: 8972 - protein, 258 aa, Streptococcus agalactiae; identical to SEQ ID NO: 228

SEQ ID NO: 8973 - protein, 756 aa, Streptococcus agalactiae
ATGAAGACGAGGAATGTTTTAGCAATTTCAGGAAATGATATTTTCTCTGGCGGCGGCTTGCATGCAGATTTAGCAACTTACGTTGTTAATAAATTACATGGTTTTGTGGCAGTAACATGCTTAACAGCAATGTCAGATAAAGGGTTTGAAGTCATTCCTATAGAGGCATCTATACTAAAGCAGCAACTAGAAAGTTTAAAAGATGTAGAGTTTGGGTCTATTAAACTAGGATTGCTTCCCAATGTAGAAACAGCACAAGTTGTTTTGGAATTTGTAAAATCAAAACAAGAATGTCCAGTAGTCTTAGACACAGTCTTAGTTTGTAAAGAAAATCATGATTTAGAAGTTAGCCAATTACGTGAGCAGCTAATTGCGTTTTTCCCATATGCTGATGTGATTACTCCTAATTTAGTAGAGGCTCAATTATTGACGGGTCTTTCGATTGAAAACTTAGATCAAATGAAAATTGCTGCTGAGAAACTTTACGATATGGGAGCTAAACATGTTGTTATCAAAGGGGGCAACCGTTTAAATGCTGAAGAGGCTACAGACCTTTACTATGATGGTGAACGTTTTGAAACCTATGTTTTTCCTGTAGTAGATGCCAATAATACAGGTGCTGGATGTACATTTGCGTCAAGTATTGCCAGCCAATTAGCTATGGGTAAAAATGTAGAAGATGCAGTCAAAATGTCTAAAGGTTTCGTCTATCAAGCTATTAAAGCATCGGATAAGTACGGAGTTGTCCAACATTTT

SEQ ID NO: 8974 - protein, 252 aa, Streptococcus agalactiae
MKTRNVLAISGNDIFSGGGLHADLATYVVNKLHGFVAVTCLTAMSDKGFEVIPIEASILKQQLESLKDVEFGSIKLGLLPNVETAQVVLEFVKSKQECPVVLDTVLVCKENHDLEVSQLREQLIAFFPYADVITPNLVEAQLLTGLSIENLDQMKIAAEKLYDMGAKHVVIKGGNRLNAEEATDLYYDGERFETYVFPVVDANNTGAGCTFASSIASQLAMGKNVEDAVKMSKGFVYQAIKASDKYGVVQHF

SEQ ID NO: 8975 - protein, 462 aa, Streptococcus agalactiae
ATGAGGAAAGAGAAAACTAGTCAATTGGTTCAATTGGCAATTGTAACAGCTATATCTATTGTATTGGGGATGTTTATAAGTATTCCGACACCAACAGGTTTTTTGACATTACTAGATGCTGGAATATTCTTTGCTGCCTTTTACTTTGGCAAAAAAGAAGGGGCTGTGGTAGGTGCCTTAGCTGGTTTTTTAATTGATTTATTGAAAGGTTATCCCAATTGGATGTTCTTTAGTTTATTGATTCATGGGACGCAAGGGTATTTAGCGGGTTTACCAGGTAGAAGACGTCTTTTAGGTCTTATTAGTGCAACTCTTGTTATGGTATTAGGTTATGCTATAGCTAGTGGATTGATGTATGGTTGGGGAGCTGTTCTACCAGATATTCCTGGCAATATTATGCAAAATATGGTTGGTATGGTTGTTGGTTTTGCTCTTAATAAGTCTCTAGAAAGAGTGAAGAAA

SEQ ID NO: 8976 - protein, 154 aa, Streptococcus agalactiae
MRKEKTSQLVQLAIVTAISIVLGMFISIPTPTGFLTLLDAGIFFAAFYFGKKEGAVVGALAGFLIDLLKGYPNWMFFSLLIHGTQGYLAGLPGRRRLLGLISATLVMVLGYAIASGLMYGWGAVLPDIPGNIMQNMVGMVVGFALNKSLERVKK

SEQ ID NO: 8977 - protein, 567 aa, Streptococcus agalactiae
ATGATACTAGATTATAATAAGTTAAAGCAGGAAACTAAAGCTATTGTAGTTGATATTATTGAACGTAGCGCTCTTAAAAAAGGTCAAATTTTTGTACTAGGTCTATCATCTAGTGAGGTTTCTGGTGGTTTAATTGGAAAAAATTCTAGTTCTGAAATTGGTGAAATTATCGTTGAAGTTATCCTCAAAGAGTTACATTCACGCGGCATCTATTTAGCAGTTCAAGGTTGTGAACATGTTAATAGGGCGTTGGTTGTTGAAGCAGAATTGGCTGAACGTCAACAGTTGGAAGTCGTTAATGTTGTTCCTAATCTACATGCTGGCGGTAGTGGTCAGGTTGCAGCTTTTAAGTTGATGACATCACCAGTTGAGGTTGAAGAAATTGTGGCACATGCTGGAATTGATATTGGAGATACTTCTATTGGAATGCATATCAAGAGAGTACAAGTTCCCTTGATTCCAATTAGTCGTGAGTTGGGAGGAGCACACGTTACAGCACTAGCTAGTCGTCCTAAATTAATTGGCGGTGCTAGAGCAGGATATACGAGCGATCCAATCCGTAAATTT

SEQ ID NO: 8978 - protein, 189 aa, Streptococcus agalactiae; identical to SEQ ID NO: 4532

SEQ ID NO: 8979 - protein, 840 aa, Streptococcus agalactiae
ATGATTACTTTAGAAAAATTTATAGACCATCTTAATGTAGAGGAAGTTTTATTTACTTTCTTCACCAAACTAATATCAATCTTATTATTAATCATTGCATTCGTTATCGTTAGGCAAGTCATCAATTATCTTTTCGAAAAGACTGTTAATCGCTCACTCGCCTTTTCTAGACAAAAAGTAGCTCGTCAAAAAACATTAGCTAAACTTTCTCACAATGTTTTAAACTATACCCTTTATTTCTTTCTATTCTATTGGATTTTAAGTATATTGGGCGTTCCAATTTCTAGTTTATTAGCTGGGGCTGGTATTGCTGGGGTTGCTATTGGACTTGGTGCTCAAGGCTTCTTATCAGATGTTGTCAATGGCTTTTTTATTCTGCTAGAAAACCAATTTGATGTTGGTGATATTATTAATGTTGGTACTGTATCAGGCACTGTTACTAATGTTGGGATACGCACCACACAAATTCATGATTTCGATGGAACCTTGCACTTCATTCCTAATCGTAATATTACAATTGTCAGCAATAAGTCTCGTAGCAATATGCGTGCTCAAATTGATATTCCTTTATTTGTTCATACAAACCTTGATCAGATTTCTGATATTGTAACAAAAATCAATGAAGAGTATGTTTCAAAACACCCTGCTATCGTTGGAGAGCCTACTGTTTTTGGTCCTACAACCAATGCTAATGGTCAATTTGTTTATCGTATTAATATCTTCACGCAAAACGGTGCTCAGTTTGACATCTATGCTGAATTTTACAAACTTTATCAAAAAGCTATTCTTGAAGAAGGTATTGACTTACCAACGTACAATTTCTCCAATAACCACTCTCGT

SEQ ID NO: 8980 - protein, 280 aa, Streptococcus agalactiae; identical to SEQ ID NO: 4534

SEQ ID NO: 8981 - protein, 1281 aa, Streptococcus agalactiae
ATGTCTACATCATTTGAAAATAAAGCTACAAACCGTGGTATTATCACATTTACAATTAGTCAAGATGAGATCAAGCCAGCTCTTGATCAAGCATTCAACAAAGTAAAAAAAGATTTGAACGTTCCAGGATTCCGTAAAGGACATATGCCTCGTACAGTTTTCAACCAAAAATTTGGTGAAGAAGCACTCTACGAAAATGCATTGAATTTAGTGTTGCCAAAGGCTTACGAAGCAGCTGTTGCAGAACTTGGTTTAGACGTTGTTGCTCAACCAAAAATTGATGTTGTATCAATGGAAAAAGGTCAAGATTGGAAGTTGACAGCTGAAGTTGTTACAAAACCAGAAGTTAAACTTGGAGATTACAAAGACCTTTCAGTAGAAGTTGATGCTTCAAAAGAAGTTTCAGATGAAGAAGTTGATGCTAAAGTTGAACGTGAGCGTAACAACCTTGCAGAATTGACTGTTAAAGATGGTGAAGCAGCACAAGGTGATACAGTTGTTATTGACTTTGTAGGTTCAGTTGATGGTGTTGAATTTGATGGTGGTAAAGGAGATAACTTCTCACTTGAACTTGGTTCAGGTCAATTTATCCCAGGATTTGAAGAACAATTAGTAGGTTCTAAAGCTGGTCAAACTGTAGACGTTAATGTAACATTCCCAGAAGATTATCAAGCAGAAGATCTTGCTGGTAAAGATGCTAAATTTGTTACAACAATTCATGAAGTAAAAACTAAAGAAGTTCCAGCACTTGATGATGAACTTGCAAAAGATATTGATGATGAAGTTGAAACACTTGATGAGTTGAAAGCGAAATATCGCAAAGAGCTAGAATCAGCAAAAGAAATTGCATTTGATGATGCAGTTGAAGGTGCAGCAATCGAATTAGCTGTTGCCAATGCAGAAATTGTTGAATTACCAGAAGAAATGGTCCATGATGAAGTACATCGTGCTATGAATGAGTTCATGGGTAATATGCAACGTCAAGGAATTTCACCAGAAATGTACTTCCAATTAACAGGTACAACTGAAGAAGACCTTCATAAGCAATACCAAGCAGATGCTGACAAACGCGTTAAAACTAACCTTGTTATCGAAGCAATTGCAGCTGCAGAAGGCTTTGAAGCAACAGATGAAGAAATCGAAAAAGAAATCACAGATCTTGCTTCAGAATACAATATGGAAGCTGACCAAGTACGCGGTCTACTTTCAGCAGATATGCTTAAACATGATATTGCAATGAAAAAAGCGGTTGACGTTATCACTAGCTCAGCTACTGTAAAA

SEQ ID NO: 8982 - protein, 427 aa, Streptococcus agalactiae
MSTSFENKATNRGIITFTISQDEIKPALDQAFNKVKKDLNVPGFRKGHMPRTVFNQKFGEEALYENALNLVLPKAYEAAVAELGLDVVAQPKIDVVSMEKGQDWKLTAEVVTKPEVKLGDYKDLSVEVDASKEVSDEEVDAKVERERNNLAELTVKDGEAAQGDTVVIDFVGSVDGVEFDGGKGDNFSLELGSGQFIPGFEEQLVGSKAGQTVDVNVTFPEDYQAEDLAGKDAKFVTTIHEVKTKEVPALDDELAKDIDDEVETLDELKAKYRKELESAKEIAFDDAVEGAAIELAVANAEIVELPEEMVHDEVHRAMNEFMGNMQRQGISPEMYFQLTGTTEEDLHKQYQADADKRVKTNLVIEAIAAAEGFEATDEEIEKEITDLASEYNMEADQVRGLLSADMLKHDIAMKKAVDVITSSATVK

SEQ ID NO: 8983 - protein, 419 aa, Streptococcus agalactiae
TTGGAATTAGAAGTATTTGCTGGGCAAGAAAAAAGTGAACTTTCGATGATTGAAGTTGCTCGCGCTATTTTAGAGCAACGTGGTCGTGATAACGAAATGTACTTCAGCGATTTGGTAAATGATATTCAAACCTACCTTGGAAAATCTGACTCAGCAATCCGTGAGTCATTGCCATTTTTCTATTCAGATTTGAATACAGACGGAAGTTTTATTCCACTTGGCGAAAACATGGGGACTTCGTTCATGGTATGCTATCGATGAAATTGACGAGGAAATCATCACTCTTGAAGAAGATGAAGATGGCGCTCCAAAACGTAAGAAGAAACGTGTCAATGCTTTCATGGATGGTGATGAAGATGCTATTGATTACAATGATGATGATCCAGAAGATGAAGATTTCACAGAAGAAACACCAAGTT

SEQ ID NO: 8984 - protein, 140 aa, Streptococcus agalactiae
MELEVFAGQEKSELSMIEVARAILEQRGRDNEMYFSDLVNDIQTYLGKSDSAIRESLPFFYSDLNTDGSFIPLGENNGDFVHGMLSMKLTRKSSLLKKMKMALQNVRRNVSMLSWMVMKMLLITMMMIQKMKISQKKHQV

SEQ ID NO: 8985 - protein, 231 aa, Streptococcus agalactiae; identical to SEQ ID NO: 4539

SEQ ID NO: 8986 - protein, 77 aa, Streptococcus agalactiae; identical to SEQ ID NO: 4540

SEQ ID NO: 8987 - protein, 1602 aa, Streptococcus agalactiae
ATGACAAAGTATATTTTTGTTACAGGTGGTGTGGTCTCTTCTATTGGTAAGGGGATTGTTGCAGCAAGTCTTGGGCGCTTACTAAAAAACCGTGGGCTAAAGGTGACAATTCAAAAATTTGATCCATATATTAATATTGACCCAGGGACAATGAGCCCTTATCAACATGGAGAAGTTTATGTTACAGATGATGGTGCAGAAACTGACCTTGACCTTGGACACTACGAGCGTTTTATTGATATTAACTTAAACAAATATTCAAATGTTACAACGGGTAAGATTTATAGTGAAGTTCTTAAAAAAGAACGCCGTGGAGAATACCTTGGTGCAACTGTTCAAGTTATCCCACACGTTACAGATGCTTTGAAAGAAAAAATTAAACGTGCTGCGACAACTACAGATTCAGATGTTATTATTACTGAAGTTGGCGGTACTGTTGGAGATATTGAGAGCCTTCCGTTTTTAGAAGCACTTCGTCAAATGAAGGCAGATGTTGGTTCTGATAATGTTATGTACATTCATACAACGTTATTACCATACCTAAAGGCTGCCGGCGAAATGAAAACAAAACCGACTCAACATTCTGTTAAAGAGTTACGTGGCCTAGGTATCCAACCTAATATGCTTGTTATCCGTACAGAGCAACCAGCAGGTCAAAGTATTAAGAATAAATTGGCACAATTTTGTGATGTTGCACCAGAGGCTGTTATAGAGTCCCTTGACGTTGACCATATTTATCAAATTCCACTTAACATGCAAGCTCAAAATATGGATCAAATTGTTTGTGATCACTTGAAGCTTGAGACACCTGCTGCTGATATGACAGAATGGTCAGCAATGGTTGATAAAGTAATGAACCTTGAGAAAAAAGTTAAAATTGCATTGGTTGGTAAATATGTTGAATTACCTGATGCCTACCTTTCAGTTGTGGAAGCCCTTAAGCACTCAGGGTACGTCAACGATGTTGCTATTGATCTAAAATGGGTAAATGCTGCTGAAGTGACAGAAGATAATATTAAAGAACTTGTCGGAGATGCAGATGGTATCATCGTTCCTGGTGGATTTGGCCAAAGAGGTAGTGAGGGTAAAATTGAAGCAATTCGCTATGCACGTGAAAATGATGTTCCAATGCTTGGTGTTTGTCTCGGAATGCAGCTAACTTGTGTCGAATTTGCGCGTAATGTTTTAAACCTTCATGGAGCTAATTCAGCAGAGCTTGACCCTAAAACACCGTTCCCAATCATTGATATCATGCGTGATCAAATCGATATTGAAGATATGGGTGGTACACTTCGCCTTGGTCTATATCCATGTAAATTGAAATCAGGTTCAAGAGCTGCGGCAGCTTATAATAATCAAGAAGTTGTCCAACGTCGTCACCGTCACCGTTATGAATTTAATACAAAATTCCGTGAGCAATTTGAGGCTGCTGGATTTGTCTTCTCAGGGGTATCACCGGATAATCGTTTGATGGAAGTTGTTGAGTTACCAGAGAAAAAATTCTTTGTTGCAGCACAATACCATCCAGAATTACAATCACGTCCTAACCATGCTGAAGAGCTTTACACAGCTTTTGTAACCGCAGCAGTTGAAAATATGAAA

SEQ ID NO: 8988 - protein, 534 aa, Streptococcus agalactiae
MTKYIFVTGGVVSSIGKGIVAASLGRLLKNRGLKVTIQKFDPYINIDPGTMSPYQHGEVYVTDDGAETDLDLGHYERFIDINLNKYSNVTTGKIYSEVLKKERRGEYLGATVQVIPHVTDALKEKIKRAATTTDSDVIITEVGGTVGDIESLPFLEALRQMKADVGSDNVMYIHTTLLPYLKAAGEMKTKPTQHSVKELRGLGIQPNMLVIRTEQPAGQSIKNKLAQFCDVAPEAVIESLDVDHIYQIPLNMQAQNMDQIVCDHLKLETPAADMTEWSAMVDKVMNLEKKVKIALVGKYVELPDAYLSVVEALKHSGYVNDVAIDLKWVNAAEVTEDNIKELVGDADGIIVPGGFGQRGSEGKIEAIRYARENDVPMLGVCLGMQLTCVEFARNVLNLHGANSAELDPKTPFPIIDIMRDQIDIEDMGGTLRLGLYPCKLKSGSRAAAAYNNQEVVQRRHRHRYEFNTKFREQFEAAGFVFSGVSPDNRLMEVVELPEKKFFVAAQYHPELQSRPNHAEELYTAFVTAAVENMK

SEQ ID NO: 8989 - protein, 884 aa, Streptococcus agalactiae
ATGAAAAAGATTCGATTATCAAAGTTTATTAAAATGATTGTTGTTATTTTGTTTTTAATTAGTGTAGCAGCTAGTTTTTATTTTTTCCACGTTGCCCAAGTTCGAGATGATAAATCCTTTATTTCAAATGGTCAACGTAAGCCTGGAAACTCTTTATATGCTTATGATAAATCCTTTGATAAGCTATTAAAGCAAAAAATAGAAATGACAAACCAAAATATAAAGCAAGTTGCTTGGTATGTTCCTGCTGTTAAGAAAACTCATAAGACAGCTGTTGTCGTTCATGGTTTTGCGAATAGCAAAGAGAATATGAAGGCATATGGTTGGCTGTTTCATAAGTTAGGATACAATGTTCTTATGCCTGACAATATTGCACATGGTGAAAGTCATGGGCAGTTGATAGGCTATGGCTGGAACGACCGCGAGAACATTATCAAATGGACAGAAATGATAGTTGATAAGAATCCATCAAGCCAAATTACTTTATTTGGTGTTTCAATGGGTGGAGCAACAGTCATGATGGCTAGTGGTGAAAAATTACCTAGTCAGGTTGTTAATATCATTGAAGATTGCGGTTATTCTAGTGTTTGGGATGAATTAAAATTTCAGGCTAAAGAGATGTATGGTTTACCAGCCTTCCCACTCTTATATGAAGTTTCAACAATTTCTAAAATCAGAGCAGGTTTTTCGTATGGACAAGCAAGTAGTGTCGAACAATTGAAAAAGAATAATTTACCAGCCCTCTTTATTCATGGTGATAAGGATAATTTTGTTCCAACAAGTATGGTTTATGACAACTATAAAGCTACAGCAGGTAAGAAAGAGCTTTATATGTAAAAGGGGCAAAACATGCGAAATCTTTTGAAACAGAGCCAGAANNNNNT

SEQ ID NO: 8990 - protein, 295 aa, Streptococcus agalactiae
  VARIANT 294, 295: Xaa = Any Amino Acid
MKKIRLSKFIKMIVVILFLISVAASFYFFHVAQVRDDKSFISNGQRKPGNSLYAYDKSFDKLLKQKIEMTNQNIKQVAWYVPAVKKTHKTAVVVHGFANSKENMKAYGWLFHKLGYNVLMPDNIAHGESHGQLIGYGWNDRENIIKWTEMIVDKNPSSQITLFGVSMGGATVMMASGEKLPSQVVNIIEDCGYSSVWDELKFQAKEMYGLPAFPLLYEVSTISKIRAGFSYGQASSVEQLKKNNLPALFIHGDKDNFVPTSMVYDNYKATAGKKELYIVKGAKHAKSFETEPEXX

SEQ ID NO: 8991 - protein, 138 aa, Streptococcus agalactiae
ATGCAAAATATTACTGATCAGGCTGTTATTTTAGAAGAAGGGGAACGGATTGTTCAGGCTGTTTTTGCCCCATTCTTATTGGCAGATGACGATCAGGCTACAGGAATGCGTACAGGTGGTTTTGGTAGTACTGGAAAA

SEQ ID NO: 8992 - protein, 46 aa, Streptococcus agalactiae
MQNITDQAVILEEGERIVQAVFAPFLLADDDQATGMRTGGFGSTGK

SEQ ID NO: 8993 - protein, 1362 aa, Streptococcus agalactiae
GTGGCTAAGAAAAAATCAGTCTTCACCTGTCAAGAGTGTGGTTACCAATCACCTAAGTATTTGGGACGTTGTCCAAATTGCTCAGCCTGGTCTTCATTTGTAGAAGAGGTTGAAGTTCAAGAAGTTAAAAATGCACGAGTTAGTTTGAACGGTGAAAAGTCCCGACCGACGAAGTTAAAAGATGTTTCCTCAATTAACTATTCTAGAACTAAGACTGATATGGATGAATTTAACCGTGTTCTAGGAGGCGGTGTTGTACCAGGAAGTTTGGTTCTGATTGGAGGAGACCCTGGGATAGGTAAATCTACTTTATTACTACAAGTATCAACTCAGCTAGCTAATAAAGGTACAGTATTATATGTCTCAGGTGAGGAATCTGCAGAACAGATTAAGTTACGAAGTGAGCGTCTAGGCGATATCGATAATGAATTTTACCTTTATGCCGAGACTAATATGCAAAGTATTCGGTCGGAGATTGAGAAGATTAAACCAGATTTTCTTATTATTGATTCTATACAAACTATTATGAGTCCCGAAGTATCAAGTGTCCAAGGCTCTGTTAGCCAAGTTCGCGAAGTGACCGCTGAATTGATGCAGTTAGCTAAAACTAATAATATTGCTACTTTTATTGTAGGTCATGTGACTAAGGAGGGAACATTAGCAGGCCCTCGAATGCTAGAACATATGGTGGATACGGTTCTTTATTTTGAAGGGGAGCGTCATCACACGTTCCGTATTTTACGGGCAGTCAAAAACCGTTTTGGTTCGACCAATGAAATAGGTATCTTTGAAATGCAGTCGGGTGGTCTAGTTGAAGTTTTGAATCCAAGTCAAGTTTTTCTTGAAGAACGTTTAGACGGTGCAACAGGATCTGCTATTGTTGTTACTATGGAAGGAACAAGGCCTATTTTAGCAGAGGTTCAAGCTTTAGTGACTCCGACTGTTTTTGGAAATGCTAAGCGTACAACAACAGGTCTTGACTTTAATCGTGTCAGTCTTATTATGGCAGTTCTAGAAAAACGTTGTGGTTTATTGCTTCAAAATCAAGATGCCTATTTAAAATCAGCGGGTGGTGTTAAATTGGATGAACCAGCAATTGATTTAGCTGTTGCTGTAGCTATTGCTTCCAGTTACAAAGAAAAACCCACAAATCCACAAGAATCATTTATTGGAGAAATTGGACTCACTGGTGAGATTCGTCGCGTGACACGTATTGAGCAACGTATTAATGAGGCTAGTAAATTGGGCTTTACTAAAATTTACGCACCAAAGAATTCTCTAGCTGGGATTGAAATACCTAAAGGCATTGATGTTATTGGTGTGACAACTGTTAGTCAGGTCTTAAAAGCAGTGTTTTCAACA

SEQ ID NO: 8994 - protein, 454 aa, Streptococcus agalactiae
MAKKKSVFTCQECGYQSPKYLGRCPNCSAWSSFVEEVEVQEVKNARVSLNGEKSRPTKLKDVSSINYSRTKTDMDEFNRVLGGGVVPGSLVLIGGDPGIGKSTLLLQVSTQLANKGTVLYVSGEESAEQIKLRSERLGDIDNEFYLYAETNMQSIRSEIEKIKPDFLIIDSIQTIMSPEVSSVQGSVSQVREVTAELMQLAKTNNIATFIVGHVTKEGTLAGPRMLEHMVDTVLYFEGERHHTFRILRAVKNRFGSTNEIGIFEMQSGGLVEVLNPSQVFLEERLDGATGSAIVVTMEGTRPILAEVQALVTPTVFGNAKRTTTGLDFNRVSLIMAVLEKRCGLLLQNQDAYLKSAGGVKLDEPAIDLAVAVAIASSYKEKPTNPQESFIGEIGLTGEIRRVTRIEQRINEASKLGFTKIYAPKNSLAGIEIPKGIDVIGVTTVSQVLKAVFST

SEQ ID NO: 8995 - protein, 495 aa, Streptococcus agalactiae
ATGACCACTTATTTTGATAACTTTTTAAAAACCAATCAAGCCTATGCTGACTTACATGGAACAGCTCATCTACCTATCAAGCCAAAGACAAAGGTTGCTATTGTAACCTGTATGGATTCTCGTTTACACGTTGCTCAAGCTCTAGGGCTAGCTTTAGGAGATGCTCATATTTTACGTAATGCTGGTGGACGAGTTACAGACGATGTTCTACGTTCTTTAGTTATTTCGCAACAACAATTAGGAACACGAGAAATCGTTGTTCTACACCATACAGATTGTGGAGCACAGACGTTTACTAACGAAGCTTTTGCTGCTCAATTACAGAGAGATTTGGGTGTTGATATGCATGGACATGATTTTCTTCCTTTTAATGATATTGAAGAAAGCGTTCGTGAAGATGTGGCAAAATTACATGCTTCTCCATTAATCCCAGATGATGTTGTTATTTCTGGTGCTATTTATGATGTAGATACTGGTCGTATGGTGGAAGTTAAA

SEQ ID NO: 8996 - protein, 165 aa, Streptococcus agalactiae; identical to SEQ ID NO: 236

SEQ ID NO: 8997 - protein, 1313 aa, Streptococcus agalactiae
ATGAAAAAATATGATGTCATTGTCTTGGTTTTGTAAGCAGGTAAACATTAGCAGCAAAATTAGCAACACAAGGTAAAAGCGTTGCAATGGTCGAAGAAGACGATAAAATGTACGGGGGAACATGTATCAACATTGGATGTATTCCGACAAAAACGCTTTTAGTATCAGCTAGCAAAAATCATGATTTTCAAGAAGCTATGACTACTAGAAATGAAGTTACAAGTCGTTTACGTGCTAAAAACTTTGCTATGTTGGATAATAAAGACACTGTGGATGTTTATAATGCTAAAGCCCGCTTTATATCAAATAAAGTGGTCGAATTAACAGGAGGAGCTGACAAACAAGAACTTACAGCTGATGTTATTATTATCAATACTGGTGCTAAGTCAGTACAATTACCAATCCCAGGATTAGCTGATTCTCAACATGTTTATGATTCAACGGCAATCCAAGAATTGGCTCATCTTCCTAAACGGTTAGGTATCATTGGAGGCGGTAATATTGGGCTTGAATTTGCGACTTTATATTCCGAATTAGGGAGCAAAGTGACAGTTATTGATAGTCAATCCCGTATCTTTGCGCGTGAGGAAGAGGAATTATCAGAGATGGCTCAAGATTATTTAGAAGAGATGGGGATATCTTTTAAATTATCAGCCGATATCAAATCTGTGCAAAATGAAGATGAAGACGTTGTTATTAGCTTTGAGGATGAAAAATTAAGCTTTGATGCAGTATTATATGCAACAGGACGTAAGCCAAATACAGAAGGTTTAGCACTTGAAAATACAGATATTAAATTGACAGAACGTGGAGCTATTGCTGTTGATGAATATTGCCAAACTTCTGTTGAGAATATTTTTGCAGTTGGTGATGTTAATGGCGGCCCTCAATTCACATATATTTCTTTAGATGACTCACGTATTGTCTTAAATTATTTGAATGGTGATAAGGATTATTCTCTAAAAAATCGAGGAGCAGTACCGACTTCAACCTTTACAAATCCTCCTTTAGCAACGGTAGGTCTAGATGAAAAGACCGCTAAGGAAAAAGGATATCAAGTTAAATCTAATAGCCTTCTTGTTTCTGCCATGCCACGTGCACATGTTAATAATGACCTTAGAGGTATTTTTAAAGTTGTGGTAGATACTGAGACAAATCTTATTTTGGGAGCTCGCTTATTTGGTGCAGAATCCCATGAATTAATTAATATCATCACAATGGCAATGGATAATAAAATCCCATATACTTATTTCCAAAAACAAATTTTCACTCACCCAACAATGGTAGAGAATTTTAATGATTTGTTTAACTTT

SEQ ID NO: 8998 - protein, 439 aa, Streptococcus agalactiae; identical to SEQ ID NO: 4556

SEQ ID NO: 8999 - protein, 1434 aa, Streptococcus agalactiae
GTGCGTTATGCACCAAGTCCAACAGGATTGTTACACATCGGAAATGCGCGTACTGCGCTCTTTAACTACCTTTATGCTCGCCATCATGGTGGGGATTTTGTTATTCGTATTGAAGATACTGACCGAAAACGCCACGTCGAAGATGGTGAACGCTCTCAATTGGAGAACTTACGTTGGCTAGGTATGGACTGGGATGAAAGTCCTGAAACACATGAAAATTATCGTCAATCAGAACGCCTTGAGCTCTACCAACGTTATATTGATCAGTTGTTAGCAGAAGGTAAAGCCTACAAGTCCTATGTGACTGAGGAAGAATTAGCAGCAGAGCGTGAACGCCAAGAATTGGCAGGCGAAACACCTCGCTATATCAACGAATTTATCGGAATGTCAGAAACTGAAAAAGAAGCTTACATTGCAGAGCGTGAAGCAGCAGGCATCATTCCGACAGTACGCCTTGCTGTTAATGAATCTGGGATTTATAAATGGACTGATATGGTAAAAGGTGACATTGAGTTTGAAGGCTCTAATATCGGCGGAGACTGGGTTATTCAGAAGAAAGATGGTTATCCAACTTACAATTTCGCAGTAGTCATTGATGATCATGACATGCAAATTTCGCATGTTATCCGTGGCGATGACCATATTGCAAATACGCCAAAACAATTAATGGTTTATGAAGCACTCGGTTGGGAAGCGCCACAATTTGGTCACATGACATTGATTATAAACTCAGAGACTGGTAAGAAATTATCAAAACGCGACACCAATACTCTTCAATTTATCGAAGACTATCGTAAAAAAGGTTATATGTCGGAAGCTGTCTTTAATTTCATTGCCCTTCTTGGCTGGAATCCTGGTGGAGAAGAAGAAATCTTCTCACGCGAGCAATTAATTAATCTATTTGATGAAAATCGTCTTAGCAAATCACCAGCAGCATTCGATCAGAAGAAAATGGATTGGATGAGTAATGATTACCTAAAAAATGCTGATTTTGAGAGTGTTTTTGCACTTTGCAAACCATTCTTAGAAGAAGCTGGTCGACTTACAGACAAAGCTGAAAAATTAGTTGAGCTTTATCAACCTCAATTAAAATCAGCTGATGAGATTGTACCATTAACAGACCTTTTCTTTGCAGATTTTCCAGAACTAACAGAAGCCGAAAAAGAAGTAATGGCAGCTGAAACAGTCCCAACAGTCTTATCTGCTTTTAAGGAAAAGTTAGTATCGCTTTCTGACGAAGAATTCACTAGAGATACTATTTTCCCTCAAATTAAGGCTGTTCAAAAAGAAACAGGTATTAAAGGTAAGAACCTATTTATGCCTATTCGTATTGCGGTTTCTGGTGAAATGCATGGACCAGAGTTACCAGATACTATTTATTTATTAGGTAAAGAAAAATCAGTTCAACATATCGATAATATGTTAGCAAAATTA

SEQ ID NO: 9000 - protein, 478 aa, Streptococcus agalactiae; identical to SEQ ID NO: 240

SEQ ID NO: 9001 - protein, 966 aa, Streptococcus agalactiae
ATGAAATTTGGAAAAAAACTTGGCTTTCTAGCCTTATTGATGTCTATTGTCCTCATTCTAGGTGCATGTGGTAAAACTGGACTTGGAAATTCTTCTGGGAATTCTACAAAAAATGTAACCAAAAAATCTGCTAAAGATTTGAAACTAGGTGTATCTATTTCAACAACTAACAATCCCTACTTTGTTGCGATGAAAGACGGTATTGACAAATATGCTAGCAATAAAAAAATAAGCATTAAGGTAGCTGATGCTCAAGATGACGCCGCACGTCAAGCAGATGATGTCCAAAACTTTATTAGTCAAAACGTAGATGCTATTTTGATTAATCCCGTTGACTCAAAAGCTATTGTAACAGCTATTAAGTCTGCAAACAACGCTAATATTCCTGTTATTCTAATGGACCGTGGTAGTGAGGGAGGCAAAGTATTAACTACTGTCGCTTCAGATAACGTTGCTGCTGGTAAGATGGCTGCGGATTATGCCGTTAAAAAACTAGGCAAAAAAGCAAAAGCCTTTGAATTATCTGGAGTACCAGGTGCCTCTGCTACTGTAGACCGTGGTAAAGGATTTCATTCAGTTGCAAAATCTAAACTTGACATCCTTTCAAGCCAATCTGCCAATTTTGACCGCGCCAAAGCTTTGAATACTACACAAAATATGATTCAAGGACATAAAGATGTCCAAATTATTTTCGCACAAAATGATGAAATGGCACTTGGGGCTGCACAGGCTGTCAAATCTGCTGGCTTGCAAAATGTTCTTATCGTAGGAATTGATGGTCAGCCAGATGCCCATGATGCCATTAAAAAAGGAGATATTTCAGCCACTATTGCACAACAACCAGCTAAGATGGGAGAAATAGCAATTCAAGCAGCAATTGATTATTATAAAGGCAAAAAAGTAGAGAAAGAAACAATTTCTCCAATTTACCTTGTTACCAAAGACAATGTTGAAAAATACAATTGG

SEQ ID NO: 9002 - protein, 322 aa, Streptococcus agalactiae; identical to SEQ ID NO: 242

SEQ ID NO: 9003 - protein, 927 aa, Streptococcus agalactiae
ATGAAATATATATCAGAGTTAACAACCCTGATTGCGTTAGCTGGTTTAATGGTTATTATCACACTCATTAATCCTAATTTCCTCACAACCAATAATCTACTCAATTTATTATTACAAGTAACTGCAAATGGTTTTATCGCTTTCGGGATGACCTTCGTTATTTTGACTGGCGGTATTGATTTATCAGTCGGGTCCATATTAGCCCTATCTAGTGCATTAACAGCTGGATTAATCGGCCACGGAGTACCCGTTGGTATTGCTATCGTTTTATCTGTTGCCTTAGGTGGCATCTTGGGAATGCTAAACGGACTCTTCATTTCTTACGGAAAATTAGCACCATTTATCGTTACACTGGCAACAATGACTATCTTTAGAGGAGCAACGCTAGTTTATTCAAACGGCAACCCAATTACCGCTGGCTTATCCGATAGTTTTCTATTCCAATTTTTGGGACAAGGCTATATTGTTGGTATCCCATTCCCAGTCATTCTCATGTTTCTTACTTTTATTATTTTGTATATTTTGTTACATAAAACAGCCTTCGGGAAATCTGTTTACGCTTTAGGAGGTAATGAAAAAGCAGCGTATATCTCGGGTATTAAGTTAAACAAAGTTAAAATTATCATCTACACTATCTCAGGTATCATGGCTTCCATTTCTGGGTTAATTATCACATCACGCCTTAGCTCAGCACAACCAACAGCTGGAGCAAGTTATGAGATGGATGCTATTGCCGCCGTTGTCTTAGGTGGAACGTCTTTATCTGGTGGGAAAGGACGTATCATTGGAACATTGATTGGTGCTCTTATTATTGGTGTCCTGAACAATGGATTAAACATCATTGGTGTCTCTGCATTTTGGCAACAAGTTGTGAAAGGTATCGTTATTTTAATGGCTGTTTTACTTGATCGCTTTAAAGTAGCAAAA

SEQ ID NO: 9004 - protein, 309 aa, Streptococcus agalactiae; identical to SEQ ID NO: 4566

SEQ ID NO: 9005 - protein, 1476 aa, Streptococcus agalactiae
ATGAAAATTGACATGAGGAATATCTCCAAATCCTTCGGTACTAATAAAGTTCTAGAAAAGATTGATTTGGAATTACAATCTGGTCAAATACACGCGCTTATGGGTGAAAATGGTGCGGGTAAATCAACCTTAATGAACATTCTAACAGGACTTTTTCCAGCAAGTACAGGAACTATTTATATTGATGGCGAGGAACGAACTTTTTCAAACCCTCAAGAAGCAGAGGAATTTGGTATTAGTTTTATTCACCAAGAGATGAATACTTGGCCGGAAATGACTGTCTTGGAAAATCTCTTTCTTGGACGTGAAATCAAGACAACTTTTGGCTTACTCAATCAAAAATTAATGAGACAAAAAGCACTTGAAACTTTTAAAAGATTAGGTGTGACTATTCCCCTAGACATCCCGATTGGTAACTTGTCTGTTGGACAACAACAAATGATTGAAATCGCCAAAAGTCTCCTAAACCAACTCTCTATTTTGGTAATGGATGAACCGACTGCTGCTTTAACAGATCGTGAAACTGAAAATCTTTTCCGAGTTATCCGAGGTTTGAAACAAGAAGGAGTGGGCGTTGTCTATATCTCCCATCGAATGGAGGAAATTTTTAAAATCACTGACTTCGTAACCGTCATGAGAGATGGTGTCATTGTAGATACAAAAGAAACATCACTCACAAATTCTGACGAATTGGTTAAAAAAATGGTTGGCCGAAAATTGGAAGATTACTATCCTGAAAAACATTCTGAAATTGGGCCTGTTGCTTTTGAAGTTAGTAACCTCTGTGGAGATAATTTCGAGGACGTTTCCTTTTATGTCCGTAAAGGCGAGATTCTTGGATTTTCTGGATTAATGGGAGCTGGGCGTACTGAAGTTATGCGAACTATCTTTGGAATTGATAAAAAGAAGTCTGGTAAGGTGAAAATTGATGACCAAGAAATCACTATTACTACCCCAAGCCAAGCTATCAAGCAGGGCATTGGTTTTTTGACCGAAAATAGAAAAGATGAAGGTCTCATCCTAGACTTCAATATCAAGGACAATATGACTCTCCCTAGCACTAAAGATTTTAGCAAACATGGTTTCTTTGATGAAAAAACAAGCACAACATTTGTGCAACAATTGATTAATCGTCTCTACATTAAATCAGGGAGACCAGATTTAGAGGTTGGAAATCTTTCTGGAGGTAACCAACAAAAGGTCGTTCTCGCTAAATGGATTGGTATTGCTCCTAAAGTCTTAATTCTTGATGAGCCAACGCGTGGTGTTGATGTCGGTGCTAAACGAGAGATTTACCAATTAATGAATGAACTAGCAGACAGAGGTGTTCCAATTGTCATGGTATCATCAGACTTACCTGAAATTCTAGGTGTTAGTGACCGCATCATGGTAATGCACGAAGGTCGAATCAGTGGAGAACTCAGTCGAAAAGAAGCTGACCAAGAAAAAGTTATGCAACTAGCCACAGGAGGTAAG

SEQ ID NO: 9006 - protein, 492 aa, Streptococcus agalactiae; identical to SEQ ID NO: 246

SEQ ID NO: 9007 - protein, 396 aa, Streptococcus agalactiae
ATGAAAAAGACTGGTATATTAAATAGTCATCTCGCTAAATTAGCAGACGACCTTGGGCATACTGATCGAGTTTGTATTGGAGATCTGGGTCTACCTGTTCCAAATGGCATTCCAAAGATTGATTTGTCTTTGACCTCTGGAATACCTAGTTTCCAAGAGGTACTTGATATCTATTTAGAGAATATCTTAGTTGAAAAAGTCATTTTAGCAGAAGAAATCAAGGAAGCAAATCCGGATCAATTATCAAGGTTATTAGCTAAACTTGATAACTCTGTTAGCATAGAGTACGTCAGTCACAATCATTTAAAACAAATGACCCAAGATGTCAAAGCAGTTATTCGTACAGGTGAAAATACACCGTATTCAAATATTATTCTACAATCTGGTGTTATCATC

SEQ ID NO: 9008 - protein, 132 aa, Streptococcus agalactiae; identical to SEQ ID NO: 248

SEQ ID NO: 9009 - protein, 909 aa, Streptococcus agalactiae
ATGAGTAACATTGTCATTATCGGTAGTATTTCCATGGACTTAGTTATGGAAACCAATCGTATCGCCAAAGAGGGAGAAACCGTATTTGGCCAACGTTTTTCAATGGTTCCAGGAGGTAAAGGTGCTAATCAGGCTGTCGCTATTGGGCGTCTTAGCCAAGAGCGAGATAATATTACTATTCTTGGTGCCATTGGCGAGGATTCTTTTGGTCCCATTCTTTTGGATAATTTAAACAAAAATCATGTTACTACGGATTTTGTGGGAACGATACCATCTTCTTCAGGTGTTGCCCAAATCACTCTTTATAATAATGATAATCGAATCATTTACTGTCCTGGAGCCAACGGAAAAGTTGATACTAAAAAATGGTCTCAGGAGTGGTCAATAATTAAAGAAGCTGATTTAGTTGTATTACAAAATGAAATTCCTCATCAAGCAAATATGAAAATTGCTAATTTTTGTAAAGAACATAGTATTAAATTACTCTATAATCCTGCACCATCTAGAGAGACTGATATTGAGATGCTCGATAAGGTCGATTATTTCACACCAAATGAACACGAATGTCAAGAGCTGTTCCCAAACCAAAAACTAGAGGATATATTAGCCACATATCCTGAAAAACTAATCGTAACACTCGGCACAAAAGGAGCCATCTACTCTGATGGAAAAGAAAGTCATTTAATTCCTGCTTTAGAAACTAAAGCTGTTGATACAACTGGTGCAGGTGATACTTTTAACGGTGCATTCGGTTATGCTATCTCGAAAAAATTTAAGATTGCTAAGGCCTTACGTTTTGCAACTCTAGCTGCTCACTTATCCGTGCAAAAATTTGGTGCACAGGGTGGCATGCCTACAATTAAAGAAATGGAGGACAACCAACATTATGAAAAAGACTGGTATATTAAA

SEQ ID NO: 9010 - protein, 303 aa, Streptococcus agalactiae
MSNIVIIGSISMDLVMETNRIAKEGETVFGQRFSMVPGGKGANQAVAIGRLSQERDNITILGAIGEDSFGPILLDNLNKNHVTTDFVGTIPSSSGVAQITLYNNDNRIIYCPGANGKVDTKKWSQEWSIIKEADLVVLQNEIPHQANMKIANFCKEHSIKLLYNPAPSRETDIEMLDKVDYFTPNEHECQELFPNQKLEDILATYPEKLIVTLGTKGAIYSDGKESHLIPALETKAVDTTGAGDTFNGAFGYAISKKFKIAKALRFATLAAHLSVQKFGAQGGMPTIKEMEDNQHYEKDWYIK

SEQ ID NO: 9011 - protein, 984 aa, Streptococcus agalactiae
ATGAGTACGATTAGACAAGTCGCCGAGAAAGCTGGCGTATCAACATCTACTGTCTCAAGGTATATATCCCAAAATGGTTACGTTAGTCAAAAAGCAAGTCAAAAAATCGAGCAAGCTATCCGCGAACTCCATTATGTTCCAAATTTCCTTGCACAATCTCTGAAAACCAAAAAAAATCAACTTGTTGGATTACTACTTCCCGATATTTCAAACCCTTTCTTTCCAAGACTTGCTAGAGGAGTTGAAGAATTTCTAAAAGAACAGGGTTATCGTGTCATGCTTGGCAACACAAATAACAAGAGCCATTTAGAAGAAGAGTACTTAAATGTGCTATTACAAAGTAATGCTGCAGGGATTATTACAACACACGATTTCACCAAAAATCATCCTGAAATAGATATTCCAGTTGTAGTTGTTGACCGCGTTAATCAAGAAACACAGTACGGCGTTTTCTCTGATAATAAAGAGGGAGGAAAATTAGCAGCTCAAGCTATTTGGACAGCAGGTGCTACCAATATATTACTCATTCGTGGTCCGCTAGATAAAGCTGATAACCTTAATCAAAGGTTTCAAGGAAGCCAAAATTACCTATTAAACAAAGGGGCTTGTTTTGCTATCGAAGATAGTGCCAGTTTTGATTTTGCAGAGATTCAAATTGAAGCGAAAACTTTACTTGACCACCATCCAGACATTGATAGCATTATCGCTCCATCTGATATACATGCTATTGCCTACCTACACGAGATTCTTAATCGAGGGAAGCGAATCCCTGAAGATGTACAAATTATTGGTTATGATGATATTTTAATGAGCCAATTTATCTACCCTTCGTTGTCAACTATTCACCAATCATCATATATTATGGGACAAAAAGCAGCTGAATTAATTTTCAAAATTACTAATCAATTACCTATTACCAATAAGCGTATTAAATTACCCGTTCATTATGTCGAACGTGAAACCCTAAGGAGGAAAATAGATGAG

SEQ ID NO: 9012 - protein, 328 aa, Streptococcus agalactiae; identical to SEQ ID NO: 256

SEQ ID NO: 9013 - protein, 96 aa, Streptococcus agalactiae; identical to SEQ ID NO: 4575

SEQ ID NO: 9014 - protein, 32 aa, Streptococcus agalactiae; identical to SEQ ID NO: 4576

SEQ ID NO: 9015 - protein, 1086 aa, Streptococcus agalactiae
ATGTCACATGCTTGGAAAGAATTAACCTTTTATAAGAAAAAATACCTCCTGATTGAATTGCTAATCATTGTTATGATGTTCATGGTAGTTTTTTTATCAGGTTTAGCAAACGGTTTAGGTAGAGCTGTTAGTGCTGCTATTGAAAATAACCCAGCTCAAACCTATATTTTGAATGAAGGTGCTGAACAAGTGATTACATCATCTGTATTGACAACTAAAGATCAGACAGATTTAAACAGTTTGAATTTAAAAGATAGTACCACTTTAAATATTCAACGTTCGAGTTTAACTCGACAAGGACACGAAAAGAAAATTGATATTTCTTATTTTGCTATTGATAAAGATTCTTTTATGGCACCTACACTTTCTGAGGGAAAACAACTGACAAGTTACAAAAAAGCTATTATTTTAAATGATAGTTTAAAAGCTGAAGGGATAAAGTTAGGTGATAAAGTGATTGATAAGTCATCATCTATATCACTAACAGTCGTTGGATTTGTCCATAATAGTATGTATGGTCACGGACCTGTGGCATTTATTGATAAAGACATTTATACCGAAATTAATAAAAAGATTAATCCTCAATACCAGTTCTTACCTCAGGCATTAGTTATGAAAAATGATAAAAGTATATCTCATTTACCAACTCAATTAGAAGCTGTTAGTAAAAAAGATGTCATTCAACATATTCCTGGTTATAGTGCCGAACAATCCACTTTGAATATGATTTTATGGGTCCTTGTCGTAGCTTCAGCTGGTATTTTAGGTGTCTTTTTCTACATCATCACACTTCAAAAACGTCATGAATTTAGCGTCATGAAAGCTATTGGGACAAAAATGTCAGAGATTGCCCTATTTCAATTGAGTCAAGTCATTATATTGGCACTGTTTGGTATCATTGTTGGAGATGGATTGGCGGTTGCTCTCTCTTATGTATTACCAGCTCAAATGCCATTTGTTATTAATTGGCAAAATATTATTCTAGTATCGTTTGTATTTTTAGTCATTGCAATGATTAGTAGTGCTTTGTCAATTGTAAAAGTTGCTAAAATCGACCCAGTCGAAGTTATTAATGGGGGAGGAGAA

SEQ ID NO: 9016 - protein, 362 aa, Streptococcus agalactiae
MSHAWKELTFYKKKYLLIELLIIVMMFMVVFLSGLANGLGRAVSAAIENNPAQTYILNEGAEQVITSSVLTTKDQTDLNSLNLKDSTTLNIQRSSLTRQGHEKKIDISYFAIDKDSFMAPTLSEGKQLTSYKKAIILNDSLKAEGIKLGDKVIDKSSSISLTVVGFVHNSMYGHGPVAFIDKDIYTEINKKINPQYQFLPQALVMKNDKSISHLPTQLEAVSKKDVIQHIPGYSAEQSTLNMILWVLVVASAGILGVFFYIITLQKRHEFSVMKAIGTKMSEIALFQLSQVIILALFGIIVGDGLAVALSYVLPAQMPFVINWQNIILVSFVFLVIAMISSALSIVKVAKIDPVEVINGGGE

SEQ ID NO: 9017 - protein, 684 aa, Streptococcus agalactiae
ATGTCAGCAATCTTAGAATTAAAACACATCTCAAAGCACTATCCAGATGGAGATGAGCTTTTATCAATATTAGATAATTTAGATTTATCAGTTTCTGCAGGTGAGTTTGTAGCTATACTGGGACCCTCAGGTTCAGGTAAAAGCACACTTTTATCCATTGCAGGGTTACTTCTTGGCGCAGATCAAGGTAGTTTGTATGTCAATCATGAGAACGTTACGGATTTGTCTCAAAGACAAAGAACACAATTGCGCCGTGAAGCACTAGGTTTTATATTTCAAAGTCATCAACTGCTTCCTTATTTAACAATCCAAGAACAGTTGCAACAAGAGGCTCGATTTGCAAAACACTATGATAAGAAAACAAGCTTGGAAGAAATTAATAAATTATTATCAGATTTAGGAATAGAGCAGTGTGCACATAAATACCCTAACCAATTATCGGGAGGACAAAAGCAACGCGCAGCAATTGCTAGAGCATTTATTAATCATCCTAAGGTTATCTTGGCAGATGAGCCAACAGCTAGCCTTGATGAAGAACGTGGGCGTCAAGTTACAGAACTTATTCGTCAGGAAGTTAAATCACATAATACTGCAGCTATTATGGTGACACACGATGAGCGCGTTCTAGATTTAGTAGATACCGTTTATCGTTTAAAGGACGGGAAATTAGTTAAAGAAAACTTC

SEQ ID NO: 9018 - protein, 228 aa, Streptococcus agalactiae; identical to SEQ ID NO: 4580

SEQ ID NO: 9019 - protein, 669 aa, Streptococcus agalactiae
ATGATTAAAATATTAGTTGTAGAGGATAACATTGTTCAACAAAAAATCATTACCACAAAATTAACACAAGAGGGCTACCAATTTATCACTGCTTCAAATGGACAAGAAGCTCTAAATTGTCTAGATACAGAAGAAGTACAATTGATTATAACTGATATCATGATGCCCATGATGGATGGTTATCAATTAATTCAAGAACTCAGGTCAGCTGCTTATAATGTTCCAATCATTGTTATGACAGCAAAATCACAAATGGAAGATATGACAAAAGGGTTTGGCCTTGGTGCAGATGATTATATGGTTAAGCCTGTGCAGTTACAAGAATTAGCTTTACGTATTAAGGCACTCTTGAGGAGAGCTAATATTGTAGCTCAACATCAGCTAATTATTGGGAATACTTGTCTTAATGAAGATGAATTAAGCTTGAAATATTTTGAGCAAGAAATTATATTTCCTCAGAAAGAATTTAGGGTTCTTTTCCACTTACTTAGCTATCCTAATAGGATTTTCACACGTTTAGAACTATTGGATAGTATTTGGGGAATGGATACTGATTTAGATGAGCGGGTGGTAGATGCTTGCATCAATAAAATTAGACGAAAAGTAGAACACTTACCAGATTTTAAGATTGAGACGGTGAGAGGGGTAGGGTATCGTGCAAAAAATGAC

SEQ ID NO: 9020 - protein, 223 aa, Streptococcus agalactiae
MIKILVVEDNIVQQKIITTKLTQEGYQFITASNGQEALNCLDTEEVQLIITDIMMPMMDGYQLIQELRSAAYNVPIIVMTAKSQMEDMTKGFGLGADDYMVKPVQLQELALRIKALLRRANIVAQHQLIIGNTCLNEDELSLKYFEQEIIFPQKEFRVLFHLLSYPNRIFTRLELLDSIWGMDTDLDERVVDACINKIRRKVEHLPDFKIETVRGVGYRAKND

SEQ ID NO: 9021 - protein, 1068 aa, Streptococcus agalactiae
ATGACTAAGCTAAGGCGATTTCGGTTTCCGTTAAGATTTTATTTCACATTAATGTTTGTGTTAACGATGCTTTTCTCAGTCCTAGCTTCTCTTTTACTAGTTGCAGCAATAGTTTTTACTTTTTTTCAAGGAGTCTTAACTACTCATGTATTACAAGTTAGTGCTCTCGCTGTTGTTTTTTTAAGCCTTGTGATAGCTAGTATTAGTATGTGGTACGGTTCTTATCATTTAACAAAACCAATTTTAGATATTAGCCATATTGTGTCCAATGTTGCAGACGGTGACTTTGAAGGGCATATTTATCGAAACAGTAATCGTCGTAAATCCTATGAGTATTATAATGAATTGGATGAGCTATCTGAAAGTATTAATCAGATGATTGTTTCTTTATCTCATATGGATCATATGCGAAAAGACTTTATCACTAATGTTTCTCATGAGCTAAAGACTCCGATTGCTGCAGTAGCTAATATTGTAGAACTATTACAAGATCCAGAATTAGATGAAGAAACACAAAGTGAGTTATTAGGTCTTGTTAAAACAGAGAGCCTAAGGTTAACAAGATTATGTGATACGATGTTGCAAATGTCGCGCGTGGATAATCAGGAGACTATTGGGGAGCTATCCTCTGTTCGTGTAGATGAACAAATTCGTCAAGCAATGATTAGTTTAACAGAACGTTGGCAAGCTAAAAGGATAAATTTTCAACTGGATTCAAAACCATATACTGTTTACTCAAACTCTGACTTGCTGATGCAAGTTTGGATAAACCTTTTAGATAATGCAATAAAATATTCCGAGGATATTGTAGACTTAAGTGTACGAATGGAAGAAACTAATAATCATTATCTGAGAGTTATTATTTCTGATAAAGGTAGGGGAATTTCTCAATATGATGTTCAGCATATATTTGATAAATTTTACCAAGCGGATCAGTCGCATAATCAACAAGGAAATGGATTAGGACTAGCAATAGTTAAACGTATAATTGTTCTTTGTAAGGGACGTATTAGTGTCTCCAGTCAGTTGGAAATTGGAACAGAATTTTGTGTAGAACTACCTTTATCA

SEQ ID NO: 9022 - protein, 356 aa, Streptococcus agalactiae
MTKLRRFRFPLRFYFTLMFVLTMLFSVLASLLLVAAIVFTFFQGVLTTHVLQVSALAVVFLSLVIASISMWYGSYHLTKPILDISHIVSNVADGDFEGHIYRNSNRRKSYEYYNELDELSESINQMIVSLSHMDHMRKDFITNVSHELKTPIAAVANIVELLQDPELDEETQSELLGLVKTESLRLTRLCDTMLQMSRVDNQETIGELSSVRVDEQIRQAMISLTERWQAKRINFQLDSKPYTVYSNSDLLMQVWINLLDNAIKYSEDIVDLSVRMEETNNHYLRVIISDKGRGISQYDVQHIFDKFYQADQSHNQQGNGLGLAIVKRIIVLCKGRISVSSQLEIGTEFCVELPLS

SEQ ID NO: 9023 - protein, 1187 aa, Streptococcus agalactiae
ATGGGAAAAGAAAAATTAATTTTAGCTTATTCTGGTGGTTTAGATACCTCTGTTGCTATAGCTTGGTTAAAAAAAGATTATGACGTTATTGCTGTCTGTATGGATGTTGGCGAAGGTAAAGATCTTGATTTTATTCACGATAAGGCTTTAACAATAGGTGCCATAGAATCTTATATTTTAGATGTTAAAGATGAGTTCGCTGAGCATTTTGTTTTACCAGCTTTACAGGCACATGCGATGTATGAACAAAAATACCCGCTTGTTTCAGCGCTTAGTCGTCCAATTATTGCCCAAAAATTAGTTGAAATGGCACATCAAACAGGTGCGACCACAATTGCACATGGCTGTACAGGTAAAGGAAATGACCAAGTGCGTTTTGAAGTTGCAATTGCAGCACTAGATCCTGAATTAAAAGTAATTGCCCCTGTTCGTGAGTGGAAGTGGCATCGTGAAGAGGAAATTACTTTTGCAAAAGCTAACGGCGTACCTATTCCAGCAGATTTAGATAACCCTTATTCTATAGACCAAAATTTATGGGGACGTGCCAATGAATGTGGTGTGCTTGAGAATCCTTGGAATCAAGCGCCAGAAGAAGCTTTTGGTATTACAAAATCACCAGAAGAAGCTCCTGATTGTGCAGAATATATTGATATTACGTTCCAAAATGGGAAGCCTATAGCTATAAACAATCAAGAAATGACACTAGCAGATTTGATTTTATCGCTAAATGAAATTGCAGGAAAACATGGTATTGGACGCATTGATCATGTTGAAAATCGTTTAGTCGGTATCAAATCACGTGAAATTTATGAATGTCCTGCGGCAATGGTACTGTTAGCTGCTCATAAAGAAATTGAAGATTTAACACTAGTTCGTGAAGTGTCTCATTTTAAACCTATCCTTGAAAATGAACTATCAAATCTTATTTATAATGCTTTATGGTTTAGTCCAGCTACAAAAGCTATCATTGCCTATGTCAAAGAAACACAAAAAGTGGTTAATGGTACTACAAAAGTTAAGTTATATAAAGGTTCTGCCCAAGTCGTTGCTCGCCACTCATCTAATTCATTATATGATGAGAATTTAGCAACCTATACAGCTGCTGATAGCTTTGATCAAGATGCAGCAGTTGGTTTTATCAAACTCTGGGGACTTCCAACCCAGTTAATGCCCAAGTAAACAAAGGA

SEQ ID NO: 9024 - protein, 396 aa, Streptococcus agalactiae
MGKEKLILAYSGGLDTSVAIAWLKKDYDVIAVCMDVGEGKDLDFIHDKALTIGAIESYILDVKDEFAEHFVLPALQAHAMYEQKYPLVSALSRPIIAQKLVEMAHQTGATTIAHGCTGKGNDQVRFEVAIAALDPELKVIAPVREWKWHREEEITFAKANGVPIPADLDNPYSIDQNLWGRANECGVLENPWNQAPEEAFGITKSPEEAPDCAEYIDITFQNGKPIAINNQEMTLADLILSLNEIAGKHGIGRIDHVENRLVGIKSREIYECPAAMVLLAAHKEIEDLTLVREVSHFKPILENELSNLIYNALWFSPATKAIIAYVKETQKVVNGTTKVKLYKGSAQVVARHSSNSLYDENLATYTAADSFDQDAAVGFIKLWGLPTQVNAQVNKG

SEQ ID NO: 9025 - protein, 1386 aa, Streptococcus agalactiae
ATGACAAAAAATCATAAGTTATGGGGTGGTCGTTTTGAAAGTAGTCTTGAAAAATGGGTTGAAGAGTTCGGTGCATCAATCAGTTTCGACCAAAAATTAGCTCCCTATGATATGAAGGCTTCTATGGCCCATGTCACAATGTTAGGCAAAACGGATATTATTAGTCAAGAAGAAGCAGGCTTGATAAAAGATGGTTTAAAAATACTGCAAGATAAATACAGAGCAGGTCAATTGACTTTTAGCATATCAAATGAAGACATTCATATGAACATAGAGAGCTTATTAACCGCTGAAATTGGAGAAGTAGCAGGTAAGCTTCATACTGCACGTTCACGAAATGATCAAGTGGCTACAGATATGCACCTTTATTTGAAAGATAAATTGCAAGAAATGATGAAGAAATTGCTTCATTTACGAACAACCTTAGTTAATTTAGCAGAAAATCATATCTATACTGTTATGCCAGGGTATACACATTTACAACATGCTCAGCCGATTTCATTTGGACATCATCTAATGGCTTACTATAATATGTTTACGCGTGATACAGAGCGATTAGAGTTTAATATGAAACACACCAATCTATCACCATTAGGAGCTGCTGCTCTAGCAGGGACAACGTTTCCTATTGACCGCCATATGACAACTCGTTTATTAGATTTTGAAAAACCATATAGTAATTCGCTTGATGCTGTCTCAGATCGTGACTTTATCATAGAATTTTTATCCAATGCTAGCATTTTAATGATGCATTTATCACGTTTTTGTGAAGAAATCATTAATTGGTGCAGTTATGAATATCAATTCATCACATTATCAGATACTTTCTCTACAGGATCATCTATTATGCCTCAAAAGAAAAATCCTGATATGGCAGAATTAATTCGAGGGAAGACAGGCCGTGTTTATGGAAATTTATTTAGTTTACTAACTGTTATGAAATCATTGCCGTTAGCTTATAACAAAGATTTACAAGAAGATAAAGAAGGGATGTTTGATAGCGTAGAAACAGTCAGCATAGCTATTGAAATCATGGCTAATATGCTTGAGACAATGACTGTGAATGAGCACATAATGATGACCTCAACGGAGACTGATTTTTCAAATGCAACAGAATTAGCAGATTATTTAGCAAGTAAGGGGGTACCTTTCAGAAAAGCACATGAAATTGTAGGTAAATTGGTTTTAGAATGCAGTAAAAATGGTTCTTATTTACAGGATATACCTTTAAAATATTATCAAGAAATTTCAGAGTTGATAGAAAACGATATCTATGAGATATTAACTGCAAAGACAGCAGTTAAACGAAGAAATTCATTAGGAGGAACGGGGTTTGACCAGGTTAAAAAACAGATCCTATTGGCACGTAAAGAATTGAAAGCGGAA

SEQ ID NO: 9026 - protein, 462 aa, Streptococcus agalactiae
MTKNHKLWGGRFESSLEKWVEEFGASISFDQKLAPYDMKASMAHVTMLGKTDIISQEEAGLIKDGLKILQDKYRAGQLTFSISNEDIHMNIESLLTAEIGEVAGKLHTARSRNDQVATDMHLYLKDKLQEMMKKLLHLRTTLVNLAENHIYTVMPGYTHLQHAQPISFGHHLMAYYNMFTRDTERLEFNMKHTNLSPLGAAALAGTTFPIDRHMTTRLLDFEKPYSNSLDAVSDRDFIIEFLSNASILMMHLSRFCEEIINWCSYEYQFITLSDTFSTGSSIMPQKKNPDMAELIRGKTGRVYGNLFSLLTVMKSLPLAYNKDLQEDKEGMFDSVETVSIAIEIMANMLETMTVNEHIMMTSTETDFSNATELADYLASKGVPFRKAHEIVGKLVLECSKNGSYLQDIPLKYYQEISELIENDIYEILTAKTAVKRRNSLGGTGFDQVKKQILLARKELKAE

SEQ ID NO: 9027 - protein, 879 aa, Streptococcus agalactiae
ATGGCAATCGTTTCAGCAGAAAAATTCGTCCAAGCAGCTCGTGATAACGGCTATGCAGTAGGTGGATTTAACACAAACAACCTTGAGTGGACTCAAGCTATCTTGCGCGCAGCAGAAGCTAAAAAAGCTCCAGTACTTATCCAAACTTCAATGGGTGCGGCTAAATACATGGGTGGTTACAAACTTTGTAAACAACTTATTGAAACTTTGGTTGAATCAATGGGTATTACTGTACCAGTTGCTATCCACCTTGACCACGGTCATTACGATGATGCCCTTGAGTGTATTGAAGTAGGTTACACTTCAATTATGTTTGATGGTTCACACCTTCCAGTTGAAGAAAACCTTGAAAAAGCACGCGAAGTTGTTGCTAAAGCACATGCTAAAGGTATTTCAGTAGAAGCTGAAGTTGGTACTATCGGTGGTGAAGAAGATGGTATTGTCGGTAAAGGTGAATTAGCACCAATCGAAGACGCTAAAGCTATGGTTGAAACTGGTATTGACTTCTTGGCTGCAGGTATCGGTAACATTCATGGACCATACCCAGCAAACTGGGAAGGACTTGACCTTGATCACTTGAAGAAATTGACTGAAGCTGTTCCTGGTTTCCCAATCGTGTTACACGGTGGTTCAGGTATTCCTGATGATCAAATCCAAGAAGCTATCAAACTTGGTGTTGCTAAAGTTAACGTTAACACAGAATGTCAATTAGCTTTCTGTCAAGCAACTCGTGACTACGCTGTTGAATTCAACGCTAACGAAGCTGAATACATGAAGAAAAAACTCTTTGACCCACGTAAATTCTTGAAACCTGGTTTCGATGCAATTACAGAAGCAGTTGAAGAACGTATTGACGTGTTTGGTTCAGCAAACAAAGCA

SEQ ID NO: 9028 - protein, 293 aa, Streptococcus agalactiae
MAIVSAEKFVQAARDNGYAVGGFNTNNLEWTQAILRAAEAKKAPVLIQTSMGAAKYMGGYKLCKQLIETLVESMGITVPVAIHLDHGHYDDALECIEVGYTSIMFDGSHLPVEENLEKAREVVAKAHAKGISVEAEVGTIGGEEDGIVGKGELAPIEDAKAMVETGIDFLAAGIGNIHGPYPANWEGLDLDHLKKLTEAVPGFPIVLHGGSGIPDDQIQEAIKLGVAKVNVNTECQLAFCQATRDYAVEFNANEAEYMKKKLFDPRKFLKPGFDAITEAVEERIDVFGSANKA

SEQ ID NO: 9029 - protein, 887 aa, Streptococcus agalactiae
ATGGGGCACGTTGGATCAACTGTTGCACACGCTCTTATTGCACAAGGTATTGGTGATGATTATGTCTTTATTGATACTAATGTTGATAAGGTTAATGCTGATATGATTGATTTTCAAGATGCTCTGGCAAATGCTACTTATCACGCTAATCTAGTATTAAACGACTATGACGCGTTGTCAGATGCTGATGTTGTGATTTCAGCCTTAGGTGATATTTCACTACAGAATAACAAAGAAGCTAATCGCTTTGCTGAACTACCATTTACCAGTAAAGAAGTCTACGACGTTAGCCAAAAGTTAAAATCATCTGGTTTTAGAGGGATCCTTATTGTCGTTACTAATCCTGTTGATGCCATTACCCAGCTTTATCAAGAATATACTCAATTTCCTAAATCACGCGTTATCGGAACAGGAACCTTATTGGATACTGCTCGGATGAAAAGAGTGCTTGGTCAACGCCTACAAGTTGATCCAAGGAGTATCGGTGGTTATAATCTAGGAGAGCATGGTAACTCCCAATTTGTCGCTTGGAGTCAGGTAACTGTAAAAGGACAACCAGCTATATCACTATAAAAGCAGAAGAATTAGAACAGATAAAAGAAGCTTCTTTAAAAGGCGGGCACACTGTCTTTTTTGGTAAAAAATATACTAGTTATGGTATCGCTACCGCAGCTGTCCGCATCGTTTTAACTGTGTTAAATGATTCCCATGAGTTACTACCTGTATCTACCTTCTATGAGTCCGAAGGGGTTTACCTTGGATATCCAGCTATTATTGGTAGAGTAGGAATTGTAGAAAGAATTTCTCTTTCACTAAGCCCAAAAGAAGAGCAACAACTCACAGATTCAGCGGCATTTATTCGAAATTATCTTAAGCATATCAATCTT

SEQ ID NO: 9030 - protein, 296 aa, Streptococcus agalactiae
MGHVGSTVAHALIAQGIGDDYVFIDTNVDKVNADMIDFQDALANATYHANLVLNDYDALSDADVVISALGDISLQNNKEANRFAELPFTSKEVYDVSQKLKSSGFRGILIVVTNPVDAITQLYQEYTQFPKSRVIGTGTLLDTARMKRVLGQRLQVDPRSIGGYNLGEHGNSQFVAWSQVTVKGQPAISLLKAEELEQIKEASLKGGHTVFFGKKYTSYGIATAAVRIVLTVLNDSHELLPVSTFYESEGVYLGYPAIIGRVGIVERISLSLSPKEEQQLTDSAAFIRNYLKHINL

SEQ ID NO: 9031 - protein, 213 aa, Streptococcus agalactiae
TTGATCAATATAGGAGGAACTCGTAAAATGGCTAAAGTATGTTATTTCACAGGACGTAAAACAGTTTCTGGTAACAACCGTTCACACGCGATGAACCAAACAAAACGTACTGTTAAACCAAACCTTCAAAAAGTTACTGTTCTTATCGACGGTAAACCAAAAAAAGTTTGGGTTTCAGCTCGTGCGCTTAAATCTGGTAAAGTAGAACGCGTT

SEQ ID NO: 9032 - protein, 71 aa, Streptococcus agalactiae
MINIGGTRKMAKVCYFTGRKTVSGNNRSHAMNQTKRTVKPNLQKVTVLIDGKPKKVWVSARALKSGKVERV

SEQ ID NO: 9033 - protein, 363 aa, Streptococcus agalactiae
ATGACTGTAAAAATCAATACAAGAGATGGTCAAATTGAACTCTCTGATGACGTTATTGCAACTGTCGTTGGAGGTTCAGCAACGGAAATTTTTGGCGTTGTTGGTATGGCAAGTAAAAGTGCTATCAAAGATAACTTTCAAGCACTTTTGCGTAAGGAAAACTACGCAAAAGGTGTTGTTGTGAGGTCTAGTGAAGCGGGCATCGTAGTAGATGTTTATACTGTCATGAGTTACGGCGTCAAAATTAGTGAAGTTTCAAAAAATATTCAAGAGCGAGTGAAATTCAATCTCGAAAATCAGCTTGGTTTATCTGCTGATATGGTGAATGTTTATGTGCAAAGTATTAAGGTTGTAGGAGAAGAT

SEQ ID NO: 9034 - protein, 121 aa, Streptococcus agalactiae
MTVKINTRDGQIELSDDVIATVVGGSATEIFGVVGMASKSAIKDNFQALLRKENYAKGVVVRSSEAGIVVDVYTVMSYGVKISEVSKNIQERVKFNLENQLGLSADMVNVYVQSIKVVGED

SEQ ID NO: 9035 - protein, 1629 aa, Streptococcus agalactiae
ATGGTACAAGCTGCCAGTACACGTCTGAGTAAACAGGCAGAGTATGTCAACTCATTAAATGTATTCCCAGTTCCAGATGGTGATACTGGTACGAATATGGGGATGACTATGGAAAACGGAGCCAAGGAAGTTTCGGACAAACCAGCGACGACTGTTGGAGAAGTTGGTCAAATTCTTTCTAAAGGTGTATTGATGGGAGCACGTGGAAATTCAGGTGTAATTACATCACAATTATTCCGTGGTTTTGGTCAAAGTATCAAGGATAAAGAAGAATTAACGGGTCAAGATTTGGCACACGCTTTCCAGAATGGTGTTGAAGTAGCTTATAAAGCCGTTATGAAACCAGTTGAAGGAACTATCTTGACAGTATCACGCGGTGCAGCTACCGCTGCTCTAAAAAAAGCTGAAGAAACTGATGATGCAGTTGAAGTTATGCGCGCAACTCTCAAAGGTGCTAAGCGTGCTCTTGCTAAAACACCGGATATGCTACCTGTTCTTAAAGAGGTTGGTGTTGTTGATTCTGGTGGTCAAGGACTCGTCTTTATTTACGAAGGTTTCCTCTCAGCACTGACTGGGGAATATATCGCATCAGAAGATTTTAAAGCAACTCCCGCAACAATGACTGAAATGGTTAATGCAGAGCACCATAAAGCTGTAGTAGGCCACGTAGCCACAGAAGATATTAAATATGGCTATTGTACAGAAGTCATGGTTGGTTTAAAGCAAGGACCAACTTACGTTAAGGAATTTAACTACGAAGAATTTCAAGGTTATCTTAGCAATCTAGGGGATTCTTTACTAGTTGTTAATGATGATGAAATTGTCAAGGTTCATGTTCATACAGAAGATCCAGGTCTTGTTATGCAAGAAGGTTTGAAATATGGATCGCTTGTGAAGGTTAAAGTTGAAAACATGCGTAACCAACATGATGCCCAAATGCAAAAGGTTGAAGTTGAAGAAACTGTCAAAGAAACTAAAGAATATGGTATTATTGCTGTTGTAGCTGGTGACGGTCTAGCTGAGATTTTTAAATCACAAGGTGTTGATTATATCATCTCTGGCGGCCAGACTATGAACCCATCTACAGAAGATATTGTAAAAGCGATTGAAAAAGTAAACGCTAGAAATGTTATTATTTTACCAAACAATAAGAACATCTTCATGGCTGCACAGTCAGCTGCAGATGTCGTTGATATTCCAGCAGCAGTAGTAGAGACACGTACAGTTCCACAAGGATTTACTAGCTTACTTGCTTTTGATCCTGCTAAGTCTCTTGAAACTAATGTAGCTGATATGACAAATAGCCTCTCAGATGTCATTAGTGGTAGTGTGACTTTAGCTGTTCGTGATACAACGATAGATGGCCTTGAAATTCATGAAAACGACATCCTTGGGATGGTTGATGGTAAAATTCTAGTATCTACACCAGATATGGAAAAAGCACTTAAAGACACTTTTGATAAAATGATTGATGAAGATAGTGAAATCGTGACAATCTATGTTGGTGAAGATGGTAAGCAAGCATTAGCTGAGACCTTGTCGGAATATCTTGAGGAAACTTATGAAGATGTTGAAGTTGAGATCCACCAAGGAGATCAACCTGTATATCCATACCTCATGAGCGTTGAA

SEQ ID NO: 9036 - protein, 543 aa, Streptococcus agalactiae
MVQAASTRLSKQAEYVNSLNVFPVPDGDTGTNMGMTMENGAKEVSDKPATTVGEVGQILSKGVLMGARGNSGVITSQLFRGFGQSIKDKEELTGQDLAHAFQNGVEVAYKAVMKPVEGTILTVSRGAATAALKKAEETDDAVEVMRATLKGAKRALAKTPDMLPVLKEVGVVDSGGQGLVFIYEGFLSALTGEYIASEDFKATPATMTEMVNAEHHKAVVGHVATEDIKYGYCTEVMVGLKQGPTYVKEFNYEEFQGYLSNLGDSLLVVNDDEIVKVHVHTEDPGLVMQEGLKYGSLVKVKVENMRNQHDAQMQKVEVEETVKETKEYGIIAVVAGDGLAEIFKSQGVDYIISGGQTMNPSTEDIVKAIEKVNARNVIILPNNKNIFMAAQSAADVVDIPAAVVETRTVPQGFTSLLAFDPAKSLETNVADMTNSLSDVISGSVTLAVRDTTIDGLEIHENDILGMVDGKILVSTPDMEKALKDTFDKMIDEDSEIVTIYVGEDGKQALAETLSEYLEETYEDVEVEIHQGDQPVYPYLMSVE

SEQ ID NO: 9037 - protein, 882 aa, Streptococcus agalactiae
ATGTCATTAATTATTCTTACGGTTATTTTGGTTTTAGTGATTGTTCTGTTGATAACTTCTTTATACGTTGTTAAACAACAGACAGTAGCCATCATTGAACGCTTTGGTAAATATCAAAAGACTGCTACTAGCGGTATTCATATTCGTGTACCATTGGGTATCGATAAGATTGCAGCACGAGTGCAGTTACGTCTTTTACAGAGTGAAATTATCGTTGAGACAAAAACAAAAGATAATGTTTTTGTCACTTTAAATATTGCTACACAATATCGTGTCAATGAAAATAACGTTACAGACGCTTATTACAAATTAATAAAGCCAGAAGCTCAGATTAAATCTTATATCGAAGATGCTTTGCGTTCATCAGTACCTAAACTTACATTAGACGAGCTATTTGAAAAGAAAGATGAAATAGCCTTGGAAGTTCAACATCAAGTGGCAGAAGAAATGTCAACATACGGCTACATCATTGTTAAGACTTTAATTACTAAGGTTGAGCCAGATGCAGAAGTAAAACAATCCATGAACGAAATCAATGCTGCACAACGTAAACGTGTAGCAGCTCAAGAATTAGCGAATGCTGATAAGATCAAAATTGTAACTGCTGCAGAAGCAGAAGCAGAAAAAGATCGTCTACATGGTGTGGGTATTGCGCAACAACGTAAAGCAATTGTAGATGGGTTAGCTGATTCGATTCAAGAATTGAAAGATGCTAACGTGACATTGACAGAAGAACAAATCATGTCTATCTTGTTAACAAATCAATATTTAGATACTTTAAATACATTTGCTATTAATGGTAATCAAACGATTTTCTTACCAAATAACCCAGAAGGTGTTGAAGATATTCGTACACAAGTTTTATCTGCTCTTAAAACAAGA

SEQ ID NO: 9038 - protein, 294 aa, Streptococcus agalactiae; identical to SEQ ID NO: 274

SEQ ID NO: 9039 - protein, 114 aa, Streptococcus agalactiae; identical to SEQ ID NO: 4595

SEQ ID NO: 9040 - protein, 38 aa, Streptococcus agalactiae; identical to SEQ ID NO: 276

SEQ ID NO: 9041 - protein, 288 aa, Streptococcus agalactiae
ATGAAACTTAAAATCAGTGTTTTAACAGCAGCTTCAGCTGTCACTCTATTATTAGCTACTTTAGCAAGTCTTGCGAAGGCAGACACAGTGTCTTATCCTTCACGTGATGCCGGATTTGTCTACTCTCGTGGGTATGCGCCTTCTGAATCAAGCTATCCTTCACGCGATGCCGGGTTTATCTACTCTCGTGGGTATGCGCCTTCTGAATCAAGCTATCCTTCACGCGATGCCGGATTTATCTACTCTCGTGGGTATGCTCCAAAACACTTCCTAAGTGCTTACGATAAA

SEQ ID NO: 9042 - protein, 96 aa, Streptococcus agalactiae; identical to SEQ ID NO: 278

SEQ ID NO: 9043 - protein, 603 aa, Streptococcus agalactiae
TTGAAGCTAGTCGTGGATTTCACTAAAGATGTAGCAATAAAAAATCCCCTCCAGTTCCATTGCAATGATGACAATGACAAAACCTGTAGGGGTATAAATAGTCTATATTTAAATGTGAATAAATTTTATTTTAAGAAGCGTTGTAGAAATTCCTTAGTTCTTTCTTGTGTTGGATTTTCGAAAAGTTGTTTAGGAGTACCCTGCTCTGCAATGATTCCTTTGTCCATGAAAATAACGCGGTCTGATACTTCTTTAGCAAATTCCATCTCGTGTGTCACAATTATCATTGTTAATCCAGATTTAGCTAGATCTTGCATTGTTTTAAGGACCTCACCAACCATTTCTGGATCCAAGGCTGAAGTTGGTTCATCAAAAAGTATAGCTTCTGGGTTAACAGAAAGTGCTCGGGCGATTGCGACACGTTGCTTTTGCCCACCTGATAATTGTTTTGGTTTAGCTTTCCAATATTGCTCAGTCATGCCAACAGCATTTAAGTTTTCTTTAGCAATCTTTTCAGCTTCTTGGCGTTCACGTTTTAGAACAGTAGTCTGTGCGACAATAGCATTCTCTAAGATATTTAAATTTTCAAAGAGGTTAAAAGAT

SEQ ID NO: 9044 - protein, 201 aa, Streptococcus agalactiae
MKLVVDFTKDVAIKNPLQFHCNDDNDKTCRGINSLYLNVNKFYFKKRCRNSLVLSCVGFSKSCLGVPCSAMIPLSMKITRSDTSLANSISCVTIIIVNPDLARSCIVLRTSPTISGSKAEVGSSKSIASGLTESARAIATRCFCPPDNCFGLAFQYCSVMPTAFKFSLAIFSASWRSRFRTVVCATIAFSKIFKFSKRLKD

SEQ ID NO: 9045 - protein, 738 aa, Streptococcus agalactiae
ATGACACAAGCTATTTTAGAAATTAAACATTTGAAAAAATCTTACGGAAGCAATGAAGTGTTAAAAGATATTTCGCTTTCGGTCAACAAAGGCGAAGTTATTTCTATCATTGGTTCTTCTGGATCAGGAAAATCAACTTTCCTACGTTCTATTAACCTCTTAGAAGAACCAAGTGGAGGAGAAATCTTATATCACGGTCACAATGTTCTTGAAAAAGGCTATGATTTAAATAATTATCGTGAAAAACTTGGGATGGTCTTTCAATCTTTTAACCTCTTTGAAAATTTAAATATCTTAGAGAATGCTATTGTCGCACAGACTACTGTTCTAAAACGTGAACGCCAAGAAGCTGAAAAGATTGCTAAAGAAAACTTAAATGCTGTTGGCATGACTGAGCAATATTGGAAAGCTAAACCAAAACAATTATCAGGTGGGCAAAAGCAACGTGTCGCAATCGCCCGAGCACTTTCTGTTAACCCAGAAGCTATACTTTTTGATGAACCAACTTCAGCCTTGGATCCAGAAATGGTTGGTGAGGTCCTTAAAACAATGCAAGATCTAGCTAAATCTGGATTAACAATGATAATTGTGACACACGAGATGGAATTTGCTAAAGAAGTATCAGACCGCGTTATTTTCATGGACAAAGGAATCATTGCAGAGCAGGGTACTCCTAAACAACTTTTCGAAAATCCAACACAAGAAAGAACTAAGGAATTTCTACAACGCTTCTTAAAA

SEQ ID NO: 9046 - protein, 246 aa, Streptococcus agalactiae; identical to SEQ ID NO: 4604

SEQ ID NO: 9047 - protein, 1548 aa, Streptococcus agalactiae
ATGAAAAAAATATTACTAAGTTTATTCACTGCTTTGCTTATCACCTTTGGAGGTATGACAAGTATACAAGCAGATGAATATCTACGTGTCGGTATGGAGGCAGCCTATGCTCCTTTCAACTGGACACAAAATGATAACACAAATGGTGCAGTTCCTATTGAAGGAACTGATCAATATGCTAATGGTTATGATGTACAAGTCGCTAAAAAGTTAGCTAAAAAGTTAAATAAAAAAGTTGTTGTTGTCAAAACAAAATGGGAAGGCCTTGTTCCAGCACTAACTTCTGGAAAACTCGATATGATTATTGCAGGAATGAGTCCTACCGAAGAACGTAAAAAAGAAATTAATTTTTCAAAGCCTTACTACATTTCAGAACCTACTCTAGTTGTTAATGCTGAAGGAAAATATACTAATGCTAAAAATATTAGTGATTTCAAAAATGCTAAAGTAACTGCCCAACAAGGAGTCTACTTATACAACCTCATTGATCAAATCAATGGTGTCAAAAAAGAAGTTGCCATGGGGGACTTCAATCAATTAAGACAAGCTGTAGAATCTGGTGTTGTAGACGCCTATGTTTCAGAACGTCCAGATGCAACTTCCGCTCAAACTGCTAATCCTAAATTAAAAATGATTGAACTGCACCAAGGGTTTAAAACATCTGATGCCGATACAAATATTTCTGTTGGGATGCGTAAAGGTGACAATCGTATTAATCAAGTTAATCAAGTTCTCGAAAGCATTTCTAGAGATAAACAAATCGCCTTGATGGATAAGATGATTAAAGAACAGCCATCCGTTAAAAAAGAAAAAAATGGGAAACCAAACTTCTTTGAACAGATGGCAACTATTTTAAAAAACAATGGTTCTCAATTCCTCAGAGGAACAGCTACAACCCTCCTAATTTCTATGGTAGGAACAATCGTCGGATTATTTATCGGCCTTCTCATCGGTGTTTTCCGTACAGCACCAAAATCTGACAATAAGTTAAAGGCTGCCTTACAAAAATTATTAGGTTGGTTACTTAACATCTATATTGAGGTCTTCCGCGGGACACCTATGATTGTACAATCGATGGTTATCTACTACGGAACAGCACAAGCTTTTGGAGTTTCGCTGGACCGTACACTAGCAGCTATATTTATTGTTTCAATCAATACTGGTGCTTATATGAGCGAAATTGTACGTGGTGGTATTTTCTCTGTTGATAAAGGACAATTTGAAGCCGCAACTGCACTTGGTTTCACCCACGGACAAACCATGCGAAAAATTGTTCTACCACAAGTTGTACGTAACATACTCCCAGCTACTGGTAATGAGTTTGTTATCAATATCAAAGATACCTCTGTACTGAACGTTATCTCTGTTGTCGAACTCTACTTCTCTGGTAATACTGTTGCAACACAAACCTACCAATATTTCCAAACATTCACCATTATTGCGATTATTTACTTCATCTTAACCTTCACCGTAACACGTATCTTACGTTACATTGAAAAACGTTTTGATTCAGATAATTACACAACCGGTGCGAATCAATTACAAGTC

SEQ ID NO: 9048 - protein, 516 aa, Streptococcus agalactiae; identical to SEQ ID NO: 288

SEQ ID NO: 9049 - protein, 1881 aa, Streptococcus agalactiae
ATGAAGAAATGTTTTTTGGCTATTTGTTTAGCTCTTAGTTTTTTTATGGTTTCAGTTCAAGCAGATGAGGTGGACTATAACATTCCTCATTATGAGGGTAATCTAACTATTCACAATGATAATAGTGCTGATTTTACAGAGAAGGTTACTTACCAATTTGATTCGTCCTATAATGGACAGTATGTCACATTAGGTACGGCGGGTAAGTTACCTGACAATTTTGATATTAATAATAAGCCACAGGTTGAAGTTTCAATTAATGGTAAAGTAAGGAAAGTTAGTTACCAGATAGAAGATTTGGAGGATGGCTACCGTTTGAAAGTGTTTAATGGTGGTGAAGCAGGTGATACTGTTAAAGTCAATGTTCAGTGGAAACTAAAAAATGTTCTATTTATGCATAAGGATGTTGGTGAACTTAACTGGATTCCTATTAGCGACTGGGATAAAACGTTAGAGAAAGTAGATTTTTGGATATCAACTGACAAAAAGGTTGCTCTTTCTCGTCTTTGGGGGCACTTGGGTTATCTTAAAACTCCTCCTAAAATAAGACAAAATAATAATCGTTACCATTTGACAGCTTTTAATGTAAACAAACGATTAGAATTTCATGGTTATTGGGATAGATCTTATTTTAATCTACCTACAAACAGTAAAAATAATTACAAGAAAAAAATTGAATATCAAGAGAAGATGATAGAGCGTCATGGTTTTATCCTAAGTTTCTTGTTAAGGATATTATTACCTTCATTCTTTATTATTGTGACACTATTCATCTCAATTAGGGTGTTCCTGTTTAGAAAAAAAGTTAATAAATACGGGCAATTCCCTAAGGAACATCATTTATATGAAGCACCTGAGGACCTTTCACCACTAGAGTTAACTCAAAGCATTTATAGTATGAGTTTTAAAAATTTTCAAGATGAGGAGAAGAAAACTCACCTTATCAGTCAAGAACAACTCATTCAGTCAATTCTATTAGACTTGATTGATAGAAAAGTATTGAATTATGATGATAACTTGTTATCTCTAGCTAACTTAGATAGAGCTTCTGATGCAGAAATAGATTTTATAGAGTTTGCTTTTGCGGATTCTACGAGTTTGAAGCCAGATCAACTCTTTTCTAATTACCAATTTAGTTATAAAGAAACACTACGTGAACTGAAAAAGCAGCACAAGGCTTCAGATCTGCAAACTCAAATGAGACGCCGAGGAAGTAATGCCTTATCAAGAATTACGCGTCTCACAAGGTTGATTTCTAAAGACAATATAAACTCTCTTAGAAGAAAGGGAATTTCATCCCCTTATCGTAAAATGTCTTCAGAAGAGTCTAAAGAATTATCTAGGTTGAAAAGATTCAGTTACCTATCACCTCTTATTTCTTTTGTTGTTATAATTTATACGCTTTTTTTAAATTATTTTACCTATTTCTGTATCTATCTCTTATTGTTTGGTGTTATCCTGTTGTTGAATAAAATCATTTTTATGATGACAAGAAAAATAAGTAACGGTTATATTGTAACTGAAGATGGAGCAAGTCGTGTCTACCAATGGACTAGTTTTAGGAACATGCTAAGGGATATCAAATCGTTTGATCGTTCAGAGTTAGAAAGTATCGTATTATGGAATCGAATATTGGTTTACGCTACTTTATTCGGCTACGCTGACCGTGTTGAGAAAGTACTCAGAGTGAACCAAATAGATATTCCAGAAAGATTTGCAAACATTGATAGTCATCAATTTGCGATTTCAGTCAATCAATCTAGTAATCATTTTTCAACGATAACTGAAGATGTTAGTCACGCTTCTAATTTTAGTGTTAATTCAGGCGGTTCTTCAGGTGGTTTCTCAGGCGGCGGAGGCGGCGGAGGTGGTGGTGCCTTC

SEQ ID NO: 9050 - protein, 627 aa, Streptococcus agalactiae
MKKCFLAICLALSFFMVSVQADEVDYNIPHYEGNLTIHNDNSADFTEKVTYQFDSSYNGQYVTLGTAGKLPDNFDINNKPQVEVSINGKVRKVSYQIEDLEDGYRLKVFNGGEAGDTVKVNVQWKLKNVLFMHKDVGELNWIPISDWDKTLEKVDFWISTDKKVALSRLWGHLGYLKTPPKIRQNNNRYHLTAFNVNKRLEFHGYWDRSYFNLPTNSKNNYKKKIEYQEKMIERHGFILSFLLRILLPSFFIIVTLFISIRVFLFRKKVNKYGQFPKEHHLYEAPEDLSPLELTQSIYSMSFKNFQDEEKKTHLISQEQLIQSILLDLIDRKVLNYDDNLLSLANLDRASDAEIDFIEFAFADSTSLKPDQLFSNYQFSYKETLRELKKQHKASDLQTQMRRRGSNALSRITRLTRLISKDNINSLRRKGISSPYRKMSSEESKELSRLKRFSYLSPLISFVVIIYTLFLNYFTYFCIYLLLFGVILLLNKIIFMMTRKISNGYIVTEDGASRVYQWTSFRNMLRDIKSFDRSELESIVLWNRILVYATLFGYADRVEKVLRVNQIDIPERFANIDSHQFAISVNQSSNHFSTITEDVSHASNFSVNSGGSSGGFSGGGGGGGGGAF

SEQ ID NO: 9051 - protein, 837 aa, Streptococcus agalactiae
ATGTTAATAATTGAATTACTCAAAGCCCTATTTTTAGGAGTCGTTGAGGGAGTGACAGAATGGTTACCTGTTTCTAGTACTGGCCATTTAATCTTGGTTCAAGAGTTTATGAAGTTGAACCAAAGCAAATCCTTTGTTGAAATGTTTAATATTGTTATACAACTTGGGGCAATTATGGCAGTTATTGTCATTTATTTTAAACGCCTTAACCCATTTCAGCCAGGTAAATCTGCTAGAGAAATTCGTTTAACTTGGCAATTATGGTTAAAAGTAGTGATAGCTTGTATTCCATCTATTTTAATTGCTTTACCATTTGATAATTGGTTTGAAGCTCATTTTAATTTCATGATCCCGATTGCAATAGCCCTAATCTTTTATGGTTTTGTCTTCATATGGGTTGAAAAACGTAATGCACACCTCAAACCACAGGTAACCGAATTGGCAAGTATGTCTTACAAGACAGCTTTCTTGATTGGATGCTTCCAGGTTCTCAGTATTGTTCCGGGAACCAGTCGTTCTGGAGCTACTATTTTAGGAGCAATTATTATTGGAACTAGTCGTTCGGTCGCTGCTGACTTTACTTTCTTCCTTGCCATCCCAACTATGTTTGGTTATAGTGGACTTAAGGCGGTTAAATACTTTTTAGATGGTAACGTCTTGAGTTTAGACCAATCTTTAATACTTTTAGTAGCAAGTCTGACAGCTTTCGTAGTTAGTTTATATGTTATTCGTTTCTTGACAGACTATGTCAAACGACACGATTTCACCATCTTTGGTAAGTATCGTATAGTCTTAGGAAGTTTACTCATCCTCTACTGGTTAGTTGTTCATTTATTC

SEQ ID NO: 9052 - protein, 279 aa, Streptococcus agalactiae; identical to SEQ ID NO: 292

SEQ ID NO: 9053 - protein, 681 aa, Streptococcus agalactiae
ATGGAGCTGAAAGATTTCCTAATCCCTCAGGAGAAGACTGAGGAATTTTTCTATTCTGTCATGGATGAATTAGACTTGCCAGAAAACTTTAAAAATAGTGGTATGTTAAGTTTTCGAGTAACACCTAAAAAAGATCGCATTGATGTTTTTGTTACAAAGTCTGAATTAAGTAAAGATTTAAATTTAGAAGAATTAGCAGATTTGGGTGACATTTCAAAAATGTCTCCAGAAGACTTTTTTAAAACATTGGAACAATCGATGTTGGAAAAAGGGGATACGGATGCCCATGCCAAATTAGCAGAAATTGAAAATATGATGGATAAAGCAACTCAAGAAGTAGTTGAGGAAAATGTTTCTGAAGAACAACCTGAAAAGGAAGTAGAAACGATTGGATATGTTCACTATGTCTTTGATTTTGATAATATTGAAGCTGTAGTTCGATTTTCACAAACGATTGATTTTCCAATAGAAGCTTCTGAACTCTATAAAAATGGTAAAGGCTATCATATGACAATTTTGCTAGACTTGGAAAACCAACCAAGCTACTTTGCTAATTTGATGTATGCTCGAATGCTTGAACATGCTAATGTGGGCACAAAAACACGAGCTTACTTGAAAGAGCATAGTATTCAATTGATTCATGATGATGCTATTTCAAAATTACAAATGATTGAGATGGGA

SEQ ID NO: 9054 - protein, 227 aa, Streptococcus agalactiae; identical to SEQ ID NO: 4614

SEQ ID NO: 9055 - protein, 1158 aa, Streptococcus agalactiae
ATGATACCTTTTACAATTGAGTATATTTTTGTATTGATTGGAGCATTTTTATTATCAATCATTCTAACTCCTATTATTCGAGTTATATCTTTGAAGGTAGGAGCGGTTGATAAACCGAACGCTCGAAGAATCAACAAAGTACCAATGCCAAGTAGTGGTGGTTTAGCAATATTTCTCTCCTTTGTTGTAACAACATTATTTTTCATGCCAATGGCGGCCAGTAGACACTTTATAGAAGTCTCTTATTTTCACTACATTTTGCCTGTAATTATTGGCGGTCTCGTAGTTACAACAACAGGATTCATAGATGACATCTTTGAATTAAGACCTCGTTATAAAATGTTGGGAATTATTATTGCAGCTATTATCATATGGAAATTTACACATTTTAGATTTGATAGTTTTAAGATTCCAATAGGTGGTCCACTCTTGGAGTTTGGTCCTATTTTAACTTTCTTTTTGACAGTTTTATGGATTATTTCAATCACTAATGCTATCAATCTGATTGATGGTCTAGATGGTCTAGTTAGTGGTGTTTCAATTATCAGTCTAGCAACGATGGCAGTGGTTTCTTATTTCTTTTTACCTAAAATAGATTTTTTTCTCACGCTAACTATTGTTATTTTAATCGCCTCAATAGTTGGTTTTTTCCCTTATAATTATCATCCAGCCATTATCTACCTAGGTGATGCTGGTGCCTTGTTTATAGGATTTATGATTGGTGTATTATCGCTTCAAGGTTTAAAAAACTCCACAGCTGTTGCAGTGATAACACCTGTCATTATTTTAGGAGTTCCTATTTTGGATACAGCTGTTGCTATTGTGAGGCGTAAATTATCAGGGAAAAAGATTTCTGAAGCTGATAAGATGCACCTGCATCACCGATTGCTATCTATGGGATTTACACATAGAGGAGCAGTTTTAGTTGTTTATGGTATTGCAATTATCTTTTCGCTTATCGCTTTGCTTTTAAATGTTTCTAGTCGTATTGGGGGAATTTTTCTTCTATTGGCGCTACTATTAGCGATGGAAATTTTTATAGAAGGTTTAAATATTTGGGGTGAGAATCGGACACCACTATTTAATCTCTTAAAGTTCATTGGCAACAGTGATTACAGACAAAGTGTTATTGCTAAATATAGCGATAAGCATCAAAAA

SEQ ID NO: 9056 - protein, 386 aa, Streptococcus agalactiae
MIPFTIEYIFVLIGAFLLSIILTPIIRVISLKVGAVDKPNARRINKVPMPSSGGLAIFLSFVVTTLFFMPMAASRHFIEVSYFHYILPVIIGGLVVTTTGFIDDIFELRPRYKMLGIIIAAIIIWKFTHFRFDSFKIPIGGPLLEFGPILTFFLTVLWIISITNAINLIDGLDGLVSGVSIISLATMAVVSYFFLPKIDFFLTLTIVILIASIVGFFPYNYHPAIIYLGDAGALFIGFMIGVLSLQGLKNSTAVAVITPVIILGVPILDTAVAIVRRKLSGKKISEADKMHLHHRLLSMGFTHRGAVLVVYGIAIIFSLIALLLNVSSRIGGIFLLLALLLAMEIFIEGLNIWGENRTPLFNLLKFIGNSDYRQSVIAKYSDKHQK

SEQ ID NO: 9057 - protein, 768 aa, Streptococcus agalactiae; identical to SEQ ID NO: 4617

SEQ ID NO: 9058 - protein, 256 aa, Streptococcus agalactiae; identical to SEQ ID NO: 300

SEQ ID NO: 9059 - protein, 1260 aa, Streptococcus agalactiae
ATGTCTAAAGAAGCTATATTAAATTTTTTACAAGCCAAAGGTGAGCCTACTTGGTTACAAGAATTACGACTAAAGGCTTTTGAAAAAATAGAAGAACTAGAATTACCAGTAATTGAACGTGTAAAATTTCATAGATGGAATTTAGGTGATGGAACCATTTTAGAGAATGACTATACAGCTAACGTTCCAGATTTCACAGAGTTAGGAAACAATCCCAAGTTGGTTCAAATTGGGACCCAAACCGTCCTTGAACAAGTTCCTATGGAATTAATAGAGAAAGGCGTTGTCTTTACAGATTTCTATTCGGCCTTGGAAGAAATTCCAGAAGTCATAGAGCGCTACTTTGGGAAAGCACGTCCTTTTGAAGAAGATAGACTTGCTGCCTATCACACAGCTTACTTCAACAGTGGTGCAGTGCTTTATATTCCAGATAATGTTGAAATTACTCAACCAATCGAAGGTCTTTTTTATCAAGATAGTCAGTCTAAAGTACCATTTAATAAGCATATCCTTCTTATTGTTGGAAAGAATGCAAAAGTTAGTTACTTAGAGCGATTTGAGTCAATTGGTGATGGGACAGAACGAACAAGTGCTAATATTTCTGTAGAAGTAATTGCCCAAGCAGGTAGCCAAATTAAATTTGCTTCAATTGATCGCCTCGGAGAAAATGTGACAACGTTTATAAGTCGTCGTGGTCGTCACAGTAGCGATGCAACAATAGATTGGGCCCTTGGGGTGATGAATGAAGGCAATGTTGTTGCTGACTTTGATTCTGATTTAATTGGTGATGGAAGTCACGCTAATTTAAAAGTAGTTGCTGCCTCGTCAGGGCGTCAAGTTCAAGGAATTGATACGCGTGTTACAAACTACGGCTGTAATTCAGTAGGACATATTTTACAGCATGGGGTTATTTTAGAGCGTGGGACTCTTACTTTTAATGGTATCGGACATATTATAAAAGGTGCAAAGGGAGCAGACGCCCAACAAGAAAGCCGAGTTCTCATGTTATCAGACAAAGCACGTTCAGATGCTAATCCTATCCTTTTGATTGATGAAAATGATGTTACAGCTGGTCACGCAGCCTCAATTGGTCAGGTTGACCCAGAGGATTTATATTATTTGATGAGCCGAGGCTTGAACCAAAAAACAGCAGAGCAATTAGTTATTCGTGGATTTTTAGGAACAGTCATTGCTGAAATACCAGTAAAAGAAGTTCGCGATGAAATGATTGCCGTTATTGATACAAAACTAGAAAAACGT

SEQ ID NO: 9060 - protein, 420 aa, Streptococcus agalactiae; identical to SEQ ID NO: 302

SEQ ID NO: 9061 - protein, 1229 aa, Streptococcus agalactiae
ATGACATTACTAGATAGTTATAAACTAAAGCAAGATTTCCCAATTTTAAATCAATTAGTTAATGATGAGCCGCTTATCTATTTAGATAATGCAGCAACGACACAAAAACCGAATCAAGTTTTAGAAGCTTTGCGAGACTACTACCAAAACGACAATGCAAATGTCCATCGTGGTGTTCATACTTTAGCAGAACGAGCGACTGCTCAGTACGAGAATGCTCGTGAAAAAGCAAGGCAGTTTTTAAATGCTAAATTAAGTAAAGAAATTTTATTCACACGTGGCACCACAACAGGATTAAATTGGGTAGCTAAGTTTGCCGAAAGTATTTTAGAACGAGGTGATGAGGTACTTATTTCCATTATGGAGCATCATTCTAATATATCCCATGGCAACAAGCTTGCGAGAGAACTGGCGCTAAATTGGTTTATGCCTATCTAAAAGATGGTTCTTTAGATTTAGAAGATTTCTATAATAAATTATCCTCTAAAACTAAATTTGTTAGTTTGGCACATATCTCAAATGTACTTGGCTGTGTTACACCAGTAAAAGCAATAGCAGAACGTGTGCATCAAGTTGGGGCATACATGGTTGTTGATGGAGCTCAATCAGCGCCACATATGGCGATTGATGTTCAAGACCTTGATTGTGATTTCTTCGCCTTATCTGGCCATAAGATGCTTGGTCCTACTGGTATCGGTGTTCTTTATGGGAAAGAAAGCATTTTAGATAAGATGCCACCTGTCGAATTTGGTGGTGAAATGATTGATTTTGTCTATGAGCAAAGTGCAACATGGAAGGAATTGCCCTGGAAGTTTGAAGCTGGAACGCCTAATATTGCTGGAGCGATCGCTTTTGGAGAAGCTTTAGATTATTTAACGGATGTTGGTATGGATGAGATTCATCAATATGAACAAAGTTTAGTTTCTTATGTGTTGCCTAAATTACAGGCTATCGATGGTTTAACTATTTACGGACCTAGTGATGCTGAATCTCATGTAGGCGTTATTGCCTTCAATTTAGAAGGTTTACACCCACATGATGTGGCAACTGCAATGGATTACGAAGGAGTGGCTGTTCGTGCAGGTCATCATTGTGCACAACCCCTTATTAATCATCTTGGTATCCATTCGGCGGTTCGAGCAAGTTTCTATTTCTATAATACCAAAGAGGATTGCGACAAATTGGTAGACGCTATCCAAAAAACTAAGGAGTTTTTCAATGGCACTCTC

SEQ ID NO: 9062 - protein, 410 aa, Streptococcus agalactiae; identical to SEQ ID NO: 304

SEQ ID NO: 9063 - protein, 441 aa, Streptococcus agalactiae
ATGGCACTCTCTAAATTAGATAATCTCTACATGGCAGTGGTAGCTGATCATTCAAAACACCCTCATCATCATGGATTTTTAGAAGGCGTTGAACAAGTGCAGTTAAATAATCCTACATGTGGAGATGTTATTTCCTTATCTGTTAAATTTGATGGAAATATTATTTCAGATATTGCATTTGCTGGTAATGGTTGTACAATTTCTACGGCTTCATCAAGCATGATGACAGATGCAGTTATTGGGAAAACAAAAGAAGAAGCATTGCAGCTTGCTGATGTATTCTCCAAAATGGTTCAAGGCGATCAAAATCCAAAACAAGAGAAACTTGGGGATGCAGAGTTTCTAGCTGGGGTATCAAAATTTCCACAACGTATCAAATGTGCTACGCTTTCGTGGAATGCTTTAAGAAAGGCTATTGAGAGAGATAATCAGGCAGAACTC

SEQ ID NO: 9064 - protein, 147 aa, Streptococcus agalactiae; identical to SEQ ID NO: 306

SEQ ID NO: 9065 - protein, 1416 aa, Streptococcus agalactiae
ATGTCCGAAATAAATGAAAAAGTAGAACCACAGCCAATAGATCTTGGGGAATATAAATTTGGATTTCATGACGATGTAAAGCCAATTTATTCTACGGGAAAAGGTCTAAATGAGGCTGTTATTCGTGAGTTATCTGCAGCTAAGGGTGAACCTGAGTGGATGTTGGACTTTCGTCTAAAATCCTTGGAAACGTTTAATAAAATGCCAATGCAGACCTGGGGAGCAGATTTATCAGATATTGATTTTGATGATATTATTTATTATCAAAAAGCATCTGATAAACCTGCGCGTGATTGGGATGATGTTCCAGAAAAAATCAAAGAAACTTTTGAAAGAATTGGGATTCCAGAAGCTGAAAGAGCTTATCTTGCAGGAGCATCAGCACAATATGAATCAGAAGTGGTTTATCATAATATGAAAGAAGAATATGATAAGCTGGGTATTGTTTTTACGGATACTGACTCTGCACTTAAAGAGTACCCAGAGCTATTCAAAAAATATTTTGCTAAACTTGTCCCTCCAACAGATAATAAATTAGCTGCTCTGAACTCTGCTGTATGGTCAGGTGGAACATTTATTTATGTCCCTAAAGGTGTTAAGGTGGATATTCCACTTCAAACTTACTTCCGTATTAATAATGAAAATACTGGACAATTTGAACGTACTCTCATTATTGTCGATGAGGGAGCAAGTGTTCACTATGTTGAAGGTTGTACCGCCCCAACTTATTCTTCAAATAGTTTACATGCAGCTATAGTTGAAATTTTTGCACTTGATGGAGCTTATATGCGCTATACGACTATTCAAAATTGGTCCGATAATGTCTATAATTTAGTGACAAAACGTGCTACCGCTAAAAAAGATGCAACAGTTGAGTGGATAGATGGAAATCTAGGTGCTAAAACAACAATGAAATACCCATCGGTTTACCTTGATGGTGAAGGAGCACGTGGCACGATGTTGTCTATTGCTTTTGCAAACAAAGGACAACACCAAGATACGGGTGCAAAGATGATTCATAATGCTCCCCATACTAGTTCATCCATTGTCTCTAAATCAATTGCTAAGGGTGGAGGAAAAGTTGATTATCGAGGTCAAGTGACATTTAATAAAGATTCCAAAAAATCAGTGTCACATATAGAATGTGACACCATATTGATGGATGATATTTCAAAATCAGATACCATACCGTTTAATGAGATTCATAATTCACAGGTTGCTTTAGAGCATGAAGCAAAGGTGTCTAAGATTTCTGAAGAGCAACTGTACTACTTGATGAGTCGAGGTTTATCTGAAGCTGAGGCAACAGAAATGATTGTTATGGGGTTTGTTGAGCCCTTTACGAAAGAATTACCAATGGAATATGCGGTAGAGTTAAACCGCTTAATTTCCTATGAAATGGAAGGTTCAGTTGGT

SEQ ID NO: 9066 - protein, 472 aa, Streptococcus agalactiae; identical to SEQ ID NO: 308

SEQ ID NO: 9067 - protein, 1179 aa, Streptococcus agalactiae
ATGCCTAAATTAATCGTATCTTTCCTCTGCATTTTATTATCCCTGACTTGTGTAAACTCTGTGCAAGCTGAAGAACATAAAGATATTATGCAAATTACCCGAGAAGCCGGATATGATGTTAAAGATATTAATAAACCTAAAGCGTCTATCGTTATTGACAATAAAGGTCATATTTTGTGGGAAGATAACGCTGATTTAGAACGTGATCCCGCTAGCATGTCTAAAATGTTTACTTTATATTTACTATTTGAAGACTTAGCTAAAGGAAAAACAAGCCTCAACACCACAGTGACTGCAACAGAAACAGACCAAGCCATAAGTAAGATTTATGAAATTAGTAATAATAATATTCATGCTGGGGTTGCTTATCCTATTCGTGAACTGATTACTATGACAGCTGTCCCGTCATCTAATGTAGCAACTATTATGATTGCTAACCACTTATCACAAAACAATCCTGACGCCTTCATTAAACGAATCAATGAAACCGCCAAGAAACTCGGTATGACAAAAACTCACTTTTATAACCCCAGTGGGGCGGTAGCGAGTGCTTTTAATGGACTTTACTCCCCAAAAGAATACGATAACAATGCTACTAACGTTACGACTGCACGTGATCTATCAATTTTAACCTATCATTTCCTTAAAAAATACCCTGATATACTGAACTATACAAAATATCCTGAAGTCAAGGCCATGGTCGGAACTCCTTATGAAGAAACATTTACAACTTATAACTACTCTACCCCCGGCGCTAAATTTGGATTAGAAGGAGTAGATGGCTTAAAAACTGGTTCTAGCCCTAGCGCTGCTTTTAATGCCTTAGTTACAGCTAAACGCCAGAATACTCGCTTGATAACTGTGGTTTTAGGAGTTGGTGATTGGTCAGACCAAGACGGAGAGTACTATCGTCATCCGTTTGTCAACGCTCTTGTAGAAAAAGGTTTTAAAGACGCTAAAAATATTTCTTCTAAAACTCCTGTATTAAAAGCCGTTAAACCTAAAAAAGAAGTTACTAAAACCAAATCTATTCAAGAACAGCCTCAAACAAAAGAACAGTGGTGGACAAAAACAGATCAATTTATTCAATCACATTTTGTATCTATTTTAATTGTTCTGGGCACCATCGCTATCCTTTGTCTTTTAGCTGGGATAGTATTACTTATAAAGCGCTCTAGA

SEQ ID NO: 9068 - protein, 393 aa, Streptococcus agalactiae
MPKLIVSFLCILLSLTCVNSVQAEEHKDIMQITREAGYDVKDINKPKASIVIDNKGHILWEDNADLERDPASMSKMFTLYLLFEDLAKGKTSLNTTVTATETDQAISKIYEISNNNIHAGVAYPIRELITMTAVPSSNVATIMIANHLSQNNPDAFIKRINETAKKLGMTKTHFYNPSGAVASAFNGLYSPKEYDNNATNVTTARDLSILTYHFLKKYPDILNYTKYPEVKAMVGTPYEETFTTYNYSTPGAKFGLEGVDGLKTGSSPSAAFNALVTAKRQNTRLITVVLGVGDWSDQDGEYYRHPFVNALVEKGFKDAKNISSKTPVLKAVKPKKEVTKTKSIQEQPQTKEQWWTKTDQFIQSHFVSILIVLGTIAILCLLAGIVLLIKRSR

SEQ ID NO: 9069 - protein, 1232 aa, Streptococcus agalactiae
TTGAAAAAAATTATTACTTCTATTCTATTACTTAGTTGCATTTTTTTTATGCCAACCATCTCTGCTGAATCTTTTAATGCTTCCGCTAAACATGCCTTGGCAGTTGATTTAGATTCAGGAAAAATCTTGTATGAAAAAGATGCTAACAAACCCGCTGCTATTGCTTCCTTGACTAAAATAATGACCGTTTATATGGTCTATAAAGAAATTGATAACGGTAACCTCAAGTGGAATACCAAAGTAAATATATCTGACTACCCTTATCAACTAACACGCGAATCTGATGCTAGTAATGTTCCTTTAGAAAAAAGGCGCTATACTGTTAAACAGCTCGTGGACGCTGCCATGATTTCTAGTGCTAACAGTGCAGCCATTGCTTTGGCTGAACATATTTCAGGAACCGAAAGTAAATTTGTTGATAAAATGACTGCTCAATTGGAAAAGTGGGGAATTCATGATAGCCACCTAGTCAATGCTTCTGGCTTAAATAATAGTATGTTAGGCAATCACATTTATCCAAAATCGTCACAAAACGACGAAAATAAAATGAGTGCACGTGATATTGCTATTGTTGCCTACCATTTGGTCAACGAATATCCTTCCATTCTTAAGATTACTAGTAAGTCCGTTGCTAATTTGATAAAGATATTATGCATTCTTATAACTACATGCTACCAGATATGCCTGTCTTTAGACCAGGTATTACAGGTTTGAAAACTGGGACAACGGAATTAGCTGGCCAATCTTTTATTGCTACATCTACTGAAAGTGGAATGAGACTACTCACTGTTATTATGCATGCTGATAAGGCCGATAAAGACAAATATGCTCGCTTTACAGCAACTAACTCTCTCTTGAACTATATCACAAACACCTACGAACCTAACCTTGTATTAGCTAAAGGAGCTGCATATAAAGGTAAAGAAGCAAGTGTGAGAGACGGAAAAGAACAATCGGTCATCGCTGTTGCTAAAAACGATTTGAAAGTAGTACAGAAGAGAAATATCACTAAACAAAATCAGTTAAAAATTAACTTTAAAAAAGAGCTTACTGCTCCTATTACAAAAAAAGAGAACCTAGGGAAAGCTTATTACGTTGACCTTAATAAGGTTGGAAAAGGCTATCTCATAAAGGAACCTAGCGTTCATTTAGTGGCAAAAGATAGTATTGAGCGCAGTTTCTTCCTCAAAGTGTGGTGGAATCATTTTGTGCGCTACGTTAACGAAAAACTT

SEQ ID NO: 9070 - protein, 411 aa, Streptococcus agalactiae
MKKIITSILLLSCIFFMPTISAESFNASAKHALAVDLDSGKILYEKDANKPAAIASLTKIMTVYMVYKEIDNGNLKWNTKVNISDYPYQLTRESDASNVPLEKRRYTVKQLVDAAMISSANSAAIALAEHISGTESKFVDKMTAQLEKWGIHDSHLVNASGLNNSMLGNHIYPKSSQNDENKMSARDIAIVAYHLVNEYPSILKITSKSVAKFDKDIMHSYNYMLPDMPVFRPGITGLKTGTTELAGQSFIATSTESGMRLLTVIMHADKADKDKYARFTATNSLLNYITNTYEPNLVLAKGAAYKGKEASVRDGKEQSVIAVAKNDLKVVQKRNITKQNQLKINFKKELTAPITKKENLGKAYYVDLNKVGKGYLIKEPSVHLVAKDSIERSFFLKVWWNHFVRYVNEKL

SEQ ID NO: 9071 - protein, 1652 aa, Streptococcus agalactiae
ATGGCAAAACAGAAAAATAACTGGCGCCGTGTTGGAGTTGGTGTCCTTACACTTGCTTCAGTTGCGACTCTTGCTGCATGTGGAAGTAAATCAGCTTCCCAGGATTCTAATGGAGCGATTAATTGGGCTATTCCAACAGAAATCAATACACTAGATTTATCTAAAGTCACAGACACTTACTCAAATCTAGCTATTGGTAACTCTAGTAGTAATTTCCTTCGCTTAGATAAAGATGGAAAGACAAGACCAGATTTGGCTACTAAAGTAGATGTTTCAAAAGATGGCTTAACTTATACAGCTACATTACGTAAAGGCTTGAAGTGGTCAGATGGCAGTAAACTTACTGCAAAGGATTTTGTTTATTCATGGCAACGTTTAGTTGATCCTAAAACAGCTTCACAATATGCTTACCTTGCTGTTGAAGGGCATGTGCTTAATGCCGATAAAATCAACGAAGGACAAGAGAAAGACTTGAATAAGCTAGGTGTTAAGGCGGAAGGCGATGACAAAGTTGTTATTACTTTATCTAGTCCGTCTCCACAATTTATCTACTACCTTGCATTCACTAACTTCATGCCACAAAAACAAGAAGTTGTTGAAAAATATGGAAAAGATTACGCAACTACTTCAAAAAATACAGTTTACTCAGGACCATATACTGTTGAAGGTTGGAATGGTTCGAATGGTACTTTCACGCTGAAGAAAAACAAAAATTATTGGGACGCTAAAAATGTAAAAACAAAAGAAGTTCGCATCCAGACTGTTAAAAAACCAGATACCGCCGTTCAAATGTATAAACGTGGTGAGTTAGATGCAGCTAATATCTCAAATACTTCTGCTATTTATCAAGCTAATAAGAATAATAAAGATGTCACAGATGTTCTAGAAGCGACCACTGCCTATATGGAATATAATACTACTGGTTCTGTGAAAGGGCTTGATAATGTTAAGATTCGTCGCGCCTTAAACTTAGCAACTAACCGTAAAGGAGTTGTTCAAGCAGCCGTTGATACAGGCTCAAAACCGGCAATTGCTTTTGCACCTACTGGTTTAGCCAAAACACCAGATGGAACTGATTTGGCAAAATATGTTGCCCCAGGTTATGAATATAATAAAACTGAAGCAGCAAAACTCTTTAAAGAAGGTTTGGCTGAATCAGGCTTGACTAAGCTAAAATTAACAATTACAGCAGATGCTGATGCTCCTGCTGCAAAAACTCTGTTGACTATATCAAGTCTACTTGGGAAGCTGCTCTTCCAGGACTTACTGTTGAAGAAAAATTTGTAACCTTTAAACAACGCTTAGAAGACAGTAGAAAACAAAACTTTGACATCGTAGTTTCTCTTTGGGGTGGGGATTATCCAGAAGGATCAACTTTCTACGGCCTCTTTAAGTCAGATTCACAAAATAACGATGGAAAATTTGCTAACAAGGACTATGATGCTGCTTATAACAAGGCAATTTCTGAAGATGCGATGAAACCAGCAGAATCAGCGAAGGACTATAAAGAAGCAGAGAAAATTTTATTTGAGCAAGGTGCTTATAACCCACTCTACTTCCGTAGTGGTAAAGGTTTACAAAATCCAAAATTAAAAGGTGTTATTCGTAATACTACAGGTTTGTCAATAGACTTTACACATGCTTATAAAAAA

SEQ ID NO: 9072 - protein, 551 aa, Streptococcus agalactiae
MAKQKNNWRRVGVGVLTLASVATLAACGSKSASQDSNGAINWAIPTEINTLDLSKVTDTYSNLAIGNSSSNFLRLDKDGKTRPDLATKVDVSKDGLTYTATLRKGLKWSDGSKLTAKDFVYSWQRLVDPKTASQYAYLAVEGHVLNADKINEGQEKDLNKLGVKAEGDDKVVITLSSPSPQFIYYLAFTNFMPQKQEVVEKYGKDYATTSKNTVYSGPYTVEGWNGSNGTFTLKKNKNYWDAKNVKTKEVRIQTVKKPDTAVQMYKRGELDAANISNTSAIYQANKNNKDVTDVLEATTAYMEYNTTGSVKGLDNVKIRRALNLATNRKGVVQAAVDTGSKPAIAFAPTGLAKTPDGTDLAKYVAPGYEYNKTEAAKLFKEGLAESGLTKLKLTITADADAPAAKNSVDYIKSTWEAALPGLTVEEKFVTFKQRLEDSRKQNFDIVVSLWGGDYPEGSTFYGLFKSDSQNNDGKFANKDYDAAYNKAISEDAMKPAESAKDYKEAEKILFEQGAYNPLYFRSGKGLQNPKLKGVIRNTTGLSIDFTHAYKK

SEQ ID NO: 9073 - protein, 912 aa, Streptococcus agalactiae
ATGATTAAATATATTTTAAAGCGTGTTGCTATTTTGTTAGTAACGCTATGGGTTGTCATAACCCTATCGTTCTTTCTGATGCAGATCCTTCCAGGAACACCCTACAATAATCCAAAACTCACTGAAGAAATGATCGCATTGCTTAATAAACAGTATGGTTTAGACAAGCCTGTATGGCAACAATATTTGACTTACCTTTGGAATGTACTTCATGGTGACTTTGGAACGAGTTATCAATCAGTGAATCAGCCAGTATCACGTATGATTAGCTTGAGATTAGGAGTTTCAGTACATCTAGGTGTTCAGGCTCTCGTATTTGGTGTTTTAGGCGGTATTTTGGTAGGAGCTATTTCGGCACGTCATAAGAATGATAAAGTCGATGGTATCTTAAGTGTTATTGCAACGCTAGGGATTTCTATGCCTTCATTTATCATTGGTATCTTATTATTAGACTATTTTGGATTTAAGTGGAACTTGTTGCCTTTATCAGGTTGGGGGACTTTCTCTCAAACCATTTTACCTTCTTTAGCTCTAGGACTCCCTACATTAGCATCTGTTTCACGCTTCTTCCGTAGTGAAATGATTGAAACTTTAAATTCTGATTATGTGCAACTAGCTCGTTCAAAAGGTATGACAATTCGTCAAGTAACTCGAAAACATGCTTACCGTAATTCTATGATTCCAATTTTAACTCTAATTGGCCCTTTGGCGGCGGGTCTGTTAACTGGTTCTGCACTAATTGAGCAGATTTTCTCGATTCCAGGAATTGGGCAGCAGTTTGTTACTTCGATTCCAACAAAAGACTATCCTGTTATTATGGGGACAACCATTGTTTATGCAGTAATGTTGATGGTTGCTATCTTGATAACAGACGTTGTTATTAGTATCGTAGACCCACGTGTTCGCTTGCAG

SEQ ID NO: 9074 - protein, 304 aa, Streptococcus agalactiae; identical to SEQ ID NO: 4634

SEQ ID NO: 9075 - protein, 1029 aa, Streptococcus agalactiae
ATGGCAGATAAAAACAGAACATTTAAACTTGTAGGTGCAGGATCTTCTAGCACACAAGAAAAAATTGAAAAGCCTGCTCTTTCGTTTATGCAAGATGCGTGGCGTCGCTTGAAAAAAAACAAATTAGCAGTAGTTTCACTCTATTTATTAGCTCTTTTACTTACTTTTTCGTTAGCCTCAAATTTATTTGTAACTCAGAAGGATGCTAATGGGTTTGATTCGAAAAAAGTAACTACATATCGCAACTTACCACCTAAATTGAGTTCAAACCTTCCTTTTTGGAATGGTAGCATTAAGTACGCTGGAAATACAGAATCTACAGACGCTTATAAGTCTCAAAATGTCCCTGAAAAAGTTAAGTATGCTTTAGGTACAGATTCTCTAGGGAGAAGTGTTGCTAAGCGCATCATCGTAGGTATTCGGATTTCCTTACTTGTAGCTATTGCAGCTACATTCATTGATTTAATTATCGGTGTTACATACGGTCTTGTTTCAGGTTTTGCTGGAGGACGCCTTGATACATTAATGCAACGTATCGTAGAGGTAATTTCATCAATTCCAAACTTAGTTATCGTTACAATGTTAGGTTTGGTCCTTGGTAACGGTATTACGGCTATTATTATCTCTATTGCTTTTACCGGATGGACTTCTATGTCTCGTCAGGTAAGGAATTTAACCCTATCATATCGAGAAAGAGAGTTTGTGCTTGCTGCACGTTCACTTGGGGAAAGTCCAATTAAAATAGCCTTCAAACATATTTTACCTAACATTTCTGGTATTATCATTGTACAAATTATGATGACAATCCCAAGTGCTATTATGTATGAAGCGGTACTTTCAGCAATCAATTTAGGTGTTAAACCACCGACAGCTTCATTAGGATCATTGATTTCAGATGCACAAGAAAATTTACAATATTATCCATATCAAGTTATCTTGCCAGCTTTAGCATTGGTAATGATTTCATTGGCATTTATTTTGCTTGGTGATGGGTTGCGAGATGCTTTTGATCCAAAATCTAGCGATGAA

SEQ ID NO: 9076 - protein, 343 aa, Streptococcus agalactiae; identical to SEQ ID NO: 4636

SEQ ID NO: 9077 - protein, 1043 aa, Streptococcus agalactiae
ATGGAAAAAGAAACTATTTTAAGTGTTAATAATCTTCATGTTGACTTCCACACATATGCTGGAGAAGTAAAAGCAATTCGTGATGTCAACTTTGAATTAAAAAAAGGTGAGACTCTTGCAATCGTTGGTGAATCTGGTTCAGGAAAATCTGTAACTACCAGAACTTTAATTGGTTTAAATGCTAAAAATTCAGAGATATCAGGGAATGTTCAATTTAAGGGGCGTAACCTTGTTGAACTATCAGAAGAAGAGTGGACTAAGGTACGCGGGAATGAGATTTCTATGATTTTCCAAGACCCTATGACTAGTTTGGATCCAACGATGAAAATTGGCATGCAAATAGCAGAACCAATGATGATTCATCAAAAAATTTCAAAAAAGGATGCTTTAAAATTAGCTCTTGAGCTAATGAAAGATGTAGGTATCCCAAATGCTGAAGAGCATATTAATGATTACCCACATCAGTGGTCTGGAGGAATGCGCCAACGTGCGGTTATAGCGATTGCTTTAGCTGCTGATCCTGAAATTCTTATTGCTGATGAACCAACGACTGCTTTAGATGTAACAATTCAAGCACAAATTTTGAACTTAATGAAAAAAATTCAAGCAGAACGAGACTCCTCCATTGTTTTCATAACTCATGACTTAGGGGTCGTTGCAGGGATGGCAGACCGTGTAGCAGTTATGTATGCAGGGAAAATTGTTGAATTTGGAACTGTTGATGAAGTCTTTTATAATCCACAACATCCATATACTTGGGGATTATTGAATTCAATGCCGACAACCGACACAGAATCAGGTAGTTTAGAGTCAATTCCGGGAACACCACCAGATTTGTTGAACCCACCTAAAGGAGATGCATTTGCAGCTCGTAATGAATTTGCATTAGATATTGATCATGAAGAAGAACCACCGTACTTCAAAGTTTCAGAAACACATTTCGCTGCTACATGGCTTTTAGATGAAAGATCACCTAAGGTGCTTCCTCCATTACCGATCCAAAAACGTTGGGAAAAATGGAACGAGATGAAGGGAGGAAAGCC

SEQ ID NO: 9078 - protein, 348 aa, Streptococcus agalactiae; identical to SEQ ID NO: 320

SEQ ID NO: 9079 - protein, 930 aa, Streptococcus agalactiae
ATGACTGAAAATCGAAAAAAATTAGTTGAAGTCAAAAATGTTTCTTTGACCTTCAATAAAGGAAAAGCTAATGAAGTGAGAGCAATTGATAATGTTAGTTTTGACATTTATGAAGGTGAAGTGTTTGGATTAGTTGGGGAATCTGGATCAGGAAAGACAACCGTTGGACGTTCAATTTTAAAACTTTATGATATTTCTGATGGAGAAATTACCTTTAATGGAGAAGTGATCTCACATCTGAAAGGTAAAGCATTACATAGTTTTCGTAAAGACGCTCAGATGATTTTTCAGGATCCTCAGGCTAGCTTAAACGGCCGTATGAAGATTCGTGATATCGTAGCAGAAGGTTTAGATATACATAAATTAGCTAAATCAAAATCAGATCGTGATAGTAAAGTTCAGGCCCTATTAGATCTTGTAGGGTTAAATAAAGATCATTTAACACGTTATCCGCATGAATTTTCAGGTGGACAACGACAACGTATCGGGATTGCACGTGCTTTAGCAGTAGAGCCTAAATTTATCATTGCTGATGAACCAATATCTGCCTTAGATGTTTCAATCCAAGCACAAGTTGTTAATTTAATGCAAAAATTGCAAAGAGAACAAGGATTGACTTATTTGTTTATCGCACATGATTTGTCTATGGTAAAATACATTTCAGATCGTATCGGTGTTATGCATTGGGGGAAACTGTTAGAAGTTGGAACATCTGATGATGTTTATAACAATCCAATCCACCCTTATACGAAGAGTCTATTATCAGCTATTCCAGAACCAGATCCGGAGAGTGAACGTCAACGTGTTCACCAGCCGTATAATCCAGCTATTGAGCAAGACGGACAAGAACGTCAAATGCACGAGATTACCCCTGGTCATTTTGTTTTATCTACACCCCAAGAAGCTGAAGAATATAAAAAACAAATATTA

SEQ ID NO: 9080 - protein, 310 aa, Streptococcus agalactiae; identical to SEQ ID NO: 322

SEQ ID NO: 9081 - protein, 717 aa, Streptococcus agalactiae
ATGAAAATTTTTGAGAAAGCTCCTGCCAAACTTAATTTAGGATTAGATATTAAAGGACGATGTGACGATGGTTATCATGAATTAGCTATGATTATGGTTAGTATTGATCTTAATGACTACGTTACCATTTCTGAGCTAAAGGAAGATTGTATTGTTATCGATTCTGATAGTAGCAAAATGCCTTTAAATAATGATAATGATGTGTTTAAAGCTGCAGATATAATCAAAAATCAATATGGTATTAATAAAGGTGTTCATATTAGATTAGAAAAATCCATTCCTGTCTGTGCAGGACTGGGGGGTGGTTCTACTGATGCTGCTGCTACAATAAGAGCTCTTAATCGATTATGGAATCTTCAAATGGACTATGACGAAATGGTTGCTATTGGTTTTAAAATTGGTAGTGATGTTCCTTATTGTCTTGGTGGGGGATGTTCGTTAGTATTAGGTAAAGGTGAAATTGTTAAACCCTTACCGACATTGAGACCATGTTGGATAGTTCTGGTTAAGCCGGATTTTGGTATTTCAACTAAATCCATTTTTAGAGATATTGATTGTAAGTCTATAAGTAGAGTTGATATTGATTTATTAAAGTCTGCTATTTTGTCATCAGATTATCAGTTAATGGTCAAATCTATGGGAAATTCACTCGAGGATATTACAATTACTAAAAATCCAGTTATAAGTACAATAAAAGAACGTATGTTAAATNNNNNT

SEQ ID NO: 9082 - protein, 239 aa, Streptococcus agalactiae
  VARIANT 238, 239: Xaa = Any Amino Acid
MKIFEKAPAKLNLGLDIKGRCDDGYHELAMIMVSIDLNDYVTISELKEDCIVIDSDSSKMPLNNDNDVFKAADIIKNQYGINKGVHIRLEKSIPVCAGLGGGSTDAAATIRALNRLWNLQMDYDEMVAIGFKIGSDVPYCLGGGCSLVLGKGEIVKPLPTLRPCWIVLVKPDFGISTKSIFRDIDCKSISRVDIDLLKSAILSSDYQLMVKSMGNSLEDITITKNPVISTIKERMLNXX

SEQ ID NO: 9083 - protein, 180 aa, Streptococcus agalactiae
TTGAAATCAGCGACAGGTCAAAAACGTGTGAAAGCAGATCGTCGACTGGATGTGTTAGATGCCTTTAAAAAATCTGGAAATAAACCAGAATGGATGGTTCTTAACATTTTACCGGTTATCCCACCGGATCTTCGACCGATGGTTCAATTAGATGGAGGTCGTTTTGNNNNNTTAATTAAT

SEQ ID NO: 9084 - protein, 60 aa, Streptococcus agalactiae
  VARIANT 56, 57: Xaa = Any Amino Acid
MKSATGQKRVKADRRLDVLDAFKKSGNKPEWMVLNILPVIPPDLRPMVQLDGGRFXXLIN

SEQ ID NO: 9085 - protein, 741 aa, Streptococcus agalactiae
ATGGTTTTAGGAAATTACTACCTGACTATGGAAGATGCTGGTCGTGAAGGTGAAGGCATGATTTTCAAAGATCATGACGAAGCAGTTATGGCATATCAAAATGGTTATGTTCATTTACATACACGTGTTGGTATCGCTGTTGATTCAATGCCGAATAAGCCTTGGACAGAAGAGCAAAAACATAAAATCATGGTTACAACAGTTGGTAAGATTCTCTTCAACGATATCATGCCTGAAGATTTACCGTACTTAATTGAACCTAATAATGCAAACTTGACAGAAAAAACTCCAGATAAATACTTCTTAGAGCCAGGTCAGGATATTCAAGCAGTTATTGATAACTTAGAGATTAATATTCCCTTTAAGAAGAAAAATCTTGGTAATATTATCGCAGAAACTTTTAAACGTTTCCGTACAACAGAAATAACAAAGATATTGTTATTTCTGGTGGAATCCCTGCGACAAGCCGTCCTGTCCTTATGGGTATTACTAAGGCTTCCCTTGAAACTAATTCATTCTTATCAGCTGCATCCTTCCAAGAAACAACACGTGTCCTTACAGATGCTGCTATCCGTGGTAAGAAAGATCACTTACTTGGTCTTAAAGAAAATGTTATTATCGGTAAAATCATTCCAGCGGGTACTGGTATGGCTCGTTACCGTAATATTGAACCACTTGCTGTTTATGAAAGTGAGATTATTGAAGGAACTCCTGTTGATGCAGAAGTNNNNNTTAATTAAT

SEQ ID NO: 9086 - protein, 247 aa, Streptococcus agalactiae
  VARIANT 243, 244: Xaa = Any Amino Acid
MVLGNYYLTMEDAGREGEGMIFKDHDEAVMAYQNGYVHLHTRVGIAVDSMPNKPWTEEQKHKIMVTTVGKILFNDIMPEDLPYLIEPNNANLTEKTPDKYFLEPGQDIQAVIDNLEINIPFKKKNLGNIIAETFKRFRTTEITKILLFLVESLRQAVLSLWVLLRLPLKLIHSYQLHPSKKQHVSLQMLLSVVRKITYLVLKKMLLSVKSFQRVLVWLVTVILNHLLFMKVRLLKELLLMQKXXLIN

SEQ ID NO: 9087 - protein, 441 aa, Streptococcus agalactiae
ATGACAGTTTTAGAACAAAAATTAGACCATTTAGTGAGTCAAATCTTGCTTAAAGCAGAAAATCAACATGAATTATTGTTTGGTACTTGTCAAAGTGATGTTAAATTGACTAATACGCAAGAACACATTCTGATGCTTTTATCACAAGAGCAGTTGACAAATTCTGATTTAGCTAAGAAGTTAAATATTAGTCAGGCAGCTGTAACTAAAGCAGTAAAAAGTTTAATTTCTCAGGATATGTTGAAAGCGAATAAAGATTCTAAAGATGCTCGTATTACTTATTTTGAGTTATCTGAACTTGCTAAACCCATTGCAGATGAACACACACATCATCATGACAATACGTTAGGGGTTTACGGAAGATTAGTAAATCATTTTTCAAAGGACGAAAAGGTCGTTTTAGAACGTTTTCTTGATCTTTTCTCTAGAGAATTAGAAGGG

SEQ ID NO: 9088 - protein, 147 aa, Streptococcus agalactiae; identical to SEQ ID NO: 326

SEQ ID NO: 9089 - protein, 708 aa, Streptococcus agalactiae
ATGCGATATATTACAGTTAGTGGTCTTACTTTTCAGTACGATAGCGATCCTGTGCTGGAAGGGGTTAATTACCATTTAGACAGTGGGGAGTTTGTTACCTTAACAGGTGAAAATGGGGCTGCTAAATCAACTTTAATAAAGGCTACTTTAGGTATTTTAACGCCCAAAGTGGGTACAGTTAATATCTCTAAAGAAAACAAAGAAGGAAAAAAATTACGTATTGCCTATTTACCTCAACAGATTGCAAGTTTTAACGCTGGCTTTCCATCGTCAGTTTATGAATTTGTGAAATCTGGACGATACCCTAGAAATGGTTGGTTTAGAAGACTGACTAAACATGATGAAGAACATATTAGGGTTAGTTTAGAAGCTGTTGGTATGTGGGATAATCGCCATAAAAAGATAGGAAGTTTATCTGGCGGTCAAAAGCAGAGGGCTGTCATTGCTAGGATGTTTGCTTCTGATCCAGATATTTTTGTATTGGATGAGCCAACAACTGGTATGGACGCAGGGACTACTGAGAAATTTTATGAGTTAATGCATCATAATGCTCATAAGCATGGTAAGTCTGTTTTGATGATTACTCACGATCCTGATGAAGTAAAGGGGTATGCTGACCGAAATATTCATCTTGTTAGGAACCAATCTTTACCATGGCGTTGTTTCAATGTCCATACAAACGAAATGGAGGTTGAATCAGATGCTACT

SEQ ID NO: 9090 - protein, 236 aa, Streptococcus agalactiae; identical to SEQ ID NO: 328

SEQ ID NO: 9091 - protein, 810 aa, Streptococcus agalactiae
ATGCTACTTGATATGCTTTCCTATGATTTTATGCAACGAGCGCTCTTAGCAGTTGTGGCTATTAGTATTTTTGCTCCAATTTTAGGCATCTTCCTAATTTTACGTCGTCAGAGTTTGATGAGTGATACTTTGAGTCACGTTTCCTTAGCCGGTGTTGCATTAGGCGTTGTTTTAGGTATCTCGCCTACATGGTCAACTATTTTCGTTGTTACTTTGGCGGCAGTTGTATTAGAGTATTTGCGTACTGTATACAAACATTATATGGAAATATCAACTGCTATCCTGATGTCGATGGGGTTGGCTATATCTTTAATCGTTATGAGTAAAGCTCATAATGTTGGTAATGTCAGTCTTGAACAGTATTTATTTGGTTCTATTATTACTATTGGGAAGGAACAAGTGATTGCTTTGTTTGTTATTGCATTAATCACTTTTATTTTAACCATCCTATTTATTAGACCAATGTATATATTAACGTTTGATGAGGATACAGCTTTTGTAGATGGATTGCCTGTGCGTACAATGTCTATTTTGTTCAATGTTGTTACAGGTATTGCTATTGCATTAACAATTCCTGCCGCAGGTGCTCTATTGGTGTCAACTATTATGGTTTTACCAGCTAGTATTGCTATGCGGTTAGGTCGAAATTTTAAAACTGTTATTTTTCTGGGTATGTTAATTGGATTTGTGGGAATGGTAGCTGGTATTTTCCTTTCGTATTATTGGGAGACACCTGCTAGTGCAACAATAACGATGATTTTTATTGGCATTTTCCTATTAGTTAGCTTAGTAGGCTTGCTTCGCAAACGT

SEQ ID NO: 9092 - protein, 270 aa, Streptococcus agalactiae; identical to SEQ ID NO: 4648

SEQ ID NO: 9093 - protein, 1029 aa, Streptococcus agalactiae
ATGAAATTATCTAAACAATTATACAAATCACTCCCACTATTAACTGTCGTGCTATGCGTTGGGGCATTACAACAGAATGTTGAAGCTAAGGATAAACATTATAAGACGACATCCCATGTTGAGACACAGTATGTAAGTACTTCTTCAAAAAAAATCTTACCGTTTACTCATAATAAGCAAATCAAGGTAGGTTCATTAGATAACTTAGGAAGAGCAACATATTCTCACATACAATTAAGGGATGCAGATGAGCCTAAGATAAAAAGAGAAAGACTGACGTATAATCCAACCGGTTGGCACAACTACAAATTTACTACTGAAAAGGGTAAAACAACTTGGCTTATGGACCGAGGTCACCTCGTTGGTTATCAATTTTCAGGAATGAACAATGTTCCTGAGAACCTAGTTACTATGACCAAATATCTAAATACAGGATTTAGCGAAAATAATCCTGATGGTATGTTATATTACGAAAATAGATTAGATAGTTGGTTGGCAAATCATAAAAATTTCTGGCTTGATTACAAAGTGACTCCAATATACGAAGGAAACAATTTAGTACCTAGCCGAGTTGAACTTCAGTATGTTGGAATTGATAAACAAGGAAAACTTCTAGAAATCAAATTAGGCGGCGGCAAAGAACAAGTTGATGAATACGGCGTCACAACTGTTACATTAGAAAATACGTCTCCTCTCGCAAAAATTGATTACAAAACTGGTATGCTAATCAAAGAAGATGGGAAACAGGCAGAAGAAGGTGAAGATCCAAATAGCGATGCTGATGAAAACGAAGCAGCTATTGAAAGTGCATCTGATATAGAAGAAAATACTAACACTAATACTTCTGAATCAGATACAAATAATGTAGCTCCCCAAAATAGAATCGTCTACGTTGCAAATAAGGGTCGTTCAAATACTTATTGGTATAGTTTAGAAAACATAAAAAATGCAAATACCGCTAATATCGTTCAAATGACTGAACAAGAAGCGTTAAATCAACACAAACATCACAGCACTACTGAAGCACAA

SEQ ID NO: 9094 - protein, 343 aa, Streptococcus agalactiae
MKLSKQLYKSLPLLTVVLCVGALQQNVEAKDKHYKTTSHVETQYVSTSSKKILPFTHNKQIKVGSLDNLGRATYSHIQLRDADEPKIKRERLTYNPTGWHNYKFTTEKGKTTWLMDRGHLVGYQFSGMNNVPENLVTMTKYLNTGFSENNPDGMLYYENRLDSWLANHKNFWLDYKVTPIYEGNNLVPSRVELQYVGIDKQGKLLEIKLGGGKEQVDEYGVTTVTLENTSPLAKIDYKTGMLIKEDGKQAEEGEDPNSDADENEAAIESASDIEENTNTNTSESDTNNVAPQNRIVYVANKGRSNTYWYSLENIKNANTANIVQMTEQEALNQHKHHSTTEAQ

SEQ ID NO: 9095 - protein, 1257 aa, Streptococcus agalactiae
ATGAATATTTTTGATGAACTCAAAGAACGTGGACTCGTTTTTCAGACAACTGACGAAGATGCTTTACGCAAAGCTCTTGAAGAAGGTTTTGTCTCTTACTATACTGGCTACGATCCTACGGCTGACAGCCTTCATCTTGGACATTTAGTTGCTATTTTAACCTCTCGTCGCTTACAACTTGCTGGTCACAAGCCGTATGCACTTGTGGGAGGCGCAACTGGACTTATTGGGGATCCTTCATTTAAAGATGTTGAGCGCAGTTTACAAACAAAGGAAACTGTAGTTAGTTGGGGTAATAAAATCCGCGGTCAATTATCTAATTTTCTAGAGTTTGAAACAGGTGATAACAAAGCCGTATTGGTAAATAATTATGATTGGTTCAGCAATATTAGTTTCATTGATTTCTTACGAGATGTTGGTAAATATTTTACTGTCAATTATATGATGAGTAAAGAATCTGTTAAAAAACGTATCGAAACAGGGATTTCCTATACTGAATTTGCTTATCAAATTATGCAAGGATATGACTTTTACGAATTAAATAAGAACTATAATGTCACTTTGCAAATTGGTGGTTCTGATCAATGGGGCAACATGACTGCTGGAACCGAACTTATTAGACGAAAATCAAATGGTGTATCTCATGTTATGACTGTTCCATTGATAACAGATTCTACAGGAAAAAAATTCGGAAAATCTGAAGGAAATGCTGTTTGGCTTGATGCTGACAAAACCTCTCCTTATGAAATGTACCAATTTTGGCTCAATGTTATGGATGCTGATGCCGTTCGCTTCCTTAAGATTTTTACATTCCTAAGCCTTAAAGAAATAGAAGATATACGTATTCAATTCGAGGAAGCACCTCACCAACGCTTAGCACAAAAAACACTAGCACGTGAAGTTGTAACTCTTGTTCATGGTGAAAAAGCTTATAAGGAGGCCGTTAATATCACGGAACAGCTATTTGCTGGCAATATAAAAGGATTGTCTGTTAAAGAGCTCAAACAAGGTTTACGTGGAGTACCAAATTATCACGTTCAGACGGAAGATAACCTCAATATCATAGACCTTCTAGTCACTTCAGGAGTTGTCAATTCTAAACGTCAAGCTCGAGAAGATGTCTCCAATGGAGCTATTTATATTAATGGAGATCGTATTCAAGATTTAGAATATACTATCTCAGAAAATGATAAGCTTGAAAATGAAATTACAGTCATTCGTCGTGGAAAGAAAAAATACTTTGTATTAAACTTTAAA

SEQ ID NO: 9096 - protein, 419 aa, Streptococcus agalactiae
MNIFDELKERGLVFQTTDEDALRKALEEGFVSYYTGYDPTADSLHLGHLVAILTSRRLQLAGHKPYALVGGATGLIGDPSFKDVERSLQTKETVVSWGNKIRGQLSNFLEFETGDNKAVLVNNYDWFSNISFIDFLRDVGKYFTVNYMMSKESVKKRIETGISYTEFAYQIMQGYDFYELNKNYNVTLQIGGSDQWGNMTAGTELIRRKSNGVSHVMTVPLITDSTGKKFGKSEGNAVWLDADKTSPYEMYQFWLNVMDADAVRFLKIFTFLSLKEIEDIRIQFEEAPHQRLAQKTLAREVVTLVHGEKAYKEAVNITEQLFAGNIKGLSVKELKQGLRGVPNYHVQTEDNLNIIDLLVTSGVVNSKRQAREDVSNGAIYINGDRIQDLEYTISENDKLENEITVIRRGKKKYFVLNFK

SEQ ID NO: 9097 - protein, 2295 aa, Streptococcus agalactiae
ATGTTTAAAGGTAATAAGAAGTTGAATAGTTCTAAATTAGGTGATTACACACCACTTGAATTTGGTTCTATTTTTTTAAGAATTGTAAAGCTTTTATCAGATTTCATCTATGTTATTATTTCACTATTTGTTATGCTCGGAGTAGGACTTGCAGTAGGGTATCTTGCTAGTCAAGTTGACTCTGTTAAAGTACCAAGTAAAAATAGTTTAGTGACACAAGTTAATACACTTACTAGGGTGTCTAGGTTAACTTATTCTGATAAATCACAAATTTCAGAGATTGACACTGATTTACAACGTACACCAGTGGCAAAGGATGCTATATCTGATAATATTAAAAAGGCTATCATTGCAACAGAGGACGAAAATTTCAATGACCATAAAGGTGTAGTTCCCAAAGCCGTACTACGTGCTGCAGCAGGATCTGTTCTGGGGTTTGGAGAGAGTAGCGGTGGTTCAACGCTGACACAACAATTATTAAAGCAGCAAATTTTGGGAGATGATCCGTCATTTAAACGCAAATCAAAAGAAATTATCTATGCTCTAGCATTAGAGCGTTACATGGATAAGGATTCGATTTTATCAGATTATTTAAATGTATCACCGTTTGGTCGCAATAACAAAGGACAGAATATTGCAGGTATTGAAGAAGCAGCACAAGGGATTTTTGGAGTTTCCGCAAAAGATTTAACAATTCCTCAGGCAGCTTTCCTTGCAGGTTTACCGCAAAGTCCTATTGTATATTCTCCTTATACTGCAGATGCCCAGTTGAAATCAGATAAAGATCTTAGTTTTGGTATAAAGCGCCAAAAAAATGTGTTATACAATATGTATAGAACGAGAGCTTTAACCAAAGATGAGTACAAATCCTACAAAGATTATGACATCAAAAAAGATTTTATCAAACCTGCAGTGGCGACAACAAATCATCATGATTATCTTTACTACTCGGCATTATCTGAAGCTCAAAAAGTGATGTACAATTACCTCATTAAAAAGGATAATGTTTCAGAGCATGATTTAAAAAATGATGAGACTAGAGCGACGTACAGACACCGCGCTATTGAAGAGATTCAACAGGGAGGGTATACTATTAAAACTACTATCAATAAATCTGTTTATCAAGCCATGCAGGATGCTGCAGCTCAATACGGAGGGTTGTTAGATGATGGTACTGGCAAGGTTCAAATGGGAAATGTACTAACGGACAATTCTAGTGGTGCTATTATAGGATTTATTGGTGGTCGTAACTATAGTGAGAATCAAAATAACCATGCTTTTGATACGGCACGCTCTCCAGGGTCAAGTATTAAACCGATATTACCTTACGGAATTGCTATTGATCAAGGGATGTTAGGCAGTGGTAGTGTTCTTTCAAATTATCCAACGACATATTCAAGTGGCGAAAAGATTATGCATGCGGATGAAGAAGGTACTGCTATGGTTAACCTTCAAGAGTCATTGGACATTTCTTGGAACATTCCAGCTTTCTGGACTTACAAGATGCTACGAGATCGAGGCGTTGATGTAAAAAACTATATGGAGAAATTAGACTATCCAATTGAAAACTTTGGTATAGAAAGTTTACCACTTGGTGGTGGTATTGATACGTCAGTTGCTCAGCAAACAAACCTTTATCAAATGATTGCAAATGGTGGTGTTTATCATAAGCAGTATATGATAGAAAGCATAGAGGATAGTAATGGGAAAGTGATTTATAATCACGAAAGTAAACCTGTCCGTGTCTTTTCGAAAGCAACAGCTACTATCTTACAGCAGCTATTACATGGACCAATTAACTCCGGAAAGACTACAACCTTTAAAAATCGCTTACAAGGTTTAAATAGTGGTTTAGCTGGGGTAGATTGGATTGGAAAAACGGGTACTACTAACTCAACTTCTGATGTTTGGTTGATGCTTTCTACACCTAAAGTGACTTTAGGTGGATGGGCAGGACATGATAATAATGCCTCTTTAGCGAAATTGACAGGTTACAATAATAATGCTAATTATATGGCTCACTTGGTTAATGCTATTAATAATGCAGATGGCAATACTTTTGGTAAGTCAGAAAGGTTTAGACTTGATGATAGCGTTATAAAAGCTAAAGTTCTTAAGTCTACAGGTTTACAGCCAGGTGTAGTAACAGTAAACGGTCGTCGAATCACTGTTGGAGGTGAAAGCACAACAAGTTATTGGGCAAAAAATGGACCTGGAACGATGACCTATCGTTTTGCTATTGGGGGAACTGATAGTGATTATCAAAAAGCTTGGTCTACTTTGGGTGGAAAACGA

SEQ ID NO: 9098 - protein, 765 aa, Streptococcus agalactiae
MFKGNKKLNSSKLGDYTPLEFGSIFLRIVKLLSDFIYVIISLFVMLGVGLAVGYLASQVDSVKVPSKNSLVTQVNTLTRVSRLTYSDKSQISEIDTDLQRTPVAKDAISDNIKKAIIATEDENFNDHKGVVPKAVLRAAAGSVLGFGESSGGSTLTQQLLKQQILGDDPSFKRKSKEIIYALALERYMDKDSILSDYLNVSPFGRNNKGQNIAGIEEAAQGIFGVSAKDLTIPQAAFLAGLPQSPIVYSPYTADAQLKSDKDLSFGIKRQKNVLYNMYRTRALTKDEYKSYKDYDIKKDFIKPAVATTNHHDYLYYSALSEAQKVMYNYLIKKDNVSEHDLKNDETRATYRHRAIEEIQQGGYTIKTTINKSVYQAMQDAAAQYGGLLDDGTGKVQMGNVLTDNSSGAIIGFIGGRNYSENQNNHAFDTARSPGSSIKPILPYGIAIDQGMLGSGSVLSNYPTTYSSGEKIMHADEEGTAMVNLQESLDISWNIPAFWTYKMLRDRGVDVKNYMEKLDYPIENFGIESLPLGGGIDTSVAQQTNLYQMIANGGVYHKQYMIESIEDSNGKVIYNHESKPVRVFSKATATILQQLLHGPINSGKTTTFKNRLQGLNSGLAGVDWIGKTGTTNSTSDVWLMLSTPKVTLGGWAGHDNNASLAKLTGYNNNANYMAHLVNAINNADGNTFGKSERFRLDDSVIKAKVLKSTGLQPGVVTVNGRRITVGGESTTSYWAKNGPGTMTYRFAIGGTDSDYQKAWSTLGGKR

SEQ ID NO: 9099 - protein, 3573 aa, Streptococcus agalactiae
TTGGCAGGACATGAAGTTCAGTACGGAAAACACCGTACACGTCGTAGCTTTTCAAGAATTAAGGAAGTTCTTGATTTACCAAACTTAATTGAAATTCAAACTGATTCATTCCAAGATTTTCTTGATGCTGGCTTGAAAGAAGTATTTGAGGATGTACTTCCAATTTCAAACTTTACAGATACTATGGATCTTGAATTTGTTGGTTATGAATTAAAAGAACCTAAATATACTTTGGAAGAAGCTCGTATCCATGATGCTAGCTACTCAGCACCTATTTTTGTTACTTTCCGTTTAGTTAATAAAGAAACTGGTGAAATTAAAACTCAAGAAGTTTTCTTTGGTGATTTTCCAATTATGACTGAAATGGGTACTTTCATCATCAATGGTGGTGAACGTATCATTGTTTCACAATTAGTCCGTTCTCCTGGTGTTTACTTTAATGATAAGGTAGATAAAAATGGAAAAGTTGGTTATGGGTCAACTGTTATCCCTAACCGCGGAGCTTGGTTGGAACTTGAGACAGACGCAAAAGATATTGCTTATACACGTATTGACCGCACACGTAAAATTCCATTCACAACACTAGTCCGTGCACTTGGTTTCTCTGGAGACGATGAAATTGTTGACATCTTTGGTGACAGTGAACTTGTTCGCAATACTATTGAAAAAGACATTCATAAAAATCCAAGTGATTCTCGTACAGATGAAGCACTTAAAGAAATCTATGAACGTCTTCGTCCAGGTGAACCAAAAACTGCAGACAGCTCACGTAGTCTTTTAGTTGCACGTTTCTTTGATCCACGTCGTTATGACTTAGCGGCTGTTGGTCGTTATAAGATTAATAAAAAACTGAATCTTAAAACACGCCTATTGAACCAAACAATCGCTGAAAATTTAGTTGATGGTGAAACAGGAGAGATTCTTGCTGAAGCTGGAACCGTTATGACACGAGATGTCATTGATTCAATTGCAGAGCATATCGATGGAGACTTAAACAAGTTTGTCTACACACCAAATGATTATGCTGTAGTTACTGAACCAGTTATTCTTCAAAAATTCAAAGTTGTTGCTCCAACTGATCCAGACCGTGTTGTTACTATTGTTGGAAACTCAAATCCTGAAGATAAAGTTCGTGCCTTAACTCCTGCAGATATTTTAGCAGAGATGTCATACTTCTTAAACCTTGCAGAGGGTATCGGTAAGGTAGATGACATTGACCATTTAGGTAACCGTCGTATTCGTGCAGTTGGTGAATTACTTGCGAACCAATTCCGTATCGGACTTGCTCGTATGGAACGCAATGTCCGCGAACGTATGTCTGTACAAGACAATGAAGTCTTGACACCTCAACAAATCATTAACATTCGTCCAGTGACTGCCGCCGTTAAAGAATTCTTTGGTTCATCACAGCTGTCACAATTCATGGACCAACACAACCCTCTATCAGAATTGTCGCACAAACGCCGTCTCTCTGCCTTAGGACCTGGTGGTTTGACACGTGACCGTGCTGGATATGAAGTTCGTGACGTGCACTATACCCACTATGGGCGCATGTGTCCGATTGAAACACCTGAAGGTCCAAACATTGGTTTGATTAATAACTTATCTTCATTTGGACACCTCAATAAATATGGATTTATTCAAACACCATATCGTAAAGTAGATCGTTCTACTGGTGCGGTAACGAACGAAATTGTTTGGTTGACTGCTGATGAAGAAGATGAATTTACAGTTGCACAAGCCAACTCTAAGCTTAACGAAGACGGTACATTTGCAGAAGAAATCGTTATGGGTCGTCATCAAGGTAATAACCAAGAGTTTCCTTCAAGCATTGTTGACTTTGTTGACGTGTCACCTAAGCAAGTAGTTGCTGTCGCAACAGCATGTATTCCTTTCTTGGAAAATGATGACTCTAACCGTGCCTTGATGGGTGCCAACATGCAACGTCAGGCTGTGCCATTGATTGATCCAAAAGCACCATATGTTGGTACTGGTATGGAGTATCAAGCAGCCCACGATTCAGGTGCAGCTGTGATTGCTAAACATGATGGTCGTGTTATTTTTTCAGATGCTGAAAAAGTTGAAGTGCGTCGCGAAGATGGTTCTCTTGATGTTTATCATGTTCAAAAATTCCGCCGTTCAAACTCAGGTACTGCTTATAACCAACGTACCTTAGTTAAAGTTGGTGATCTCGTTGAAAAAGGTGATTTTATCGCCGACGGACCATCTATGGAAAATGGTGAAATGGCTCTTGGACAAAACCCAGTTGTTGCTTATATGACTTGGGAAGGTTATAACTTCGAGGATGCCGTTATCATGAGTGAGCGCCTTGTGAAAGAAGATGTCTATACATCTGTTCACTTGGAAGAATTCGAATCTGAAACGCGTGATACAAAGCTTGGGCCTGAAGAAATTACTCGTGAAATTCCAAATGTTGGTGAAGATTCACTACGTGATCTCGATGAAATGGGAATTATCCGCATTGGTGCTGAGGTAAAAGAAGGTGACATTCTTGTTGGTAAGGTAACACCTAAGGGTGAAAAGGACTTATCTGCTGAAGAACGTCTCTTGCATGCCATTTTTGGTGATAAATCACGTGAAGTTCGTGATACTTCACTACGTGTACCTCACGGTGGCGATGGAGTAGTTCGTGACGTTAAAATCTTTACTCGTGCAAATGGTGATGAATTGCAATCAGGTGTTAATATGCTTGTCCGCGTTTATATCGCTCAAAAACGTAAAATCAAAGTCGGTGATAAGATGGCCGGTCGTCACGGAAACAAAGGTGTCGTCTCACGTATTGTTCCTGTTGAAGATATGCCTTACTTACCAGATGGAACGCCAGTTGATATCATGTTGAACCCACTTGGGGTGCCATCACGTATGAATATCGGACAAGTTATGGAGCTTCATTTAGGTATGGCTGCTCGTAATTTAGGTATTCATATTGCAACGCCAGTCTTTGATGGGGCTTCTTCAGAAGACCTTTGGGAAACTGTTCAAGAAGCAGGTATGGATTCAGATGCTAAGACTGTTCTTTATGATGGTCGTACTGGTGAACCATTCGATAACCGTGTGTCAGTTGGTGTCATGTACATGATCAAACTTCACCACATGGTTGATGATAAACTTCATGCCCGTTCAGTAGGACCATACTCACTTGTTACTCAACAACCACTTGGAGGTAAAGCTCAATTTGGTGGACAACGTTTTGGTGAGATGGAGGTTTGGGCGCTTGAAGCTTATGGTGCTTCAAATGTTCTTCAAGAAATTTTAACATACAAATCTGATGATGTTACAGGACGTCTTAAAGCTTATGAAGCTATCACAAAAGGTAAGCCAATTCCAAAACCAGGTGTTCCAGAATCATTCCGTGTTCTTGTAAAAGAATTGCAATCACTTGGTCTTGATATGCGTGTCCTTGATGAAGATGACAACGAAGTTGAACTCCGTGATCTTGATGAAGGTGAAGATGATGATGTGATGCACGTTGATGACCTTGAAAAAGCACGTGTGAAACAAGAAGCTGAAGAAAAACAAGCTGAACAAGTATCTGAAGTCGTTCAAGAAGAT

SEQ ID NO: 9100 - protein, 1191 aa, Streptococcus agalactiae
MAGHEVQYGKHRTRRSFSRIKEVLDLPNLIEIQTDSFQDFLDAGLKEVFEDVLPISNFTDTMDLEFVGYELKEPKYTLEEARIHDASYSAPIFVTFRLVNKETGEIKTQEVFFGDFPIMTEMGTFIINGGERIIVSQLVRSPGVYFNDKVDKNGKVGYGSTVIPNRGAWLELETDAKDIAYTRIDRTRKIPFTTLVRALGFSGDDEIVDIFGDSELVRNTIEKDIHKNPSDSRTDEALKEIYERLRPGEPKTADSSRSLLVARFFDPRRYDLAAVGRYKINKKLNLKTRLLNQTIAENLVDGETGEILAEAGTVMTRDVIDSIAEHIDGDLNKFVYTPNDYAVVTEPVILQKFKVVAPTDPDRVVTIVGNSNPEDKVRALTPADILAEMSYFLNLAEGIGKVDDIDHLGNRRIRAVGELLANQFRIGLARMERNVRERMSVQDNEVLTPQQIINIRPVTAAVKEFFGSSQLSQFMDQHNPLSELSHKRRLSALGPGGLTRDRAGYEVRDVHYTHYGRMCPIETPEGPNIGLINNLSSFGHLNKYGFIQTPYRKVDRSTGAVTNEIVWLTADEEDEFTVAQANSKLNEDGTFAEEIVMGRHQGNNQEFPSSIVDFVDVSPKQVVAVATACIPFLENDDSNRALMGANMQRQAVPLIDPKAPYVGTGMEYQAAHDSGAAVIAKHDGRVIFSDAEKVEVRREDGSLDVYHVQKFRRSNSGTAYNQRTLVKVGDLVEKGDFIADGPSMENGEMALGQNPVVAYMTWEGYNFEDAVIMSERLVKEDVYTSVHLEEFESETRDTKLGPEEITREIPNVGEDSLRDLDEMGIIRIGAEVKEGDILVGKVTPKGEKDLSAEERLLHAIFGDKSREVRDTSLRVPHGGDGVVRDVKIFTRANGDELQSGVNMLVRVYIAQKRKIKVGDKMAGRHGNKGVVSRIVPVEDMPYLPDGTPVDIMLNPLGVPSRMNIGQVMELHLGMAARNLGIHIATPVFDGASSEDLWETVQEAGMDSDAKTVLYDGRTGEPFDNRVSVGVMYMIKLHHMVDDKLHARSVGPYSLVTQQPLGGKAQFGGQRFGEMEVWALEAYGASNVLQEILTYKSDDVTGRLKAYEAITKGKPIPKPGVPESFRVLVKELQSLGLDMRVLDEDDNEVELRDLDEGEDDDVMHVDDLEKARVKQEAEEKQAEQVSEVVQED

SEQ ID NO: 9101 - protein, 3678 aa, Streptococcus agalactiae
ATGATGATAAATCGAAGAAAGGTAAAACTAGTGGTTGACGTAAATCGTTTTAAAAGTATGCAAATCACATTAGCATCACCAAGTAAGGTCCGTTCATGGTCTTATGGTGAAGTTAAAAAACCTGAAACAATCAACTACCGCACATTGAAACCAGAACGTGAAGGACTTTTTGATGAAGTTATTTTTGGTCCAACAAAAGATTGGGAATGTGCGTGTGGAAAATACAAACGTATTCGTTACAAAGGAATCATTTGTGACCGTTGTGGCGTTGAAGTAACCCGTGCAAAAGTTCGTCGCGAACGTATGGGACATATCGAGTTAAAAGCACCAGTATCTCATATCTGGTATTTCAAAGGTATCCCATCGCGTATGGGGCTCACATTGGATATGAGTCCTCGTGCACTTGAAGAAGTTATTTATTTTGCGGCTTATGTTGTTATCGATCCAATGGACACACCATTAGAACCGAAGTCACTCCTTACTGAGCGTGAATACCGTGAAAAACTTCAAGAGTACGGTTACGGTTCGTTTGTTGCTAAAATGGGTGCTGAAGCCATTCAAGATCTTCTTAAACGCGTTGATTTAGATGCAGAAATCGCAGTTCTTAAAGAGGAGTTGAAATCAGCGACAGGTCAAAAACGTGTGAAAGCAGTTCGTCGTCTGGATGTGTTAGATGCCTTTAAAAAATCTGGAAATAAACCAGAATGGATGGTTCTTAACATTTTACCGGTTATCCCACCGGATCTTCGTCCGATGGTTCAATTAGATGGTGGTCGTTTTGCGGCATCAGACTTGAATGACCTTTACCGCCGTGTTATTAACCGTAACAATCGTTTGGCACGTTTGTTGGAATTAAATGCTCCTGGCATCATCGTTCAAAATGAAAAACGTATGTTACAAGAAGCTGTTGATGCGCTTATCGACAATGGTCGTCGTGGTCGTCCAATTACCGGACCAGGTAGTCGTCCTTTGAAATCATTAAGCCATATGCTTAAAGGTAAACAAGGTCGTTTCCGCCAAAACTTGCTTGGTAAACGTGTTGACTTCTCTGGACGTTCCGTTATTGCTGTTGGTCCAACACTCAAAATGTACCAATGTGGTGTACCACGTGAAATGGCTATTGAGCTCTTCAAACCTTTTGTAATGCGTGAAATCGTTGCTCGTGACCTCGCAGGGAACGTTAAAGCAGCTAAACGTATGGTTGAACGTGGGGACGAGCGTATTTGGGACATCTTAGAAGAAGTTATTAAAGAGCACCCAGTACTTCTAAACCGTGCACCTACTCTTCACAGATTAGGTATCCAAGCGTTTGAACCTGTCCTTATTGATGGTAAGGCGCTTCGTCTTCACCCACTTGTATGTGAGGCCTACAATGCTGACTTTGATGGAGACCAAATGGCCATCCACGTTCCATTGTCTGAAGAAGCCCAAGCAGAAGCTCGTCTTTTGATGCTTGCTGCAGAGCACATCCTTAACCCTAAAGATGGTAAGCCAGTCGTAACACCATCTCAGGACATGGTTTTAGGAAATTACTACCTGACTATGGAAGATGCTGGTCGTGAAGGTGAAGGCATGATTTTCAAAGATCATGACGAAGCAGTTATGGCATATCAAAATGGTTATGTTCATTTACATACACGTGTTGGTATCGCTGTTGATTCAATGCCGAATAAGCCTTGGACAGAAGAGCAAAAACATAAAATCATGGTTACAACAGTTGGTAAGATTCTCTTCAACGATATCATGCCTGAAGATTTACCGTACTTAATTGAACCTAATAATGCAAACTTGACAGAAAAAACTCCAGATAAATACTTCTTAGAGCCAGGTCAGGATATTCAAGCAGTTATTGATAACTTAGAGATTAATATTCCCTTTAAGAAGAAAAATCTTGGTAATATTATCGCAGAAACTTTTAAACGTTTCCGTACAACAGAAACTTCTGCTTTCCTTGACCGTTTGAAGGACCTTGGATATTATCATTCAACACTTGCTGGTTTGACTGTGGGTATTGCTGATATCCCAGTTATTGACAATAAAGCTGAGATTATTGATGCAGCTCACCACAGAGTTGAAGATATCAATAAAGCCTTCCGTCGAGGTTTGATGACTGAAGAAGATCGTTATGTTGCTGTTACAACAACATGGCGTGAAGCTAAAGAAGCACTTGAAAAACGTCTTATTGAGACACAAGATCCAAAGAACCCTATCGTTATGATGATGGACTCAGGAGCTCGTGGTAACATCTCAAACTTCTCACAACTTGCCGGTATGCGTGGTTTGATGGCTGCTCCTAACGGACGTATCATGGAATTGCCAATCTTATCAAACTTCCGTGAAGGTCTTAGTGTTTTGGAAATGTTCTTCTCAACTCACGGTGCGCGTAAAGGTATGACTGATACGGCCCTTAAGACAGCCGACTCAGGTTACCTTACTCGTCGTTTGGTTGACGTTGCCCAAGATGTTATTATTCGTGAAGATGACTGTGGAACAGACCGCGGTTTGACAATCACAGCAATTACAGATGGTAAAGAGGTTACTGAGACACTTGAAGAGCGTTTGATAGGACGTTATACTAAGAAGTCAATCAAACATCCTGAGACAGGTGAAATTCTCGTTGGTGCAGATACCTTAATTACTGAAGATATGGCTGCTAAAGTTGTTAAAGCGGGCGTTGAGGAAGTAACTATCCGATCAGTATTTACATGTAACACTCGCCATGGTGTTTGTCGTCACTGTTACGGTATTAACTTGGCAACAGGTGATGCTGTTGAGGTTGGTGAAGCAGTTGGTACTATTGCAGCTCAATCTATCGGTGAACCAGGGACACAGCTTACAATGCGTACCTTCCATACCGGTGGTGTTGCTTCAAATACTGATATTACACAAGGTCTCCCACGTATCCAAGAAATCTTTGAAGCACGTAACCCTAAAGGTGAGGCAGTTATTACTGAAGTTAAGGGTGAAGTCGTTGCAATTGAAGAAGACTCTTCAACACGTACTAAGAAAGTATTCGTTAAAGGTCAGACAGGTGAGGGAGAATACGTTGTTCCATTTACAGCACGTATGAAAGTTGAAGTTGGTGATGAAGTAGCTCGTGGTGCGGCCTTAACTGAAGGATCTATCCAACCAAAACGTCTCCTTGAAGTTCGTGATACTTTATCTGTTGAAACGTACCTACTTGCTGAAGTACAAAAAGTTTACCGTAGCCAAGGGGTAGAAATCGGAGATAAACACGTTGAGGTAATGGTTCGTCAAATGCTCCGTAAAGTTCGTGTCATGGATCCAGGAGATACAGATCTTCTTCCAGGTACACTTATGGATATTTCAGACTTTACAGATGCTAACAAAGATATTGTTATTTCTGGTGGAATCCCTGCGACAAGCCGTCCTGTCCTTATGGGTATTACTAAGGCTTCCCTTGAAACTAATTCATTCTTATCAGCTGCATCCTTCCAAGAAACAACACGTGTCCTTACAGATGCTGCTATCCGTGGTAAGAAAGATCACTTACTTGGTCTTAAAGAAAATGTTATTATCGGTAAAATCATTCCAGCGGGTACTGGTATGGCTCGTTACCGTAATATTGAACCACTTGCTGTTAATGAAGTTGAGATTATTGAAGGAACTCCTGTTGATGCAGAAGTTACGGAAGTATCAACACCTACAACAGAAGAT

SEQ ID NO: 9102 - protein, 1226 aa, Streptococcus agalactiae; identical to SEQ ID NO: 340

SEQ ID NO: 9103 - protein, 363 aa, Streptococcus agalactiae; identical to SEQ ID NO: 4665

SEQ ID NO: 9104 - protein, 121 aa, Streptococcus agalactiae; identical to SEQ ID NO: 346

SEQ ID NO: 9105 - protein, 969 aa, Streptococcus agalactiae
ATGGTTCAATCATTAGCAAAGCAAGTCATTCATCAGGCAGTAGAAGTAAATGCTCAAGATATTTATATCATTCCCAAAGGTGATTGTTATGAACTCTATATGCGTATTGATGATGAAAGGCGGTTTATTGATGTTTTTGAGTTTAATAGGATGGCTAGTCTTATTAGTCACTTTAAATTTGTGGCAGGCATGAACGTTGGAGAAAAAAGACGAAGTCAATTAGGTTCTTGTGACTATGAACTGTCAGAGGGAAGACTGGTTTCATTACGACTATCGAGTGTGGGAGATTATCGTGGTCAAGAATCTTTAGTTATTCGTATTTTGTATTCAGGTCATCAGGACTTAAAATATTGGTTTGATAATATAAAGCAAATGAAGGAAGTACTGGGTATAAGAGGGCTATATCTTTTTTCCGGCCCTGTGGGGAGTGGTAAAACAACTCTCATGTATCAATTAGCTTCAGAAGTATTTAAAAATAAGCAAATTATCACGATTGAAGATCCGGTAGAAATCAAGAATGACAAGATGTTACAACTCCAATTGAATGAGGATATTGGAATGACTTATGATGCTTTAATCAAACTGTCTTTACGGCATCGTCCAGATATTTTAATTATCGGAGAGATTAGAGATCAAGCGACGGCCCGTGCTGTTATTCGTGCAAGTTTAACGGGAGTGATGGTTTTTTCTACTATTCATGCTAAAAGTATTCCCGGAGTCTATGATAGGCTTATAGAATTAGGGGTTAACTATCAAGAGTTAGAAAATAGTCTAAAATTAATAGCATATCAACGTTTAATTGGAGGAGGAAGCCTAATTGACTTTGAGACAGGTAATTTTAAAAAACACTCATCAGACAAGTGGAATAGACAAGTGGATATCTTGGCTGAAGAAGGACATATCAGTAAGAAACAGGCACAAGTCGAAAAAATTATCCCTCAAGAAACAACGGAAAGTAGTCCAACTTTT

SEQ ID NO: 9106 - protein, 323 aa, Streptococcus agalactiae; identical to SEQ ID NO: 348

SEQ ID NO: 9107 - protein, 846 aa, Streptococcus agalactiae
ATGAATAAGGCATTATTAGAGGGAAAAGATTTATCAAAAATGTTAGGAGAGTTAGGTTTTTCTGACACTGTTATCACACAGGTTGCATTAGCTGATTTGCATGGTAACATTTCAAGGAGCCTACTAAAGATTGAGTCTTATTTAGCTAATCTTTTGTTAGTTAGAAAAAAAGTAATAGAAGTAGCTACTTACCCATTGATATTATTGTCTTTTCTGGTGCTAATTATGATTGGCCTTAGGAATTATTTAATGCCCCAATTAGGAGAAAATAATTTTGCAACTAGACTGATTACAAATGTGCCGAATATTTTCTTATTACTTTTAGCAGTTGTACTTATTTTTAGTTTAATATTTTATATTATTCAAAAGCGATTGTCGCGCATTAAAGTAGCTTGTTTTTTAACAACAATTCCCTTAGTTGGATCATATGTTAAGCTTTATTTAACTGCTTACTATGCCCGTGAGTGGGGAAATTTATTAAGTCAAGGTATTGAATTGGACCAAATTGTTAAAGTAATGCAAAATCAGAAATCCAAACTTTTTAGGGAAATAGGATATGACATGGAAGAAGGTTTTCTATCAGGTAAAGCATTTCACCAAAAAGTATTAGACTATCCGTTTTTCTTAACTGAGCTTAGTTTAATGATTGAATATGGCCAAGTTAAGGCGAAATTAGGAACAGAGTTAGATATATATGCTGATGAGAAGTGGGAGGATTTTTTTACAAAATTAGCTAGAGCGACCCAGTTAATCCAACCCGTTATTTTTATTTTTGTAGCTCTTATCATTGTTATGATTTATGCAGCAATGCTGTTACCAATGTATCAAAATATGGAGATATTATCA

SEQ ID NO: 9108 - protein, 282 aa, Streptococcus agalactiae; identical to SEQ ID NO: 350

SEQ ID NO: 9109 - protein, 327 aa, Streptococcus agalactiae
ATGAAAAATTTATTGTTAAAATGTAAGGATAAGAAGGTTAAAGCATTTACACTTTTAGAAATGTTAGTTGTTTTGATCATTATTTCGGTCTTGTTGTTATTGTTTGTACCCAATTTATCAAAACAAAAGGAAAGTGTCACAAGAACTGGAAATGCCGCTGTTGTCAAGGTTGTAGAAAGTCAAGCCGAACTTTTTGAACTGCAAGAAACAGGTAGAAAAGCTAGTTTATCCACTCTAAAATCTGGAGGATATATTACTGAAAAGCAAGAAAAAGCCTATTTAGATTATTATAAAGACAGTTCCAATGGTTCTCAGAAAATTTCAAGT

SEQ ID NO: 9110 - protein, 109 aa, Streptococcus agalactiae
MKNLLLKCKDKKVKAFTLLEMLVVLIIISVLLLLFVPNLSKQKESVTRTGNAAVVKVVESQAELFELQETGRKASLSTLKSGGYITEKQEKAYLDYYKDSSNGSQKISS

SEQ ID NO: 9111 - DNA, 411 bp, Streptococcus agalactiae
atggttctcagaaaatttcaagttaaagcatttactgttttggagagccttattgtattatcagtagtggcatttatgacgttagtattttcaacatcatttaataatatttttaggcaggttgaagaaacaattttcttcatatcctttgaacatctttatagagatactcagaaattgagtgcatttggtcagaagaaacaaacccttacaatctctcataattatctcgaaaatacttatgagagactttatttacctaaaactgtaaaagtagtcaaaagtgatacacttgcatttgacactaatggagggaattcaagcttggcaaaaattcaatttgaatgttatagaaaaactgtcacgtatcaattatatataggaagtggtaattatcgtaagaaagaaaat

SEQ ID NO: 9112 - protein, 137 aa, Streptococcus agalactiae
MVLRKFQVKAFTVLESLIVLSVVAFMTLVFSTSFNNIFRQVEETIFFISFEHLYRDTQKLSAFGQKKQTLTISHNYLENTYERLYLPKTVKVVKSDTLAFDTNGGNSSLAKIQFECYRKTVTYQLYIGSGNYRKKEN

SEQ ID NO: 9113 - DNA, 297 bp, Streptococcus agalactiae
gtggtaattatcgtaagaaagaaaattagagcctatattttactggaaagcctagtgggattagctattttagttactattacaagattagtaataagtgaaataaatcgtcaacaatcccatattgcaagaaggcaacatgagcaagaagtattgatattagctagaatggctgtgcaaactgatcaaaaaatattagaagcaaatggtgttaatattcgtattgaagaaagtaaaaataaaattgtgctctttgaagataataaggaaattttgcacgtatcaaaagttaagggt

SEQ ID NO: 9114 - protein, 99 aa, Streptococcus agalactiae
MVIIVRKKIRAYILLESLVGLAILVTITRLVISEINRQQSHIARRQHEQEVLILARMAVQTDQKILEANGVNIRIEESKNKIVLFEDNKEILHVSKVKG

SEQ ID NO: 9115 - DNA, 330 bp, Streptococcus agalactiae
ttggctcaacagatagtagtgatgtcttcttccagtcagtctgaatgggtgttattaactcagcaactaaatgcagaatttgaaggcgctcatctggaatatttaagacagaacaaactttatttacgtaagcaagataagattgtaacctttggcaaatctaataaagatgatttccgtaagacaggttatgatggtcgaggttatcaaccaatggtttatgggttagacaattgtcaaatgagtcagaccaaaagtatggtaaaacttgttttttattttaaggacgggttaaaaaggacattttactatgattttaaagaagaaact

SEQ ID NO: 9116 - protein, 110 aa, Streptococcus agalactiae; identical to SEQ ID NO: 4676

SEQ ID NO: 9117 - DNA, 369 bp, Streptococcus agalactiae
atgattttaaagaagaaacttaaagctggcatccttttgcaagctattgtattggctgctgtatttacactcgtcttacagttttatctagcaagaatattggcaacagaaagacagtatcatagccaaattgaagcaagtaaagcttatttaacagcgcagttagcttataaaacaatagaaggtgactccatatcaggaaaatgttattttacaggaggatatgcttcatacctccaagaagggaactatttacaagttaaggttacattggataagggaggaaactataaccataagttttatcgtaaaacagacactctccaagtacctctcaagtctaatgataataaagcaagccataaacat

SEQ ID NO: 9118 - protein, 123 aa, Streptococcus agalactiae; identical to SEQ ID NO: 354

SEQ ID NO: 9119 - DNA, 972 bp, Streptococcus agalactiae
atgaattttgaaaaaattgagacagcctatgagctgattttagaaaatatccaaacgattgagaaccaattaaaaactcatatttatgatgccttaattgaacagaactcttattaccttggttcaagttgtgatttagatatggttgtggtgaataaccaaaaattacgtcaacttgacttaagtcaagaagaatggcgtcgcactttccagttcatttttatcaaatctgcgcaaacagagcaattacaagctaatcatcagtttacgccagatagtattggttttatcttgttatttcttttggaagaattaacgagtcaagagacagtggatgtcttggaaattggaagtggaactgggaatttagctcagactctcctcaataacagctcgaaagagttaaattatatgggcattgaagttgatgatcttttgattgatctatcagcaagcattgctgaaattataggttctagtgcccaatttatccaagaggatgctgttagaccacaaattttgaaagaaagcgatgtaatcattagtgatttaccagttggctattatcctaatgatggtattgctaaacgatatgctgtatcaagttctaaagagcacacctatgctcaccatctattgatggagcaatctcttaaatatttgaaaaaagatggaatcgctatatttttagcacccgaaaaccttttaacaagtccacaaagtgatttgctgaaggagtggttaaaaggatatgcagatgtcattgccgttttaactctaccagaaactatttttggaagtcgtcaaaatgcgaaatctatatttgttctcaagaagcaagcagaacaaaaaccagaaacctttgtatatccgctgacagatttgcaaaatcgtgagaatatggcaaacttcattgaaaattttcaaaaatggagcagagaaaatagtcattactcaaaaaatatgataaaa

SEQ ID NO: 9120 - protein, 324 aa, Streptococcus agalactiae; identical to SEQ ID NO: 356

SEQ ID NO: 9121 - protein, 1191 aa, Streptococcus agalactiae
ATGTCAAAAACAATAGCAATTAATGCTGGAAGTTCAAGTTTGAAATGGCAATTATATGAAATGCCAGAGGAGAAAGTAGTTGCCAAAGGGATTATCGAACGTATTGGTTTGAAAGATTCTATTTCGACTGTAAAATTTGACGATAAAAAAGATGAACAAATTTTAGATATCGTAGATCATACCCAAGCTGTTAAAATTCTTTTAGAAGATCTAACAAAACATGGTATTATCAAAGACTTTAATGAAATTACAGGTGTTGGTCATCGTGTCGTTGCTGGTGGTGAATATTTTAAAGAGTCTGCTTTAGTAGATGATAAAGTTGTAGAACAGGTTGAAGAATTATCAGCTTTAGCTCCACTCCACAACCCAGCAGCTGCAGCAGGGATTCGTGCGTTTAGAGAAATCTTACCAGATATCACGAGTGTATGTGTATTTGATACAGCCTTCCATACAACAATGCAACCTCATACCTACTTATATCCAATCCCACAAAAGTACTATACTGATTATAAAGTACGTAAATACGGTGCACACGGGACAAGCCACCAATACGTTGCACAAGAAGCAGCTAAGCAATTAGGACGTCCTTTAGAAGAATTAAAATTAATCACAGCACATGTGGGTAATGGTGTTTCTATTACAGCAAATTATCATGGACAGTCTATTGATACATCAATGGGATTCACACCACTTGCAGGACCAATGATGGGAACACGTTCAGGAGACATTGATCCTGCGATTATCCCTTATCTTGTAGCTAATGATCCAGAATTGGAAGATGCAGCAGCTGTTGTTAATATGCTTAACAAACAATCAGGATTGCTTGGAGTATCAGGAACTTCAAGTGATATGCGAGATATTGAAGCAGGTCTTCAAAGTAAAGATCCAAATGCAGTGTTAGCCTATAATGTCTTTATTGACCGTATTAAGAAATTTATTGGACAATACTTGGCAGTATTAAATGGCGCGGATGCTATTATTTTTACTGCAGGTATGGGAGAAAATGCGCCATTAATGCGTCAAGATGTTATCGCAGGATTATCATGGTTTGGCATTGAACTTGATCCAGAAAAAAATGTTTTTGGTTATTTTGGAGATATCACAAAACCAGATTCAAAAGTGAAGGTTTTAGTTATTCCTACTGATGAAGAATTAATGATTGCGCGTGACGTTGAGCGCCTTAAAGCTAAA

SEQ ID NO: 9122 - protein, 397 aa, Streptococcus agalactiae; identical to SEQ ID NO: 358

SEQ ID NO: 9123 - protein, 204 aa, Streptococcus agalactiae
ATGAAAAATTCTCTACAAAAGTTACGAAAATCTAGGAAATTAAGTCAAGCAGAACTTGCAGTTGCACTTGGAGTTACTAGGCAAACTATTATTTCTCTAGAAAAAGAGAAATACACGGCATCTTTGGAGCTAGCATTTAAGATAGCGCGTTATTTTGATAAACAAATTGAGGAAGTTTTTATTTATACAGAAAGTGAAGGAGGA

SEQ ID NO: 9124 - protein, 68 aa, Streptococcus agalactiae; identical to SEQ ID NO: 360

SEQ ID NO: 9125 - protein, 135 aa, Streptococcus agalactiae
ATGTCAAGGATGTGGACTATTGATTTTTGTCCACCAATCGTTTACCAGCAATATGTTTTTATCATTACTATTAGTATTAGCATTGCGATGTCTATTTTTGCTATTTATCGCTATGCTTCATTGAAGAAAACGATA

SEQ ID NO: 9126 - protein, 45 aa, Streptococcus agalactiae; identical to SEQ ID NO: 362

SEQ ID NO: 9127 - protein, 453 aa, Streptococcus agalactiae
ATGTTAATAAAAGGATTATTGTCACCCAATAGTAAAGTATCTCCGAAGGATTACAAAGTATATATGAGAGTTTTGTCTTTTGTTTTTAGTGTATGTAGTTTGATTATGATAGTATCATCATTTCTACATACCTTTGAATCTAATTTTACTAAAGGTTTTTCCTTTGGTTCAGGTATTGCCTTATTTGCAGGAAGTTTTTATTTTTTGGTGATAACATTTAGTGAAAAGCGATTTCAACATTACTATACCAAAGTTTTTGATGAGCGTAATCAATTTATTGCTAATATGTCTTGTCGACTTCTTTTCCTTTTATCTGTCCTTGTTTTAGTGGTATTGTGTCTGATTAATGTCTGGTTTGGTATAACTTTTTCCTATGCAAAGTTCTTGCTATTGATACTCTCTTTTATTTTATATGGTTATTTATTAATTTACTTTATTTTACAGAAGTTATTG

SEQ ID NO: 9128 - protein, 151 aa, Streptococcus agalactiae; identical to SEQ ID NO: 364

SEQ ID NO: 9129 - protein, 663 aa, Streptococcus agalactiae
GTGTCATTTATTATTAGAAAAGGCAAAATTTTAGCTTTGCTAATAGCATTTTTAGTTATTAATCAACTTGTTCCTATATTGGCTGTGTGGCTCCTAAAGAATCACTATCAAACGCCTTTTACTAGTATATTGTTGATTGGCTTAGAATTACTTATTATTGCTCTTTTCCTTTATTATGCCAAGGTTAAACAAATAATCAGATGGAAAGCATTATTGACAAGGAAAGCATTAGTTACTATTCTCTTAGGTTGGTTATCATTGAGGGTTCCACAAATTATTGGTTACCTCATTATGACTATGCAAGGGGTTAAAGATACAGCAAATCAAACAGTAATTATGGAATTAACAAAGCAACTTCCACTAGCTTTGATGTTAATTTTTGCCATAATTGGTGCCCCTATTATGGAAGAAATTATATTTCGCTATATTATCCCTAAAGAACTTTTTGCGAAACATCAAAAATGGGGTTTTGTCATCGGTACTTTAGCTTTTGCTCTTATTCATTCCCCTTCTGATATAGGTAGTTTTATTATTTATGCTGGGATGGGTGCTATTTTATCTTTTGTTTATTATAAAACTGAGCACTTAGAATATAGTATAATGATTCATTTTATTAACAATGCTCTTGCTTATAGCGTGTTAATCAGTACAATGATGAATAAC

SEQ ID NO: 9130 - protein, 221 aa, Streptococcus agalactiae; identical to SEQ ID NO: 366

SEQ ID NO: 9131 - DNA, 768 bp, Streptococcus agalactiae
atgaaaattggaattatcggcgtcggaaaaatggccagtgcaattattcaaggcctcaaacaaacccaacatgacattatcatatccggatcttgcttagagcgttcaaaagaaattgcagaaagacttgatgttacttacgccgaatctcatcagtcattaatcaatcaagctgatattatcatgttaggtattaaacctcaactatttgaaaaggttcttcttccacttgatatcacaaaaccaatcatctcaatggcagcaggaatctccttagcgcgtttaagccaattaactcgttctgatttaccattgattcgtattatgccaaatattaacgcacaaatacttcaaagttgcacagctatttgttacaacaatcatgtatcagatgagttacgacaattagccaaagaaattacggatagttttggaagtagctttgatatagcagaaaccaattttgataccttcactgctctagcaggttctagccctgcctatatctatctatttatagaagccttagctaaagcaggtgtaaaatatggatttccaaaagaacaagcactctctattgtaggacagactgtcttagcttctagtcaaaacctattacaaggacaaaatagcacctctgacttaatcgacaacatttgtagcccaggcggaactactattgctggccttttagacttagaaaaaaatggtctgacgcatagtgttatttctgccattgatgctactattgagaaagcaaaaaaactt

SEQ ID NO: 9132 - protein, 256 aa, Streptococcus agalactiae; identical to SEQ ID NO: 368

SEQ ID NO: 9133 - DNA, 1065 bp, Streptococcus agalactiae
atgtcagatttatttaacaaaattaaaaccgtaactgagcttgatgggattgctggctatgaacacaatatccgcaacttccttcgtcaagaaataactcctttagttgatcaagttgagacagacggacttggtggaatttttggagttaaaaatactcatgagactaatgctcctaaagtcatggttgctgcccatatggatgaagtcggctttatggttagtcatattcagccagatggaacatttcgtgtacttgaggttggaggatggaatcccctagtagtcagctcacaacgctttaccctctacacacgttctggtgatgctattcctgttatatcaggctcagttcctcctcactttcttcgtggacaaagcggtggaacaacattacccaaaattagtgacattgtttttgatggaggattcacagataaaaatgaagctgaaagctttggcattgctcctggcgatatcattgttcctaaatctgaaaccattttaactgcaaatcaaaaacatattatgtcaaaagcttgggataatcgctatggtgtgcttatggtgaccgaattgctaaaaagcttaaaagatcaaagtcttagcaacacacttattgctggggcaaatgttcaagaagaagtcggacttcgtggcgcacatgtttcaacaactaaattcaacccagatatcttcttagctgtcgattgttccccagctggagatatttatggggaacaaggcaaaataggagagggaaccttaatccgtttttatgatcccggacatatcatgcttaaagatatgagagatttcttacttacaacagctgaagaagcaggtataaaataccaatattatgctgcaaatggtggtaccgatgctggggctgctcacctaaaaaatagtggtattccttctacaactatcggtgtctgtgcacgctacattcattctcatcaaacactctacgctatggatgattttctacaagcacaagcttaccttcaggccatcgttaacaaattagaccgctcgacggtggatattattaaaggttat

SEQ ID NO: 9134 - protein, 355 aa, Streptococcus agalactiae; identical to SEQ ID NO: 370

SEQ ID NO: 9135 - DNA, 237 bp, Streptococcus agalactiae
atgaaagaaaaattattagtacctgctttaaattgtttgctaggtctactcttcctaggtgatcactggtttttatttcgtcttcaaaatggagaactttttgctattgtgacgctaatactgctttgcacaacttcatttttaatcaataagaatcaccccaaaaatttgactttaattgctatggttatcacttttttagccgtattatcttttctatctacctttttattagct

SEQ ID NO: 9136 - protein, 79 aa, Streptococcus agalactiae
MKEKLLVPALNCLLGLLFLGDHWFLFRLQNGELFAIVTLILLCTTSFLINKNHPKNLTLIAMVITFLAVLSFLSTFLLA

SEQ ID NO: 9137 - DNA, 318 bp, Streptococcus agalactiae
gtgtctaattccggggggtatggtataataacagttatgaaaaataaaaaaatcttatttgggactggccttgctggtgtgggtttactggcagctgctggttataccctaactaaaaaagtaacagattataaacgtcagcaaatcactcagaccttaagagaattttttagtcagatgggtgatattcaggtattttattttaatgaatttgaatctgatattaaaatgaccagtggtggtcttgtcttggaagatggcagaattttcgaattcatttatcgtcaaggtgttcttgattatgtggaggtgagcaaa

SEQ ID NO: 9138 - protein, 106 aa, Streptococcus agalactiae; identical to SEQ ID NO: 372

SEQ ID NO: 9139 - DNA, 321 bp, Streptococcus agalactiae
atgattttaccagaatcttatgaagaaatagcagcctatattgatagcactaagaaagttgttttcttttttacagcagattggtgtccagattgtcaatttatatatccagtaatgccatcaattgaaaaagatttctcagattttgtctttgtacgtgttaatcgtgatgactatatagaattagctcagcagtggaatatttttgggattccgagtttcgttgttgtggaaaatggtcaggaactgggtcgtttggttaataagaatcgcaaaacaaaggctgaaattactaaatttctcgctgaaattaactataaa

SEQ ID NO: 9140 - protein, 107 aa, Streptococcus agalactiae; identical to SEQ ID NO: 374

SEQ ID NO: 9141 - protein, 624 aa, Streptococcus agalactiae
ATGATTTTTACTTATAATAGAGAGCATGTTGGTGATACCTTAATGGTTATTGTTAAGGATAGTCAAGGAGCTAAGCTAGATGTTGATCGTCGCGGACAAGTAGCACGCGTCTATCTGCAAGATAGTAAAGAAACAGTTGCTTGGAATATCTTTGAAGTGTCAAGTTTAATTGTTATTGAGGGAGCAGGTCAAATAACTTTATCTGATCAAGATATTAAAATCCTTAATGCAGAACTACTGAAAGAAGGATTCGAAGACTCTCTTGTTAATAATATTGAACCTACATTTGTTGTGGCGCAAATTAAAGAAATGATTGATCATCCAGATAGTGACCATTTACATATCTGTCAAGCAGAAATCAACGATGGGAAGACGGTCCAAATCGTTTGTGGGGCACCTAATGCTTCAGTAGGTCTTAAAACAGTTGCAGCTCTTCCAGGAGCTATGATGCCAAATGGTAGCCTTATTTTCCCAGGAAAACTTCGTGGAGAAGATAGCTTTGGAATGTTATGTAGTGCTCGCGAGTTAGCTCTTCCAAATGCTCCTCAAGTCAGAGGTATCATTGAATTATCTGATCAGGTAATTGTTGGAGAGTCTTTCGACGCCAATAAACATTGGAAAAAT

SEQ ID NO: 9142 - protein, 208 aa, Streptococcus agalactiae; identical to SEQ ID NO: 376

SEQ ID NO: 9143 - protein, 714 aa, Streptococcus agalactiae
ATGACAAATGTAACTAGTTATAAAGAAATGCTGGCTAAACCTTGGGGAAAAATACAATATGAAATAACTTTTGCTCAATTAAGCCATATCAAAAATCAGAACGTTTTAGATTTTGGAGCTGGTTTTTGTCTCACCGAACAACATCTAGCAAAAGAAAACAATGTAACTGCTATTGAACCCAATCCTAAACTGCTTTACGATAATCAAAGTGACAATATTTATAAAATCCTAGGTTCCTACGAAGCATTAAGAGATTTGCCTGATCAAAGCTTTGATACTATTATTTGTCATAATGTTCTTGAATATATAGACAAACATAATCATCCTGCTTATTTTGACGAATTTTCTCGACTTCTAAAACCCAATGGAGAACTATCTCTCATCAAACATAATATAACCGGTAAAATATTACAATCAGTTATTTTTAGCAATGATACCTCCACTGCGATGGAACTCTTAACAGGAGAAGCAAACTTTAAAAGTGCCAGTTTTGACCAGGGAAATATTTATACCTTAGAAGAACTAAAACAAAATACAAATTTATTAGTTGAACGTTATCAGGGTATTCGTACCTTCTATTCATTACAACCAAACCATTTTAAAACTGAAACTGGTTGGCTAAACAAAATGCTTGCTATCGAGCTAAGTGTTGCTGACAAAGCTCCTTATAAAGATATTGCTTTTTTGCAACACATCACACTTAAAAAGTCATTG

SEQ ID NO: 9144 - protein, 238 aa, Streptococcus agalactiae; identical to SEQ ID NO: 380

SEQ ID NO: 9145 - protein, 393 aa, Streptococcus agalactiae
ATGTATAATAAAGTTATTATGATTGGGCGTCTAACAGCAAAGCCTGAGATGGTAAAAACACCAACTGACAAGTCAGTGACGCGTGCAACTGTTGCTGTTAATAGACGCTTTAAAGGAAGTAATGGTGAGCGTGAAGCAGATTTTATTAATGTGGTTATGTGGGGTCGTCTAGCGGAAACCCTTGCGAGCTATGGGACAAAGGGCTCTTTAATTTCAATAGATGGTGAATTGCGTACGCGCAAGTACGAAAAGGATGGTCAAACGCACTATATCACTGAAGTATTAGCATCATCATTTCAGTTGCTAGAAAGCCGTGCCCAACGTGCTATGCGTGAAAATAACGTTTCTGGTGATTTGTCAGATTTAGTATTGGAAGAAGAGGAGCTCCCCTTT

SEQ ID NO: 9146 - protein, 131 aa, Streptococcus agalactiae; identical to SEQ ID NO: 382

SEQ ID NO: 9147 - protein, 726 aa, Streptococcus agalactiae
TTGCTTTTCACAGAAAGCAACCTTTTTTTATTGAAAATAGAAAGGCAAACGATTACAATAAAGGGGATAGAAAGCAGGTTTAAGATGGAAAAAGTCATTATTTTTGATATGGACGGCGTTATTGTTGATTCCGAGTACACGTTTTTAGATAATAAGACAGAAATGTTACGTGAGGAGGGTATTGATACGGACGTCTCGTATCAATACCAGTACATGGGGACTACTTTTGAATTCATGTGGCAAGCTATGAAAGAGGAGTTTGGCTTACCGAAAACAGTAAAAGAGTATATTGCTGAGATGAACAGACGTCGACAAGCGATTGTGGCGCGTGATGGTGTTAGGCCCATCAAAGGAGCTCAGCGACTGATTCATTGGTTACACCAACATGGCTATCGCTTAGCAGTTGCGTCCTCATCTCCAATGGTAGATATTAAGCGTAATCTAAAAGAGTTGGGTGTGACAGAATGCTTTGAATACATGGTTACAGGAGAAGATGTATCGTCTTCTAAACCAGCACCAGATGTTTTTCTTAGAGCTGCAGAGCTTTTAGATGTAGACCCTAAAGTTTGTATAGTTATAGAAGATACAAGAAATGGGAGTTTAGCTGCTAAGGCAGCAGGAATGTATTGCTTTGGCTTTGCTAATCCTGATTATCCACCGCAAGATTTATCAATGGCAGACAAGGTTATTTCAGATTATCAAGATATCTATATTTATCTTCCGGAG

SEQ ID NO: 9148 - protein, 242 aa, Streptococcus agalactiae; identical to SEQ ID NO: 384

SEQ ID NO: 9149 - protein, 1743 aa, Streptococcus agalactiae
ATGTTGATGGTGTTGTTATTCCAAAGGCTAGGAATTATTATGATTTTAGCCTTTTTATTGGTAAATAATAGTTATTTTAGACAGTTAATTGAAGAGCGGTCTAAACGTGAAACGGTAGTCCTTGTCATCATTTTCGGCTTGTTTGTTATTATATCTAATATAACAGGAATTGAAATAAAAGGGGATCGAAGTTTGGTCGAGCGCCCTTTTCTAACAACGATTTCTCATTCTGACTCACTTGCTAATACAAGGACTTTAGTTATTACAACGGCAAGTTTGGTTGGTGGACCTCTGGTTGGATCAATTGTTGGTTTTATTGGAGGAGTTCATCGCTTTTTTCAAGGAAGCTTTTCAGGTTCTTTCTATATTGTCAGTTCAGTTCTAGTCGGCATTGTTAGCGGAAAGATTGGTGATAAGCTTAAGGAAAACCATCTCTACCCTTCAACAAGCCAAGTTATTTTAATTAGTATTATTGCCGAAAGTATCCAGATGCTATTTGTTGGCATTTTTACAGGATGGGAACTTGTCAAAATGATTGTCATTCCAATGATGATTTTAAATAGTTTAGGTTCCACACTTTTCCTTGCGATTTTGAAAACTTATTTGTCAAATGAAAGTCAGTTACGCGCAGTTCAAACGAGAGATGTTCTTGAATTGACTCGACAGACTCTGCCCTACCTTAGACAAGGTTTGACACCGCAATCTGCTAGGAGCGTTTGCGAAATTATAAAGAGGCATACTAACTTTGATGCTGTGGGATTAACAGATCGGTCAAACGTATTAGCTCATATTGGTGTTGGCCATGATCACCATATTGCAGGACAACCGGTCAAAACAGACTTATCTAAAAGTGTTATTTTTGATGGCGAACCAAGAATTGCGCAAGATAAAGCGGCGATTTCTTGTCCAGATCACAACTGTCAGTTAAATTCTGCTATTGTAGTTCCTCTAAAAATAAATGATAAAACTGTGGGTGCCTTAAAAATGTACTTTGCAGGAGATAAGACAATGTCTGAGGTGGAGGAAAACCTAGTCCTTGGTTTAGCGCAAATATTTTCAGGACAACTGGCAATGGGGATAACAGAGGAACAAAATAAGTTAGCCAGTATGGCAGAGATAAAGGCTTTACAAGCACAAATCAACCCTCATTTCTTCTTTAATGCCATTAACACAATTAGTGCATTAATCCGTATTGATTCTGATAAAGCACGTTATGCACTGATGCAGTTAAGTACTTTTTTTAGAACAAGTTTGCAGGGTGGTCAGGATCGTGAGGTAACGCTTGAGCAAGAAAAATCACATGTGGATGCTTATATGAATGTTGAAAAATTACGTTTCCCTGATAAATATCAGTTATCTTATGATATTAGTGCACCAGAAAAAATGAAGTTACCACCTTTTGGTTTACAGGTACTGGTAGAGAATGCAGTTCGACATGCTTTCAAAGAACGTAAGACGGACAACCATATATTGGTTCAAATAAAGCCAGATGGTCATTATTATTGTGTTTCTGTTAGTGACAATGGACAAGGAATCTCAGATACTATCATTGATAAATTAGGTCAAGAAACAGTTGCAGAGAGTAAGGGTACAGGTACTGCTCTAGTTAATCTAAATAACAGGCTGAATTTATTATATGGTAGTGTAAGTTGCCTTCATTTTTCGAGCGACAAGAATGGTACAAAAGTTTGGTATCGAATACCTAATAGAATAAGGGAGGATGAGCATGAAAATTTTAATTCT

SEQ ID NO: 9150 - protein, 581 aa, Streptococcus agalactiae; identical to SEQ ID NO: 386

SEQ ID NO: 9151 - DNA, 738 bp, Streptococcus agalactiae
atgaaaattttaattcttgatgatgaaatgtttgccagacaagaattatcgtttttagttgaacatagccaggaggttgacaaccctgagatttttcaggctgaggatatcagtgaagccgaaaaaatcttatttagacagcaaattgatttaatttttttagatatttcgcttagtgaagaaaatggctttactttggctaatcagttgagccaacttgcacatcccccacttgttgtttttgcgacagcttatgataactacgctgtgaaagcttttgaaagtaacgctgttgattatatcatgaaaccgtttgaacaacagcgcgttgatatggctctatcaaaagtgaagaaattgagccaactcaccactgcttcagatgtagagcaagcaatacctaaaaaagccagtgttgaattgttaaccttgacattatcagatcgcagtgttgttgttaaaatgcaagatattgttgcagctagtgttgaagatggcgaattaactgttagtacagttcagaaaacttacactattcggaagacactcaattggtttaagtcacgcgctgtagcaccatattttctccagattcatcgaaacacagtgattaatctagagatgattgaggaaattcaaccttggtttaatcatactttgttactaattatgtctaatggagagaaatttccagtaggtcgatcgtatttaaaagacctaaatgagcatttaaccatg

SEQ ID NO: 9152 - protein, 246 aa, Streptococcus agalactiae; identical to SEQ ID NO: 388

SEQ ID NO: 9153 - DNA, 453 bp, Streptococcus agalactiae
atgaaacacaccagtaaagaaaccaaaacaaaagaagctccaatgtttattcaaatgtcaatatatgcagctattctattagtttcacaaatgatttcaatgttattaccgaaatcactaccaatcccaacgacggttattggtttggtgctaatgtatgtattgctaactgctaaaattatcaaggtagagtgggttgactcttttggggctttgatgataagcatgattggttttatgtttgtcccctcaggaatatcagtagcagcgaatcttgatatcctaaaagctgaaggcttgcaactagttgctgttattacaatctcaactgttgttatgttggtagtggtagcatatgttgcacgattaatacttgctatcagagaactcagtgtcacagatttatttaaaaagatattacctaaccactatagtaagaaagtagaggaaaaa

SEQ ID NO: 9154 - protein, 151 aa, Streptococcus agalactiae; identical to SEQ ID NO: 390

SEQ ID NO: 9155 - DNA, 726 bp, Streptococcus agalactiae
atggaactcttaaaaacacccatctttggtatttgcttttctttaatactctatacgataggacaacatttatttaagaagagtaaaggtttcttccttttgcagcctcttttctttgcaatggttagtggtattgtcattctttggcttatgtcaaaaggtttaggaaccgatgttaagacattttatacacaagcttataaaccaggtggtgatttaatattttggtttttaaatccagcgacaattgcttttgcagttcctctctataagaaaaatgacgttgttaaaaaatattgggtagaaattctcagcagtttagtaatcggtatgattgtttcccttatacttatcgtcgctatttctaaaatggttgggcttagtcaagtcggaattgcttcaatgttgccacaagcagcaacaacagcaattgctcttccaataacagcagcaattggagggaacacagctgtgacagcaatggcgtgtatcttaaatgcagttattatttatgcattaggtaaaaaattagtgtcatttttccatttgaatgatagtaagattggtgcaggattaggtctagggacctctggtcatacagtcggagcagcctttgcattggaattgggagaactgcaaggtgcgatggcagctatagctgtggtggttatcggtttggtagttgatttggttattcctatctttagtcatttgattggtttgcta

SEQ ID NO: 9156 - protein, 242 aa, Streptococcus agalactiae
MELLKTPIFGICFSLILYTIGQHLFKKSKGFFLLQPLFFAMVSGIVILWLMSKGLGTDVKTFYTQAYKPGGDLIFWFLNPATIAFAVPLYKKNDVVKKYWVEILSSLVIGMIVSLILIVAISKMVGLSQVGIASMLPQAATTAIALPITAAIGGNTAVTAMACILNAVIIYALGKKLVSFFHLNDSKIGAGLGLGTSGHTVGAAFALELGELQGAMAAIAVVVIGLVVDLVIPIFSHLIGLL

SEQ ID NO: 9157 - DNA, 108 bp, Streptococcus agalactiae
ttgataaataatatttttgacaacttttttcattataacaagaaaaaagtaggagaacaattacttaactggttaattagaaaatttgttattttatcattaataact

SEQ ID NO: 9158 - protein, 36 aa, Streptococcus agalactiae; identical to SEQ ID NO: 396

SEQ ID NO: 9159 - DNA, 1488 bp, Streptococcus agalactiae
atgggggcaaagcttcctcatgaattcgatccaaaggaccgttatggaatccataatgaaggtaatattactcatagcaccctattgaaacgttctcctgaactagatataaaaggagagcttgctaaaaaatataaaatctctaaggatagcttaacgtggtcgttcgacttaaatgatgattttaaattctccaatggtgagcctgttactgctgacgatgttaagtttacttatgatatgttgaaagcagatggaaaagcttgggatttgacctttattaagaatgttgaagtagttgggaaaaaccaggtaaatattcatttgactgaggcgcattcgacatttacagcacagttgacagaaatcccaatcgtccctaaaaaacattacaatgataagtataagagcaatcctatcggttcaggaccttacatggtgaaagaatataaggctggagaacaagcaatcttcgttcgaaatccctattggcacggtaaaaagccttattttaaaaagtggacttgggtattacttgatgaaaatacagcactagctgctttagaatctggtgatgttgacatgatttacgcaacgccagagcttgctagcaagaaagtcaaaggaacacgtcttctagatattgcttcaaacgacgttcgcggactgtcattgccttatgtgaagaaaggtgttgtgaaaaattcaccagacggttatccagtaggaaatgatgtcactagtgatccagcaatcagaaaagccttgactattggtttaaatagacaaaaagttctggatactgttttaaatggttatggtaaaccagcttattcaattattgatagaacaccattctggaatccaaaaacagcaattaaagataataaagtagctaaagctaagcaacttttgacaaaagctggatggaaagaacaagcagacggtagccgtaaaaaaggaaatcttaaagcggaatttgacctttactaccctactaatgatcaattacgagcaaacttagccgttgaagtagcggagcaagctaaagccttaggtattactattaaactcaaggctagtaactgggatgaaatggcaactaagtcacatgattcagccttactttatgcgggaggacgtcatcatgcgcagcaattttatgaatcacattacccaagtttagctggtaaaggttggaccaatattactttttataacaatcctactgtgactaagtaccttgacaaagcaatgacatctcctgaccttgataaagctaacaaatattggaagttagctcagtgggatggcaaaacaggtgcttccactcttggagatttaccaaatgtatggttggtgagtcttaaccatacttatattggtgataaacgtatcaatgtaggtaaacaaggtgtccatagtcatggtcatgattggtcattattgactaacattgctgaatggacttgggatgaatctgctaag

SEQ ID NO: 9160 - protein, 496 aa, Streptococcus agalactiae
MGAKLPHEFDPKDRYGIHNEGNITHSTLLKRSPELDIKGELAKKYKISKDSLTWSFDLNDDFKFSNGEPVTADDVKFTYDMLKADGKAWDLTFIKNVEVVGKNQVNIHLTEAHSTFTAQLTEIPIVPKKHYNDKYKSNPIGSGPYMVKEYKAGEQAIFVRNPYWHGKKPYFKKWTWVLLDENTALAALESGDVDMIYATPELASKKVKGTRLLDIASNDVRGLSLPYVKKGVVKNSPDGYPVGNDVTSDPAIRKALTIGLNRQKVLDTVLNGYGKPAYSIIDRTPFWNPKTAIKDNKVAKAKQLLTKAGWKEQADGSRKKGNLKAEFDLYYPTNDQLRANLAVEVAEQAKALGITIKLKASNWDEMATKSHDSALLYAGGRHHAQQFYESHYPSLAGKGWTNITFYNNPTVTKYLDKAMTSPDLDKANKYWKLAQWDGKTGASTLGDLPNVWLVSLNHTYIGDKRINVGKQGVHSHGHDWSLLTNIAEWTWDESAK

SEQ ID NO: 9161 - protein, 975 aa, Streptococcus agalactiae
GTGAAACATATTACCACTGTAGTTATCTGGAAGATACTTAGGTGTTTGTCACTCGTTTTTGGAGTATCAATTTTGACCTTTATTTTACTAAAACAATCACCGGTTGATCCAGTCATGGCAAGTGTCAATTATGACACGTCACTAACCCCTGTTCAGTACAAAGCGATTGCTCACCACTATGGTTTGGATAAGCCAGCTCCGGTCCAGTATTTTATTTGGTTAAAAAATTTTATACAGGGACATTTAGGGACTTCACTAGTTTATCGGCAACCTGTTATTGATATTATTAGATCACGGGCAGGTGCCTCTTTCATACTTATGGGACTCTCCTGGGTCTTATCGGGTCTTATTGGATTTATCTTAGGAACTTTATCAGCTTTCCATCAAGGGAAATTGCTTGATCGAATTGTAAGGTGGTTTTCTTACCTTCAGATATCAGTACCAACTTTTTGGATTGGGCTCATTTTTTTATTAATCTTTTCTGTCCAGCTGGGGTGGTTCCCGATTGGTATTTCTTCCCCGATAGGTACTTTGAGTCAAGATATTACGTTAGCTGATCGTATTAAGCACCTTATTTTACCTGTTTTCACGCTAAGTATTCTAGGCATTGCCAATGTAACTCTTCATACTAGAACTAAAATGATGTCGGTACTTTCTAGTGAATATGTCTTATTTGCCAGAGCGCGTGGGGAAACGGAATGGCAAATTTTTAAAAATCATTGTCTTAGAAATGCTATCGTACCAGCTATTACACTGCATTTTTCCTATTTTGGAGAATTGTTTGGAGGATCCGTTCTTGCTGAGCAAGTTTTCTCATATCCAGGACTAGGGTCTACCCTAACTGAAGCAGGACTTAAAAGTGATACACCGCTACTTCTAGCTATTGTGATGATAGGGACATTATTTGTTTTTGCGGGCAATCTTATTGCGGATATTTTAAACAGCATAATCAATCCACAGTTAAGGAGAAAAGTA

SEQ ID NO: 9162 - protein, 325 aa, Streptococcus agalactiae; identical to SEQ ID NO: 400

SEQ ID NO: 9163 - protein, 819 aa, Streptococcus agalactiae; identical to SEQ ID NO: 4723

SEQ ID NO: 9164 - protein, 273 aa, Streptococcus agalactiae; identical to SEQ ID NO: 402

SEQ ID NO: 9165 - protein, 801 aa, Streptococcus agalactiae
ATGACAGAAACATTATTAAGCATTAAAGACCTCTCCATCACCTTCACTCAATACGGAAGATTTTTAAAACCATTTCAATCAACACCGATACAAGCGCTGAATTTAGAAATTAAAAAAGGTGAGTTATTAGCTATTATAGGTGCTAGTGGTTCAGGGAAGAGTTTATTAGCACATGCTATTATGGATATTCTTCCTAAAAATGCATCTGTAACAGGAGATATGATTTATCGTGGTCAATCACTAAATTCTAAACGCATTAAACAGTTGCGAGGAAAAGATATTACGTTGATTCCACAATCAGTTAATTATTTAGATCCATCTACGAAAGTCAAACATCAGGTGCGCTTAGGTATCTCAGAAAATTCAAAGGCTACTCAAGAAGGATTGTTTCAACAGTTTGGTTTAAAAGAAAGTGATGGTGACTTGTATCCTTTCCAACTTTCTGGCGGAATGCTCCGACGTGTTTTGTTTACAACGTGTATTAGTGATAAGGTTTCTTTGATTATTGCGGATGAGCCCACCCCTGGATTACATCCAGATGCTCTGCAAATGGTTTTAGACCAACTACGCTCCTTTGCAGATAAAGGAATAAGCGTTATATTTATCACTCATGATATTGTAGCAGCTAGTCAAATTGCTGATCGTATTACTATTTTTAAAGAGGGAAAAGCTATTGAAACAGCTCCAGCTAGTTTCTTTAGCGGAAATGGAGAGCAGTTACAAACAGAATTTGCTAGAAGTTTATGGCGCTCTCTCCCACAGCAAGAATTTTTGAAAGGAGTTACTCATGACCTTAGAGGC

SEQ ID NO: 9166 - protein, 267 aa, Streptococcus agalactiae; identical to SEQ ID NO: 404

SEQ ID NO: 9167 - protein, 624 aa, Streptococcus agalactiae
ATGACCTTAGAGGCTAAAAAGCTTGGCTTTTATCATAAAAAAGATCAATGGCTTTTTAAGGAGATTAATTTAGAGGTAGCACCTGGTCAAGTTTTAGGTATATTTGGACAAAGTGGTTGTGGAAAAACTAGTTTATCCAGGGTGCTTGCAGGTTTTTTACATCCTAAATCTGGTGAAGTATTAGTTGATGGCAGTAATTTGCCTAGCAAAGCATTTAGACCTGTACAACTTATTCAACAACATCCTGAAAAAACGATGAATCCTTTATGGCCTATGAAAAAAAGTTTGGAAGAAGCCTATTACCCAAGTCGAGATTTACTAGATGCTTTTGGAATTCAAGAAAAATGGCTAAATCGTCGACCTAGTGAACTCTCGGGAGGAGAATTACAACGCTTTTCGATTGTGCGTTCATTACATCCAGAGACTAAATACCTTATTGCAGATGAAATGACTACTATGTTGGATAGCATTACACAAGCTAGTGTATGGAAAAGCATGTTGGAGATTGTAAAGGATAGAAATTTAGGTCTCATCGTTATTAGTCATGATTTCGCTATGTTAGAGAAACTTTGTAACCAATGCTATATGATTGAAGAGAATCGTATCGTATCTTTCAATGGAGAT

SEQ ID NO: 9168 - protein, 208 aa, Streptococcus agalactiae
MTLEAKKLGFYHKKDQWLFKEINLEVAPGQVLGIFGQSGCGKTSLSRVLAGFLHPKSGEVLVDGSNLPSKAFRPVQLIQQHPEKTMNPLWPMKKSLEEAYYPSRDLLDAFGIQEKWLNRRPSELSGGELQRFSIVRSLHPETKYLIADEMTTMLDSITQASVWKSMLEIVKDRNLGLIVISHDFAMLEKLCNQCYMIEENRIVSFNGD

SEQ ID NO: 9169 - protein, 2028 aa, Streptococcus agalactiae
ATGGAACAATTTAAACATGATGCCAAAGCCTTGTTAGAGGCAATTGGGGGTAAAGAAAATATTAGTGCAGTGACACATTGTGCTACACGCATGCGATTTGTTTTGAATGACAGTAGTAAAGCTAAGGTAAAGGTAATTGAGGAGTTACCATCAGTCAAGGGTACCTTTACCAATGCTGGGCAATTTCAAGTCATTATTGGTAATGATGTCCCTATTTTTTATAATGCTTTTGTAGCCGTTTCTGGTATTGAGGGTGTGTCTAAAGAGGCGGCAAAATCGGCTGCCCAAAAAAATCAAAACCCTTTACAGCGTGTGTTGACAATGCTGGCTGAAATATTTACACCGATTATTCCAGCCATTATTGTTGGTGGTCTGATCCTTGGTTTTCGTAATATTTTAGATGCCGTTCCATTTGAATTTTTAGGTCAAAAAGTTGTTGATGGTGTCAGGCAAGTAGACTCTTCTGGGCATCCAATTTGGAATACTCTAGTAGATGTTTCAACGTTTTGGAGCGGAGTAGACTCTTTTTTATGGTTACCAGGTGAAGCTATATTTCATTTCTTACCAGTTGGTATTGTATGGTCTGTGACTCGTAAGATGGGGACTACTCAAATCCTCGGTATTGTTCTAGGTATCTGTCTAGTGTCGCCACAATTACTTAATGCTTATTCTGTAGCTAGTACTTCAGCAGCAGACATTGCTAAAAATTGGTCTTGGAATTTTGGTTACTTTACAGTACAAAAAATTGGTTATCAAGCTCAAGTTATTCCAGCTCTGTTAGCTGGTTTGAGCCTGTCTTACTTAGAAATCTTCTGGAGAAAACATATTCCTGAAGTTGTTTCAATGATTTTTGTGCCATTTCTATCCTTAGTTCCAGCTATTATCTTGGCTCATACTGTCCTTGGACCTATTGGTTGGACACTAGGTAAATGGATTTCTGCTATCGTTCTTATTGGATTGACTGGTCCTGTAAAATGGCTCTTTGGTGCTATTTTTGGTGCCCTGTATGCCCCATTTGTTATTACTGGTTTGCACCACATGACAAATGCTATCGATACTCAACTCATAGCAGATACAAAAACACATACAACTGGCCTTTGGCCGATGATTGCTCTTTCAAATATTGCTCAGGGTTCAGCTGTACTAGCTTATTATTTTATGCATCGTCATGATGAAAAAGAGGCTCAAATATCACTTCCAGCTGCTATCTCAGCCTACCTTGGTGTTACAGAGCCGGCGCTTTTTGGTGTAAACGTTAAATACATTTATCCATTTGTTGCTGGTATGATTGGTTCAAGTGTGGCAGGTCTTTTGGCGACAACTTTTAATGTCCAAGCTAACTCTATTGGTGTAGGCGGTCTTCCAGGCTTCCTGTCAATTAACGTTAAATATATGGGATATTTCTTTATCTGTATGGCAGTGGCTATCTTTATTCCTTTATTTTTGACACTATTCTTTAAAAAATCAGGTATTTTGACAAAAACTGAAGAGGAAAAATTAGTACCTGATGCTGTCATTGCTTCAACAACAGAAACAAAATCAGCAAAAGAAAAAGCTGTCGTATCAGGTACAAAGCTTAGTGTAGTAAGCCCTTTATCAGGTTTAGCTAAACCACTGGATCAAGCTAGTGATCCTGTCTTTTCACAAGGAATTATGGGGAAGGGAGTGGTTATCGATCCAAGTGATGGAGAACTAGTTTCACCGGTCGATGCGACAGTTTCAGTTCTTTTCCCTACGAAACATGCTATTGGATTGTTAACATCAGAGGGGGTTGAGTTTCTTATTCATATTGGTATGGATACTGTTAATTTAGAAGGAAAAGGGTTTACCTCTCATGTTGCTCAAGGTGACACTGTAAAAGTAGGAGATAAACTCATTACTTTCGATATTCCAATGATAAAAGAAGAAGGATACATTGTGGAAACTCCTATTCTGATTACTAATCAACAAGAATTCCGACCAGAAGAATTGATAGATTTACCCAAACAGATAAAACGTGGACAAGCATTAATGGTTGCCAAGAAAATT

SEQ ID NO: 9170 - protein, 676 aa, Streptococcus agalactiae; identical to SEQ ID NO: 408

SEQ ID NO: 9171 - DNA, 1623 bp, Streptococcus agalactiae
atgacgattgataaacgtaaagttgtctatcaaatttatccaaaatcatacaaagacacaactggtaatggggttggtgatcttcgtggtattatcgaaaaattaccctatttagcagaacttggtattgatatggtttggctcaacccattttatccaagtccacaacgagataatggatatgatatctctgattatacagctattaaccctgattttggaacgatggacgattttgaagaaatgattgaggtgggacgtcaataccgtatagattttatgcttgatatggtgcttaatcattgttcaatagaacatgagtggtttaaaaaagcacttgcaggagatcgctactatcaagatttctttatcttacgtgataatccaacagattgggtatctaaatttggtggaaatgcttgggcaccatttggtgatacagggaagtattatcttcatctttttgatatcactcaagctgaccttaattggcgcaatgccgatgttcgcaaggaactttttaaagttgtcaatttttggcgtgataaaggggttaaaggttttcgatttgatgtgattaatttaattgggaaagatgagatacttgagaactgcccaattaatgatggaaaaccagcttatactgatcgtccaataacacatgattatctcaagatgttgaataatgctagttttggacaagatgattccttcatgacagttggtgaaatgtcttcaacgacaattgcaaattgcattctttacactgcaccagaacgtgaagagttatccatggcttttaattttcaccacctcaaagtagattataaagatgggcaaaagtggaccattatggcttttgattttcctgcattacgtgaccttttccatagttggggcgaagggatgagcgaaggaaatggttggaatgctttattctataataatcatgaccaaccgcgagcattaaatcgttttgtagacgtgaaacgttttcgaaatgaaggagcaaccatgttagcagcatctatccacttatcgcgtggtactccttatatatatatgggtgaagaaatcggaatgcttgatcccgattacagttctatggatgattatgtggatattgagagtttgaatgcctaccaaataatgcttgatgaaggcaagtcacaagaagaggcatttagcattattcgagcgaaatctcgagacaattctcgagtaccaatgcaatgggatgatagtacgaatgcaggtttttctgaaggcgctccatggttgaaagtaggaaaatcatataaagaaatcaatgtcgcaaaggagaaaacagggctgatatttactttctatcaagagttgataaggctacgtaaacaactgccaataatagctgacgggaattataaagcagctttcaaagataatgaaaaagtatatgcttttgaacgccatcttgataaggaaaaacttcttgttttaaataatttctttgctgagaaagttaagataaaattaccggagaattatctccaaggacaagttcttctatcaaattataaggatgttactcttgatgaaacggttactttgcaaccttatcaaactttagctatcttagtgtca

SEQ ID NO: 9172 - protein, 541 aa, Streptococcus agalactiae
MTIDKRKVVYQIYPKSYKDTTGNGVGDLRGIIEKLPYLAELGIDMVWLNPFYPSPQRDNGYDISDYTAINPDFGTMDDFEEMIEVGRQYRIDFMLDMVLNHCSIEHEWFKKALAGDRYYQDFFILRDNPTDWVSKFGGNAWAPFGDTGKYYLHLFDITQADLNWRNADVRKELFKVVNFWRDKGVKGFRFDVINLIGKDEILENCPINDGKPAYTDRPITHDYLKMLNNASFGQDDSFMTVGEMSSTTIANCILYTAPEREELSMAFNFHHLKVDYKDGQKWTIMAFDFPALRDLFHSWGEGMSEGNGWNALFYNNHDQPRALNRFVDVKRFRNEGATMLAASIHLSRGTPYIYMGEEIGMLDPDYSSMDDYVDIESLNAYQIMLDEGKSQEEAFSIIRAKSRDNSRVPMQWDDSTNAGFSEGAPWLKVGKSYKEINVAKEKTGLIFTFYQELIRLRKQLPIIADGNYKAAFKDNEKVYAFERHLDKEKLLVLNNFFAEKVKIKLPENYLQGQVLLSNYKDVTLDETVTLQPYQTLAILVS

SEQ ID NO: 9173 - DNA, 2034 bp, Streptococcus agalactiae
atggttgataataagactgttgtgataatgttggtatttttagctcggaaaaatctttccttgtatgagttaacagtgcaaacaaagttttcaataaaagttatcatagagcaaattaactatctcaatagttttttagcaaaaaatcacctaccagctattgctcactctgctggacgttatcagttattaggagatgaaaaagagcatgataaaattgtctccttattagaagctgagcaattttacctaacccaggaagaaagggtatgtctgatttacctttatagcttttgccgaagagagtttgtctccaatgtgcattatcaagattttttgaaagtaagtaagaatactactttatcagatatcaagatgctacgttctaaattagcaaaaagaggtatctcactcacttatacaagagcaaagggatatagtctagtaggagatgagatggataagcatcaagttgcttttcagatgataactcaactactagaatctcccattggtttttggtctttgaattatatcttgtcttcttggaaattcgctctctcatatgagaagttagaaaagacggtagaatatttctatgaatcttttcaactttctccaatacaagataggcttgagaaatctttatattttatcattttaatactgtgtcgttatcaaaggtcagtagatcgtgttttgcagggttctcctattgtttctgaacaattaaaagagttaacgactattattgtgactaatttaagtcaggatatttccttatctaaaccattagatcagaaagaaaaagattatattaccttgatcttatctggctgttttgaaggtgagggaactaaagatgatgatttctttgaagcattggcaaaagcaatcgttgatgagatggaaactgtttcacttcttaatttttccaataaagaagagttattacaaggtctgaagcgtcatattattccagcttatttccgattgaaatatggtttaactggcgatagtggttatacacaaaatattaaagagcattacagtgatttatttctattggttaaaaaggcactacgtcctttggaagagcaagtaggattaatacccgatagtgaaatttcttacttcgtgattcactttggaggctatcttagacaatcaggtggtacacaatcaatgtcttataaagctttgatactctgtccaaacggcgttagttcatccttagtgattaaggaaaaattgcgtggattatttcctcaaattcattttcatcgtgtctctaaaattgagcagctgaaactgattgacaatcaaacttacgatatggtcttttctactatatttgtagaaacaaaaaaacctaattatctagtttcgctgatgatgacagcagagcaagtacaacagctcaaagaactggttatttcagattttcccaaagcttgccttgacgatttccaacttgatcaattaatagcaactataaaaaaatacgctcatgttcattgtgaagaggaattaaaattggctttgaggacaatggtaaaacaagatatatttagaaaggatgtgaggcccttgttgcaccaacttataacagaggaaacttatcagacaagttctgaacaaatgaattggaaagaggcaattcgtttagcggcaaaacccttgttagcttctggaaaaattacggaaagttacccagaagctatgattgaaaaggtcgaagagtttggtccttttatcaatcttggtaaaggtattgctattccacatgccagaccagaagatggggtaaactctgtcggtatgtcaatgcttgttttggaacagcctatttatttattggatgaccccaaacaggaaatttatctcttattatgcatagcagctattgataatgaaacgcatttgaaagctctatcgcatttgacaacaatacttcgtgataataataatgttaaagctttgttagcttcacgtgggtatcaagatattgaaatgattataaaacaggaggat

SEQ ID NO: 9174 - protein, 678 aa, Streptococcus agalactiae
MVDNKTVVIMLVFLARKNLSLYELTVQTKFSIKVIIEQINYLNSFLAKNHLPAIAHSAGRYQLLGDEKEHDKIVSLLEAEQFYLTQEERVCLIYLYSFCRREFVSNVHYQDFLKVSKNTTLSDIKMLRSKLAKRGISLTYTRAKGYSLVGDEMDKHQVAFQMITQLLESPIGFWSLNYILSSWKFALSYEKLEKTVEYFYESFQLSPIQDRLEKSLYFIILILCRYQRSVDRVLQGSPIVSEQLKELTTIIVTNLSQDISLSKPLDQKEKDYITLILSGCFEGEGTKDDDFFEALAKAIVDEMETVSLLNFSNKEELLQGLKRHIIPAYFRLKYGLTGDSGYTQNIKEHYSDLFLLVKKALRPLEEQVGLIPDSEISYFVIHFGGYLRQSGGTQSMSYKALILCPNGVSSSLVIKEKLRGLFPQIHFHRVSKIEQLKLIDNQTYDMVFSTIFVETKKPNYLVSLMMTAEQVQQLKELVISDFPKACLDDFQLDQLIATIKKYAHVHCEEELKLALRTMVKQDIFRKDVRPLLHQLITEETYQTSSEQMNWKEAIRLAAKPLLASGKITESYPEAMIEKVEEFGPFINLGKGIAIPHARPEDGVNSVGMSMLVLEQPIYLLDDPKQEIYLLLCIAAIDNETHLKALSHLTTILRDNNNVKALLASRGYQDIEMIIKQED

SEQ ID NO: 9175 - DNA, 282 bp, Streptococcus agalactiae
atgttaagaattggaacagcatgtggatcaggtctaggttcaagttttatggtacaaatgaatattgagtctattttgaaggatttgggggtttctgatgttgaagttgaacattatgatttaggtggagcagatccaagcgcagcagatgtttggattgttggtcgtgatttggaggattcagctggtcacctgggggatgttcgtattttaaacagtatcattgatatggatgaattgagagaattagtgacaggtatttgccaagaaaaaggcttaatc

SEQ ID NO: 9176 - protein, 94 aa, Streptococcus agalactiae; identical to SEQ ID NO: 416

SEQ ID NO: 9177 - DNA, 1353 bp, Streptococcus agalactiae
atgaaaggtctattggattttttagttaatattgccagcacgccagctattttagtcgccttgatagccattatcggtttagtactgcagaaaaaaggtgttcctgatattgtaaaaggtggaataaaaacatttgttggcttcttagtggtttctggaggtgcagggatagtccaaaattccttgaatccatttggaaaaatgtttgagcatgcttttcatttggtgggggtagttcctaataatgaagccattgtagcagtagctcttacgaagtatggctcagcaactgctttgattatgttagcgggaatgatttttaatattttaattgctcgttttacaaaatttaaatatatttttctgacaggacatcatacattgtatatggcttgtatgattgctgttatttttgccgtagcaggctttacttcgttctcgctcatcctttttggaggtctagcgttagggattattatgagcgtatctcctgcatttgtgcaaaaatacatgattcaactgacaggtaatgataaggtggcacttgggcactttggttctttaggctattggttgagtggatttattggtggaattgttggagataaatcaaaatcaacagaagatattaaatttccaaagagtttatcatttttacgtgacagtaccgtaagtattactatctcaatggcaattatttaccttatcgttgcagtgtttgctggtgaggcttatattgcaaaagaaataagtaacggtgtcaatggtcttgtttatgccctccaactagctgggcaatttgcggcaggtgtattcgttattttagcaggtgtacgccttatcctaggtgaaattgtaccagcctttaagggaatctcagaaaaattggttccaaattcaaaaccagccttggattgtccaattgtttacccttatgcacctaatgcagtattgattggttttatctcaagttttgttggtggattggttagtatgatagtcatgattgtgactggcactactgtcattttaccaggggtcgttcctcatttcttctgtggggcaacggcaggtgttatcggtaatgcttctggtggtgtgagaggagcgactattggtgcatttgttcaaggtatcctcatcagtttcttgccgattttcttgatgcctgtactaggtggacttggtttcaaagggtcaacattctcagatgctgattttggtttgaccggtatcattcttggcgctcttaatcatgtcggcggtgcgatagctattgttattggtattgtagttatcttaattggactttttggcatttcatttgttggaaaatcaacccataaggaaggt

SEQ ID NO: 9178 - protein, 451 aa, Streptococcus agalactiae
MKGLLDFLVNIASTPAILVALIAIIGLVLQKKGVPDIVKGGIKTFVGFLVVSGGAGIVQNSLNPFGKMFEHAFHLVGVVPNNEAIVAVALTKYGSATALIMLAGMIFNILIARFTKFKYIFLTGHHTLYMACMIAVIFAVAGFTSFSLILFGGLALGIIMSVSPAFVQKYMIQLTGNDKVALGHFGSLGYWLSGFIGGIVGDKSKSTEDIKFPKSLSFLRDSTVSITISMAIIYLIVAVFAGEAYIAKEISNGVNGLVYALQLAGQFAAGVFVILAGVRLILGEIVPAFKGISEKLVPNSKPALDCPIVYPYAPNAVLIGFISSFVGGLVSMIVMIVTGTTVILPGVVPHFFCGATAGVIGNASGGVRGATIGAFVQGILISFLPIFLMPVLGGLGFKGSTFSDADFGLTGIILGALNHVGGAIAIVIGIVVILIGLFGISFVGKSTHKEG

SEQ ID NO: 9179 - DNA, 855 bp, Streptococcus agalactiae
atgacatcaccagaagaaagatattcatctctaagacgatttgcaacggagattcgtttaaatactctagaaacgctaaaccatttaggattcggtcactatgggggtagtttatcaattgttgaggctttggctgttctgtatggtgatattatggatataaatcctgaaaaattcaaagaaagtgatcgggattatatggtcttatcaaaaggacatgctggtccagccttgtatagtacactctatttaaaaggtttttttgataaaacattccttcattcgctcaatacaaacggtaccaaactaccttcgcatcctgaccgcaatttaactcctggtatagatgtaacgacaggctcgttaggtcaaggcattagtattgcaacgggaattgcttatgctcaaaagattgagaattcaagctattatacttatactattgtaggtgatggtgaattaaatgaaggacaatgttgggaggctatacaatttgctgcgcatcatcaactgcaccatttaattgtttttgtagatgataataaaaaacaattagatggtttgacagctgatatttgtaatcctggagactttgttgctaaatttgaagcttttggatttgatgcagtacgtgtaaaaggagatgacattgaggcaattgacaaagctattaaaacttttcaagattcaaatagtgtcagaccaaaatgtattgttttagatagcatcaagggacaaggtgtgaaagagttggaggagttagcttctaatcatcatttacgaccagatttacaacaaaaaacaatgttagagcgagcgttgataagcttgagagaaagtttggaggtggtagaa

SEQ ID NO: 9180 - protein, 285 aa, Streptococcus agalactiae; identical to SEQ ID NO: 420

SEQ ID NO: 9181 - protein, 927 aa, Streptococcus agalactiae
ATGAGATGTTCAACCAAAGAAATGAGGCTTGTCTATCGTGATTTCCTCCTTCAAGCTAATCAAGAAAATAAACAAATTACCGTTTTAGAAGCCGATTTGTCGAGTTCAATGTCAACAAATGCACTGGCATCAGAATTTGGAAAACGTTATATTAATCTAGGTATTATGGAGGCTGAGATGGTAGGCCTTGCAGCAGGGCTCGCCATTAAAGGTTACAAGCCATACCTTCATACTTTTGGTCCTTTCGCGTCAAGGCGTGTCTTTGATCAAGTATTCTTATCGTTAGGTTACTCACAATTATCAGCTACGATTATTGGCTCAGATGCAGGAATTAGCGCAGAAATGAATGGCGGAACTCATATGCCTTTTGAAGAGTTAGGTCTACTAAGGTTAATTCCCAAAGCGACTATTTTTGAGGTTAGTGATGATATTCAGTTTGAAGCAATTTTAAAACAAACATTAAGTATTGATGGCCTAAAATACATTAGAACTATTCGTAAGGCCCCCACTGCAGTTTATGAGGGACGCGAAGATTTTTCAAAGGGTTTTATACAATTACGCCAGGGAAAAGATATTACTCTTGTAGCAAGTGGTATTATGGTTTCTAGAGCGATAGAAGCAGCCGACTACCTCAAAGAACTAGGGATTGAGGCCTCAGTTATCGACCTTTTTAAAATTAAGCCCCTTCCAGAAGAACTGAAACCATTACTGATAGATCAATCCATTGTAACTATTGAGAATCATAACCGTATTGGCGGTATCGGAAGTGCATTATGCGAATGGCTTAGTATGGAGAAAGACACTACTGTTAGTCGTATGGGTATTGATGAGCGATTTGGTCAGGTAGGTCAGATGGAATATTTATTAGAGGAGTATGGACTCGCTGTTAAAGATATAGTACAGCATTGCAAATCAATTTATAAATCA

SEQ ID NO: 9182 - protein, 309 aa, Streptococcus agalactiae; identical to SEQ ID NO: 422

SEQ ID NO: 9183 - protein, 1257 aa, Streptococcus agalactiae
ATGCGAGCTTGGAAAGGTATTGTTTTAATTTTATCTAGCATAGTGGTGACACTAGTAGCATGGCAAAATGCAGGATTAAGTGAATTTGTTGTACCAGGATTAGCTTTGACAAGTTTATCGCTAACATTCCTCTTATCAACCAAATTTAGGATACTTGAAAGTTACTTTCAAGGTATTGAAAATATGTATTTTTACCACAAGGTAATGGCTGTATTTTCAATGATTTTGCTTCTATTGCACAAAATTGGTCTTGGACAAGGCGGACATGGAAGTGAGTTTGCAAAGACTATTGGCAGTGCGGGATTATATCTTTTTCTAAGTATTGTTTTTGTAGCTTATTTCGGAAATTTTTTAAAGTATGAAATTTGGCGTTTTATTCATCGCTTTGTTTATTTAGCTTATATTTTGGGATTGGTACATACTTTTATGATTTTAGGAGATAGGATACTAGGAAATACTTTACTCAGTTTAATCGTATTAGGTTATGCTGTCATTGGGGTTATATCTGGATTTTATATTATTTTCCTATATTCTAGAATGCGTTTTCGTCGTGTAGGGTACGTTCAAAAGGTTACTCATCTTAACCATGATACAACTGAGATTGAAATAGCAATGAAGCGTCCTTATCGATATGACTATGGACAATTTACTTTTTTAAAAATTTATCAAGCTGGCTTTGAATCAGCAGCTCATCCTTTCTCGATATCAGGTGGTCATGATAGAGTGATATTTTTAACTGTTAAAGCTTCAGGAGATTATACGAAATCCATTTACAAACAGCTAAAAGTTGGGACAAAAATAGCCTTAGATAGAGCTTATGGTCATATGTTATTTGATAAAGACAAGAAAGAACAGGTTTGGATTGCAGGAGGTATCGGCATCACTCCCTTCATTTCATTTATTAGAGAAAATAGTATTTTGACTAAGAGAGTTGACTTCTTTTATACCTTTTCAAATCAAGACAATTTGATTTATCAAGATATGTTAGAATCCTATGCTAAAGCCAATCCTAATTTTAAACTTCACTTAAATAATAGTAGCCTCAAAGGAAGACTTGATTTTAGTCAGTCTGTTTTTGAAGGACAACCAACAATATTTATGTGTGGGCCAACTAGTATGACATCTACTTATGCTAAGGTCTTTCGGCAAAAAGATGCAAAGTCTCGTTTAGTCTATGAAGGATTTTCCTTTAGAGACAGTTGGTTATCCATATTTCTATTAAAAACTTTTGACAAAGTTTATTCTAATTTGATAAAA

SEQ ID NO: 9184 - protein, 419 aa, Streptococcus agalactiae
MRAWKGIVLILSSIVVTLVAWQNAGLSEFVVPGLALTSLSLTFLLSTKFRILESYFQGIENMYFYHKVMAVFSMILLLLHKIGLGQGGHGSEFAKTIGSAGLYLFLSIVFVAYFGNFLKYEIWRFIHRFVYLAYILGLVHTFMILGDRILGNTLLSLIVLGYAVIGVISGFYIIFLYSRMRFRRVGYVQKVTHLNHDTTEIEIAMKRPYRYDYGQFTFLKIYQAGFESAAHPFSISGGHDRVIFLTVKASGDYTKSIYKQLKVGTKIALDRAYGHMLFDKDKKEQVWIAGGIGITPFISFIRENSILTKRVDFFYTFSNQDNLIYQDMLESYAKANPNFKLHLNNSSLKGRLDFSQSVFEGQPTIFMCGPTSMTSTYAKVFRQKDAKSRLVYEGFSFRDSWLSIFLLKTFDKVYSNLIK

SEQ ID NO: 9185 - protein, 267 aa, Streptococcus agalactiae
ATGGCAATCTCAAAAGAGAAAAAAAATGAAATCATTGCTCAATATGCACGTCACGAAGGTGATACAGGATCAGTTGAAGTTCAAGTAGCAGTTCTTACTTGGGAAATCAACCACCTTAACGACCACATCAAACAACACAAAAAAGACCACGCTACTTACCGTGGATTGATGAAAAAAATTGGTCACCGTCGTAACTTATTAGCATACCTACGTCGTACAGATGTTAACCGTTACCGTGAATTGATTCAATCACTTGGACTTCGTCGT

SEQ ID NO: 9186 - protein, 89 aa, Streptococcus agalactiae; identical to SEQ ID NO: 428

SEQ ID NO: 9187 - protein, 2127 aa, Streptococcus agalactiae
ATGTCAAAACAAGTCTTTGAAATGATTTTTGCTGGAAAAAAATTAGTTGTTGAAACTGGCCAAGTGGCTAAACAAGCAAATGGATCAGTTGTCGTTCGTTATGGAGATTCTACTGTACTCACAGCAGCAGTTATGTCTAAGAAAATGTCAACAGGTGATTTTTTCCCACTTCAAGTCAATTACGAAGAAAAAATGTATGCTGCTGGGAAATTTCCGGGTGGCTTTAACAAACGTGAAGGGCGTCCAAGTACGGATGCTACCTTAACAGCACGTCTTATTGATAGACCAATCCGTCCGATGTTTGCTGAGGGATTTCGTAACGAAGTACAGGTCATCAATACTGTTCTTTCATTTGATGAAAATGCTAGCGCACCAATGGCTGCTATGTTTGGTTCATCATTAGCATTATCGATTTCCGATATTCCTTTCAATGGGCCAATTGCTGGAGTTCAAGTTGCTTATGTTGATGGTAATTTTATTATTAATCCGACAGCACAAGAACAAGAGGCTTCTGCGTTAGAATTAACGGTTGCAGGTACTAAAGAAGCGATTAACATGGTTGAATCTGGAGCGAAAGAACTTTCAGAAGAAATCATGCTAGAGGCTCTTCTTAAAGGACATGAGGCTGTCTGTGAATTAATCGCCTTTCAAGAAGAGATTGTTACTGCTATTGGTAAAGAAAAAGCCGAGGTAGAACTTCTTCAAGTTGATCCAGAACTTCAAGCAGAAATTATTGCTACTCATAACATAGCTTTACAGGCTGCAGTACAAGTTGAAGAGAAAAAGGCTAGAGAAGCAGCTACAGAAGCAGTTAAAGAAGTAGTTATAGGTGAATATGAGGCACGTTACGCTGAACATGAAGAATATGATCGCATTATGCGTGATGTTGCTGAAATTTTAGAACAAATGGAACATGCAGAAGTTCGTCGCCTCATTACAGAAGATAAGATTCGTCCTGATGGACGTCGTGTGGATGAGATTCGTCCATTAGACGCAGAGATTGATTTTTTACCACAAGTTCATGGATCAGGTCTCTTTACACGAGGACAAACCCAAGCATTATCAGTATTAACGTTAGCACCTATGGGTGAAGCACAAATCATTGATGGGCTAACACCAGAGTATAAGAAACGCTTTATGCACCACTATAACTTCCCACAATATTCAGTTGGTGAGACGGGACGTTATGGAGCTGCAGGGCGTCGTGAAATTGGTCACGGTGCTTTAGGAGAGCGTGCATTAGAACAAGTCCTTCCAAGCTTGGAGGAGTTTCCGTATGCTATCCGACTAGTTGCAGAAGTTTTAGAATCAAACGGTTCATCATCTCAGGCTTCTATATGTGCTGGAACGCTTGCTCTTATGGCAGGTGGTGTGCCTATAAAAGCTCCAGTTGCTGGTATTGCCATGGGGCTCATATCAGATGGAACAAACTATACAGTCCTCACTGATATTCAAGGATTAGAAGACCATTTTGGCGATATGGACTTTAAAGTTGCGGGTACACGTGAAGGGATTACAGCACTTCAAATGGATATTAAAATTGAAGGTATTACCCCTCAAATTTTGGAAGAAGCTCTTGCGCAAGCTAAAAAAGCACGCTTTGAAATTCTTGATGTCCTTCATGGAGCTATCGCAGAGCCACGTCCACAATTAGCACCAACGGCACCTAAGATTGATATGATAAAAATCGATGTTGATAAGATTAAAGTTGTCATCGGTAAAGGTGGCGAAACTATCGATAAAATCATCGCTGAAACAGGTGTTAAGATTGATATTGATGAAGAAGGAAATGTATCTATCTTCTCTAGTGATCAGGCTGCTATTGATCGTACGAAAGACATTATTGCAAGTTTAGTACGTGAAGCAAAAGTGGGAGAAGTTTACCATGCTAAAGTAGTTCGTATCGAGAAATTCGGTGCCTTTGTCAACCTCTTTGATAAAACAGATGCATTGGTACATATTTCAGAAATTGCATGGACACGTACAGCAAATGTAGCTGATGTTCTTGAAATTGGTGAAGAAGTTGATGTGAAAGTCATCAAAATTGATGATAAAGGGCGAGTTGATGCTTCTATGAAAGCATTGTTACCACGTCCTCCAAAAGCTGACAATCCTAAAAAGGAATCT

SEQ ID NO: 9188 - protein, 709 aa, Streptococcus agalactiae; identical to SEQ ID NO: 430

SEQ ID NO: 9189 - protein, 750 aa, Streptococcus agalactiae
ATGACAAGTACAAACGAGTTAGACATTAGATTGCGTGCTTTTATCAATGCACCGGATAATTTTTTAGATAGTATAGGTCTTGTGAATGCCTTGCACCACTCTACGGTTTGGGCAAGCAAGGAACCCTATGCTATTCAAGTAGATGGTCAAGAAGTTGTTCCTGTTTTTACGGATATTACTGACCTTAATCATTTCAAAGAGGAGCAAGAAAGTGCTCGAGATATGTTTTGGGAGAGTCGTCGTAGTTTAGACGTTCTTGATGAAGCTATTTCACATGGCTTAGCAGGATTGGTCTATAATTTAAAAAAAGAAGGCGATTTTGGGAACTCGACTATTTTCTACTGTGAAGATATGGTGCAATTTATGAATAATTACACCACAATCTTAAATCAGTTGTTAAATGAAGATAACATTGTTGCCGATATCATGGATAAAACCTACTTGGTACCTGCCTTTGTCCATCCACGTGAAGAAGGTAGTTTTGACCGTCTTTTCCCTACAATGTCTACCCCCGAAGGAAAAAGTTATGTTCCAGTATTCTCAAACCTTTTAAGTTTTGAAAAATGGTATAACCATAATGATTTTGGTGGTGCTTTTAGGAAAGCACAAGGAGTAATTTTAGCCTGGACGATTGACGATATTTATAAACCGCGTAATGGAGAAAATGAGATTGATGATACCTTTGGAGTAGCCATCAATCCATTTGATGAACAACAAGTTTTAGTTGATTGGTCTGATGTAGAAAACGAT

SEQ ID NO: 9190 - protein, 250 aa, Streptococcus agalactiae; identical to SEQ ID NO: 432

SEQ ID NO: 9191 - DNA, 582 bp, Streptococcus agalactiae
atggggtggtggaaagaaagtatagctattgtcaaagaacaagatccagctgctcgtagttctctagaagttattttaacttatccaggaataaaagctcttgcagctcataggctatctcattttttatggaatcataattttaaattgttagcacgtatgcacagtcaattttggcgtttctggacacaaattgaaattcatcccggagcgacgatttcggaaggggtttttattgaccacggttcaggattggtcattggagaaactgccattgtagagaaaggtgctatgctataccatggggttacattgggtggcacaggtaaagacaaaggcaaacgacacccaaccatacgtaaaggagcgctaatttcagcacattctcaaatcattggtccaattgaggttggagaaaatgctaaagtcggtgctgcagcagttgtccttgcagatgtgccagcagacgtaacagtagttggtgttccagctaaagttgtccgtgtccatggtcaaaaggatgatcttcaaatccgaagtattgaacatgatcgagaagaaagttattattcgtccaaactt

SEQ ID NO: 9192 - protein, 194 aa, Streptococcus agalactiae; identical to SEQ ID NO: 434

SEQ ID NO: 9193 - DNA, 180 bp, Streptococcus agalactiae
gtgaaggattatgtaacaactcaaatattatcaatcttaggtatactagcagcagcttgtttaagctatttaaagtttgcacaaggtaaccctctcttaggaattatttgggctgcttttgttttaatgtatgttgttcgtttgtataaagcttatcaaaaacagaaaaaggaaaaacca

SEQ ID NO: 9194 - protein, 60 aa, Streptococcus agalactiae; identical to SEQ ID NO: 436

SEQ ID NO: 9195 - DNA, 1341 bp, Streptococcus agalactiae
atgataaaaatttacgacactatgactcgcagtttacaagattttatacctctcaatgaaggtaaagtcaacatgtacgtctgtgggccaacagtttataactatatacacatcgggaatgcccgcagtgtagtagcttttgatactattcgtcgttattttgagtattgtggttaccaagtcaattatatttctaactttactgatgttgatgataaaattataaaaggtgcagctgaagcaggtatggatacaaaatccttttcagataagtttatttcagcatttatggaagatgttgctgcattaggtgtcaaacctgctacaaaaaatcctcgagttattgactatatggatgagattattgattttgttaaagttttagttgataaggaatttgcctatgaagctaatggagatgtttattttagagtaagtaaatcacatcattatgcaaaattagccaataaaactttggaagatttagagattggtgcaagtggtcgtgttgatggtgaaggagagattaaagagaatcctttagattttgcactttggaaatcagctaaatctggggaagtctcatgggaaagtccttgggggaaagggcgcccagggtggcatattgaatgttctgttatggcaactgagatctttggtgatactattgatatccatggtggaggagctgatttagaatttccacatcacacgaatgagattgcacaatctgaagctaaaacaggtaagacctttgcaaattactggatgcataatggttttgttaacgttgataacgagaaaatgtctaaatctcttggtaactttattactgttcacgatatgttgaagagcgttgacggacaagtaatacgttttttcttagcgacacaacagtatcgtaaacccgtgaatttcactgaaaaggccgttcatgatgcggaagttaaccttaaatatttaaaaaatactttcaacttaccaatccaagagaatgctaatgatgaagaattagagcaatttgtgaaagcatttcaaggagcgatggatgatgattttaatacagcaaacggtattactgttatctttgaaatggcaaaatggattaattcaggacactatacttcaagagttaaggaaacctttgctgaattattagaaatttttggtattgtattccaagaggaagttcttgatgctgatattgaatctttaatagaacaacgtcaagaagcacgagctaatcgtgattttgcaactgctgatcgtattagagatgaattagcaaaacaaggaattaaattgttagatactaaggatggcgtgaggtggactcgtgat

SEQ ID NO: 9196 - protein, 447 aa, Streptococcus agalactiae
MIKIYDTMTRSLQDFIPLNEGKVNMYVCGPTVYNYIHIGNARSVVAFDTIRRYFEYCGYQVNYISNFTDVDDKIIKGAAEAGMDTKSFSDKFISAFMEDVAALGVKPATKNPRVIDYMDEIIDFVKVLVDKEFAYEANGDVYFRVSKSHHYAKLANKTLEDLEIGASGRVDGEGEIKENPLDFALWKSAKSGEVSWESPWGKGRPGWHIECSVMATEIFGDTIDIHGGGADLEFPHHTNEIAQSEAKTGKTFANYWMHNGFVNVDNEKMSKSLGNFITVHDMLKSVDGQVIRFFLATQQYRKPVNFTEKAVHDAEVNLKYLKNTFNLPIQENANDEELEQFVKAFQGAMDDDFNTANGITVIFEMAKWINSGHYTSRVKETFAELLEIFGIVFQEEVLDADIESLIEQRQEARANRDFATADRIRDELAKQGIKLLDTKDGVRWTRD

SEQ ID NO: 9197 - DNA, 384 bp, Streptococcus agalactiae
gtgattgatgttcgtttgattaatggtattgctttagcttttgaaggagatgcagtttattctttgtatatccgacgccatttaattatgcagggttttaccaaacctaatcagttacatcggaaagcaacccaatatgtttctgctaatgcccaagcattgttaattaatgccatgttagaagaaaatattttaactgatgaagagcagttaatttataaacgaggacgtaatgcgaatagtcatacaaaagctaaaaatgctgatattattacctatcgtatgtctacaggttttgaggctcttatggggtacttggatatgactggtcagataaagcgcttggaaactctaatacagtggtgtattgaaaccattgaaaaa

SEQ ID NO: 9198 - protein, 128 aa, Streptococcus agalactiae; identical to SEQ ID NO: 442

SEQ ID NO: 9199 - DNA, 753 bp, Streptococcus agalactiae
atgactatgaaagataaacaatttaaagaagaatcaagtgaccttgtctatggcttacatgctgtgacagagagtttaagagctaatactggtaataaattatacttgcaagatgacttaagaggaaagaacgttgataaagtcaaagcactagcgactgaaaaaaaagtatccatttcctggactcctaaaaaaaccttatcagacatgacaaatggtggagttcaccaaggattcgttctaaaagtttcggaatttgcctatgcggatttatcagagataatgacaaaggcagagaatgaagaaaatcctctcattttaatccttgatggtctgaccgaccctcacaacctaggttctattctacgcacagctgatgcaaccaatgtaacaggtattatcatccccaaacatcgttctgttggagtgaccccagtggtttcaaagacatctacaggagctgttgaacatgttcctattgcaagggtaactaatctcagtcaaactttggatactttaaaagataaggagttctggatatttggcactgatatgaatgggacaccatcgcataagtggaataccaaaggtaaattagccctagttattggtaatgaaggaaaaggtatttctcataatatcaaaaagcaagtagatgaaatgattacaattcccatgaatggtcatgttcagagtttaaatgccagtgtcgcagccgctattttgatgtatgaagtatttagaaaccgccta

SEQ ID NO: 9200 - protein, 251 aa, Streptococcus agalactiae; identical to SEQ ID NO: 444

SEQ ID NO: 9201 - protein, 516 aa, Streptococcus agalactiae
ATGAAAAAACATTCTATCTTACTCGTTGATGGCTACAATATGATTGCTTTTTGGAAAGATACTCGACAGCTTTTTAAAAGCAATCGTTTAGAAGAGGCAAGGGAAGTATTACTTAGAAAGCTAAATCATTACGCACATTTCGAACACATTGATATTATTTGTGTATTTGATGCACAGTATGTTCCTGGTGTACGTCAACGTTATGACCAATACAAAATATCCGTTATCTTTACTGAGGAGGACGAAACTGCGGATAGCTATATTGAACGAGCAGCGGCAGAACTTAATCAATCTGTGTTAAATTTAGTCTCCGTTGCTACCAGTGATTTAAATGAACAATGGACTATATTTTCTCAGGGTGCTTTACGTGTCTCGGCTAGAGAATTGGAACAGCGTGTAGCGACAGTAAAATCAGATTTGGATAAGATGTCCAGTCAAATCGATTTGAGTACGCCAAAGTTAAGGCCGTGGAATGATGAACAACTAGGAAAACTCAAGGATTTTTTAGATGGTATG

SEQ ID NO: 9202 - protein, 172 aa, Streptococcus agalactiae; identical to SEQ ID NO: 446

SEQ ID NO: 9203 - protein, 858 aa, Streptococcus agalactiae
ATGACTTTTAAAATACTAACGGATTCGACATCGGATTTAGATGAAAAGTGGGCTCAAGAGCACAATGTCGATATTATAGGTTTAACCATTGAACTTGATGGAAAGACTTATGAGACAGTCGGAGACGAAAAAATTACTAGTGACTTCTTGTTGGAGCGTATGCAAGAGGGAGCAAAGCCTACAACAAGCCAAATTAACGTTGGTCAGTTTGAAGAAGTTTTTTCAACCTATGCAGAAAATGACCATGCCTTGTTATATTTAGCGCTATCTTCACATTTATCAGGCACTTACCAGAGTGCAACTATTGCGCGTGAGATGGTCTTAGACAAATATCCTGATGCTCAAATTGAGATTGTGGATACGATGGCAGCTTCATGTGGTGAGGGTGTCTTAGCGATGTTAGCAACTAAAGAGCGACAAGAAGGTAAATCTTTAGAAGAAGTGAAACAAAAAATTGAATCACTTCTCCCTAAATTAAACACATACTTTTTAGTTGACGATCTCAACCATTTAATGCGTAGTGGTCGCTTATCAAAAGGTGCAGCTATCATTGGAAGTGTTGCTAAGATTAAACCATTACTTAAGTTAGATAGTGAGGGTAAATTAGTACCATTTGCCAAGACAAGGGGCCGTAAAAAAGGTATTAAAGAGATTGTGACTCAGGCAACAAAAACACTATCTTATAGCACTTTAATTATTGCTTATAGTGGAGAGAAAGATTCAGCTCAAGTTATGAAAGAACAGTTATTAGCAGATGAGCGTATTGAAGAAGTTATTATTCGTCCATTAGGGCCAGTTATTTCAGCTCATGTGGGCTCAGGTGCTTTAGCTCTATTCTCTTTAGGGGAAGAAAACCGA

SEQ ID NO: 9204 - protein, 286 aa, Streptococcus agalactiae; identical to SEQ ID NO: 448

SEQ ID NO: 9205 - protein, 117 aa, Streptococcus agalactiae; identical to SEQ ID NO: 4781

SEQ ID NO: 9206 - protein, 39 aa, Streptococcus agalactiae; identical to SEQ ID NO: 4782

SEQ ID NO: 9207 - protein, 442 aa, Streptococcus agalactiae
ATGAACAAAACAACTTTCATGGCTAAACCAGGCCAAGTGAACGCAAATGGTACGTTGTTGACGCAGCAGATGTACCTCTTGGACGTCTTTCTGCAGTAGTTGCTAGCGTACTTGCGGAAAAAACAAACCAACTTTCACACCACACACTGATACAGGTGACTTTGTGATTGTTATCAATGCTGAAAAAGTTAAATTAACTGGTAAAAAAGCGTCAGATAAAATCTACTACACTCACTCAATGTATCCAGGTGGTTTGAAACAAATCTCAGCAGGTGAACTTCGTTCTAAAAATGCTGTTCGTTTGATTGAAAAATCAGTTAAAGGCATGCTTCCACATAACACTCTTGGACGTGCACAAGGTATGAAATTGAAAGTATTTGTTGGCGGTGAGCATACACATGCTGCACAACAACCAGAAGTACTTGATATCTCAGGACTTATC

SEQ ID NO: 9208 - protein, 148 aa, Streptococcus agalactiae; identical to SEQ ID NO: 450

SEQ ID NO: 9209 - protein, 390 aa, Streptococcus agalactiae
ATGGCACAAGCACAATATGCAGGTACTGGTCGCCGTAAAAACGCTGTTGCACGCGTTCGTTTGGTCCCAGGTACTGGTAAAATTACAATCAATAAAAAAGATGTAGAAGAGTACATCCCACACGCAGACCTTCGTCTTGTTATCAACCAACCTTTCGCAGTTACTTCAACTCAAGGTTCATACGATGTTTTTGTTAACGTTGTAGGTGGTGGATATGCAGGTCAATCAGGTGCGATCCGTCATGGTATCTCACGTGCACTTTTAGAAGTTGACCCAGATTTCCGCGATTCATTGAAACGTGCTGGACTTCTTACACGTGACGCACGTATGGTTGAACGTAAAAAACCAGGTCTTAAGAAAGCTCGTAAAGCTAGTCAGTTCTCAAAACGT

SEQ ID NO: 9210 - protein, 130 aa, Streptococcus agalactiae; identical to SEQ ID NO: 452

SEQ ID NO: 9211 - protein, 1152 aa, Streptococcus agalactiae
ATGTCCATTCACAAATACCCAAGCAAAAAAGCCAAAAATGGCTATTTGTATTTAGTCAAGGTCTATATGACTAGAGACGCTCAACGTGCAGACCATATCAAACGTGGCTTTCGTACTCGAAAGGAAGCCAAAGACTACGAAGCTAGGCTAATCTACCTTAAGGCTTCAGGAAGGTTGGAAGAGTTTATCAAGCCAACTCATAAAACTTATAACGAGATATTCGAGAAATGGTATCAAGCCTATCAAGATACGGTAGAGCCGACAACAGCTTCACGTACTCTTGATATGTTCAGGCTTCACATTCTGCCAGTCATGGGAGACTTACCTATCAGCAAAATCTCCCCTTTAGACTGTCAGAACTTCATCACAGAAAAGGCTAAGACTTTTAAGAATATCAAGCAAATCAAGTCTTATACTGGAAAAATATTTGACTTTGCAATAAAGATGAAATTGCTTAAGCATAACCCTATGGCAGAAATTATTATGCCGAAGCGGAAAAAGACACAGATAGAAAACTATTGGACGGTTCAGGAACTAAAAGAGTTTCTAGCCATTGTCCTTCAGGAAGAGCCTTATAAGCATTATGCACTGTTTAGACTACTAGCTTATAGCGGCTTAAGGAAAGGCGAACTATACGCTCTTAAATGGGCTGATATAGACTTTCAGAGTGAGACACTAAGTGTCAATAAGAGCCTAGGACGATTAGACGGACAGGCAATCGAAAAAGGCACTAAAAATGATTTCTCAGTAAGAAAGATTAAGCTAGATAGCGAAACTATTTCTATTTTGCAAGAATGGAAAGCAAATTGCCAAAAAGAAAAGGCACAACTAGCAGTTGCACCTCTTTCTATCAAGCAAGATTTTATCTTCACTTACTGCACACGGTCAGGGTCAGTAGAACCACTGCATGCAGACTATATCAATAATGTACTATCACGAATTATCAAGAAACATGGCTTAAAGAAAATCAGTCCTCACGGTTTTAGGCATACTCATGCTACCTTGATGATTGAAATTGGAGTTGACCCAGTCAACACAGCAAAAAGGCTAGGTCATGCAAGTAGTCAAATGACTTTAGACACCTACAGCCATTCAACAGCTAATGGAGAAGATAGGTCCATCAAGCAATTTGCGGACTATCTCAAAGCAAAA

SEQ ID NO: 9212 - protein, 384 aa, Streptococcus agalactiae
MSIHKYPSKKAKNGYLYLVKVYMTRDAQRADHIKRGFRTRKEAKDYEARLIYLKASGRLEEFIKPTHKTYNEIFEKWYQAYQDTVEPTTASRTLDMFRLHILPVMGDLPISKISPLDCQNFITEKAKTFKNIKQIKSYTGKIFDFAIKMKLLKHNPMAEIIMPKRKKTQIENYWTVQELKEFLAIVLQEEPYKHYALFRLLAYSGLRKGELYALKWADIDFQSETLSVNKSLGRLDGQAIEKGTKNDFSVRKIKLDSETISILQEWKANCQKEKAQLAVAPLSIKQDFIFTYCTRSGSVEPLHADYINNVLSRIIKKHGLKKISPHGFRHTHATLMIEIGVDPVNTAKRLGHASSQMTLDTYSHSTANGEDRSIKQFADYLKAK

SEQ ID NO: 9213 - protein, 588 aa, Streptococcus agalactiae
ATGACAAATTTTCAACTTCTTGTAAAAGAAAGCAATAAAAGTTTGACTGAAATAAGTCAAGAAACAGGCATTAGTTATTCAACATTAGGAAATTATAATCAAGGGACTAGAACTCCAAAGAAAGAGAATGCTAAAATCCTTGCCGACTACTTTGATGTCTCCGTCCCTTATCTATTAGGACTTGACGACAATAGACAAATACTAGATTTTGCTGGGGAGGGGATTGCAAAAGGTATCATTGAAAAAATTAAAGGTCGAAAGACACTTGATATGCTTTTGACCTCAACTCCATATCTGGAAGAAAATGTAGATATCATGAATGATATTATTAATAAAAAGGTTCTAGACTCATACATTGACTTTCTGTATGAAGGAAAATATCCTCCAGCAGTCATTGTATTTATCAAAGATGTTATCAAGAATCGTTTTGATGATATTCCAGCACTAGCAAACAGAAGCAGTGATAAAAATAGCGAGTACCATTTTCTATGGGAAGCTTGGGAAAAAGAACCAAGAAAAAAAGAACGAACGGAACAGACAAGGAAGAAATGGAAAGAGCAAGGTATTCCTATATTTAAATCTTGGAAA

SEQ ID NO: 9214 - protein, 196 aa, Streptococcus agalactiae
MTNFQLLVKESNKSLTEISQETGISYSTLGNYNQGTRTPKKENAKILADYFDVSVPYLLGLDDNRQILDFAGEGIAKGIIEKIKGRKTLDMLLTSTPYLEENVDIMNDIINKKVLDSYIDFLYEGKYPPAVIVFIKDVIKNRFDDIPALANRSSDKNSEYHFLWEAWEKEPRKKERTEQTRKKWKEQGIPIFKSWK

SEQ ID NO: 9215 - protein, 303 aa, Streptococcus agalactiae
ATGGCTTACACACTAGAAGAACGAGAAACGATTGTCCGTTATGATGAAATGGATAACTGTTGGTATTTTGAGAGTAATGTTAGGAAACACATTACTAAAATCATGAAAACTATTGATAGTTGTCAGATTTTAGGTCAAGAGAAAGAAGACGACCGCATTATATGGATTCATGCTAAATTGACAAATCTTGATGATTATATGGTTTCTCCATTTGTTCGAAAACGAGTTAAACGTGAAATGACTGAAGAACAACGAGAGGAAGCAAGAAAAAGAATGGCAAGATTACATTCTAAGTCTGAAATA

SEQ ID NO: 9216 - protein, 101 aa, Streptococcus agalactiae
MAYTLEERETIVRYDEMDNCWYFESNVRKHITKIMKTIDSCQILGQEKEDDRIIWIHAKLTNLDDYMVSPFVRKRVKREMTEEQREEARKRMARLHSKSEI

SEQ ID NO: 9217 - protein, 276 aa, Streptococcus agalactiae
ATGACAGAAGGATTTACCATTCAGCTCCCCAAAGTAACTGAAAAGAAGTTACTGGCTCGCTATGACACTATGGTTCAAAAAGCAATAGAAAAAGCCCTTGAGGACAAAGAGCTATATAAGCCTATGGTTCGTATGGCTGGCTTGTGCCGTTTTTTAGATGTCTCAACGACAACTATTGTCAAATGGCAAAAGGCAGGCATGCCACATATGGTTATTGACGGAGTGACTCTGTACGATAAGCGCAAGGTCGCTCAATGGCTACAACAATTTGAAAGA

SEQ ID NO: 9218 - protein, 92 aa, Streptococcus agalactiae
MTEGFTIQLPKVTEKKLLARYDTMVQKAIEKALEDKELYKPMVRMAGLCRFLDVSTTTIVKWQKAGMPHMVIDGVTLYDKRKVAQWLQQFER

SEQ ID NO: 9219 - protein, 228 aa, Streptococcus agalactiae
ATGGATAAAAATAATTTAGAAGACTTGACAGGAAAAAAGATACTTAGAAATGGTTTTGGTGGTCTTCGTTTGGAATATGGGACAATCTTTCTTGATGTTGGATTGTTCACTTATATTGTGCTGATACTATCAATATTTTTCTTTTTAGTTGAACGTTGGTTTTTGGGAGCTTTAACTTTTGTGTTGCATGTTCCCTTGCTTCTACTTGGGATATGGTGTGGAGAGAGA

SEQ ID NO: 9220 - protein, 76 aa, Streptococcus agalactiae
MDKNNLEDLTGKKILRNGFGGLRLEYGTIFLDVGLFTYIVLILSIFFFLVERWFLGALTFVLHVPLLLLGIWCGER

SEQ ID NO: 9221 - protein, 324 aa, Streptococcus agalactiae
ATGGACTATGATAACGACAGCTATCTTATCCCGAAAGTTTTACTGCAAGATGATTTCTACAGTAGTCTATCTGCGAGAGATATTTTAGTCTATGCTGTCTTGAAAGATAGACAGATAGAAGCTCCTGAAAAAGGTTGGATAGATACTGATGGCAGTATATATCTAAATTTTAAACTGATTGAATTAGCTAAAATGTTTTCTTGCAGCAGAACGACAATGATAGATATTATGCAACGACTGGAAGAAGTTAATTTGATTGAACGAGAAAGAGTAGATGTTTTTTATGGCTACTCTTTACCCTACAAAACCTATATCAACGAGGTA

SEQ ID NO: 9222 - protein, 108 aa, Streptococcus agalactiae
MDYDNDSYLIPKVLLQDDFYSSLSARDILVYAVLKDRQIEAPEKGWIDTDGSIYLNFKLIELAKMFSCSRTTMIDIMQRLEEVNLIERERVDVFYGYSLPYKTYINEV

SEQ ID NO: 9223 - protein, 627 aa, Streptococcus agalactiae
ATGATAAAGATTTATTTTGGAAAAGATATAACACTTAACCAAGCTATTCAGTCGCGATTGGATAGCTATCAGATTGACTATCAAGCATTCTCAAGCAAAGATATAGATGCTAAAACACTGATGGAATGGCTATTCAGGTCGACCGATATATTTGAATTACTAAGCACTAAGATGTTGAAATACAAGCTGAATACACAAATTACCCTCAGTCAATTTGTTCGAAAGATTTTAAAAGATGTCAATAGCACCTTGAAGCTTCCCATTGTTGTGACAGATGAGGTTATTTATTCGAACATGTCCCTTGACTATGTGACGGTACTCTTGCCAAAAGAATATCGGAAAATTGAAAGAATTCAGCTGATGAGGAAGATGGAGCAGTTAGATGAGGGACGTCTATTCTGGAAAAACTTTGAGTCACTACGTAAGCAATCTGAGCTACGTTGGTTTGAACTGAATGAGTTACTGTTTGCTGATATGTCCGACGATTTAGGAGAAATCAAAAAAGCTAAAGACCGTTTCTTTAGCTACAAGAAAAATAAACAGGTTCCGCCTGATGACATTATCGAAAAAATCCTCAAGATATTTTTGGTTGACCGAGAAGACTTTTTCAAAAAATCTGTGTTGGAT

SEQ ID NO: 9224 - protein, 209 aa, Streptococcus agalactiae
MIKIYFGKDITLNQAIQSRLDSYQIDYQAFSSKDIDAKTLMEWLFRSTDIFELLSTKMLKYKLNTQITLSQFVRKILKDVNSTLKLPIVVTDEVIYSNMSLDYVTVLLPKEYRKIERIQLMRKMEQLDEGRLFWKNFESLRKQSELRWFELNELLFADMSDDLGEIKKAKDRFFSYKKNKQVPPDDIIEKILKIFLVDREDFFKKSVLD

SEQ ID NO: 9225 - protein, 996 aa, Streptococcus agalactiae
ATGGTCCGACTCCGAAGGGGTCGGCTTGGGGCTACTCCCCCAAGAATGTCATTTTACGTAGGCCTTTGCGCAGACAAAAAAATCGGCGCCGTTAGGCGACCGCCAAAAAGAAAGGAGGTTTGTTTGAAATTAAAAGTCAGCTTAGACAATATCACTATGACAGCCTATATCAAATCTAAAAAGTATTTAGCTATGAAACAACTCATAGAAACCCATTTAGCTATTACTGTTCAAACTGCGATGACTGACATGTTTCGAGCCACCACTGGGGATGGAATCCACGTTGTGCTCCATATGAATTATGACAAACAAAAAGGACAAGACCGCAAGGCTCGTCCATTTCGCTTGGAGTTTAATCCCAATAAACTCCGTTTAGTTGACAGTGAAATTATAGATACTATTATACCATTTCTTGAAGATATTTCAATATCACGTGCTGATTTAGCTTTTGATCTATTTGAGGTTGATTGTAGTGAGTTTGTGCTCGAAAAAAAGGGCAGACCAACCGCAACCAAGGAATTTCGTTCTAGTACTGGAACGTTAGAAACAAAATATCTAGGTGCTCCACGTTCTGAAAAACAAGTTAGGCTATATAACAAGAAAAAGGAACAACTCCAAAATGGTACTGATAAAGATAAAGACTTTGCAAGTCAATTTAAGCACTGGTGGCGCTTGGAATTTCAATTAAGAAGCCGTTCAATTGATGAGATATTCGAGGTTATTGATACTATTATTTTTAAACCATTCAATCTTAAAGGCTTATCTATTGAGACCCAAATCTATCTAACTGCTCTTATTCACGATAAAAATATCTGGAAAAAACTCCATAGAAATACAAGAGCAAGATACAAAAAAATTTTAGAAACTCATCAAACATCAGATACTGATTATTTAGGTTTGCTGAAAGACTTGTTGAAGCATGAAAGACCAAGACTAGAAAATCAGCTCGCTTATTATGGGGGTAGGATAGACAAAAATAGCTTTCAACCCTTTTGT

SEQ ID NO: 9226 - protein, 332 aa, Streptococcus agalactiae
MVRLRRGRLGATPPRMSFYVGLCADKKIGAVRRPPKRKEVCLKLKVSLDNITMTAYIKSKKYLAMKQLIETHLAITVQTAMTDMFRATTGDGIHVVLHMNYDKQKGQDRKARPFRLEFNPNKLRLVDSEIIDTIIPFLEDISISRADLAFDLFEVDCSEFVLEKKGRPTATKEFRSSTGTLETKYLGAPRSEKQVRLYNKKKEQLQNGTDKDKDFASQFKHWWRLEFQLRSRSIDEIFEVIDTIIFKPFNLKGLSIETQIYLTALIHDKNIWKKLHRNTRARYKKILETHQTSDTDYLGLLKDLLKHERPRLENQLAYYGGRIDKNSFQPFC

SEQ ID NO: 9227 - protein, 432 aa, Streptococcus agalactiae
ATGAGAATAAAAGATTATGCTGATAGTCTAGGAGTTAGTAGCCAATCTATCTATAAACGCATACGCTCTCCAAAATATAAAGAAAGGTTGAAAGGTCATTTATACCGAGACAACCAAAAGGTTGAAAATCTTGATTTGATAGGCATTAAAATACTTGAAGATTATCATTTTGAGAATGATGTCATTGAACTGGAAAAAACGCTGGGTGATATTCAAGAAGAATTCGAGCAAGAAAAGAAGGGAATGCAATATCGGATAGATAGACTAGCTGATAAGTTAACTCCTTTACTTGAGGATAACCAAAACTTGGTACAAAAAAATTATGAGTTACTCAACTATGTTCGGAGCTTGGAACGACAGAAGCTATTGCTGATTATTGCTTTAGCTGTCATGGTAATCACTTTATTAGTGGCAATATGGCTTGCCATCTTT

SEQ ID NO: 9228 - protein, 144 aa, Streptococcus agalactiae; identical to SEQ ID NO: 466

SEQ ID NO: 9229 - protein, 1254 aa, Streptococcus agalactiae
ATGAGTTATGTTGTTGCTAGAATGGCTAAGTACAAGTCAGGTCAGTTGACGGCTATTTATAATCATAATGAACGGATTTTTAAAAATCACTCAAATAAAGAAATTGACGTTGAGAAATCTCACCTTAATTATGAACTGACAAATCGAGACCAGGCACAAAATTATCACAAACAAATAAAGGAGCACATCAATGAAAATCGCTTATCTACTCGTGGAGTCCGTAAAGATGCTATACTCTGTAACGAATGGATTATTACTTCAGATAAAACGTTTTTTGACTCGTTAGATGAGAAACAGACACGAGAGTTTTTTGAGACAGCTAAAGATTATTTTGCTGAAAAATATGGTGATGCTAATATTGCTTACGCTAGAGTTCACCTTGATGAAAGTACTCCGCATATGCATTTAGGTATCGTGCCAATGAAAAATGGTAAGTTAAGTTCAAAAGCACTGTTTGGAAATAAAGAGAAACTTGTAGCAATCCAAGATGAACTTCCCAAGTATCTTAATGAGCATGGCTTTAACCTACAACGTGGCGAAATAGGCAGTAAGAAAAAACATTTGGAAACTGCTGAATTTAAAGAAAAACAACGATTACTGGATAACGCTGATAGAAAACTAGCTGATAAACATGAAGAATTGAAAGCACTTGATGATAAGATTTCAAATGTTAACGATACAATAGCTGATAAAGAAAGTAGGCTTAAAGAATTGGAAGCGAAAGAATGGGATGCTGTTGGCGATTTGAAGCAGTATGAATTAGAGAAACAGTCACTAGCTGAAAGTATTGAAGACATAAAAGACATTGAACTATTACAACTTGATAGAATTCAAAAAGAAGATTTGGTAAAACAAAGCTTTGATGGCAAATTGAAGATGGATAAAGAAACCTATAATAGACTATTTCAAACTGCTTCGAAACATGCATCTAGTAATGCTGAGTTAAAAAGAGACTTGGTTAAAGCCCAGTCGCAGAACAATCACCTTTCTAGAGAATTACTCAATCACCGTAAGACAGCTGATAAAAATATCAAATTAAGTCAAGAAAACAGAAAATTAAAGGACAAAGTAAAAATGCTTGATGAACAAGTGAAAATTCTGAATAAAAACCTCTCTGTTTGGAAAGAAAAAGCTAAAGAATTTATGCCTAAACAGGTTTATAGAGAAACATTATCAATCATAAACTCTCTAAATCCTATCGGTTTAGCTAAAACAGCAATCAGACAAGTTAAGAAGATGGTTGATAGTAATAGT

SEQ ID NO: 9230 - protein, 418 aa, Streptococcus agalactiae
MSYVVARMAKYKSGQLTAIYNHNERIFKNHSNKEIDVEKSHLNYELTNRDQAQNYHKQIKEHINENRLSTRGVRKDAILCNEWIITSDKTFFDSLDEKQTREFFETAKDYFAEKYGDANIAYARVHLDESTPHMHLGIVPMKNGKLSSKALFGNKEKLVAIQDELPKYLNEHGFNLQRGEIGSKKKHLETAEFKEKQRLLDNADRKLADKHEELKALDDKISNVNDTIADKESRLKELEAKEWDAVGDLKQYELEKQSLAESIEDIKDIELLQLDRIQKEDLVKQSFDGKLKMDKETYNRLFQTASKHASSNAELKRDLVKAQSQNNHLSRELLNHRKTADKNIKLSQENRKLKDKVKMLDEQVKILNKNLSVWKEKAKEFMPKQVYRETLSIINSLNPIGLAKTAIRQVKKMVDSNS

SEQ ID NO: 9231 - protein, 468 aa, Streptococcus agalactiae
ATGACAGATAAAAAAATTGTTTATTACTTTGACCATGACTTATCAAAAAAAGATATGGGAGGAGTAGGACCTACCTACACCGGTAAAAATCTTTTATTCCTACTTTGGTGGACATATTCTTATGTGGCAGAAGACAATTTAGACATTGATACGTCATTGTTTGAAGTCCCAGAATTCAATGATTTTTACAATAATGGTCTAGAGCTTTATCGTATAAAAAATGAACTAGCTAATTACAATATCAGATTTGGATATGAGGTTAATCCAAAAGATAGTACAAAGATGCTGATAGGTATTTTGCCAACTGATGAAGAAGATTATGTTAAGGGATATAGAAATTTTATTGCTGATATTTCCAATCCTGACACACGTTACGCAATCTATCATAGACTAATTAAAACCATGGACACAATGCTACCGATTGAACAAATTAATGTTTATAAAAGCCTTGCAAAAGGTAATAAAAAG

SEQ ID NO: 9232 - protein, 156 aa, Streptococcus agalactiae; identical to SEQ ID NO: 470

SEQ ID NO: 9233 - protein, 333 aa, Streptococcus agalactiae
TTGGACTATAAGAAATATCAGATTATCTATGCTCCTGATGTTTTAGAGAAGTTAAAGGAAATTCGTGATTATATTTCTCAAAACTATTCCTCGACATCAGGTCAGCACAAAATGGAGCAAATCATTAGTGACATAGAAAAACTCGAGGTTTTCCCTGAAGTTGGTTTTGATGCCGATGAAAAATATGGTTCAAAAATCAGTAAGTACCACAGCACTAGAGGTTATACCTTAAGTAAAGATTATATTGTCCTATACCATATCGAGGAGGAAGAGAATAGGGTCGTTATTGATTACTTGCTTCCTACTCGAAGCGACTATATGAAATTGTTTAAA

SEQ ID NO: 9234 - protein, 111 aa, Streptococcus agalactiae
MDYKKYQIIYAPDVLEKLKEIRDYISQNYSSTSGQHKMEQIISDIEKLEVFPEVGFDADEKYGSKISKYHSTRGYTLSKDYIVLYHIEEEENRVVIDYLLPTRSDYMKLFK

SEQ ID NO: 9235 - protein, 285 aa, Streptococcus agalactiae
ATGGTTACAGCAGAAAAAAATAGAGCTGTCACATTCCAAGCTAACAAAGAATTGGTAAGCGAAGCAATGACAGTATTAAACAAGAAAAATTTAACCTTATCATCTGCTTTAAGATTATTCCTTCAAAATGTCGTTGTCACAAATGAGGTTGACTTATTGACGGAAGAGGAGCTAGAGAAAGAAAAACTTTTCAAGCAATTTCAAGCTGAAATCAACAAAAATATTGAAGATGTTCGTCAAGGGAAATTTTATACCTCTGAAGAAGTGAGGTCTGAACTTGGACTA

SEQ ID NO: 9236 - protein, 95 aa, Streptococcus agalactiae
MVTAEKNRAVTFQANKELVSEAMTVLNKKNLTLSSALRLFLQNVVVTNEVDLLTEEELEKEKLFKQFQAEINKNIEDVRQGKFYTSEEVRSELGL

SEQ ID NO: 9237 - protein, 1293 aa, Streptococcus agalactiae
TTGATTTATATTGATCCACCATATAACACTGGAAATGATTCATTTATGTATAATGATAGATTTAACCATTCAACATGGTTGAATTTTATTTATAATAGATTATCTATAGCTAATGAGTTATTAAGTGAAGTGGGATCAATTTGGTTAAATATTGATGATGATGAGTCACACTATTTAAAAGTCCTCTGCGATGAATTATTTGGTAGAGAGAACTTTATAGGAAATATCATATGGGAAAAGAAATTTTCCCCTCAAAATGATGCGACTTTCTTTTCTGATATGCACGATCATATACTTGTATATTGTAAAAATATAGATAAATTCAAAATAAACTTGTTGGCGAGAACTGAAAAAATGAATGAAAGATATAAAAATCCGGATAATGATCCGAGAGGTCCATGGTCATCTTCAGATTTAACAGTTCGGACTTATTCAAAAGAATACGATTATCCTATTGAAACACCGTCAGGAAAAATAATAAATCCACCCAAAGGTAGATGTTGGAGAACTTCAAAAGAAAATTTAAGTAAATTAATATCACAAAATAGAATTTGGTTTGGAGAATCAGGAGATAACGTTCCTAGGCTAAAGAGATTTTTAACTGATGTAAAACAAGGACTAACTCCTGGAACTATTTGGAAACATCAAGAAGTTTCACACAATCAAGAAGCTAGAAAAGAGATTTCTAGATTATTTGAAGATACTGAGTATGATTTTTCCACACCTAAACCAGAAAAGTTACTTCAAAGAATTATTCATATAGGCTCCAATGAAGGAGATTTAGTTCTCGACTTTTTCATGGGTTCAGCAACCACCCAAGCTGTCGCTATGAAGATGAATCGTCGATTTATTGGAATTGAACAAATGGACTATATTAATACCGTATCTGTACCCCGCCTTCAAAAAGTTATTGAAGGAGAGCAAGGGGGTATTTCTAAAGCTGTTGATTGGCATGGGGGCGGTTCATTTATTTATACCGAATTAATGGAGAAGAGTCAAGGTTATATAAATCAAATATATAAAGCAATTGATAGCGAAAGCTTATTCAAGATTTATAATCTAATGCTAAAGAATGTAGATATAAATTTCAAAGTAGATTTACAAGAATTAGAGGATATTCTAGAGAAAGAACCATTATTAGATGAACAGAAAAAATTGTTATTGAAAGTAATTGATAAGAATCAACTCTATTATAATTATTCTGAAATTGATGATGTGAATGTCCGTGATTTAATTTCAGATACTGATTACTCATTTAATCAGTCATTCTATAAGGAGGATGATTTCATTGGT

SEQ ID NO: 9238 - protein, 431 aa, Streptococcus agalactiae
MIYIDPPYNTGNDSFMYNDRFNHSTWLNFIYNRLSIANELLSEVGSIWLNIDDDESHYLKVLCDELFGRENFIGNIIWEKKFSPQNDATFFSDMHDHILVYCKNIDKFKINLLARTEKMNERYKNPDNDPRGPWSSSDLTVRTYSKEYDYPIETPSGKIINPPKGRCWRTSKENLSKLISQNRIWFGESGDNVPRLKRFLTDVKQGLTPGTIWKHQEVSHNQEARKEISRLFEDTEYDFSTPKPEKLLQRIIHIGSNEGDLVLDFFMGSATTQAVAMKMNRRFIGIEQMDYINTVSVPRLQKVIEGEQGGISKAVDWHGGGSFIYTELMEKSQGYINQIYKAIDSESLFKIYNLMLKNVDINFKVDLQELEDILEKEPLLDEQKKLLLKVIDKNQLYYNYSEIDDVNVRDLISDTDYSFNQSFYKEDDFIG

SEQ ID NO: 9239 - protein, 2704 aa, Streptococcus agalactiae
ATGATTTCATTGGTTAAGAAATCAAGTTTACCTCTATTAGATGCATTGATGGCATATGATGGAACTTTAGAAGAACGAACGATAATTATCAACCCCACAGTATATATATGATAATATGAAACATCATTTTAGATATTATCAAGATAAGGCACTACATTATTTTCACTTTTCATTAAATTATAATGAGTTTAAATACTTGCAATCAAATCATGTTCTATTCAACATGGCAACAGGATCTGGGAAAACTGATCTAATGGCAGGTATAATCTTATATTTGTTTAAAGAGAAGGGGTATCAAAGATTTCTATTTACGGTAAATACAAACTCAGTCCTACAAAAAACCATTGATAATTTAACGGATATTAGCTCCATAAAAAATTTATTCAACCATCCCATTGAAATTGAAAGCAATCGAATTCGTATTGAACAAGTAAAACAGTTTCCAAAGATATCTAAAGAAAATGTTATTTACATAAAGTTAGATACAATTCAAGGTATTGCAAGTGATTTATTTACTGAAAAAGAAAATACTATGGGATTGACAGAATATAAGGAAAATAAAACGGTTATTTTAGCGGATGAAGCCCATCATTATTCAGCTAGTACAAAGAAAGAAAAAGATGATGAACGTTCTTGGGAAAGAACGATTGAGTTGATACTGGAATCAAATGTTGAGAATCGATTATTAGAGTTTACGGCAACTATTGATTTAGAGAACAAACACGTCTATGAGAAATATAAAGATAAAATAATATTTCGTTATTCGCTGGACAAGTATATACTTGATGGATATTCAAAGAACATTCGAAGGATTCAATCCAGCAACAAAGATATAGATAATATGATGGATGTTATTTTGTTAAGCGAGTATAGAAGGTTGTATGCTAAACAAATGTATAATGTTGAAATTAAGCCGGTTATATTATTTAAATCTCCGAAAATAATTGATTCTAATCAAGCCGAAAGTAAATTTTTAAATCTAATTGAAAACCTAAATCCACAACAAATAGAGTCGTTTATTAGATTGAGATTTAATGAAAAGTCAGAAGAACAGAGTGAAACTCTGTATAGAACATATAGTTACTATTTGAACAACGTTAATAACTTACCTGAAATTGTTAGAGAAATGAAACGTCAATTTTCTAATAACCGAATCATTAATGCCAATGATACTGATCGTGGGAACATGTTAGAGAAAGGTTATTATGAAGTATTAAATACATTAGAAAATCCTTCAAACTTATACAGAGTCGTTTTTGCTGTCGCGAAATTAACTGAAGGATGGGATGTGCTAAACCTTTATGATATTGTACGTATTTCTGATACTGATAATGCTAAGGGGAATAAAGTATCAACCATGGCAGAAGCACAACTTATAGGGCGTGGAGCTAGATATAATCCTTTTAGATTGAATGGTGAAATTTCACATAAAAGACGTTTCGAAGCTGGCGGTGCTGATAGTTTATTACTTGAAACATTGCACTACCATACTATTAATGAACCACAATATCTAAAAAATCTGGTGGAGTCATTGAATGAAATGAATTTACCAACTGGGGAAGATAAGAAAAATCCTTTGATTGACGTTAAAGTAAAGACTTCATTCAAGAAAACAGATATTTGGAAGAGTGGATTGATATTTTATAATGAACGGGTTATAGTATCTGATGATCATTATGACAATTTATCAAAATATGGTGTAGACAATCGTTCAGATATTATTGTTAATTGGCAATTTAATACAAAGGAATATAATTACGACTCTAATAAGGTTCAAGATGATTTTTCTGATACATTCCAAAAAGTAATTCAATTAGATTCAAGATTAGTTATGAAAGCCTTTAATCGAAATTCATTTTATCATTTTGATCATTTAAAAAAGTATATACCAGTATTAAAATCGAGAAAAGAATTCTTGAATGAATCATGGTTAAACTTAAATAATAGAACCATCTATGCTGTAATACCTAAAAGTATGGGAAGCAAAGACCTTAGTCCAGAATCGAAACTAGAGATATTTGAGATTTATTTAAGGCAGGTGGAGCAACAAATCAGGCATGGTTATCGTAAAGAAATTGGAACCAATAAATTTATAGGATATCCAATACGAGAATATATAAGTGATTATAAGAAACGTCAACCGAATTATGATACTGGACGGATGAATTTATTTGGTATGAAAGTTTTTCAGTATGTAAGTAGACAAGATTATATTAATGAAGATTTCTTCGTATATGATTCAGCATTTATAAATCAAACAGAGCAACAATTGGTAGCTCGAATCAAAGAACGAATTGCAGTACTAACTGAAAAGTATAGTGAAGTATATTTAGTACGTATGGATGAAAATATGCATCGTGAGTCTGTAAAAAGCGACAAATTGAAGTTGCATCAATTTGATAGAGATACCAACGATATTCATTTCGAAGCATTTCAACCTGATTTTATCTTATTACTTGCCAACTCAGATTATTATTTACAGATATTTATCGAACCAAAAGGTATCAAACTTTTAGAGAGTGAGCAGTGGAAAGAAGATTTATTAATGTATATTAACGATCATGAATCCGATTTAGTGTTCGAGGAAGAAGTAGATGGCGTGAAGATTAAAGGATTGAAGTTCTATACTATCAATGATGGACGAGGAGCTATTGAGCAATTAGGTGAGATAGCATTAGGTGAAAAGTTTAGTGGTTTGAGTCTT

SEQ ID NO: 9240 - protein, 902 aa, Streptococcus agalactiae
  VARIANT 29: Xaa = Any Amino Acid
MISLVKKSSLPLLDALMAYDGTLEERTIXYQTPQYIYDNMKHHFRYYQDKALHYFHFSLNYNEFKYLQSNHVLFNMATGSGKTDLMAGIILYLFKEKGYQRFLFTVNTNSVLQKTIDNLTDISSIKNLFNHPIEIESNRIRIEQVKQFPKISKENVIYIKLDTIQGIASDLFTEKENTMGLTEYKENKTVILADEAHHYSASTKKEKDDERSWERTIELILESNVENRLLEFTATIDLENKHVYEKYKDKIIFRYSLDKYILDGYSKNIRRIQSSNKDIDNMMDVILLSEYRRLYAKQMYNVEIKPVILFKSPKIIDSNQAESKFLNLIENLNPQQIESFIRLRFNEKSEEQSETLYRTYSYYLNNVNNLPEIVREMKRQFSNNRIINANDTDRGNMLEKGYYEVLNTLENPSNLYRVVFAVAKLTEGWDVLNLYDIVRISDTDNAKGNKVSTMAEAQLIGRGARYNPFRLNGEISHKRRFEAGGADSLLLETLHYHTINEPQYLKNLVESLNEMNLPTGEDKKNPLIDVKVKTSFKKTDIWKSGLIFYNERVIVSDDHYDNLSKYGVDNRSDIIVNWQFNTKEYNYDSNKVQDDFSDTFQKVIQLDSRLVMKAFNRNSFYHFDHLKKYIPVLKSRKEFLNESWLNLNNRTIYAVIPKSMGSKDLSPESKLEIFEIYLRQVEQQIRHGYRKEIGTNKFIGYPIREYISDYKKRQPNYDTGRMNLFGMKVFQYVSRQDYINEDFFVYDSAFINQTEQQLVARIKERIAVLTEKYSEVYLVRMDENMHRESVKSDKLKLHQFDRDTNDIHFEAFQPDFILLLANSDYYLQIFIEPKGIKLLESEQWKEDLLMYINDHESDLVFEEEVDGVKIKGLKFYTINDGRGAIEQLGEIALGEKFSGLSL

SEQ ID NO: 9241 - protein, 288 aa, Streptococcus agalactiae
ATGTCACAAATTAAACTAACACCTGAAGAACTCCGTATTTCAGCACAAAAATATACAACAGGATCACAATCAATTACAGATGTGTTAACAGTTTTGACTCAAGAACAAGCTGTTATTGATGAAAATTGGGATGGTACAGCATTTGATAGCTTTGAAGCCCAATTCAATGAATTATCTCCAAAAATCACACAATTTGCACAATTATTAGAAGATATAAATCAACAATTATTGAAAGTTGCGGATGTTGTCGAACAAACAGACTCAGATATTGCCTCACAAATTAATAAA

SEQ ID NO: 9242 - protein, 96 aa, Streptococcus agalactiae; identical to SEQ ID NO: 476

SEQ ID NO: 9243 - protein, 405 aa, Streptococcus agalactiae
ATGAAAAAGAGTACCCAAATAATACTACTAATAGTTGCATTATTCATACTTGTTTTTAGCGGAGGATTTTATATGAAAGAACAACAAAGAAAAGAAGAACTAAAACGGAATCGAGAATATGAAGTTAGTCTAGTCAAAGCATTGAAAAATTCCTATGAGAATATAGAAGAAATAAAAATCACACATCCTGTTTCAACTGAAATTCCTGGAGATTGGCATTGTACTGTAAAGATTTCATTTAATGATAAAAAATCTATTGTTTATAATATTACACATAATTTGGAATCGAAAAAAAATTATAGCGGAAAATTTAATGAAAAAAATATGAATTTTTTTGATTCAAGAATTGGTAAAACAAAAAAAACTATAAAAATTATTTTTTCAGATGGTCAGGAGAAGATACAA

SEQ ID NO: 9244 - protein, 135 aa, Streptococcus agalactiae; identical to SEQ ID NO: 478

SEQ ID NO: 9245 - protein, 174 aa, Streptococcus agalactiae
ATGGTATTTACATATACCGAGAAAGAACTTCGTGAATTCAATATTGGAGATAATGTATATTCAGTTAACCCCGATTATGCAGAAAAAAATCATTCAACTGTCATAACGGATTTACCCCAGAAAGATAACGAAACAAATATTATTACAACAGAAGATAGAAAAAATTTAAGGTAT

SEQ ID NO: 9246 - protein, 58 aa, Streptococcus agalactiae
MVFTYTEKELREFNIGDNVYSVNPDYAEKNHSTVITDLPQKDNETNIITTEDRKNLRY

SEQ ID NO: 9247 - protein, 363 aa, Streptococcus agalactiae
ATGTCTGGCTATCAGGGTATGGCAGTTGCACCAATTATCAAGGGTAAAGTAGATTATAACAGTGTTGCAGTTATATCCGCCGCAACGGATTCAAGTAATTATAAAGATTTAATTGGCGCAGTTTCATCTGCTCAACCACATCAAAGTTCGACTCAGTTAAAATCAGCTGATAAATTTTTAAAAGACGTACAGTCACATGACAAATGGACTGTGACTCAGCTTTCAGGCTATTCTCAATCTGCATATATGTTAAAATTAGGTGCTCAATATCATATCCCGACTACAGTATTTAATGGATGGTTTAGGTATAGCACTTTAAATGAAGATGAAAAAAATTCATGGCTAAGCATCCTGAATATTTTG

SEQ ID NO: 9248 - protein, 121 aa, Streptococcus agalactiae
MSGYQGMAVAPIIKGKVDYNSVAVISAATDSSNYKDLIGAVSSAQPHQSSTQLKSADKFLKDVQSHDKWTVTQLSGYSQSAYMLKLGAQYHIPTTVFNGWFRYSTLNEDEKNSWLSILNIL

SEQ ID NO: 9249 - protein, 677 aa, Streptococcus agalactiae
ATGGCTAAGCATCCTGAATATTTTGTGAATTTTCGACATAAAGAGGATAATGTAACTTGGTGGAACGATTTTAATAAACTAGATGATAAAGATTATGGTACCGTGAAATGGGTAAATGGTAAAAGTCATAAAATAGAGAGTTGGAAATTTACTGATGATGGTAAGTTAAAAGATGAAAAAGGTAACATCGTAAATCCTAAGTCACCAGCTGTTCAGTCTGTTCTTTATGAAGAAGTTCATTTTCAAAAAGCTAAAGCTAAATTAAAAAAATCTGGAGGCAAACTTAGTCATAGTGAAAAAGTATATTTAGATTCTGAACAGGCTATATTTATTGCTAACGGTTTAACCACGGCATCTCAAACAGCTTCTGATGATATCAAGAAGAATGCTGAATTAGTTAAAGAAAAAGCATCAGAACTATTTGCAAAAACTAAAGTGATGCCTCCTGGTATAACAGATTTAAGTCCGGAAGAATTAGCTGATACATATAGTGAGGGCGGAGTTAGAGAGGACACCATAGTAACACCAATTGAAACTTTCTTTGATGAAAAAGTTACTAATGCACAAGAGATTACAACTTCATATATTAATCTTCAAAAACAAATTGAATCTGGTGTCCAAAAATTGCTAGAAGAGGACTCCAAATTAGAGGAGAATTTAAGGAATGGTCACAGTAC

SEQ ID NO: 9250 - protein, 226 aa, Streptococcus agalactiae; identical to SEQ ID NO: 482

SEQ ID NO: 9251 - protein, 384 aa, Streptococcus agalactiae
ATGGTCACAGTACTAGATCAAAATGAAAACAAAATTAATAGTCTAAAAATAAACCTAGGGAAATTGGAAGATAATTATCATCGCGAAAATATGGAGATAGAAGATAAATTATATAGCCTTGAGGATAAAAAGAACGAGTTAGAGACTTATTTACAAGAAGTCTATGAAGAGACAAGTCACCTTTTGAGACAAAATGATTCAGATGGTTCGACTTTTATGAGTTTAAATCGAATAATTGAAAGTTATCAAATGGAATTAATTGATGAATATGAAAACTATAAACAGACTATCATTGTCCAAGAGGAAAATAGTCGGACACAGTTTCTAAAAGACCGAGTAAAATTAGAAAATGACATTTCTAGTTTAGAAGGAAGAAAATACTAC

SEQ ID NO: 9252 - protein, 128 aa, Streptococcus agalactiae; identical to SEQ ID NO: 484

SEQ ID NO: 9253 - protein, 279 aa, Streptococcus agalactiae
ATGAGTTTAATAGGCGCTGTATTGAAAGGAACCAAAGAAGACAAAGAATTCAAAAAGCAAATTCAAAGAGCTTTAGTAAGGATTGTCTATGCCCCTGAAATAGTAGAAGAAGCTGATTCTATTAAGATGACTTATAGTGACAAGATTGATAATGTTTCTGAGACGGCCAAATCATCAATTAAAACGATAGCAAATCAAATAGATTCAGGACTTGTAGGACAATTTGGGGAAAAAGTAAAGGCACAGGTAGATTTAAATAAAGGTAGTTATGATGATTTA

SEQ ID NO: 9254 - protein, 93 aa, Streptococcus agalactiae
MSLIGAVLKGTKEDKEFKKQIQRALVRIVYAPEIVEEADSIKMTYSDKIDNVSETAKSSIKTIANQIDSGLVGQFGEKVKAQVDLNKGSYDDL

SEQ ID NO: 9255 - protein, 96 aa, Streptococcus agalactiae; identical to SEQ ID NO: 4829

SEQ ID NO: 9256 - protein, 32 aa, Streptococcus agalactiae; identical to SEQ ID NO: 488

SEQ ID NO: 9257 - protein, 102 aa, Streptococcus agalactiae; identical to SEQ ID NO: 4831

SEQ ID NO: 9258 - protein, 34 aa, Streptococcus agalactiae; identical to SEQ ID NO: 490

SEQ ID NO: 9259 - protein, 123 aa, Streptococcus agalactiae; identical to SEQ ID NO: 4833

SEQ ID NO: 9260 - protein, 41 aa, Streptococcus agalactiae; identical to SEQ ID NO: 4834

SEQ ID NO: 9261 - protein, 858 aa, Streptococcus agalactiae
ATGTTTAAATATGTCCCTATTTTTAGGGAATTTCGACTTAATCGACAGTTTTCTCTTAAACAGGTTGCTTCAAATGAACTTTCTGTTTCTCAGTTATCACGATTTGAGAGGGGTGAATCAGATTTATCATTAACAAAATTTTTAGGGGCTTTAGAGGCAATTGATTTATCAATTAGCGAATTTATGGATAGAGTAAATAAATATCAAAAATCTGATCAGATATCTTTAATGTCTCAGATGGCTCAATATCATTATCAAAGAGACGTAGCTGGGTTAGAAAAGATGATTTCTGTGGAAGAAGGTAAACTAAAAAAGGATAGTTCAGATATACGTTGTCGTTTAAACATAGTTCTTTTTAGAGGAATGATATGTGAATGTGACTCCTCAAGAAAAATGTCGGAAGAAGACCTTTGCTTTTTGTCGGATTACCTCTTTCAAAAGGATAGTTGGGAAATTAGTGACTATATTTTGATTGGAAATCTTTACCGGTATTACAACACAAGGCATATTTGCCAACTTGTTAAAGAGGTTATCAATCAAAAGGAATATTATCGAGATATTTATACAAACCGCAATGTTGTCGAAGCAACCCTCCTAAATGTGGTAGAGACACTAATAGAACGGCGCGCTCTAGAAGAAGCAACGTTTTTTCTAGAGAAAGTTGAAGCACTTTTAAATAATGAGCGGAATGCTTATCACCGTATTATTTTACTCTATGAAAAAGGATTTCTTGCCTATGCTAAAGGGGATAGTCGAGGAATACAAAGCATGAAGCAAGCTATTTTTTGCTTCCAAGCAATTGGTTCTAAACATCATGTTGAAAATTTTCAGGAACACTTTAATAGGGTAACAAGATTA

SEQ ID NO: 9262 - protein, 286 aa, Streptococcus agalactiae; identical to SEQ ID NO: 492

SEQ ID NO: 9263 - protein, 1178 aa, Streptococcus agalactiae
ATGAATATTAATGGTATAAAATTACTATCTAGTCGAGCAGTCAGTAAACTTGGTGATGTGTTTTATGATTATGGAAATAGTACTTGGATTGCTTCGATGGGTGGTCTAGGACAAAAGATTTTAGGTATTTATCAGATAGTAGAGTTGTTGGTTTCTATTGTCCTCAACCCTTTTGGAGGCGCCTTAGCTGATCGCTTTCAACGAAGAAAAATTTTACTAATAACAGATGCTATCTGTGCTATCATGTGTTTCTTACTTTCTTTTATTGGAGATGATAAAGTAATGGTGTATGGTCTAATAGTTGCTAATGCTATCTTAGCGGTTTCCAATGCTTTTTCTTCTCCGGCTTATAAATCTTATATTCCTGAAATAGTAGATAAAGCTGATATCATTACCTATAATGCTAATCTGGAAACCATTGTGCAAATTATTAGTGTAAGTTCCCCTGTTTTAGGTTTCCTTATTTTTAATAATTTTGGTATTAGGATTACTTTAATTGTTGATGCGATTACTTTTTTGATCTCTTTCCTGTTTCTTTATGCTATTAAAGTGGAAAGGGTACAGCTTTCAAAACAAGAAAAGGTAGCGATAAAAAATATTTTAGCTGATATTGCAGATGGATTTACTTACATCAAAAAAGAAAAAGAAATTATGTTTTTTCTAATTATTGCTGCTTTATTAAACACTTTCCTAGCAATGTTCAATTATCTTTTACCTTTTACTAACTCCCTATTAAAAACTTCAGGTGCTTATGCAACAATACTTAGTATATCAGCTATCGGATCAATTATTGGAGCGCTTATTGCTAGAAAAATTAAATCTAGTATTAATTCTATGCTATCTATGCTAGTATTCAGTAGTTTGGGAGTCATAGTTATGGGATTCCCATCTCTATTTGAATTACCGATATGGATACCTTACAGTGGTAGTTTTCTTTTTAATAGTCTTCTGACAATGTTTAATATTCATTTTTCAGTCAGGTACAAATCAGGGTCGATGAAGCGTATATGGGGCGTGTGATGTCGACTATATTTACTATTGCTATTATGTTTATGCCTATAGGAACACTATTTATGACTATCTTTTCATTTGCCTTATCAAATGTTAGCTTTATTGTTATAGGATGTGCCATTGCTATATTGGGAGGATTAGGATTTAGCTATAGTAAAAAACAATTT

SEQ ID NO: 9264 - protein, 393 aa, Streptococcus agalactiae
  VARIANT 325: Xaa = Any Amino Acid
MNINGIKLLSSRAVSKLGDVFYDYGNSTWIASMGGLGQKILGIYQIVELLVSIVLNPFGGALADRFQRRKILLITDAICAIMCFLLSFIGDDKVMVYGLIVANAILAVSNAFSSPAYKSYIPEIVDKADIITYNANLETIVQIISVSSPVLGFLIFNNFGIRITLIVDAITFLISFLFLYAIKVERVQLSKQEKVAIKNILADIADGFTYIKKEKEIMFFLIIAALLNTFLAMFNYLLPFTNSLLKTSGAYATILSISAIGSIIGALIARKIKSSINSMLSMLVFSSLGVIVMGFPSLFELPIWIPYSGSFLFNSLLTMFNIHFXSQVQIRVDEAYMGRVMSTIFTIAIMFMPIGTLFMTIFSFALSNVSFIVIGCAIAILGGLGFSYSKKQF

SEQ ID NO: 9265 - protein, 648 aa, Streptococcus agalactiae
ATGAAACAAATGAATACTTTCCAACAATTTATCTACTACTTCCAACATAATGGTAGTTATATCTTAGAACAATTTATCCACCACTTTTTAATTTCAGTTTACGGCGTTATTTTAGCTGCAATTGTTGGTATCCCTCTAGGTATCTTCATCGCTAGACGTGGTAAAATTAAAACCTTTGTTATGGGAATCGCAAATGTCATCCAAACCATTCCTTCTTTAGCTATGATCTCTATCATTATGTTAGGTCTAGGGCTAGGTATTAAAACAGTAGTTGCAACTGTCTTTCTTTATTCTCTTCTGCCAATCATCACAAATACTTACACTGGTATTAGAAATGTTGACTCCGACTTACTAGATGCTGCTAAAGGAATGGGCATGACTAAGCGTCAACGTTTATTTATGGTTGAGTTACCACTATCTATTTCCGTTATCATGGCTGGACTTAGAAATGCCCTTGTTGTAGCAATTGGTATTACAGCCATTGGTGCTTTCGTCGGGGGAGGCGGACTTGGAGATATCATCATAAGAGGAACTAATGCAACAAATGGTGGTGCTATTATCTTAGCAGGATCTCTTCCAACAGCCCTTATGGCAATTTTCTCTGATTTAATCCTAGGCGGTATCCAACGCATGCTTGAACCAAGAAAA

SEQ ID NO: 9266 - protein, 216 aa, Streptococcus agalactiae; identical to SEQ ID NO: 496

SEQ ID NO: 9267 - protein, 924 aa, Streptococcus agalactiae
ATGCTTAAAAAATCGCACTTTTTACAGATATTTACACTTTGCTTAGCCCTCTTAACGATTTCTGGTTGTCAATTAACCGATACTAAAAAGTCTGGTCATACCACAATTAAGGTTGCTGCCCAAAGTTCTACAGAGTCTAGTATTATGGCAAATATTATCACCGAATTAATTCATCACGAATTAGGATACAACACAACTTTAATAAGCAATCTTGGTTCCTCTACGGTTACTCACCAAGCTTTGCTCCGTGGTGATGCTGACATTGCTGCCACACGTTATACAGGAACAGACATCACAGGGACTCTTGGTTTAAAAGCTGTTAAAGACCCTAAAGAAGCTTCTAAGATTGTAAAAACTGAATTCCAAAAACGCTACAATCAAACTTGGTATCCTACTTATGGTTTTTCTGATACTTATGCATTCATGGTTACTAAAGAGTTTGCCAGACAGAATAAAATCACTAAGATCTCTGATCTTAAAAAATTATCAACAACTATGAAGGCAGGGGTTGATAGTTCATGGATGAATCGCGAGGGAGATGGATACACTGATTTCGCTAAAACATACGGTTTTGAATTTTCACATATTTACCCTATGCAAATTGGCTTAGTCTATGATGCGGTTGAAAGTAACAAAATGCAATCTGTATTAGGCTACTCCACTGACGGTCGTATTTCGAGCTATGATTTAGAAATTTTAAGGGATGATAAAAAATTCTTTCCTCCTTATGAAGCCTCTATGGTTGTCAACAATTCTATCATCAAAAAAGATCCTAAACTAAAAAAATTACTCCATCGACTCGATGGTAAAATCAATTTAAAAACGATGCAAAACCTTAATTATATGGTAGATGATAAACTTTTAGAACCTTCAGTTGTTGCCAAACAATTTTTAGAAAAAAACCATTATTTTAGAGGAGATAAA

SEQ ID NO: 9268 - protein, 308 aa, Streptococcus agalactiae; identical to SEQ ID NO: 498

SEQ ID NO: 9269 - protein, 362 aa, Streptococcus agalactiae
TGCTCCTATACTAAGGAATACTATATAGGTATGAATAATGTCATCCAACACTTAAAGATTGTGCTAAAGGGATGGGAATGAAACCTATTCAATCTATATTTCAAGTTGAGTTACCTTTAGCTACTCCAATTATTATGGCTGGTATTCGCTTGTCTACTATTTATGTTATTTCTTGGGCTACATTGGCTTCTTATATAGGTGCAGGTGGACTTGGTGATCTCATTTTTAGCGGGTTAAATCTTTTTCAGTCCAAATTAATTCTAGGGGGCACAATTCCTGTTATTATCCTGTCACTTATTATAGATTATCTTTTAGGATTACTGGAAACAGCTCTAACGCCCAGAACAACAAGAAGGGAGGCT

SEQ ID NO: 9270 - protein, 122 aa, Streptococcus agalactiae
LLPILRNTYIGMNNVNPTLKDCAKGMGMKPIQSIFQVELPLATPIIMAGIRLSTIYVISWATLASYIGAGGLGDLIFSGLNLFQSKLILGGTIPVIILSLIIDYLLGLLETALTPRTTRREA

SEQ ID NO: 9271 - protein, 276 aa, Streptococcus agalactiae
ATGGTCAATTTCTTATCACAGTATGGCATGCAAATATTAGTAAAAACATGGGAACAAGTCTATATCTCATTCTTTGCTATAGCACTTGGGATTGCAATTGCTGTTCCATTGGGTGTGGTCTTAACACGTTTTCCCAAAGTAGCCAAAATTATCATTGCTATAGCTAGCATGTTACAAACTATACCAAGTTTAGCCTTATTAGCTTTAATGATTCCATTGTTTGGAATTGGAAAAATCAGCTATCGTTGCTTTATTTATTTATTCCTGCTCCTATAC

SEQ ID NO: 9272 - protein, 93 aa, Streptococcus agalactiae
MVNFLSQYGMQILVKTWEQVYISFFAIALGIAIAVPLGVVLTRFPKVAKIIIAIASMLQTIPSLALLALMIPLFGIGKIQLSLLYLFIPCFLY

SEQ ID NO: 9273 - protein, 1143 aa, Streptococcus agalactiae
ATGGGCCAAGAACCTATCATCGAATATCAAAATATCAATAAAGTGTATGGGGAAAATGTTGCGGTTGAAGACATTAACCTTAAAATTTACCCTGGTGATTTTGTTTGTTTCATCGGTACGAGTGGATCAGGTAAAACAACATTAATGCGTATGGTTAACCATATGTTAAAACCAACAAATGGTACTCTATTATTTAAGGGAAAAGATATTTCTACTATTAACCCCATTGAATTAAGACGCAGAATTGGATATGTTATCCAAAACATTGGTTTAATGCCTCATATGACCATTTACGAAAATATAGTTCTTGTACCAAAATTATTGAAATGGTCAGAAGAAGCTAAAAGAGCTAAAGCAAGGGAACTTATTAAATTAGTTGAATTACCCGAAGAATATTTGGATCGCTACCCTAGTGAGTTGTCTGGCGGTCAGCAACAACGTATCGGTGTCATTCGCGCTCTTGCAGCAGACCAAGATATTATTTTAATGGATGAGCCTTTTGGAGCTCTGGATCCTATTACTAGAGAAGGTATTCAAGACTTAGTCAAGTCTCTTCAGGAAGAAATGGGGAAAACTATCATCTTAGTTACTCATGATATGGATGAAGCCCTCAAGTTAGCAACAAAAATTATTGTTATGGACAATGGTAAAATGGTCCAAGAAGGGACACCCAATGATCTCTTACATCATCCTGCTACTAGTTTCGTTGAACAAATGATTGGAGAAGAGCGTCTCCTTCATGCGCAGGCTGATATTACTCCTGTTAAACAGATAATGTTAAATAATCCTGTTTCAATAACTGCTGAAAAAACACTAACTGAAGCTATTACACTAATGCGCCAAAAACGCGTTGACTCACTTCTAGTAACCGATAACGGTAAATTAATTGGTTTTATTGACTTAGAATCTCTGAGCAGTAAATATAAGAAAGATCGACTTGTTTCTGATATCTTAAAACATACTGATTTTTATGTTATGGAAGACGACTTACTTAGAAATACTGCTGAGCGTATTTTAAAACTTGGTTTAAAATACGCTCCAGTTGTTGACCATGAGAATAACTTAAAGGGCATTGTTACTCGTGCATCCCTAGTTGATATGTTATACGATATTATTTGGGGCGATACTGAAACGGAGGATCAA

SEQ ID NO: 9274 - protein, 381 aa, Streptococcus agalactiae; identical to SEQ ID NO: 502

SEQ ID NO: 9275 - protein, 1350 aa, Streptococcus agalactiae
ATGAAAGTAGTCAAATTTGGAGGAAGTTCTTTAGCATCTTCCCAACAATTATACAAAGTACTAAATATTATCAAATCAGACTACACTAGACGGTTTGTTGTCGTTTCAGCTCCAGGGAAACGCTACGAAGAAGACTTAAAAATGACAGATGCTTTGATACAATATTATCAAAATTATATTAACGGTAAAGATATTGTTAAAGACCAAACTTGGATTATCAATCGTTATCAAGAAATTATTAGTGATTTGTCTTTAGGAAGCACTATTGCAGAAGAAATTACTCGCTCTATAGAGCAGCTAGCTTCACTTCCCATAGAAAATAATCAGTTTTTATATGATTGTTTTTTAGCAGCCGGTGAAGATAACAACGCAAAGTTAGTTGCAACGTTTTTTAATCAAAATGACATTCCTGCAAGATATGTTCATCCAAACGAAGCAGGAATTATTGTAACTAAAGAACCATGTAATGCACGAATTATTCCAGGAAGTTATGATAAGATTGAGAACTTATGTCTATACAATGAGGTTCTTGTTATCCCTGGATTTTTTGGAGTCACAGAAGATAACCAAATTTGTACCTTTTCAAGAGGGGGATCTGACATTACTGGATCCCTAATTGCAGCAGGCATAAAAGCAGACCTTTATGAGAACTTCACAGATGTTGATGGTATATTTGCAGCACATCCAGGTGTAGTTAAGAACCCTCACGCTATCCCTGAGCTTACTTATAAAGAAATGCGTGAATTAGCCTATGCGGGTTTTTCGGTTTTACATGATGAAGCTTTACTTCCTGCCTATCGTGGCAGAATCCCTCTTGTTATTAAAAATACAAATAATCCCCAACAGCCTGGTACAAAAATAGTTTTAAAGCATACTCGTAGTAACATAGCAGTAACTGGGATCGCTTCTGATAGCCGTTTTGCTAGCATAAACGTATCTAAATACTTAATGAATAGAGAAGTAGGTTTCGGCCGAAAAGTACTACAAATTTTAGAGGATTTAAATATTAGTTTTGAACATATGCCAACTGGCATAGATGATCTATCCATTGTCTTACGTGAAAAAGAATTGACACCAATCAAAGAACAAGAAATCTTAAATTACCTAACTCGTAAACTAGAAGTAGATTACGTTGACATCCAACACAATCTATCTACAATCGTAATTGTAGGTGAAAATATGAAAAGTCAGATTGGAGTCACTGCAACAGCGACACAAGCCTTATCAAGAGAAAAAATCAATATCACCATGATATCACAAGGTTCAAGCGAAGTCTCCATTATGTTCGTTATAAACAGTAAGGATGAAAAAAGAGCTATTAAAGCACTATATGAAACATTCTTCCAAAAA

SEQ ID NO: 9276 - protein, 450 aa, Streptococcus agalactiae; identical to SEQ ID NO: 690

SEQ ID NO: 9277 - protein, 660 aa, Streptococcus agalactiae
ATGTGTAAATATAAAGCAATAATATTTGATATGGATGGTGTTCTATTTGACACTGAATTATTTTATTATAAAAGGCGAGAGCGTTTTTTAAAACAACATGGAATTACAATTGACCATTTACCAATGAATTTTTTTATTGGAGGAAATATGAAGCAGGTTTGGAAATCTGTTTTAGGTGATCAATATGATACCTGGGATATTGATAAGCTCCAACAAGATTATAGTCGCTATAAAGAGGATAATCCCTTGCCATACAAAGATTTAATTTTTCAGGATTGTAAAAGAGTCATTGAAAAGCTTCATCACAAAGGCTATCTTTTGGGTCTAGCTTCAAGTTCTACTAGACATGATATCATGTTAGCATTAGAAAGTTTTAATCTGGATACATATTTTAAGGTAATTCTGTCTGGTGAGGAATTTTCAGAAAGTAAACCTAATCCAGCTATTTATAATAGAGCAGCAGAACTTTTAGATATTCCTAAACAGCAAATTCTTATTGTAGAAGACAGTGAGAAGGGGATTACAGCTGGTATTGCAGCCGGTATTGCAGCCGGTATTGATGTGTGGGCTATTGAAGATAAATACTTTGGAATGAATCAGTCGCAGGCTAATGTATTAGTGAGCGATCTGAGTCAATTTTTTGTGAAATTAGATAACTAT

SEQ ID NO: 9278 - protein, 220 aa, Streptococcus agalactiae
MCKYKAIIFDMDGVLFDTELFYYKRRERFLKQHGITIDHLPMNFFIGGNMKQVWKSVLGDQYDTWDIDKLQQDYSRYKEDNPLPYKDLIFQDCKRVIEKLHHKGYLLGLASSSTRHDIMLALESFNLDTYFKVILSGEEFSESKPNPAIYNRAAELLDIPKQQILIVEDSEKGITAGIAAGIAAGIDVWAIEDKYFGMNQSQANVLVSDLSQFFVKLDNY

SEQ ID NO: 9279 - protein, 750 aa, Streptococcus agalactiae
GTGGCCACTATTATGCTTAATCGACCAGATATTTCAAATGGTTTTAACATCCCAATGTGTCAAGAAATTATTGATGCAATAAGGCTTGTGTCTGAAAATAAAGATGTCATGTTTTTAGTGATTGAAGCACAAGGACCAATCTTTTCAATCGGAGGAGATTTAAAAGTGATGAAAGCTGCTGTTGAGAGCGATGATATTAGCTCATTAACTAAAATTGCTGAGTTAGTTAATCAGATATCGTATGATTTACTACAGCTAGAGAAACCTGTTGTTATGTGTGTAGATGGGGCTGTAGCTGGTGCCGCAGCTAATATTGCATTAGCAGCTGATTTTGTTATCGCAAGCAAGAAGAGTAAATTTATCCAGGCTTTTGTGGGTGTCGGTTTAGCTCCAGATGCAGGAGGTTTATTGTTACTTAGTAAATCAATCGGTATAACTCGTGCAGTGCAACTAGCTTTAACTGGAGAAAGCTTATCTGCTGAAAAAGCTGAAGCTTTGGGAATTGTTTATAAACTTTGTGAATCAGATAAAATAGGTAAAATTAAGGATCAACTATTAAAGCGTTTAAGTAGACATTCTATAAACTCATATCAAGCCATAAAATCATTAGCTTGGGAAGCTGCTTTTAAAGATTGGGAACAATATAAAAAGCTTGAATTACAACTGCAAGAATCATTAGCCTTTAAGCAAGATTTTAAAGAAGGTGTTCGGGCACACGCTGATAGAAGGCGTCCTAATTTTTTAGGCAAA

SEQ ID NO: 9280 - protein, 250 aa, Streptococcus agalactiae; identical to SEQ ID NO: 694

SEQ ID NO: 9281 - protein, 432 aa, Streptococcus agalactiae
TTGGAATACGATCAGATTAATAGTTATTTAGTTGACATTTTTAATAGAATCATGATTATTGAGGAAATGAGTTTAAAGACTAGCCAATTTAGCGATGTATCTTTAAAAGAAATGCATACTATTGAAATTATTGGGAAACATTCTGAGGTAACTCCTAGCGATGTCGCTCGAGAATTAATGTTAACTTTGGGAACTGTAACAACCAGCCTTAATAAGTTAGAAAAAAAAGGCTACATTGAGCGTAAACGGTCAAGTATTGATCGTCGAGTTGTTCACTTGAGTCTTACTAAGAGAGGTAGGTTATTAGATCGATTGCATAGTAAATTTCATAAATCTATGGTATCTCATATTATTGAAGACCTAGGTGAAGAAGACATAAAAATGTTGACGAGCGCTTTAGGGAATCTTCATAAATTTTTGGAGGACTTAGTC

SEQ ID NO: 9282 - protein, 144 aa, Streptococcus agalactiae; identical to SEQ ID NO: 696

SEQ ID NO: 9283 - protein, 969 aa, Streptococcus agalactiae
GTGGTTTTTGCTAAAATTAGTCAACTTGCACATTATGCACCTTCTCAAATTATTAAAAATGAGGATTTATCATTAATCATGGATACCAGTGATGACTGGATTTCGTCACGTACTGGTATAAAACAACGTCATATTAGTAAAAATGAAACAACAGCTGATTTGGCAAATAAGGTCGCAGAACAACTTATTGAAAAATCCGGTTATTCCGCTAGTCAAATTGACTTTATTATTGTTGCAACGATGACACCAGACTCTATGATGCCTTCTACTGCTGCAAGAGTGCAAGCTCATATTGGAGCGAGTAATGCTTTTGCCTTTGACTTGAGTGCAGCATGTAGTGGTTTTGTTTTTGCCTTGTCTACCGCCGAAAAATTGATATCATCAGGTAGCTATCAAAAAGGTTTAGTAATAGGAGCAGAAACTGTTTCTAAAGTATTAGACTGGACTGATAGAGGGACAGCAGTTTTATTTGGAGATGGAGCTGGAGGTGTCTTGCTAGAAGCTTCTAAGGAAAAACATTTTCTTGCAGAGTCTCTCAATACAGATGGTAGTCGTCAGGGACTTCAATCCAGTCAAGTCGGGTTAAATTCACCTTTCTCAGATGAAGTACTTGATGATAAATTTTTGAAAATGGATGGTAGAGCAATCTTTGATTTTGCTATCAAAGAAGTTTCAAAAAGTATCAATCATCTTATAGAAACATCTTATTTGGAAAAAGAAGATATTGATTATCTTTTCTTACACCAAGCGAATCGAAGGATTTTAGATAAGATGTCTCGAAAAATTGATATAGCACGTGATAAATTTCCAGAGAATATGATGGATTATGGTAATACTAGTGCAGCTAGTATCCCTATTTTACTTTCAGAATCTTATGAGAACGGTTTGTTGAAACTAGATGGTAACCAAACAATCCTCTTATCGGGTTTCGGTGGAGGTTTGACATGGGGAAGTCTAATTGTTAAAATT

SEQ ID NO: 9284 - protein, 323 aa, Streptococcus agalactiae; identical to SEQ ID NO: 698

SEQ ID NO: 9285 - protein, 270 aa, Streptococcus agalactiae; identical to SEQ ID NO: 5055

SEQ ID NO: 9286 - protein, 90 aa, Streptococcus agalactiae; identical to SEQ ID NO: 700

SEQ ID NO: 9287 - protein, 957 aa, Streptococcus agalactiae
ATGAAAACACGTATAACAGAATTACTAAATATAAAATATCCAATTTTTCAAGGGGGTATGGCGTGGGTCGCTGATGGAGATCTTGCAGGAGCAGTTTCTAAGGCAGGTGGTCTAGGTATTATTGGTGGAGGAAATGCCCCTAAAGAGGTTGTCAAAGCAAATATTGATAAAATAAAATCTATGACTGATAAACCCTTTGGTGTGAATATTATGCTTTTATCACCTTTTGTAGATGATATTGTTGATTTGGTTATTGAAGAAGGTGTAAAAGTTGTAACGACGGGTGCAGGTAATCCTGGTAAGTACATGGAGCGCTTTCATGAAGCAGGTATAACAGTAATCCCTGTTGTTCCTAGTGTTGCATTAGCAAAACGTATGGAGAAATTAGGGGCTGATGCTATCATTACAGAAGGAATGGAAGCGGGTGGTCACATCGGAAAACTGACCACGATGACATTAGTACGACAGGTTGTTGATGCTGTTACAATTCCAGTCATTGCCGCAGGTGGTATAGCAGATGGGCGTGGGGCTGCTGCGGGTTTCATGTTAGGAGCTGATGCTGTTCAGGTAGGAACTCGTTTTGTTGTTGCTAAAGAATCTAATGCTCACCCTAATTACAAAGCAAAAATCTTAAAAGCAAAAGATATCGACACTGCTGTTTCTGCTCAGGTAGTAGGTCATCCAGTTCGTGCCTTAAAAAATAAACTAGTAACAACCTATAGCCAAGCAGAAAAAGATTATTTAGCTGGCCGTATTTCAATCAATGAGATTGAAGAATTAGGAGCGGGAGCTCTTCGCAATGCAGTTGTTGATGGGGATGTTATTAATGGTTCAGTTATGGCAGGACAAATTGCAGGATTAATTAAATCAGAAGAGACTTGTCAAGAGATTCTTGAAGATATTTATTCAGGAGCGCGTCAAGTTATTCTTTCTGAGGCAAGCCGCTGGTCAGATTTA

SEQ ID NO: 9288 - protein, 319 aa, Streptococcus agalactiae; identical to SEQ ID NO: 702

SEQ ID NO: 9289 - protein, 924 aa, Streptococcus agalactiae
ATGAATAAAGTTGCATTTCTATTTGCTGGTCAAGGTGCTCAAAAGTTAGGAATGGCTAGAGATTTATATGAAACTTTCCCGATTGTTAAAGAAACTTTTGATAAGGCAAGTCATGTTTTAGGATATGATTTGAGAGAATTGATTGATAAAGACTTAGACAAATTAAATCAGACGAAATATACGCAACCAGCTATTCTAACGACTTCGACTGCTATTTATCGTTTAATTCTTAAAGAAATTGAACTTAGACCAGATATGGTTGCAGGACTTTCTTTGGGAGAATACAGTGCTTTAGTTGCTTCAGGTGCTATAAGATTTGAAGATGCTGTAGTACTTGTTGCTAGACGAGGCCAACTAATGGAAGCAGCAGCACCTGCTGGTAGTGGCAAAATGGTAGCAGTTTTAAATGCTGATCGTCAAATAATTGAAGATGCTTGTAAGAAGGCTTCTCAGTTTGGTATTGTTAGTCCTGCAAATTATAATACTCCAAAGCAAATTGTTATAGGGGGAGAGTCAATCGCTGTAAATGCAGCTGTAGAAGAATTAAAACAACAAGGAGTAAAACGTTTAATTCCTCTGAATGTTTCAGGTCCTTTTCACACTGCTTTATTGAAACCTGCAAGTCAGAAATTGAGCGATGTTTTAGATAAAGTTCATTTTTCAGTTTCTGAAATCCCTGTAATTGGAAATACAGAGGCGCAGATAATGAAAAAAGACGATATCAAATCTTTATTGGCACGCCAAGTTATGGAACCTGTACGCTTTGATGAGTCTATTGAAACCATGAAAAAAATGGGAATGACACAGGTTGTTGAAATTGGTCCAGGGAAGGTACTCTCAGGTTTCTTGAAAAAAATAGATAGCTCATTATCAGTACATTCTGTTGAAGATAAAATTGGATTTAATAATCTTAAGGAATTAAAC

SEQ ID NO: 9290 - protein, 308 aa, Streptococcus agalactiae
MNKVAFLFAGQGAQKLGMARDLYETFPIVKETFDKASHVLGYDLRELIDKDLDKLNQTKYTQPAILTTSTAIYRLILKEIELRPDMVAGLSLGEYSALVASGAIRFEDAVVLVARRGQLMEAAAPAGSGKMVAVLNADRQIIEDACKKASQFGIVSPANYNTPKQIVIGGESIAVNAAVEELKQQGVKRLIPLNVSGPFHTALLKPASQKLSDVLDKVHFSVSEIPVIGNTEAQIMKKDDIKSLLARQVMEPVRFDESIETMKKMGMTQVVEIGPGKVLSGFLKKIDSSLSVHSVEDKIGFNNLKELN

SEQ ID NO: 9291 - protein, 732 aa, Streptococcus agalactiae; identical to SEQ ID NO: 5061

SEQ ID NO: 9292 - protein, 244 aa, Streptococcus agalactiae; identical to SEQ ID NO: 706

SEQ ID NO: 9293 - protein, 1230 aa, Streptococcus agalactiae
ATGACATTACAGCGAGTAGTAGTAACAGGTTACGGTGTAACCTCACCTATTGGAAACACACCAGAAGAATTTTGGAATAGTCTTAAAGAAGGAAATGTTGGTATTGGACCTATCACTAAATTTGATTCAAGTGATTTCATGGTCAAAAATGCTGCTGAAATTCATGATTTTCCATTTGATAAATATTTTGTCAAAAAAGATCTGAACAGATTTGATATGTATTCCCTTTATGCCTTATATGCTTCAAGTGAAGCTATTCAACATGCTAATTTAAATTTAGATGAAATTGATGCAGATCGATTTGGTGTCATCGTTGCATCAGGTATTGGAGGGATTCAAGAGATTGAAGAACAAGTGATTCGTCTTCATGAAAAAGGGCCAAAACGCGTAAAACCAATGACGCTTCCAAAAGCTCTACCAAATATGGCAGCTGGAAATGTTGCGATGAGGTTAGGCGCTCATGGTGTATGTAAATCAATTAATACAGCTTGTGCTTCTTCTAATGATGCTATTGGAGATGCTTTCCGTAATATAAAATTTGGTATTCAAGATATTATGGTAGTCGGTGGTGCAGAAGCTGCTATTACAAAATTTGCCATTGCTGGATTCCAAAGTCTTACAGCATTATCAACAACTGAAGATCCATCAAGAGCATCTATTCCATTTGATAAAGATCGCAATGGATTTATCATGGGAGAAGGTTCTGGAATGTTGGTCTTAGAAAGTTTAGAACACGCTGAAAAACGAAGAGCTACTATTCTTGCAGAAGTTGTTGGTTATGGTAACACTTGTGACGCATATCATATGACTTCACCACATCCAGAAGGTTTAGGAGCCACTAAAGCTATTCAACTTGCACTGGTTGAAGCTAATATTAAACCTGAAGAAGTTAACTATGTAAATGCTCATGGAACTTCAACACCTGCTAACGAAAAAGGAGAGAGTCAAGCTATTGTTGCTGCACTTGGGACAGACGTTCCAGTTTCTTCGACTAAATCTTTTACTGGTCATCTTTTGGGTGCCGCGGGAGCTGTTGAGGCAATTGCAACTATTGAAGCGATACGTCATAGTTATGTTCCAATGACTGCTGGAACGACAGAATTATCAGAAGATATTACAGCGAATGTTATTTTTGGTCAAGGGCAAGACGCTGATATTCGTTATGCCATTTCAAATACATTTGGTTTTGGAGGACACAATGCAGTTCTGGCCTTCAAACGCTGGGAGGAT

SEQ ID NO: 9294 - protein, 410 aa, Streptococcus agalactiae
MTLQRVVVTGYGVTSPIGNTPEEFWNSLKEGNVGIGPITKFDSSDFMVKNAAEIHDFPFDKYFVKKDLNRFDMYSLYALYASSEAIQHANLNLDEIDADRFGVIVASGIGGIQEIEEQVIRLHEKGPKRVKPMTLPKALPNMAAGNVAMRLGAHGVCKSINTACASSNDAIGDAFRNIKFGIQDIMVVGGAEAAITKFAIAGFQSLTALSTTEDPSRASIPFDKDRNGFIMGEGSGMLVLESLEHAEKRRATILAEVVGYGNTCDAYHMTSPHPEGLGATKAIQLALVEANIKPEEVNYVNAHGTSTPANEKGESQAIVAALGTDVPVSSTKSFTGHLLGAAGAVEAIATIEAIRHSYVPMTAGTTELSEDITANVIFGQGQDADIRYAISNTFGFGGHNAVLAFKRWED

SEQ ID NO: 9295 - protein, 534 aa, Streptococcus agalactiae
ATGCAGTTCTGGCCTTCAAACGCTGGGAGGATTAAATTGGATATTCAAGAGATTAAGGATTTAATGACTCAATTTGATGAGTCAAGTCTGAGAGAATTTTCATTCAAAACAAGTGACGGTGAGCTGTCTTTTAGTAAAAATGAGGGAAAAGCTCCACTTGTCCCAACTATGTCTCCTATGAGTCATCAACCTGAAGCGACTCCAACTATAGCAACTCCTGTCTCTAATGAAGCAGGTGAGCAAACGAAACAAGCTACTGAAGTAGTTTCAGAAATCCCAGAGTCGACTGTGACTGTTGCAGAAGGTGACGTTGTCGAAAGTCCTTTAGTTGGGGTTGCTTATTTAGCTTCTGGACCAGATAAACCTAACTTTGTTTCAGTAGGTGATAGCGTGAAGAAGGGACAAACTTTGATGATTATTGAGGCAATGAAGGTGATGAATGAAGTGCCTGCCCCCCATGATGGTGTAGTTACTGAAATTCTTGTAGCCAATGAAGAAGTTATTGAATTTGGTAAAGGATTGGTACGAATCAAA

SEQ ID NO: 9296 - protein, 178 aa, Streptococcus agalactiae; identical to SEQ ID NO: 710

SEQ ID NO: 9297 - protein, 420 aa, Streptococcus agalactiae
ATGATTGATATAAAAGAAATTCGTGAGGCTTTACCTCACCGCTATCCAATGTTATTAGTGGATCGTGTTTTAGAGGTATCAGAAGATGAGATAGTCGCTATCAAAAATGTTAGTATCAATGAGCCTTTTTTCAATGGTCATTTTCCAGAATATCCTGTAATGCCAGGCGTTTTAATTATGGAAGCTTTGGCTCAAACTGCAGGTGTTTTAGAATTATCTAAAGAAGAAAACAAAGGAAAGCTTGTTTTTTATGCAGGTATGGATAAAGTGAAATTTAAAAAGCAAGTTGTTCCAGGAGATCAATTAGTTATGACTGCTAAGTTTGTCAAACGTAGAGGAACTATAGCCGTTGTTGAAGCAATAGCAGAAGTTGATGGGAAATTAGCTGCCAGTGGAACGTTAACATTTGCAATAGGCAAT

SEQ ID NO: 9298 - protein, 140 aa, Streptococcus agalactiae
MIDIKEIREALPHRYPMLLVDRVLEVSEDEIVAIKNVSINEPFFNGHFPEYPVMPGVLIMEALAQTAGVLELSKEENKGKLVFYAGMDKVKFKKQVVPGDQLVMTAKFVKRRGTIAVVEAIAEVDGKLAASGTLTFAIGN

SEQ ID NO: 9299 - protein, 1368 aa, Streptococcus agalactiae
ATGTTTAAGAAAATATTGATTGCTAATCGCGGAGAAATTGCAGTACGTATCATTCGTGCAGCCCGTGAAATGGGAATTTCGACAGTTGCTATCTATTCGGAGGCTGACAAGGAATCATTGCACACAATTTTAGCAGATGAAGCTATTTGTGTTGGACCAGCCAAATCAGCAGAATCTTATTTAAACGTTAATGCTATATTATCTGCTGCTATTGTGACTGGAGCGGAAGCTGTTCATCCAGGTTTTGGTTTTTTGAGTGAAAATTCTAAATTTGCTACTATGTGTGAAGAGATGAACTTAAAATTCATTGGTCCATCTGGAGAAGTTATGGATAAAATGGGTGATAAAATCAATGCTCGTACAGAGATGATAAAAGCTGATGTTCCGGTTATCCCAGGATCAGATGGTCAAGTTACAAGTGTAGAAGAAGCTGTATCAATTGCTGAGGAAATCGGCTATCCATTGATGTTAAAAGCCTCAGCCGGTGGCGGTGGAAAAGGAATTAGGAAGGTCAAATCAGCAGATGAATTGAAGCCTGCTTTTGAGTCTGCTTCACAGGAGGCTTTGGCTGCGTTCGGTAATGGTGCTATGTATATTGAAAAAGTTATATACCCAGCTAGACATATTGAAGTACAAATACTTGGAGATAGCTTTGGTAAGATAGTTCACCTAGGAGAACGTGATTGTTCTCTGCAGCGTAACAATCAGAAGGTATTGGAAGAAAGTCCGTCTGTGGCAATAGGTAACACTCTGCGTCAACAAATTGGTGAAGCAGCTGTTCGTGCAGCTGAGGCTGTATCTTATGAAAATGCAGGAACAATTGAGTTTTTGTTAGATGAGAATAGCGGACAGTTCTATTTCATGGAAATGAATACTCGTGTTCAAGTAGAACACCCTGTTACAGAATTTGTAACGGGTGTTGACATCGTTAAAGAGCAGATTCGTATCGCTGCTGGAATTCCTTTATCAGTTTCTCAAAATGATATTAAGTTAACTGGTCATGCGATTGAATGTCGTATTAACGCAGAGAATCCACAATTTAATTTTGCGCCATGTCCAGGTACCATTAATGGGTTACATCTACCTGCTGGCGGTATGGGCTTACGTGTCGATTCAGCGGTTTACACAGGCTACACTATTCCTCCTTATTACGATAGTATGATTGCGAAAGTAATTGTTCACGGAGAAAATCGTTTTGATGCACTTATGAAAATGCAACGTGCCTTATATGAGCTTGAAATTGATGGTATTGTAACAAATACAGAATTTCAAATGGATCTCATTTCTGATAAAAAAGTCTTGGCTGGGGATTATGATACTTCATTCCTGATGGAAGACTTTTTACCAAGGTATTATGGTAACAATCAA

SEQ ID NO: 9300 - protein, 456 aa, Streptococcus agalactiae; identical to SEQ ID NO: 714

SEQ ID NO: 9301 - protein, 873 aa, Streptococcus agalactiae
ATGGCTTTATTTAGTAAAAAGGATAAATATATCCGTATTAGTCCAAACAAAGCATTAGGGTCTTCTGATAAACGTAGTCTTCCTGAGGTTCCTGATGAACTCTTTGCTAAGTGTCCTTCTTGTAAACATATGATTTATCAGAAAGATTTAGGATTAGCAAAGATTTGTCCAGCTTGTTCTTACAACTTTAGAATTTCAGCGCAAGAACGTCTGTTGCTAACAGTTGACGAAGATAGTTTTGAGGAATTATTTACAGGAATTGAAACTAAGGATCCTTTGAATTTTCCAAACTACCGTGAAAAACTGGCTGCTACACGTCAAAAGACTAACTTAGATGAAGCGGTGGTGACAGGTTTAGCTAAAATAAAAGGACAAACTACGGCCTTAGCTATTATGGATTCTCATTTTATAATGGCGTCTATGGGAACGGTCGTAGGCGAAAAGTTGACAAGATTATTTGAGCTAGCAACTGAAAAGAAATTACCTATTGTTATTTTTACAGCGTCAGGGGGCGCCAGAATGCAAGAAGGTATTATGAGTTTGATGCAAATGGCAAAAGTATCGGCAGCAGTTAAACGCCATTCTAACCAGGGATTGTTTTATTTAACAATTTTAACAGACCCAACAACCGGCGGCGTTACTGCGAGTTTTGCTATGGAAGGTGATATTATTCTGGCTGAGCCACAAGCGTTGGTTGGTTTTGCTGGTCGTCGTGTTATCGAAACAACAGTGAGAGAAGATTTACCTGAAGGCTTTCAAAAGGCAGAGTTTTTGTTAGAACATGGTTTTGTCGATGCTATTATAAATCGAACAGAATTACGCGACTGCATTGCTCAACTAATTGCTTTCCATGGAAATGAGGTTGGTCATGAA

SEQ ID NO: 9302 - protein, 291 aa, Streptococcus agalactiae; identical to SEQ ID NO: 716

SEQ ID NO: 9303 - protein, 771 aa, Streptococcus agalactiae
ATGAATAATGATGTGACAAGAATTTTAAAAGATGCGCGTGATCAAGGGAGGCTAACTGCTCTTGACTACGCTGAATTGATTTTTGATAATTTTATGGAACTTCATGGTGATCGCCAGTTCGCAGATGACAAATCAATTATAGGAGGTTTGGGGTACTTGGCAGGGCGTCCTGTGACGATTGTCGGTATTCAAAAAGGTAAGAACCTTCAAGATAATTTAGACCGTCATTTTGGTCAACCACATCCTGAAGGTTATCGTAAGGCTTTACGTTTAATGAAACAAGCTGAGAAGTTTGGAAGACCTGTTATAACCTTCATCAATACTGCTGGAGCATATCCTGGGGTAGGTGCTGAGGAGCGAGGTCAGGGTGAAGCAATTGCTAGAAACCTCTTAGAAATGAGTGATTTAAAAGTCCCTATTATAGCTATTATTATTGGTGAAGGGGGTTCTGGAGGAGCATTAGCTTTAGCTGTTGCCGATAAGGTTTGGATGTTGGAACATACTGTTTATTCTATTTTAAGTCCTGAGGGCTTTGCCTCTATTTTATGGAAAGATGGTACAAGAACAACAGAAGCAGCACAATTAATGAAGATGACTGCTGGAGAACTTTACCATATGGAAGTTGTAGACAAAGTAATCCCTGAACATGGTTATTTTTCAAGTGAGATTGTCGATATGATTAAGACAAGTTTAATTTCAGAGTTAGAAGTGCTCTCACAATTATCTCTTGAGGATTTATTGGAACAACGTTACCAACGTTTTAGAAAATAT

SEQ ID NO: 9304 - protein, 257 aa, Streptococcus agalactiae; identical to SEQ ID NO: 718

SEQ ID NO: 9305 - protein, 630 aa, Streptococcus agalactiae
ATGTATCAAGAATTAAATGATTATTTAGAATTCCAATCAATGAAGTATATTATGCCTGAGAAGGCAGGCCCTTTAAAGGACGATATGCAAACTTTTAAGGCAAAGGGCCAACTTGCTAGGAATAGCTTTACAGAGTTATCAAGAGCCTTAGAACAACGTATGGATGGCTTTAAAATGCAAAGAGTGAGTAATTGGGCTAATCAAGCTCAAGTAGGGCGTCCACATTTTTGGGTTTATTATCGAAAGGATACAGACCAATTAGATGATGTGGCTGTTGCGCTAAGGGTTTATGGTGTAAAAGATAGTTTTGGGGTTAGCCTTGAGGTAAGCTTTGTAGAGAGGCAAAAATCTGATAAGACACTCGAGAAGCAGGCTAGAGTGTTATCGATTCCGATTGCCTCTCCATTGTATTTTATGGTCCAAAGGCAAGGTGAAACTCATCGAGAAGAAGGCAATGAGGAAAATCGTCAACGTTTAATGCAAGAAATTAAGTCAGGGAAGGTAAGGAAAGTATTGGTAAAATATGACGTTCTTTTGACTGAAAACCAGAGCTTAGAAAATATTCTGCAACGATTGTTAGAAGGCTTTGAGAAAGTGTTACCTTACTATCAAGTTTGTCAAACTATTAGC

SEQ ID NO: 9306 - protein, 210 aa, Streptococcus agalactiae; identical to SEQ ID NO: 720

SEQ ID NO: 9307 - protein, 1275 aa, Streptococcus agalactiae
ATGTTAGACTTAAAACGTATTCGTACAGATTTTGATGTTGTCGCTAAAAAATTGGCCACGCGTGGTGTTGACCAAGAAACATTAACAACCCTTAAAGAACTTGATATAAAACGCCGTGAACTACTTATCAAAGCTGAAGAGGCGAAAGCGCAACGTAATGTTGCTTCTGCTGCCATTGCTCAAGCAAAACGAAATAAAGAGAATGCAGACGAGCAAATCGCAGCTATGCAAACACTTTCCGCTGATATCAAAGCAATTGATGCGGAATTGGCAGATGTGGATGCTAATTTACAATCAATGGTGACCGTACTTCCTAATACACCAGCTGATGATGTGCCGCTTGGAGCAGACGAGGATGAAAATGTTGAAGTTCGTCGCTGGGGAACTCCTCGTGAATTTGATTTTGAGACCAAAGCTCACTGGGATTTAGGTGAAAGCCTTGGAATTCTCGATTGGGAACGTGGTGCAAAAGTTACTGGCTCTCGCTTCCTCTTCTACAAAGGTCTAGGTGCTCGTTTAGAGCGTGCTATCTACAGCTTCATGCTGGATGAACACGCTAAGGAGGGGTACACTGAAGTGATCCCTCCTTATATGGTTAACCACGATTCAATGTTCGGTACGGGACAATATCCAAAGTTCAAGGAAGATACTTTCGAATTAGCAGATAGCCCATTCGTACTTATCCCAACAGCTGAAGTTCCTTTAACAAACTATTATCGTGATGAAATTATCGATGGGAAAGAATTACCTATATACTTTACTGCCATGAGTCCATCATTCCGTTCAGAAGCAGGCTCTGCAGGACGTGACACACGTGGATTAATTCGCCTTCATCAATTCCATAAAGTAGAAATGGTGAAATTTGCCAAGCCTGAGGAATCATACCAAGAATTAGAAAAAATGACAGCAAATGCTGAAAATATTCTTCAAAAACTTAATCTCCCATACCGTGTCATTACCTTGTGTACAGGAGATATGGGATTCTCAGCAGCTAAAACGTATGACTTAGAGGTATGGATTCCCGCTCAAAATACTTATCGAGAAATTTCTTCATGTTCTAATACTGAAGATTTCCAAGCACGTCGTGCTCAAATTCGTTACCGTGACGAAGTTGATGGCAAAGTTAGGTTGCTTCATACTTTAAATGGTTCAGGACTTGCAGTTGGACGTACTGTAGCAGCAATCCTCGAAAATTATCAAAATGAAGATGGTTCTGTGACTATCCCAGAAGTTCTTCGTCCATATATGGGTAATATCGATATTATTAAACCAAAT

SEQ ID NO: 9308 - protein, 425 aa, Streptococcus agalactiae; identical to SEQ ID NO: 734

SEQ ID NO: 9309 - protein, 990 aa, Streptococcus agalactiae
ATGTTCATGATTGTTATTACGCATGTTCTTGGAAAAGGTGGTCTGAGATCTTCGGTTGAGGGACACGCAGACTCCTATTTTATAGTAACGTGGATTATCCAAGTCTTAGTTTATGGGGCCGTTAACTGTTACGCACTAATAAGTGGTTATGTGGGAATTAATTCGCGTTATCGTTACTCAAAATTACTGTCTATCTGGGCACAGGTTTTTTTCTACACCTTTACAATAACAGCACTTTTTGCAATCACAGGTCATGAAGTGACCTTGCTTAATTGGAGAGATGCTTTTTTCCCTATTGTCAGTGGGCAGTATTGGTACATTACTGCTTACTTTGGTCTATTGGTTTTTATGCCTGTTATTAATAATGGATTAAATGCCTTGACTGATAAACAATTAAAACAATTGGTTTTGTTAATGTTTATTATTTTTTCAATTTTACCAGCTGTTTTAAATAATCGTGTTCCAGAATTTTCATTGAGCAAGGGTTTTGAAATGACTTGGCTACTGATTTTATATATTATTGGTGCCTATTTGAAACGTATTGATTTAAATATATTTAAAACGTCATATTTACTTATAATTTATCTATTATCATTGGTTGCTACTTATGCCATGAAGTTTAGCGTTGGTGATATTTGGTATTGGTATGTTTCGCCTACTTTAACTTTAGGGGCGGTAAGTTTGTTTATATTATTTGCTAGAGCAAGCATTAAGCCCTCGGGATTCTTAAAGAAAATAATTGTTGTATTAGCCCCTTCAACCTTGGGAGTTTATCTCTGTCATCTCCACCCACTAATAGTAAAATATTTTGTAAGAGATTTTGCAGAGACGTTTGTTTATGAGTCCATTTATCTTTACCCATTTTTAATTTTAGGAGCAGGGATTTTAATTTATTTGTTGGCTTTTATTGTAGAACGTATTAGATTACGAATATTTAAAGCAATCCATTTTTCTAACTTTTTGAGATGGTTTGATGACAAGTTCCCATAT

SEQ ID NO: 9310 - protein, 330 aa, Streptococcus agalactiae; identical to SEQ ID NO: 736

SEQ ID NO: 9311 - DNA, 300 bp, Streptococcus agalactiae
atggggaataaagttggaaaatttttagttggtgaccaggcattagaattctataacgataaaaatgtcaacgactatattcaaattccatggacatcaatcaatcaaattggagctaatgttagtcgaaaaaaaattagtcgtcactttgaggtctttacagaccaaggaaaatttttattcgcctctaaagactctggaacgatattaaagcatgcgagacgacatattggagacgataaagttgttaagcttcctaccctcatccagaccattttaaaaatattcaagtttaaaaaa

SEQ ID NO: 9312 - protein, 100 aa, Streptococcus agalactiae; identical to SEQ ID NO: 738

SEQ ID NO: 9313 - DNA, 909 bp, Streptococcus agalactiae
atgactgaacaaattaaattatcaaaatcagatcgtcaaaaagtttggtggcgttcacaattccttcaaggttcttggaactatgagcgtatgcaaaatatggggtgggcctatgctcttatcccagcattgaaaaaactttacactactaaagaagatcgtgctgctgcgcttgagcgccatatggaattctttaacacacatccatacgttgctgctccaattatcggtgtaacccttgctcttgaggaagaaaaagcaagcggtacacctgtcgaagacaaagcaattcaaggggttaaaatcggtatgatgggacctcttgctggtattggtgatccagtattctggtttactgtacgtcctatcttaggtgctcttggtgcttcacttgcctctgctggtaatatcctcggaccaatcatcttctttgttggttggaacctcattcgtatgtcattcttatggtacacacaagagttaggttacaaatcaggtaaagaaattactaaagatatgtctggtggtatcctccaagatattactaaaggtgcttcaatccttggtatgttcatccttgctgtccttgttaagcgttgggtagcaattaactttactgtagaccttcctaaaaagacattgtcagaaggggcatacatcaatttccctaaagaccatgttagtggacaacaattgcatgatatcctaggacaagttcagagtggcttaagccttgataaaatgcaaccacaaacacttcaaggacaacttgactcacttattcctggtttagctggattacttcttacattcttctgtatgtggttacttaagaagaaagtatcaccaattacaattatcatcggtttgtttatcgttggtattctagctcgccttgcaggtgtgatg

SEQ ID NO: 9314 - protein, 303 aa, Streptococcus agalactiae; identical to SEQ ID NO: 740

SEQ ID NO: 9315 - DNA, 810 bp, Streptococcus agalactiae
atggcggatatttcaattatctcaatgattttggtcgttatcgttgccttctttgctggtcttgaaggtatcctcgaccaattccaaatccatcaacctcttgttgcttgtactttaatcggtcttgtaactggtcacctcgaagcgggtattattcttggtggtagtctccaaatgattgctcttgcttgggcaaatatcggagctgccgtagcaccagacgctgcacttgcctctgttgctgctgctattattttggttaaaagtggtgacttcactcaaaaaggtatcaactttgccttctctactgctgtacctctagctattgctggacttttccttacaatgattgttcgtacaatctcaactgcacttgttcacgctggtgacaaagctgcttctgaaggaaacttcgcagcaattgaacgttttcactttatcgccctccttctccaaggattacgtattgcattcccagctgcgcttcttttagctattccatcttcttcagtacaaagtattcttgaagcaatgcctgattggttaaatggtggtatgcaagttggtggtgccatggttgttgccgttggttacgctatggttatcaatatgatggctactcgcgaagtttggcctttctttgctcttggatttgctctagcagctttgaaccagttaactcttattgcaatgggtactattggtgttgctatcgccctcatctacatcagtttatcaaaaatgggtggaagcaaaggtacttctaacgcaggttctaacgatcctatcggcgatatcttagaggactac

SEQ ID NO: 9316 - protein, 270 aa, Streptococcus agalactiae; identical to SEQ ID NO: 742

SEQ ID NO: 9317 - DNA, 771 bp, Streptococcus agalactiae
  misc_feature 758, 759, 760, 761, 762: n = A,T,C or G
atgagaattattgcaataactgaaaaggttataaaagaactgtttcgtgataaaagaacacttgctatgatgtttttagcacctattttaattatgtttttgatgaatgttatgttttctgcgaatagtaatacaaaagttaagattggaactattaacgttaacacgaaggtcgtttcaaatttagataatattaagcatattcaagtgagatcatttaaatttaactcatctgctaaaaaagcactcaaatcaaataaaattgatgctcttatttcggaggacaataaatcttatactgtcttctatgcgaatacagattcttcaaagacgactttaacaagacaagcttttaaaaccgctgttaatacaatgaacagtaaggaactgatttcgcaagttaaaattttagctaataagaatccgaaactagcacaatccttacaaactcgctccaaatatatcaaagaaaaatataattacggaaataaaaatacaggcttttttgcaaaaatgataccaatactaatgggatttatggkcttcttctttgtttttttaatttctggaatggctttattaaaagagcgtacttctggtacacttgatcgactccttgcaactcctgttaaacgtagtgatattgtatttggatatatgttatcatacggcattctagcaattattcaaacgatagttatcgttttatcaactatttggctactagatattcaagttgtaggtagtatttttagtgnnnnnttaattaat

SEQ ID NO: 9318 - protein, 257 aa, Streptococcus agalactiae
  VARIANT 181, 253, 254: Xaa = Any Amino Acid
MRIIAITEKVIKELFRDKRTLAMMFLAPILIMFLMNVMFSANSNTKVKIGTINVNTKVVSNLDNIKHIQVRSFKFNSSAKKALKSNKIDALISEDNKSYTVFYANTDSSKTTLTRQAFKTAVNTMNSKELISQVKILANKNPKLAQSLQTRSKYIKEKYNYGNKNTGFFAKMIPILMGFMXFFFVFLISGMALLKERTSGTLDRLLATPVKRSDIVFGYMLSYGILAIIQTIVIVLSTIWLLDIQVVGSIFSXXLIN

SEQ ID NO: 9319 - DNA, 714 bp, Streptococcus agalactiae
atgaaaaaagtcatcgatttaaaaaaactacaaaaagcatatgcctcagaaaccgttttaaataatattaatttggaggtgtttaaaggcgaaataattggattaataggaccctctggagcagggaaatctaccttgattaaaactatgcttggcatggaaaaagcagataagggaacagctcttgttcttgatactcaaatgccagatcgtaatattttaaatcaaattggctatatggctcaatctgatgccttatacgagtctttaactggcttagaaaatttattattctttggaaaaatgaaaggtattcaaaaaactgaattaaaacagcagataactcatatttctaaagtagtagatctagaaaaccaacttgataaatttgtctcaggttactcaggaggtatgaaaagacggctttctctagccatcgccctacttggaaaccccacagttttaatcctagatgaacctaccgttggaattgatccatccttgaggagaaaaatctggcaagagctaattaatattaaggatgaaggacgttctatctttattacaacccacgttatggatgaagcagaattaacaagtaaggttgcactactattacgtggaaacattattgcctttgatactccattacatttaaaaaaacaatttaatgtgagtactattgaggaagttttcttaaaagctgaaggagaa

SEQ ID NO: 9320 - protein, 238 aa, Streptococcus agalactiae
MKKVIDLKKLQKAYASETVLNNINLEVFKGEIIGLIGPSGAGKSTLIKTMLGMEKADKGTALVLDTQMPDRNILNQIGYMAQSDALYESLTGLENLLFFGKMKGIQKTELKQQITHISKVVDLENQLDKFVSGYSGGMKRRLSLAIALLGNPTVLILDEPTVGIDPSLRRKIWQELINIKDEGRSIFITTHVMDEAELTSKVALLLRGNIIAFDTPLHLKKQFNVSTIEEVFLKAEGE

SEQ ID NO: 9321 - protein, 681 aa, Streptococcus agalactiae
ATGGATAAACTGAAAAAATTACAAAAAGAAAATACGCTATTAGAAGGAAGAATTGATAACTCTAATAACCAAACCTATACAGATATGATTGTCTATTTGCGAGGTGCTAGCATTAGCCCCTACCATCAGGAGCTCATTCGAAATGATATTGTCAATATGTTATTAGAAGCACAAGAGCGACAAGCAAGTTTAGTTAGTGTATTTGGAGAAGATAGGCATGACTTTATAAACCAAGTTATTAAATCTACACCTAAAATCTCTAAGAAAGAAGAAACATTACAACGTTGGGATTTAGCCATTTTACTACTAACTATCCAAATGATTATCTTTTTAGGAGGATATCTCATTACTGAAGCACTTCAACAGTCAGTACCAGATCTAATCCCTATTACTCTATTAGATGTTCTTTTTGCAATCTTTATCAGTATTATTGCTGTCAAGATAGCTGATACCATAATATATGCTACATATAACTTCGATAAATCGAAAGAAAAGAAATATTTCTTTCGATATATATTTCTAATTCTTTCGCTTATCATAGCTTATATCCTTATAGGAAAATATTATCATCTTCCTTTCATTAATATCCCCCTTTGGATTTATTTAATTATACTGGGACTTAGCTTCTCTCTTCATATCATTGTTAAAAAATACCTGAATAAACATTATTATATTGAATTT

SEQ ID NO: 9322 - protein, 227 aa, Streptococcus agalactiae; identical to SEQ ID NO: 532

SEQ ID NO: 9323 - protein, 309 aa, Streptococcus agalactiae
ATGATTCCATCGCAAATGCTAAAAGGATTACTTGAAGGAGCTATCCTAAAAATCATACAGCAAGAGGAGACTTATGCTTATGAAATCTCAAAAAAATTAAATTCTTATGGTTTTGGAGAAATTTCCGAAGGGACAATCTACCCCATTATCTTAAGGCTACAAAGCAATAAATATATAAAAGGACAACAAAAGCCTTCCCCTCAAGGACCTAAGCGTAAATATTATACGTTAACCAATGAAGGCGTGGAGCAATTAGCCCAATTTAAACAGAATTGGGAGTCACTTAGTAAAGCATTAAACAAACTACTC

SEQ ID NO: 9324 - protein, 103 aa, Streptococcus agalactiae; identical to SEQ ID NO: 534

SEQ ID NO: 9325 - protein, 705 aa, Streptococcus agalactiae
ATGAAAATAGATAAAAAAGAACTTTTAGCACTTATTGCTAGTATTATTTTATTAATTTTTGCTTCTGTTACGTTTTTCTTATTTAAAGATCATGGCACTACTCAAATGGATACTGTAGAAAGCAGTGTTAACCATGTCAGTGATTCTCAATTAACTGAGGCACAAGATATGTTAGATAAATTTGAGAAGAAACCTTCAGAAAAATTATTGAAGGATGTCGAACTTGCTTTAAATAAATTGTCCAATTCTTCTAAAAAAGAAGCTTTGCAAAAACGTTTTAAGAAAGCAAAAGATAAGTATCTTAAAGACGAAGCAGATAAGAAAGCTACCAAAGATGCTACAGATTTAGTAGAAATTCTAGAACAAGCCCCTTCAGAAGAAAATGTGTTAAAAGCTGAAGCAGCAGTCAATAAGTTAACTGTCAAAGAATCTAAAGAAGCTTTACAAAAACGTATTGATACTGTTAAGACACAATATGGTTTGATTGGGAATCAAACTCCCTCTAGTTCAGTAGCTGAAACTACAGAACAAGGGACAGCTAATCCTGCTAGTCAGGATACTTCTAGTTACGTTAATCAGAATGTAGCACCAACTTATGAGCAACCGCAAGCGAATAATACACCAGTTACTCCAGGGGTTAACAATACTGTTCCGACTCCAGGAACTGGTACTGTACCTGCTACTAATGGGACAGGTGTTGCTCAG

SEQ ID NO: 9326 - protein, 235 aa, Streptococcus agalactiae; identical to SEQ ID NO: 536

SEQ ID NO: 9327 - protein, 1146 aa, Streptococcus agalactiae
ATGACGAAGTACATCAAGGCTGACCGATTCTTTTATGCTGATCATGTAAAGGAAAACGGTTATTTAGAAATAAAAGATAATCACTTTGGTAAATGGATAGAAAATATTTCTGGACAAGAGGAGATTTTAGATTATTCAGGTTATCAAATAGCACCTGGTTTAGTTGATACACATATTCATGGTTTTGCTGGCGCTGATGTTATGGATTGTGATTCAGAAGGAATTTTGCGAATGAGTGCTGGCTTACTATCTACTGGAGTCACATCTTTCTTGCCGACAACCCTAACTTCAGATACAAAGCGACTAGAAGAGGCGTCTAAATCAGTTGCGGCAGTAGCGGGCAAAGAACAAGGAGCAAAAATTCAAGGCATCTATTTTGAGGGACCATATTTTACTGAGGAATATAAAGGAGCTCAAAATCCGATTTATATGAGAAATCCAAACTTGGAAGAGTTTGCTCAATGGCAGAAGGCTGCAAAAGGCTTGATTACAAAAATTGCTTTGGCACCAGAACGTGAGGGAGTTGAGGAATTTGTCTCAGCAATCACAAAGCAAGGTGTTACGGTAGCTTTAGGTCATTCTAATGGGACATATAAAGAAGCTAAAAAGGCAGTGAAGGCGGGTGCCTCAGTTTGGGTACATGCGTATAATGGTATGCGTGGTTTGACACACCGAGAACCAGGTATGGTTGGTGCGGTTTATAATTTACCTAATACCTATGCCGAACTCATTTGCGATGGTCATCACGTTGATCCTGTTGCTTGTGACATTTTAATGACACAAAAAGGCCATAATCATGTGGCATTAATAACAGATTGTATGGCAGCTGGAGGTGCCCCTGATGGAGATTATATGTTAGGGGAATTGCCCGTGGTTGTGTCTAATGGAACTGCGCGTTTGAAAGATGGAGGTAATTTAGCTGGTTCTATTCTTAAGCTCAAAGATGGATTAAAAAATGTTGTAGAATGGGGAATTGCTACTCCGGAAGAGGCAGTGCGTATGGCGAGTTATGTTCCGGCAGTGTCTGTAGGCATTGATAATGTCTGTGGACAGATAAAAGAAGGTTATGCAGCGGATTTTATTGTATTAGATAAACATCTAGATTTAGTTGCAACATACCTTGATGGGGAAAAACGTTGGCAATCT

SEQ ID NO: 9328 - protein, 382 aa, Streptococcus agalactiae; identical to SEQ ID NO: 538

SEQ ID NO: 9329 - protein, 112 aa, Streptococcus agalactiae
ATGTCAATTATTATTGGGTTAATGGCCGCTATGTTTATTATTCGTTTAGCTTATTTAAAGCTATCTATAGCTAATGAAAGGCCTTAAGAAAAAGGTGCTAAAGAATATGGTG

SEQ ID NO: 9330 - protein, 38 aa, Streptococcus agalactiae
MSIIIGLMAAMFIIRLAYLKLSIANEKALRKMVLKNMV

SEQ ID NO: 9331 - DNA, 312 bp, Streptococcus agalactiae
ttgatgattttttctgtgtttatgttacatacagtaacacgtttacttggtcgtatttggacagtgaaattaatggtagataaaaatcatcaatttgtagatcactggttatttagggttgttaagcatcctaactatttcttaaatattgctcctgaacttttaggtgtaactttattgtgtcatgctaaatacacagcattatttgtcttgccaatttatgcttttgttatttatttaagaattcgtgaagaaaacttattattaaaaacgatcattattccaaatggaatcaaaaagtctagggtatat

SEQ ID NO: 9332 - protein, 104 aa, Streptococcus agalactiae
MMIFSVFMLHTVTRLLGRIWTVKLMVDKNHQFVDHWLFRVVKHPNYFLNIAPELLGVTLLCHAKYTALFVLPIYAFVIYLRIREENLLLKTIIIPNGIKKSRVY

SEQ ID NO: 9333 - DNA, 801 bp, Streptococcus agalactiae
atgagcccttatactttcttacgtgctataggccctgagccttggaatgctgcatacgttgaaccatcacgtcgtccagctgacggccgctatggcgaaaatccaaaccgtctttaccaacatcatcaatttcaagtggtaatgaagccttcgccgtcaaatattcaagaactttatttgaagtctttggaattactaggtatcaatccacttgagcatgatatccgttttgttgaagataactgggaaaatccatctacaggttcagctggattaggttgggaagtttggcttgatggaatggaaataacacaatttacttatttccaacaagtaggtggacttcaaacaggtcctgtaacttctgaagttacttatggactagagcgtttagcctcttatattcaagaggtagattctgtttatgatattgagtgggcaccaggtgttaaatatggtgaaatctttactcagccagagtatgagcattcaaaatattcatttgagatatcagaccaagtaatgttacttgaaaactttgagaaatttgaaagagaagcaaaacgtgctttagaagaaggacttgttcatccagcttatgactacgtccttaaatgttcacacacctttaatttattagatgcacgtggagcagtatctgttactgagcgtgcaggctatattgcacgtatccggaatttagcacgtgttgttgctaaaacctttgttgccgaacgtaaaaaacttggtttcccacttttggatgaggaaactcgtatcaaattacttgctgaggaagac

SEQ ID NO: 9334 - protein, 267 aa, Streptococcus agalactiae; identical to SEQ ID NO: 542

SEQ ID NO: 9335 - DNA, 639 bp, Streptococcus agalactiae
atgaacacactcattgtttatagtcatcctgatttttcgaatccgtactcatttacaactattctacaagaaaagtttattgaactttataatgagcattttcctaaccatcagttatctattttaaatttatatgattgtgttttgccagaaattacgaaagaagtactactttcgatttggtctaaacaaagaaagggtttggaattaacagccgatgagattgttcaagctaaaatctctaaagatttacttgaacagtttaagtcacatcaccgtattgtctttgtttctccaatgcacaattacaatgtgactgctagagcaaaaacttatattgataatatttttattgcaggtgagactttcaagtacactgaaaatggttcagtcggattaatgacagatgactatcgtctgcttatgttagaatctgcgggttctatttattctaaaggacagtatagtccatatgaatttcctgttcattatttaaaagctatctttaaagattttatggcttttgatgatttctgtgttgttcgtgcagaaggtaccgatattttagataggcaagttgttcttgataagatgaatcaggatttaagagaagcatttgaagcgttttacagtaaggag

SEQ ID NO: 9336 - protein, 213 aa, Streptococcus agalactiae
MNTLIVYSHPDFSNPYSFTTILQEKFIELYNEHFPNHQLSILNLYDCVLPEITKEVLLSIWSKQRKGLELTADEIVQAKISKDLLEQFKSHHRIVFVSPMHNYNVTARAKTYIDNIFIAGETFKYTENGSVGLMTDDYRLLMLESAGSIYSKGQYSPYEFPVHYLKAIFKDFMAFDDFCVVRAEGTDILDRQVVLDKMNQDLREAFEAFYSKE

SEQ ID NO: 9337 - DNA, 2037 bp, Streptococcus agalactiae
atgactaaagatttattattggagcttggccttgaagagttgccagcttatgttgtgacaccgagtgagaagcaattgggccaaaaaatggtcaagtttttagaggatcatcgtttatcatttgaaactgttcaaactttttcaactccacgtcgtttggctgttcgtgtgaaaggattggcagaccagcagacagatttaacagaagatttcaagggtccttctaagaaaattgctttggatgcagaagggaatttttctaaagcagcccaaggttttgttcgcggaaaaggtttaagtgttgatgatatcgaatttcgtgaagttaagggagaagaatatgtttatgtcactaagcatgaaactggaaaaagtgcgattgatgttttagcgagtgtgacagaggtattaacagaattgactttcccagtgaacatgcattgggcaaataatagttttgaatatattcgtccagttcacactttagtggtattattagatgatcaagccttagagctagacttccttgatattcattcagggcgtattagtcgaggacaccgtttcttgggttctgacactgaaatttcatctgccagttcgtatgaagatgacttgcgacaacaatttgttattgctgatgcaaaagaacgccagcaaatgattgttaatcaaattcatgctatcgaagaaaagaaaaatatttcagttgaaattgacgaagatttactaaatgaagtgcttaatttagttgagtatccgacagcattcttgggttcttttgacgagaaataccttgatgtacctgaagaagttttagtcacttcaatgaaaaatcatcaacgctattttgttgttcgcgacagggatggaaaattgttaccaaactttatttctgtgcgtaatggaaatgctgagcatatcgaaaatgttataaaaggtaatgaaaaagttttagtggctcgtcttgaagatggtgaattcttctggcaagaagatcagaaacttaatattgcagatttagttgagaaattaaaacaagtaactttccatgaaaaaattggttcactttatgaacatatggatcgtgtaaaagttatttcacaatatttggctgagaaggcagatctttctgatgaagaaaaattagctgtgcttcgagctgcaagtatttataaatttgacctcttaactggaatggttgatgagtttgatgaattacaaggtattatgggtgagaaatatgccttacttgcaggggaacagcccgcagtagcagcagcgatacgtgaacattatatgccgacatctgcagatggagagcttccagaaaccagagttggtgcaattctagctttagctgataaatttgacaccttactttcattcttctcagttggtttgattccaagtggttcaaatgatccatatgctcttcgtcgagctactcaggggattgtccgtattttggaagcttttggttgggatatcccacttgatgaattagtaactaacctttatggtctatcgtttgctagtttagattatgctaatcaaaaagaggtcatggcctttatttcagctcgtattgaaaagatgattggctctaaggtccctaaagatattcgagaagccgttttagaatcagacacttatattgttagccttattctagaagctagtcaagcattggtgcaaaagagcaaggatgctcaatataaagtttccgttgaaagtttgtcacgtgcatttaatttagctgaaaaagttactcattctgtattggtggactcttcattgtttgaaaataatcaagagaaggcgctatatcaagctattttgtcacttgaactgactgaggatatgcatgacaacttagataagcttttcgcacttagtccaattattaatgatttctttgataatacaatggtaatgacagatgatgaaaaaatgaaacaaaatcgtctggctttactcaatagccttgttgcaaaggcaagaacagtcgctgcttttaacttattaaacacaaaa

SEQ ID NO: 9338 - protein, 679 aa, Streptococcus agalactiae
MTKDLLLELGLEELPAYVVTPSEKQLGQKMVKFLEDHRLSFETVQTFSTPRRLAVRVKGLADQQTDLTEDFKGPSKKIALDAEGNFSKAAQGFVRGKGLSVDDIEFREVKGEEYVYVTKHETGKSAIDVLASVTEVLTELTFPVNMHWANNSFEYIRPVHTLVVLLDDQALELDFLDIHSGRISRGHRFLGSDTEISSASSYEDDLRQQFVIADAKERQQMIVNQIHAIEEKKNISVEIDEDLLNEVLNLVEYPTAFLGSFDEKYLDVPEEVLVTSMKNHQRYFVVRDRDGKLLPNFISVRNGNAEHIENVIKGNEKVLVARLEDGEFFWQEDQKLNIADLVEKLKQVTFHEKIGSLYEHMDRVKVISQYLAEKADLSDEEKLAVLRAASIYKFDLLTGMVDEFDELQGIMGEKYALLAGEQPAVAAAIREHYMPTSADGELPETRVGAILALADKFDTLLSFFSVGLIPSGSNDPYALRRATQGIVRILEAFGWDIPLDELVTNLYGLSFASLDYANQKEVMAFISARIEKMIGSKVPKDIREAVLESDTYIVSLILEASQALVQKSKDAQYKVSVESLSRAFNLAEKVTHSVLVDSSLFENNQEKALYQAILSLELTEDMHDNLDKLFALSPIINDFFDNTMVMTDDEKMKQNRLALLNSLVAKARTVAAFNLLNTK

SEQ ID NO: 9339 - DNA, 255 bp, Streptococcus agalactiae
atggatcctaaaaaaattgctcgtattaacgagctttcaaaaaagaaaaaaacagttggattgaccggagaagagaaggttgaacaagcaaagctccgtgaagagtatattgaaggtttccgccgatcagtccgtcaccacgttgaaggaattaaattagtggatgatgagggcaatgatgttaccccggaaaaacttcgtcaagtccagagagaaaaaggactacatggtcgtagtttggatgatccaaattct

SEQ ID NO: 9340 - protein, 85 aa, Streptococcus agalactiae; identical to SEQ ID NO: 548

SEQ ID NO: 9341 - protein, 318 aa, Streptococcus agalactiae
TTGGGTGGGGCAAAAGATAATCTTTGTCTCGCCTTTTTTATTAGGAAGGAAAAAATAATGATTGAATTACTATTAGCATTACTGTTATGGAATATTTTAGTATTTGCAACCTATGCTATTGATAAAAGGCGTGCAATTAGAGGGGCATGGCGTATTAGTGAGAAAACATTGATGATAGAGAGTTTATTATTAGGGGGATTTGGTGCATTCCTAGGTGGAGAAGTTTTTCGTCATAAAACGACTAAATGGTATTTCAGACTAGTTTGGTATATCGGAATGATTATTGATTTAGCTATTATTTGGCTAATTTGGTGTTAT

SEQ ID NO: 9342 - protein, 106 aa, Streptococcus agalactiae; identical to SEQ ID NO: 550

SEQ ID NO: 9343 - protein, 1506 aa, Streptococcus agalactiae
ATGTCTTCAGAAGAAAAATACATTATGGCGATTGACCAGGGAACAACAAGCTCTCGAGCAATTATTTTTAATAAAAAAGGTGAAAAAATTGCGAGTAGCCAAAAAGAATTTCCCCAAATTTTTCCTCAAGCAGGCTGGGTAGAGCATAATGCTAATCAGATTTGGAATTCTGTTCAATCTGTCATTGCTGGAGCTTTTATTGAATCAAGCATCAAACCTGGACAGATAGAGGCTATTGGGATTACCAATCAACGTGAAACAACTGTTGTTTGGGATAAAAAAACAGGTCTTCCAATTTATAATGCTATTGTATGGCAATCGCGACAAACAGCCCCGATTGCTGATCAATTGAAGCAAGAAGGTCATACTAACATGATTCATGAAAAAACTGGTCTTGTCATTGATGCTTACTTCTCAGCAACAAAAGTTCGTTGGATTTTAGACCACGTTCCTGGAGCACAGGAACGTGCTGAAAAAGGAGAGTTGCTTTTTGGAACAATTGATACTTGGTTAGTTTGGAAGTTAACTGATGGTCTCGTCCATGTTACAGACTATTCAAATGCTGCTCGTACGATGCTTTATAATATTAAAGAACTTAAATGGGATGATGAAATTTTAGAGTTACTAAATATTCCTAAAGCAATGTTACCAGAAGTAAAATCTAATTCTGAAGTTTATGGGAAAACTACTCCATTCCATTTTTACGGTGGAGAGGTGCCAATTTCTGGTATGGCTGGTGACCAACAGGCAGCATTATTTGGACAGTTGGCCTTTGAACCTGGTATGGTAAAAAACACTTATGGTACAGGTTCCTTCATTATCATGAATACGGGCGAAGAGATGCAACTGTCTCAAAATAATCTATTAACAACGATTGGTTACGGCATTAATGGTAAGGTTCATTATGCACTTGAAGGATCAATCTTCATTGCAGGAAGCGCTATTCAATGGTTACGTGATGGTCTTAGAATGATTGAAACGTCAAGTGAGTCAGAAGGCCTTGCTCAATCATCAACAAGTGACGATGAGGTTTATGTGGTTCCAGCTTTTACAGGTTTGGGTGCACCGTATTGGGATTCAAATGCTAGAGGGTCAGTATTTGGATTAACTCGTGGGACAAGTAAAGAAGATTTTGTTAAAGCTACACTTCAGTCAATTGCTTATCAAGTACGAGACGTTATTGACACTATGCAAGTTGATTCAGGAATTGATATCCAACAACTTCGTGTAGATGGTGGAGCTGCAATGAATAATTTATTAATGCAATTCCAAGCGGATATTTTAGGGATTGATATTGCTCGTGCGAAGAACCTTGAAACTACTGCCTTGGGTGCAGCTTTCTTAGCCGGACTTTCAGTTGGCTATTGGGAAAGTATGGATGAACTAAAAGAACTGAACGCAACAGGACAACTTTTCCAAGCAACAATGAATGAGTCTCGAAAAGAAAAACTGTATAAAGGGTGGAGAAAAGCTGTCAAAGCGACACAAGTATTTGCTCAAGAGGAT

SEQ ID NO: 9344 - protein, 502 aa, Streptococcus agalactiae; identical to SEQ ID NO: 552

SEQ ID NO: 9345 - protein, 1821 aa, Streptococcus agalactiae
ATGGAATTTTCACGAGAAACACGACGTTTAGCCTTACAAAGAATGCAAGATCGTACTCTGGATTTACTTATCATAGGTGGGGGTATCACAGGCGCTGGTGTCGCTTTACAAGCAGCAGCTAGTGGATTAGATACTGGACTTATTGAAATGCAAGATTTTGCAGAAGGGACAAGTAGTCGCTCAACAAAATTGGTCCATGGTGGTCTTCGTTACTTGAAGCAATTTGATGTAGAAGTTGTTTCTGATACAGTATCAGAGCGTGCAGTCGTGCAGCAAATTGCACCACACATTCCTAAGCCAGATCCAATGCTTTTACCGGTTTACGATGAGCCGGGTTCTACTTTTAGTATGTTTCGCCTTAAAGTGGCTATGGATTTATATGATTTATTAGCAGGTGTGACAAACACACCCGCAGCCAATAAAGTTTTAAGCGCAGAAGATGTTCTTAAGCGTGAGCCTGATTTACAAAAAGAAGGTTTGCTAGGCGGAGGGGTCTATTTAGATTTCCGTAATAACGATGCACGCCTAGTGATTGAAAATATTAAACGCGCTAATAGGGATGGAGCTTATATTGCCAGTCATGTCAAAGCTGAGGACTTCTTATTTGATGACAACAATCAAATTATAGGAGTACGTGCGCGTGATTTGTTGACTGACCAAGTTATCGATATAAAAGCTAGGCTTGTTATTAATACAACTGGACCTTGGAGTGACACCGTTCGCAACTTCTCCAATGAAGGTAAACAAATTCATCAATTACGTCCAACTAAGGGAGTTCACTTAGTTGTAGATCGCCAAAAATTAAATATTTCTCAACCTGTTTATGTTGATACAGGCCTGAATGATGGTCGCATGATTTTTGTTTTGCCACGTGAAGATAAGACTTATTTTGGAACTACAGATACTGATTACCATGGAGACTTAGAACATCCTACGGTAACTAAAGAAGATGTTGACTACCTCCTTAATATTGTAAACAAACGCTTCCCAGAAGCAGAGCTTACTATTGATGATATTGAGAGTTCATGGGCAGGTTTGCGTCCACTACTATCAGGGAATAGTGCCTCTGACTATAATGGAGGAAATAGTGGAAAACTAAGCGATGAAAGTTTTGAAGAATTAATTGATTCCGTTAAAGATTATATTGCACATAAAAATCATCGTGAGGATGTTGAAAAAGCTATTTCTCATGTAGAATCTAGTACTTCTGAAAAAGAATTGGACCCATCAGCTGTTTCTCGAGGATCAAGTTTTGAGCGTGATGATAATGGCCTATTAACACTTGCTGGTGGTAAAATTACTGATTATCGAAAAATGGCAGAAGGTGCCATGGAAACTATTATTAACATTTTGGATAAAGAATATAATCGCAAGTTTAAACTAATCAATTCTAAAACCTATCCTGTTTCAGGAGGAGAGATTACCCATCTAATGTGATTCTGAAATGAAGCTATGCTCAATTGGGCACACTAAGTGTTTAAGTATGAGGATGCACGTTATATTGCTAACCTTTATGGGTCAAATGCACCAAAATTATTTGCATTGACACGCCAAATTACAGAAGCAGAAGGTCTGAGCTTGGTAGAAACGTTGTCACTTCACTATGCTATGGATTATGAAATGGCGCTTAGCCCAACGGATTTCTTCTTAAGACGTACGAACCATATGCTTTTCATGAGAGATAATTTAGATTCTTTGATTCAGCCTGTTATTGATGAGATGGCTAAACATTATCAATGGTCTGATCAAGACAAAACTTTCTATGAAGAAGAATTACATGAGACTCTAAAAGACAATGACTTGGCAGCTTTGAAGGATAAT

SEQ ID NO: 9346 - protein, 609 aa, Streptococcus agalactiae
  VARIANT 475: Xaa = Any Amino Acid
MEFSRETRRLALQRMQDRTLDLLIIGGGITGAGVALQAAASGLDTGLIEMQDFAEGTSSRSTKLVHGGLRYLKQFDVEVVSDTVSERAVVQQIAPHIPKPDPMLLPVYDEPGSTFSMFRLKVAMDLYDLLAGVTNTPAANKVLSAEDVLKREPDLQKEGLLGGGVYLDFRNNDARLVIENIKRANRDGAYIASHVKAEDFLFDDNNQIIGVRARDLLTDQVIDIKARLVINTTGPWSDTVRNFSNEGKQIHQLRPTKGVHLVVDRQKLNISQPVYVDTGLNDGRMIFVLPREDKTYFGTTDTDYHGDLEHPTVTKEDVDYLLNIVNKRFPEAELTIDDIESSWAGLRPLLSGNSASDYNGGNSGKLSDESFEELIDSVKDYIAHKNHREDVEKAISHVESSTSEKELDPSAVSRGSSFERDDNGLLTLAGGKITDYRKMAEGAMETIINILDKEYNRKFKLINSKTYPVSGGEIXPSNVDSEIEAYAQLGTLSGLSIEDARYIANLYGSNAPKLFALTRQITEAEGLSLVETLSLHYAMDYEMALSPTDFFLRRTNHMLFMRDNLDSLIQPVIDEMAKHYQWSDQDKTFYEEELHETLKDNDLAALKDN

SEQ ID NO: 9347 - protein, 696 aa, Streptococcus agalactiae
ATGGATATTTTTGGAGAATTCTTAGGAACAGCTCTCTTAGTCTTACTTGGTAATGGTGTTGTAGCAGGTGTTGTTTTGCCTAAAACGAAGAATCATAATTCTGGATGGATTGTTATCACATTTGGATGGGGACTTGCTGTAGCTATTGCAGCGTTGGTATCTGGCAATATTAGCCCTGCCCACTTGAATCCAGCTGTGTCATTAGCTTTTGCGATCAAAGGTGATTTAGCTTGGGGAACAGCTATTCTTTATATGATTGCACAGATTATTGGTGCAATGCTAGGTTCACTTCTTGTTTATTTGCAATTTAGACCCCATTATGAGGCTGCAGAAAATAGAGCAGACATCCTTGGAACTTTTGCAACTGGTCCGGCTTTGAAGGATAATTTTTCCAATTTTTTAAGTGAAGTATTGGGAACACTTGTTCTTGTACTTACTATTTTTGCCATCGGAAAATACAATATGCCTCCAGGAGTTGGTACGATGAGTGTTGGTATGTTAGTGGTTGGGATTGGTCTATCGCTCGGTGGAACAACAGGTTATGCTATTAATCCTGCACGTGATTTTGGTCCTCGTTTATTGCATGCCTTGTTACCGATGAAGAACAAAGGTGATTCTGATTGGACTTATTCATGGATTCCGATAGTAGGACCTATGGTAGGAGCTATTTTAGCAGCCTTACTATTTGCTATGATG

SEQ ID NO: 9348 - protein, 232 aa, Streptococcus agalactiae
MDIFGEFLGTALLVLLGNGVVAGVVLPKTKNHNSGWIVITFGWGLAVAIAALVSGNISPAHLNPAVSLAFAIKGDLAWGTAILYMIAQIIGAMLGSLLVYLQFRPHYEAAENRADILGTFATGPALKDNFSNFLSEVLGTLVLVLTIFAIGKYNMPPGVGTMSVGMLVVGIGLSLGGTTGYAINPARDFGPRLLHALLPMKNKGDSDWTYSWIPIVGPMVGAILAALLFAMM

SEQ ID NO: 9349 - protein, 1278 aa, Streptococcus agalactiae
ATGACTTGTGCGCAGAAATTACGCCAATTAAATCCTAATTGGGATATCGTTTTGATTGATAAAGAAATTCATCCAGATTATGTTCCAAATGGCTTAAATTGGTATTATCGTCACGAAATTAGTGGTTTAAATCAGGCCATGTGGCAGACAGAAGAAGAGCAACGGTTGCAGAATATACGCTGTCTATTTGGTCTAAAAGTTGAGAAAATTAATAAAGAAGATAGGGAATTAATGTTATCAGATGGTTCTTCTGTCTATTATGATCAATTGATTTGTGCCATGGGCTCCCAAGCAGAATCAACTTATATTGATGGGGCTGATGCGCAAGGTGTTTTAACAACAAAAACTTATGCAACTAGTCAAAATGCTAAGCAGGTATTAGATAAAAGTCATAAGGTAGCAGTTGTTGGGGCAGGTATCATCGGTTTAGATATTGCTTATAGTTTACATGAATCAGGGAAGGCGGTCACTTTGTTAGAAGCTCAAGAAAGACCAGACTTCAGGCATACAGATCCTGATATGTCCCTTCCTTTACTTGATGCGATGGCTGAATCAAAACTACATTTTTTCCAAAATCAAAAGGTTGAGAAAATTACTGTAACCCGAGAAGAAAAACTTTGTTTGCGAACGCTAACAGGAGACACCTTTACAGTTGATGCTGTCATATTAGCTGTTAATTTTCGTCCGGATAGTCGTCTTTTAACTGGGTTGGTTGATTTAAGTGTTGATAATAGTGTTGTTGTAAATGATTATTTCCAAACGAGTGACCCTAATATCTATGCTATTGGCGATTTGATTTGGTCGTATTTTAAAGGTCTTAATAGTGCTTATTATATGCCCTTAATTAACCAAGCAATCCGTTCGGCACAAATGTTGGCATACCATTTATCGGGACATGCTGTTCCAAAATTAAAAATAACACGCGCTACAGGATCTAAACACTTTGGCTATTATAGAGCTAACATTGGATTAACTGAATTGGAAGCTGGTTTTTACGAGGATACCGTTAGTGTTACTTATTTCCCTAAAGAACAGTATGATTTAAGGATAAAATTGATTGCTAACCAAAAAACGGGCCATTTATTGGGGGCTCAATTAATCTCAAAGGAAAATTGTTTGGCTACTGCCAATCAGCTTGTTCAAGCTATATCGTGTGATATGACAGATTTTGATCTGGCTTTTCAAGATTTCATTTATACAGCTAGAGAATCTGAGATGGCTTATATGTTGCATCAAGCAGCTATCAACCTTTATGAAAAGAGGATTGGGCTATGCGAA

SEQ ID NO: 9350 - protein, 426 aa, Streptococcus agalactiae; identical to SEQ ID NO: 558

SEQ ID NO: 9351 - DNA, 1410 bp, Streptococcus agalactiae
atggaaaaagaaaggcgtgttcaatatcggctactttcttttttaagaggctctcctcaggcaatagcactgaagttagctttattagaaactggtttaagtcgagcaactttgcttaaatatatcaataatcttaatagctactttgaacaagaaaaagttaattgtcgaatcgtttattataaggataagttatttttagaagaggattataacttatccaatcaagaagtgttgaaagctctgatgaaagatagtattaaatacactatcttaatatctttatttaatcagcgtcagttcacaatcgttggtctttctcaagaattgatggttagtgaggctactttaaatcgtcatcttgctcatctcaatgaattgttagcggaatttgatattgctatttcacaaggaaaacagattggtgatgaattgcaatggcgttatttttattatgaattattcaagcaactatggtcttatgacaagtgccaaaatatgataaagaaattagacttagactcattaattctattaatagagcgcttggctcaacatactttaactcgagaagctcatcaaaatctgggactttggtttagtatttgtcatcatcgtctccttgctatggaaaaaatatctgataatctcaagcctattgtgaaacattatcaatgtaatgctttttataaacggttagacgcagccttagttttgtatatgagtcgttttgctcttgagtatagggaaggagaagttctggcaacttttgcttttctacattcacaaaatattttaccaatcaatacaatggaatacatcatgggatttggaggcccgattattgattgtgtaaccgaaacaatcatctactttaaaaaggagagtattttagctgacgagacatcagatcaggttatttaccaacttggtcagttatatagccattattatttctttaaaggtcatattttagttgaacaacctgatttagaacaaacgtatcgacttattgatcataatatgagggataagttgcatcatatttcaaagaagattattgcaaatgttaatcgaattagacctttaacagaagatggttgttctttgctgactttacatttgttggaattgcttattttctcgaaaaatagtcaaaaaatgccctttaggattggtctagatatgacaggtaatgctgtggaacagtcattgttggaatatcgcattcgacaacatttctctggtaataattctattcaagtcgaaccttatgacgaaggaaagggatttgatatggttatttatcagagtcactcaagaccttataaagccaaactaacctattgccttaataaaggtgcttcagagcgagaactacaggaaatagattcacttatttatgacaat

SEQ ID NO: 9352 - protein, 470 aa, Streptococcus agalactiae
MEKERRVQYRLLSFLRGSPQAIALKLALLETGLSRATLLKYINNLNSYFEQEKVNCRIVYYKDKLFLEEDYNLSNQEVLKALMKDSIKYTILISLFNQRQFTIVGLSQELMVSEATLNRHLAHLNELLAEFDIAISQGKQIGDELQWRYFYYELFKQLWSYDKCQNMIKKLDLDSLILLIERLAQHTLTREAHQNLGLWFSICHHRLLAMEKISDNLKPIVKHYQCNAFYKRLDAALVLYMSRFALEYREGEVLATFAFLHSQNILPINTMEYIMGFGGPIIDCVTETIIYFKKESILADETSDQVIYQLGQLYSHYYFFKGHILVEQPDLEQTYRLIDHNMRDKLHHISKKIIANVNRIRPLTEDGCSLLTLHLLELLIFSKNSQKMPFRIGLDMTGNAVEQSLLEYRIRQHFSGNNSIQVEPYDEGKGFDMVIYQSHSRPYKAKLTYCLNKGASERELQEIDSLIYDN

SEQ ID NO: 9353 - DNA, 1869 bp, Streptococcus agalactiae
atggcttatgtgctttggaataaattcttaaatgtaaacccaaaaacaagtcgcaattggacaaaccgtgaccgttttgtgctatcagctgggcatggttcagctcttctttatagcctacttcatttagctggctatgatttatcaattgatgatttaaaacaatttcgccaatggggatcaaaaacacctggacatccagaagttaaccatactgatggtgtagaagcaacaactggacctttagggcaaggtattgctaatgctgttggtatggcaatggctgaagctcatttggctgctaaatttaataaaccaggctttgatttagttgatcattacacttatacacttcatggtgatggttgtttgatggagggtgttagccaagaagctgccagtcttgctggacacttaaaacttggtaaattggtccttctttatgattcaaatgatatctcacttgatggtccaacatctcaatcatttacagaagatgttaaaggacgttttgaatcatatggttggcaacatatcttagttaaagatggtaatgatttagaagcgattgctgcagcaattgaagctgctaaagctgaaactgataaaccaaccattattgaagttaaaactattattggatttggcgcagagaaacagggaacatcttcagttcatggagcgccacttggtgcagaaggtattacttttgccaagaaggcttatggatgggaatatccagactttactgttcctgctgaagttgcagatcgatttgcctcagatcttcaagcgcgtggtgcgaaggcagaagaggcatggaatgatctttttgctaaatatgaagttgagtatccagaattagcaactgaatacaaagaagcttttgctggccaagctgagacagttgaactgaaagctcatgacctaggttcatcagtggctagtcgtgtttcaagccaacaagctattcaacaattatcgactcaattaccgaacctctggggagggtcagcagacctctcagcttctaataacacaatggtagcagcagaaacagatttccaagcaagtaactacgctgggcgtaatatttggtttggtgtacgtgaatttgcaatggctgctgcaatgaatggaattgcgcttcacggtgggactcgtgtttatgggggtacgttctttgtcttctcaaactacttgttaccagcagtacgtatggctgcacttcaaaacttgccaactgtctatgttatgacacatgattctattgctgttggagaagatgggccaactcatgagccaatagaacaattagcatcagtgcgctcaatgcctaatttgaacgttatccgtcccgcagacggtaatgaaacaaacgctgcatggcaacgagctgtatcagagacagatcgaccaacgatgcttgttttaacacgtcaaaacttaccagttcttgaaggaacatcagaattagcccaagaaggggttaataaaggtgcttatattttatcagaagctaaaggtgaacttgatggtatcatcattgcaacaggttcagaagttaaattagctttagatactcaagacaaacttgagtcagagggcatccatgttcgcgtcgtatctatgccagcacaaaacatttttgatgaacaagaggcttcatatcaagagcaagtgcttccatcagctgttacaaaacgtcttgctattgaggcaggatcaagcttcggttggggtaaatatgttggtttaaatgggctaacacttactattgatacttggggagcatcagcaccaggtaacagaattttcgaagagtatggctttacagttgagaatgctgtatcgctatataaagaactt

SEQ ID NO: 9354 - protein, 623 aa, Streptococcus agalactiae
MAYVLWNKFLNVNPKTSRNWTNRDRFVLSAGHGSALLYSLLHLAGYDLSIDDLKQFRQWGSKTPGHPEVNHTDGVEATTGPLGQGIANAVGMAMAEAHLAAKFNKPGFDLVDHYTYTLHGDGCLMEGVSQEAASLAGHLKLGKLVLLYDSNDISLDGPTSQSFTEDVKGRFESYGWQHILVKDGNDLEAIAAAIEAAKAETDKPTIIEVKTIIGFGAEKQGTSSVHGAPLGAEGITFAKKAYGWEYPDFTVPAEVADRFASDLQARGAKAEEAWNDLFAKYEVEYPELATEYKEAFAGQAETVELKAHDLGSSVASRVSSQQAIQQLSTQLPNLWGGSADLSASNNTMVAAETDFQASNYAGRNIWFGVREFAMAAAMNGIALHGGTRVYGGTFFVFSNYLLPAVRMAALQNLPTVYVMTHDSIAVGEDGPTHEPIEQLASVRSMPNLNVIRPADGNETNAAWQRAVSETDRPTMLVLTRQNLPVLEGTSELAQEGVNKGAYILSEAKGELDGIIIATGSEVKLALDTQDKLESEGIHVRVVSMPAQNIFDEQEASYQEQVLPSAVTKRLAIEAGSSFGWGKYVGLNGLTLTIDTWGASAPGNRIFEEYGFTVENAVSLYKEL

SEQ ID NO: 9355 - DNA, 309 bp, Streptococcus agalactiae
ttgtttatgaagaaggagtgtcgtgatttttatcggcagatacagcatacttacaatgatatatctgtccgtgaagatgcagtgctatcatcaatactattatcagcatcgaatggtttgataaaaactagcgatgtacctcgtgttgcttatgagttaactcagcaattggaaaataatgagatagaaaaatctttcgagtcattagctacagttaaggaattgaaaaaatctgctaaaaaattgtctgagagatatgagcaaaataaggtaacaacgggattgctttctaaagtatttggaaatcat

SEQ ID NO: 9356 - protein, 103 aa, Streptococcus agalactiae; identical to SEQ ID NO: 568

SEQ ID NO: 9357 - DNA, 732 bp, Streptococcus agalactiae
atgattaagtttgaacatgtttcgaaagtatacggagaaaaagaagctctcagtgatttaaccctctctgttaaagatggtgagatttttggattaataggtcacaatggagcaggaaaaacaacgacaattagtattctaacatctattattgatgcaacttatggccaagtctatattgatgacctacttttgacagaacatcgtgaccaaattaagaaaaaaataggttatgtaccggactcgccagatattttcttaaatttaaccgcagaggaatactggtactttttagctaaaatttatgacgttgccccagaagatattgaagcacgtatcacaaaattggtagacatatttgaactagaggagcaacgctataatcctattgaaagtttttcacatggtatgcgtcaaaaagtcattgttataggtgcccttcttccaaatcctgacatttggattctagatgagccgttaactggtttagaccctcaagcttcttttgatttgaaagaaatgatgaaagaacatgctaaaaatggaaaaacagttattttttcaacacatgtcttagcagttgcagaacagttatgcgacagaataggtattttgaaacaagggaaattaatctttgtcggtagcttaggtgagttaaaaatgaaatatccagataaagatttggaaactatctatttggaattagcaggacgtcaagctagtagggaggga

SEQ ID NO: 9358 - protein, 244 aa, Streptococcus agalactiae
MIKFEHVSKVYGEKEALSDLTLSVKDGEIFGLIGHNGAGKTTTISILTSIIDATYGQVYIDDLLLTEHRDQIKKKIGYVPDSPDIFLNLTAEEYWYFLAKIYDVAPEDIEARITKLVDIFELEEQRYNPIESFSHGMRQKVIVIGALLPNPDIWILDEPLTGLDPQASFDLKEMMKEHAKNGKTVIFSTHVLAVAEQLCDRIGILKQGKLIFVGSLGELKMKYPDKDLETIYLELAGRQASREG

SEQ ID NO: 9359 - DNA, 1602 bp, Streptococcus agalactiae
atgaattggtcacgtatctgggaactcgtaaaaattaatatcctttattcaaaccctcagactctatcggcactaagaaaaaagcaagaaaaacatcctaaaaaagaattttcagcttataaatccatgtttagaaatcagttatttcagattttgctcttttcaataatttatgtatttctctttgtatcacttgattttaaagaatatccgggctacttcacgttctacattggtatctttacactagtatccattatctactcttttattgcgatgtacagtgttttctatgagagtgacgatgttaaacaatatgcttatttgcctattaaatctgaagagctctatgttgctaaaatttttgcaacatttgggatgtctgtaacttttctaatgccaatcctaaccttaatgattgtggcttattggcgtataataggtggcccacttgcggtcctcctagcaatcataaattttgctattttatttttatcggtaacggtgatttcattgtatattaatagtttaataggccgtgccattattcgaagtgctaatcggaaacttatttctactatattaatttcactagctacatttggagcaatagttcccttattatttgtgaatatgacgagtcaaaagatggtacaagggaaattacaagatatcgctccaatcccttatgtcagaggttattatgatattgttacagcgccatttagtatggagagtctcctcaactattatctcccgctcttaatcattttattcttgataggtgctatttataaatgggttatgccacgctactatcaggagttgttgtatggacaggtcaagcagagaaaagtccatcgtcaaatcgattttagtaaacgtgagtcaattaataaaactcttgttaaacaccatttatcaagtttacaaaatgcgacattattgacaaatacatttttaatgccactattatatctagcaatgttcattgttccaattttgaataatggtaaagagattggtcgattttttaatgaaaattattttgggatagcttttctagcaggaatattaataggtagtttatgtgtgatgccagctagcattgtaggggtaggtatttctttagaaaaaagtaatttctactttataaaaagtttgcctatatcattttcgtatttcttgaagcataaatttgtaactttgataaccttacaacttgcagttcctacttttatttatttcttggtaggattctttctacttaaactatcaatcctcgttttattgagcttcattttaggtctagtcttcatgggacttatcgaaggccagtttatttatagacgtgactataaacatttgttcttgaattggcaagaggttacgcaactatttaatagagggttaggccaatggctgttagttggttcattgtttggaatgatgataataggtagttttcttattggaataagtattttttggtcaatggtatggaatactgtagctgtcaatatcataatccttatcattgggttgctcatattatcaatttgccaatacttactgctaaaaaatttttggaagaagcttgtt

SEQ ID NO: 9360 - protein, 534 aa, Streptococcus agalactiae; identical to SEQ ID NO: 574

SEQ ID NO: 9361 - protein, 1383 aa, Streptococcus agalactiae
ATGTCTAGAGAATACATCACCTTGTCAAAAAATATCATCAAACACCTTGGTGGACAAAATAATATTAACAATGTTTACCATTGTCAAACACGCCTTCGCTTTAGTCTCAATGATCCGACGAAAGTAAACCTTGAGCAATTAAAAACTTTAAAAGAGGTAAAAACTGTCGTTATCAGCGGAGGGCAACATCAGATAGTGATAGGGACTCATGTCGCAAAAGTGTTTGAAGAAATTAACTCCCTCATTGAAACTAACTCAACGACTAAAATAGAACAAACCAAAAAAGCCAAAGCAGTTAGTCGAATTATTGATTTTGTTTCTGGGACTTTCCAACCGATTTTACCTGCTTTATCAGGCGCTGGTATGATTAAGGCATTGCTAGCTTTATTACTAGTATTCAAAATCTTGACACCGTCATCTCAAACATATATATTACTAAATCTTTTTGCAGATGGTGTTTTCTATTTTTTACCTATCTTAATCGCCATCACAGCTGCTCAAAAATTGAAAGCTAATCCTATTTTAGCTTTGGGAACTGTTGTCATGCTCCTTCACCCTAATTGGGCTAATTTAGTAGCTTCTGGTAAACCAGTATCCTTATTCCATACGATCCCATTCACACTTACTAACTATGCATCAAGTGTCATTCCCATTATTCTAATTATTTGTGTTCAGGCTTATATAGAAAAATATTTAAAGCAAATTATTCCTAAATCACTGCGTTTAGTGCTTGTTCCTATGTTAATATTTCTCAGCATGGGAATTTTGTCGTTCTCTATATTGGGACCAATGGGTACTATCGCTGGCCAATATTTAGCTGTTATTTTTACTTTTTTATCCAAATACGCCAGTTGGGCACCTGCTTTTCTAGTAGGAGCATTTGCTCCTATCCTAATCATGTTTGGTGTTCATAGTGGAATTGCTGCATTAGGAATCACACAACTAGCGAAATTAGGGGTTGATTCTATTTTTGGACCAGGCATGCTCTGCTCAAATATCGCACAAGCAACTGCAGGTACAGTGGTGACTCTTATAACAAAAGAAAAAAAACTTAAAGAAATTGCTGGACCTGCTGCCATAACAGCTTATATGGGAATCACCGAACCTATCTTATATGGTGTCAACCTTCCGAAACGTTATCCTCTAATAGCCTCACTTATTGGTGGTGGTCTTGGAGGACTCTATGCCGGTATAATGAACGCTCACCGCTTCGCTGTAGGCTCTTCTGGTCTACCAGGTCTGTTTCTTTATATCAGTCATACTTCAACACATCTTTTTATTACCATGCTTATTGCAGTTATCATTACTGTAAGCACAACTGCTATATTGACATTCATTCTAGCACAATATTACGAAAAACAAGTTAGCATCAGACAAAGAGAC

SEQ ID NO: 9362 - protein, 461 aa, Streptococcus agalactiae; identical to SEQ ID NO: 576

SEQ ID NO: 9363 - protein, 801 aa, Streptococcus agalactiae
ATGAAAAGACATTTTGAGACAACTAGAAGAATTGTTATTAAAGTAGGAACCAGTTCCCTCGTACAGACAAGCGGGAAAATTAATTTAAGTAAAATAGACCATTTAGCATTTGTTATTTCTAGTCTTATGAATAGAGGCATGGAGGTGATTTTAGTATCATCTGGTGCTATGGGGTTTGGTTTAGACATTTTGAAAATGGATAAGCGTCCTCAAGAAATATCACAACAACAAGCAGTTTCTAGCGTAGGACAAGTAGCCATGATGAGTCTTTATTCTCAGATATTTTCGCACTATCAAACTCATGTTTCCCAAATTTTATTAACACGTGACGTTGTGGTTTTTCCAGAGAGTTTGCAAAATGTAACAAACTCTTTTGAGAGTCTGCTCTCTATGGGAATTTTGCCAATCGTCAATGAGAATGATGCTGTCAGCGTGGATGAGATGGATCATAAAACGAAGTTTGGGGATAATGACCGTCTCTCTGCTGTCGTTGCTAAAATTACTAAAGCAGATTTATTAATTATGCTGTCAGATATTGATGGTCTTTTTGATAAAAATCCTAATATTTATGATGATGCTGTTTTACGTAGTCATGTTTCTGAAATCACCGATGACATCATCAAGTCAGCTGGAGGAGCAGGAAGTAAATTTGGTACTGGGGGCATGCTTAGTAAAATTAAAAGTGCACAAATGGTGTTTGATAACAATGGACAAATGATATTGATGAATGGCGCCAATCCTCGTGATATTTTAAAGGTGTTAGATGGGCATAATATTGGAACTTATTTTGCTCAAGGAAAG

SEQ ID NO: 9364 - protein, 267 aa, Streptococcus agalactiae; identical to SEQ ID NO: 578

SEQ ID NO: 9365 - protein, 1251 aa, Streptococcus agalactiae
ATGACGTATATTGAAATATTAGGGCAAAATGCTAAAAAAGCTAGTCAATCAGTAGCACGATTAAGTACAGCTAGTAAAAATGAGATACTCAGGGACTTAGCGAGAAACATAGTGGCTGATACTGAAACCATTTTGACTGAGAATGCTCGCGATGTTGTTAAGGCAAAAGATAATGGTATCTCAGAAATTATGGTGGACCGTCTACGACTAAACAAAGACCGCATACAGGCGATAGCAAACGGTATTTATCAGGTAGCAGATTTGGCAGATCCGATTGGTCAAGTTGTTAGTGGTTATACAAATTTAGATGGTTTAAAAATCCTTAAAAAAAGAGTGCCTTTAGGGGTTATTGCAATGATATTTGAAAGTCGTCCCAATGTATCGGTGGATGCCTTTAGTTTAGCTTTTAAAACAGGGAACGCTATTATTTTGCGTGGTGGTAAAGATGCTATTTTTTCAAATACTGCCTTGGTTAATTGTATGCGCCAAACATTGCAAGATACAGGCCACAACCCAGATATAGTACAATTAGTTGAAGATACTAGTCACGTTGTAGCAGAGGAGTTAATGCAGGCAACAGACTACGTGGACGTCTTAATTCCAAGAGGTGGTGCAAAATTAATTCAAACGGTGAAGGAAAAGTCAAAGATTCCTGTTATCGAAACAGGTGTTGGAAATGTTCATATCTATATTGATGAATTTGCAGATTTAGATATGGCAGCTAAGATTGTTATTAATGCTAAAACCCAACGCCCTAGTGTCTGTAATGCTGCCGAAGGGTTAGTTGTTCATCAAGCTATTGCTAAGGGATTTTTATCTCAATTGGAGAAAATGCTCAAAGAATCGAACCAGTCAGTTGAATTTCGTGCCGATGAGGAAGCTTTGCAACTTTTAGAAAATGCTGTTGCTGCAAGTGAGTCTGATTATGCTACTGAATTTTTAGACTATATTATGTCAGTAAAAGTAGTAGATTCTTTTGAACAAGCAATTAGCTGGATTAATAAATACAGTAGTCATCACTCAGAAGCTATCATTACTAATAATATCAGTAGGGCAGAAATTTTTCAGGATATGGTAGATGCAGCGGCAGTTTATGTTAATGCTTCAACACGTTTTACAGATGGTTTCGTTTTTGGACTCGGAGCAGAGATTGGTATTTCGACTCAAAAATTACACGCGCGTGGACCGATGGGATTAGAAGCTTTAACAAGTACAAAATACTATATTAATGGAACTGGTCAAGTAAGGGAA

SEQ ID NO: 9366 - protein, 417 aa, Streptococcus agalactiae; identical to SEQ ID NO: 580

SEQ ID NO: 9367 - protein, 894 aa, Streptococcus agalactiae
ATGCTTGATATTAAGCCGGATGGTATCTATGTAGATGCTACTTTAGGTGGGGCAGGACACAGCGAATATCTTCTTTCACAATTAGGCCCAGATGGGCACCTTTACGCATTTGACCAAGACCAGAAGGCTATTGACAATGCTCATATACGTTTAAAGAAATATGTGGATACCGGTCAAGTAACCTTTATCAAAGATAATTTCAGAAATCTATCTTCTAACTTAAAAGCATTAGGAGTGTCGGAAATTAATGGTATTTGTTATGATTTAGGTGTATCAAGCCCACAGCTGGACGAGCGTGAACGCGGTTTCTCATATAAACAAGACGCCCCCCTTGATATGCGAATGAATAGAGAGCAGAGTCTTACAGCTTATGACGTTGTGAACACTTATAGTTATCATGATTTAGTAAGGATTTTCTTTAAGTATGGCGAAGATAAATTTTCAAAACAAATTGCTCGAAAAATTGAGCAAGTACGAGCTGAAAAAACAATATCTACAACAACAGAATTGGCTGAGATTATCAAATCGTCTAAATCTGCCAAAGAACTGAAGAAAAAAGGTCACCCAGCTAAACAAATTTTTCAAGCTATTCGTATTGAAGTCAATGACGAACTAGGAGCTGCAGATGAATCTATACAACAAGCAATGGACTTATTAGCTGTTGATGGTCGTATATCTGTCATCACTTTTCATTCTTTAGAAGATCGTCTTACTAAGCAACTTTTTAAAGAAGCATCAACAGTAGAAGTACCTAAAGGTCTTCCTTTTATACCAGATGATTTACAACCTAAGATGGAGCTCGTTAATCGTAAACCCATCTTACCAAGTCAAGAAGAACTAGAAGCGAACAATCGTGCCCATTCAGCGAAATTGAGAGTAGCGCGTCGTATTCGA

SEQ ID NO: 9368 - protein, 298 aa, Streptococcus agalactiae; identical to SEQ ID NO: 582

SEQ ID NO: 9369 - protein, 324 aa, Streptococcus agalactiae
ATGACAAATGAAAAACGAACTGAAGCAGTAACACAAACTTTACAACGTCACATCAAGACTTTCTCTCGTATTGAGAAAGCTTTTTATGGTGCTATTGTAATTACTGCTATTATCATGGCAGTCGGTATTATTTACTTGCAAAGTAATAGTTTACAAGTTAAACAAGAAGTAAATCAATTAAATAGTAAAATCAACGATAAACAGACAGAATTTGACAATGCTAAACAAGAAGTAAATGAGCTTTCTAATCGTGATCGAATTACTAAAATTGCTAAAGATGCTGGTTTAACAATTCAAAACGACAATATTTATCGGAAGGTGGAC

SEQ ID NO: 9370 - protein, 108 aa, Streptococcus agalactiae; identical to SEQ ID NO: 584

SEQ ID NO: 9371 - DNA, 2256 bp, Streptococcus agalactiae
gtgactttttttaaaaagctaaaaaaaatcttccttgattatgtgatccatataagagataggcgttcgccgcagaaaaatagggaaagagtaggtcaaaatctgatgattttaaccattttcctatttttcatttttatcatcaactttgtcatcatcgttggtacagatagtaaatttggggttaatttatccaaggaagccaagaaagtctatcaacaaagtatgacagtacaggcgaagcgtgggacaatttacgaccgtaatggaaatcctatcgctgaggatgctacgacctatagtctctacgctattatctcaaagaactatacgacagctacaggtcaaaaactatatgtacaaccttctcagtatgaaaaagtagctagtatcttagagaataaattgggcatgaagaaaaatcttgtcctaaaacaactcaatcaaaagaaattgtttcaagtttcctttggaagttcaggttcaggattgtcttataccaagatggctgacatcaagaaaacgatggaaaagtcagatatcaaaggaattggtttttctaccagtccggggcgtatttatccaaatgggatatttgcttcacaatttataggatttactcttcctcaggatgatggagatggaaaaaaattagttggtaatacaggccttgaagcggcacttaacaaggtattatcaggtactgatggtaaagtaacatacgaaaaagaccgtagtgggaatgttcttttaggtactgcaacaacagaacgtagggcggttaatggtaaggatatctacacaactttatcagagcctattcagactgttttagagactcagatggatgttttcgcagaaaaaaccaaaggaaaatttgcgagtgctacagttgtcaacgctaaaacgggtgaaattctagcaacgagtcagcgtcctacttataatccttctacccttaaaggttacgataagaaaaatttgggtacctataacacactactatatgataacttttttgaacctggttcaacaatgaaggtaatgactctagcctctgcaattgattctaagcattttaactctactgaagtgtataacagtgcacaatataaaattgcagatgcgattattcgagattgggatgtcaatgaagggttatcatctggtagttatatgacttttccacaagggtttgcacattccagtaacgttggtatggtaaccttggaacaaaaaatgggacgagataaatggttaaactatctttctaagtttaaatttggttacccaacacgttttgggatgcttcatgaaagtggaggtttgttcccatctgacaatgaagtaactatcgctatgagctcatttggtcaaggtattggtgtaacgcaagttcaaatgttgcgcgcatttacgtctatctcgaatgatggtgttatgttacaaccacagtttattagcagtatttatgatccaaatacagggacttctcgtacagcacgaaaagaagtcgttggaaaaccagtttccaaagaagcagctagtaaaacacgtgattatatggttactgttgggacagatccttattatggtacattatacgcagcaggtgccccagttattcaggtggggaatcaatcagttgcagtaaaatctggtactgcccaaatcgcccaggaaggtggtggtggttatctgcaaggaaaaaatgatactattaactcagttgtggctatggtgccatcggaaaatcctgacttcatcatgtatgttaccatccaacaacccgaaaaatttagtatcacattctggaaagatgttgttaatcctgttttagaacaagcaacagcaatgaaagaaacgatattaaaaccgggattgaatgactcagaacatcagacaaaatataaactatcaaaaatagttggtgaaaatccaggtcatgtagcggaagaattacgtcgtaatctggttcagccaattattttaggaaatggtagtaaagtttctaaagtatctaaaagaccaggagctaatcttgctgagaatgaacagctactagtattaacaaataaactgactgaattacctgatatgtatggttggtctaaagcaaacgttgaacagtttgctaaatggacaggtataaaagtgacctataaaggttcaacctcaggtaaagtaagaaaacaaagtattgatgttggaaaatccatcaataaaattaaaaaaatcaaaattacaataggagat

SEQ ID NO: 9372 - protein, 752 aa, Streptococcus agalactiae; identical to SEQ ID NO: 586

SEQ ID NO: 9373 - DNA, 1008 bp, Streptococcus agalactiae
atgtttttaagtataatggcaggtgtcatagcatttgtcctgacagttattgccattccgcgcttcattaagttttaccaattgaagaaaattggcgggcaacaaatgcatgaagatgtcaaacaacatctagccaaagcaggtacgccgacaatgggaggaacggtatttttgattgttgctcttcttgtctcacttatttttagtattattttatctaaagaaaatagtggtaatttaggtgcaacttttggtattttatctgttgttctcatctatggaattattggttttttagatgattttttgaaaatttttaaacaaatcaatgagggcttgactccaaagcaaaaaatgtcgctccaactaattgcgggtctaattttttattttgtccatgtgttaccaagtggcacatctgcgataaatatttttggtttttaccttgaagtaggatacttatacgctttttttgttcttttctgggttgttggtttttcaaatgctgtgaacctaacagatggaattgatggtctagcttctatttcggttgttatcagtttgattacttatggaatcattgcttataatcaaacgcaatttgatattttattgattatcgttatcatgattggtgctttacttggcttttttgtctttaatcataaaccagctaaagtctttatgggagatgttggttcacttgcattgggtgctatgttagcagccatttcaattgccttacgtcaggaatggaccttgctttttatcggctttgtctatgtttttgagacgtcttcagtgatgttgcaagtagcatactttaagtatactaagaagaaaactggtgttgggaaacgtatcttccgcatgacaccatttcatcaccatttagaattaggtggtgtgtctggcaaaggtaataaatggagcgaatggaaagtagatgcttttttatgggctattggtattttcatgagcgctattacacttgctattttatatctt

SEQ ID NO: 9374 - protein, 336 aa, Streptococcus agalactiae; identical to SEQ ID NO: 588

SEQ ID NO: 9375 - DNA, 1341 bp, Streptococcus agalactiae
atgtcatttaaagattttaattttaaaccatacattcagagggctctcgatgagttaaaattcgtcgatccaactgatgttcaagctaaattgattccagttgttcgttcaggccgcgatcttgtgggggaatcgaaaactggttctggtaaaacccacacctttttacttcctatttttgagaagctagatgaaagtagtgatgatgttcaagttgttattactgcaccaagtagagagttgggaacacaaatttatcaggcaactaaacaaattgctgagcattcagagcaagaaatacgggtggttaactatgttggtggtactgacaaattacgtcaaattgaaaagttgaaagtaagccaacctcatattgtcattggaaccccaggacgaatttatgatttggtgaagtcaggtgatttagctattcataaggcgcatacttttgttgttgatgaagcagatatgactctagatatgggatttcttgataccgttgataagattgcagggtctttacccaaggatgtccaaattttagtcttttcagcaacgattccacaaaaattacagccatttttaaagaaatatttgaccaatcctgtaatggaaaaaatcaaaacagcaacagttatcgctgataccatcgataactggcttttgtccactaaaggacgtgataaaaatgcacaaattttggaactctctaaactaatgcagccctatcttgcaatgatatttgttaatacgaaagagcgtgcagacgaattacattcgtacctttctagtaatggcttaaaagtagctaaaattcatggtgggattgcacctcgtgaacgtaaacgtattatgaatcaggttaaaaacctcgaatttgaatatatcgttgcaacagatttagcagcgcgtggtattgatattgaaggtgttagccatgttatcaatgatgccatacctcaagacctatctttctttgtccaccgtgtcggtcgcacaggccgtaatggcttatctggtactgctataactttatatcagccaagtgacgattctgatattcgtgaacttgaaaaactaggtattaattttattcctaaagtcattaaaaacggtgaatttcaagatacatacgaccgtgatcgtcgtaataaccgtgaaaagtcctatcaaaaattagatacagaaatgattggacttgtgaaaaagaaaaagaaaaaaataaaaccaggttacaagaaaaaaattcaatggaaagttgatgaaaagcgtcgcaaagagcgtagagcaagtaatcgtgctaaggggcgtgcggagcgcaaagctaaaaaacaaagtttt

SEQ ID NO: 9376 - protein, 447 aa, Streptococcus agalactiae
MSFKDFNFKPYIQRALDELKFVDPTDVQAKLIPVVRSGRDLVGESKTGSGKTHTFLLPIFEKLDESSDDVQVVITAPSRELGTQIYQATKQIAEHSEQEIRVVNYVGGTDKLRQIEKLKVSQPHIVIGTPGRIYDLVKSGDLAIHKAHTFVVDEADMTLDMGFLDTVDKIAGSLPKDVQILVFSATIPQKLQPFLKKYLTNPVMEKIKTATVIADTIDNWLLSTKGRDKNAQILELSKLMQPYLAMIFVNTKERADELHSYLSSNGLKVAKIHGGIAPRERKRIMNQVKNLEFEYIVATDLAARGIDIEGVSHVINDAIPQDLSFFVHRVGRTGRNGLSGTAITLYQPSDDSDIRELEKLGINFIPKVIKNGEFQDTYDRDRRNNREKSYQKLDTEMIGLVKKKKKKIKPGYKKKIQWKVDEKRRKERRASNRAKGRAERKAKKQSF

SEQ ID NO: 9377 - DNA, 810 bp, Streptococcus agalactiae
atgtttaaaaaaataatattatctattgcaactatagccgcaaccgccagcctagcagtatcagttcaggcgtcagagaaagtagaacttaaagtagctacagattctgacacggcaccatttacttatcaaaaagacgggaaattcaaaggttatgatgttgatgttgtcaaagctgtttttaaaggtagtaagtacaaagtaaccttcaagacagttccttttgatactatttcaacaggtattgatgcagggaaatttgatttatcagctaatgatttttcatacaataaagaaagagcagaaaaatatctcttctcagatcctatatcccgttcaaattatgccgtagtagggaagaaggggagccattacaaatcattaagtgacctctctggaaaatcaaccgaagttttatctggcgttaactatgcacaggttctagaaaattggaataaaaatcatcctaataaaaaaccaataaaaatcaaatatgtttctgggacaactggtgttactagcagattaaaaaatattgagagtgggaaaattgactttatcctatatgatgccatttcatccgactatattgtaaaagaccaatcattaaacttaagcgtttctcctttgaaaggtaaaattggtaataataaggatggactagaatacctccttttaccaaaagataaaaaaggtaaaactctacagaaatttataaataagcgtattaaagttttgaaagaaaatggtactttggcacgtttaagtaaacaatatttcggtggagattacgtttcaaacattgataaa

SEQ ID NO: 9378 - protein, 270 aa, Streptococcus agalactiae; identical to SEQ ID NO: 594

SEQ ID NO: 9379 - DNA, 801 bp, Streptococcus agalactiae
atgaatcaatttatcttgacgggtggatggtcttggtataataatttggttagtcaggttccagcggggaaattatttagttggaaggctgttttagatgcaataccctcaattttagagcgattacccataacactattattgacagtagcaggagccttatttggactcattttagctttgatttttgcagtagtgaaaattaaccgtgtcaaaattttatatccgattcaagctttatttgttagttttttacgtgggactccaatacttgttcaattaatgctgagttattatggaattccacttttcttgaaatttttaaaccaaaaatatggttttgattggaacattaatgctataccggcttctgtatttgctattactgcatttgcttttaatgaagcggcttatacaagtgaaactatacgagcggcgattttgtcggttgatcaaggtgaaattgaggcagcacgtagtttagggatgacctcagcgcaagtttatcgtcgtgttattattccaaacgcagcagtagtcgcaacacctactttgataaacacgttaattggtctaactaagggaacctctttagcttttaatgctggtattgttgaaatgtttgcccaagcacaaattatgggtggtagcgattatcgctattttgaacgttatatctctgtggcacttgtttactgggcggttagtttcttaattgaacaattgggaaatgctattgaacgaaaaatggcaattaaggctccacgccatttaactgatgagattccaggaggagtacgc

SEQ ID NO: 9380 - protein, 267 aa, Streptococcus agalactiae; identical to SEQ ID NO: 596

SEQ ID NO: 9381 - protein, 741 aa, Streptococcus agalactiae; identical to SEQ ID NO: 4951

SEQ ID NO: 9382 - protein, 247 aa, Streptococcus agalactiae; identical to SEQ ID NO: 598

SEQ ID NO: 9383 - protein, 246 aa, Streptococcus agalactiae; identical to SEQ ID NO: 4953

SEQ ID NO: 9384 - protein, 82 aa, Streptococcus agalactiae; identical to SEQ ID NO: 600

SEQ ID NO: 9385 - protein, 912 aa, Streptococcus agalactiae
ATGTATGATACTTTAATAATAGGTTCAGGTCCTGGTGGTATGACAGCAGCGCTTTACGCTGCACGTTCAAACCTTAAAGTTGGGTTAATTGAACAAGGTGCTCCAGGTGGACAGATGAATAATACTGCTGAAATTGAGAACTATCCAGGCTACGATCATATCTCAGGTCCAGAATTATCAATGAAGATGTATGAGCCGTTGGAAAAATTTGAAGTAGAGCATATTTATGGTATAGTTCAAAGAGTTGAGAACGATGGTGATGTAAAGCGTGTTATCACCGAAGATGAATCGTATGAAGCCAAAACAGTAATCCTTGCTACCGGAGCTAAAAACAGCCTTTTAGGAGTTCCGGGTGAAGAGGAATATACTAGTCGTGGCGTTTCTTACTGTGCGGTTTGTGATGGTGCATTTTTCCGTGATCAGGATCTTTTAGTTGTGGGTGGCGGTGATTCTGCTGTTGAAGAAGCTGTCTTCTTAACTCAATTTGCTAAAAGTGTTACTATTATTCACCGACGTGATCAATTGAGAGCTCAAAAAGTACTTCAAGACCGAGCTTTTGCTAACGAAAAAATAAAATTTGTATGGGATTCAGTGGTCAAAGAGATTAAAGGAAATGAGATTAAAGTATCTGGTGTAACTGTTGAAAATCTAAAGACTGGAGAAATCTCAGAGATGACTTTCGGAGGTGTTTTCATTTACGTTGGTTTGAAACCACATTCTAGCATGGTCTCAGAATTAGGTATTACGGACGAGACTGGCTGGGTCTTAACTGATACAAATATGAAAACATCAATTCCAGGACTATATGCTATTGGGGATGTTCGTCAAAAAGATCTACGTCAGATTGCGACTGCTGTTGGTGAAGGTGCTATCGCTGGACAGGGTGTCTATAACTATATAACTGAGCATTTC

SEQ ID NO: 9386 - protein, 304 aa, Streptococcus agalactiae; identical to SEQ ID NO: 602

SEQ ID NO: 9387 - protein, 1458 aa, Streptococcus agalactiae
ATGTATAAAGACGATAGTTTAACACTACATACTGATTTATATCAAATCAATATGATGCAAGTTTATTTTAATAAAGGTATTCACAATAAAAGAGCGGTGTTTGAAGCTTACTTTCGCAAGGTTCCATTTGAAAATGGTTATGCTGTTTTTGCAGGTTTAGAGCGTATTGTTCGTTATTTAGAAAATCTGAGCTTTTCTGATAGTGATTTATCCTATTTAGAAGAGTTAGGTTATCCTGAAGAATTTTTAGATTACTTAAAAAATTTAAAAATGGAACTGACTGTCAAATCAGCCAAGGAAGGTGACCTTGTATTTGCTAATGAACCATTAGTTCAAATTGAAGGTCCTTTAGCACAATGTCAGTTAGTAGAGACAGCGATTTTAAATATCATCAACTACCAGACACTTGTTGCTACAAAAGCAGCTCGTATTCGTTCTGTTATTGAAGATGAACCGCTATTAGAGTTTGGGACACGACGTGCTCAAGAAATGGATGCAGCCATTTGGGGTACTAGGGCAGCGATTATTGGTGGTGCTAACGCAACGAGCAATGTTCGTGCTGGTAAAATCTTTAATATTCCAGTATCAGGAACGCATGCACATGCTTTAGTTCAAACTTATGGCGATGATTACCAGGCATTTAAAGCTTACGCAGAAACTCATAAAGATTGCGTCTTTTTAGTGGATACTTATGATACCCTTCGTGTAGGTGTGCCTAATGCTATTCGAGTTGCAAAAGAGATGGGCGAAAAGATTAATTTCTTGGGAGTTCGCCTTGATTCAGGTGATTTAGCTTATTTGTCTAAGAAAGTTCGTCAGCAGTTAGATGACGCCGGTTTTCCTAATGCAAAGATTTATGCTTCGAATGATCTAGATGAAAATACAATCCTCAACCTAAAAATGCAAAAAGCTAAAATTGATGTTTGGGGTGTCGGAACAAAATTAATTACAGCCTATGATCAGCCTGCGCTAGGTGCTGTTTATAAAATTGTTTCTATTGAGACTGACGCCGGTAGTATGCGAGATACAATTAAACTATCAAACAATGCTGAAAAAGTATCAACACCTGGGAAAAAGCAAGTTTGGCGTATCACCAGTCGAGCTAAAGGGAAATCTGAGGGTGATTACATCACATTTGCAGACACTGATGTGACACAATTAGATGAAATTGAAATGTTTCATCCAACTTATACTTATATCAATAAAACAGTCCGTGATTTTGACGCAGTACCCTTACTGGTAGATATCTTTGACAAAGGGAAATTAGTTTATCAATTACCAAGTCTTCAAGAAATTCAAGAGTACGGACGCAAAGAATTTGATCAGCTTTGGGATGAGTATAAACGTGTTCTGAATCCACAGGATTACCCAGTTGATTTGGCACGCGATGTTTGGCAAAATAAAATGGACCTGATTGATCGTATCCGTAAAGAAGCTTTGGCAAAAGGAGAAGTAAGA

SEQ ID NO: 9388 - protein, 486 aa, Streptococcus agalactiae; identical to SEQ ID NO: 604

SEQ ID NO: 9389 - protein, 819 aa, Streptococcus agalactiae
ATGACTTTGCAAGATCAAATTATCAAAGAACTCGGTGTAAAACCTGTTATTAATCCAAGTCAAGAAATCCGTCGTTCCGTAGAATTTTTAAAAGACTATCTATTAAAACATAGTTTTCTAAAGACCTATGTACTGGGTATTTCAGGGGGGCAAGATTCAACTTTAGCAGGACGTCTAGCTCAACTAGCAGTTGAAGAGTTGCGTGCTGATACAGGGGAAAACTATCAATTTATAGCTATTCGTTTACCATATGGTATTCAGGCCGATGAAGAAGATGCACAAAAAGCATTAGATTTTATCAAGCCAGATATTGCTTTGACCATTAATATTAAAGAAGCTGTTGATGGCCAAGTTAGAGCTCTTAATGCAGCAGGAGTAGAGATTACAGACTTTAATAAAGGAAATATTAAAGCTCGTCAAAGAATGATTAGTCAATATGCAGTTGCAGGTCAATATGCTGGAGCGGTTATTGGTACTGATCATGCTGCAGAAAATATTACAGGTTTTTTCACCAAATTTGGTGATGGAGGTGCTGACTTATTACCTCTCTTTAGACTTAATAAAAGTCAGGGGAAACAGTTATTAGCTGAACTTGGTGCTGATAAAGCCTTGTACGAAAAGATTCCAACCGCAGATTTAGAAGAAAATAAACCAGGAATCGCTGATGAAATAGCCCTTGGAGTAACCTACCAAGAAATTGATGCTTATCTTGAAGGGAAGGTGGTTTCGGACAAGTCTCGAGGTATCATTGAAAATTGGTGGTATAAGGGTCAACATAAACGTCATCTTCCAATCACAATTTTTGATGATTTCTGGAAA

SEQ ID NO: 9390 - protein, 273 aa, Streptococcus agalactiae; identical to SEQ ID NO: 606

SEQ ID NO: 9391 - DNA, 1332 bp, Streptococcus agalactiae
atgtcaaaattaactcaaacatttacagataagttatttgctgattaccaagcaaatacaaaatttagcgctattgaaaatgcagtaactcacaatggtttattgaagtctctagagactcgtcaaagtgagattgagaacgactatgtcttttcaattgatttgaccaaagatgaagtttctaatcagaaacaatcaggacgttgctggatgtttgctgcactgaatacatttcgtcataaactgatttcagattttaaacttgagaattttgaattatctcaggcacatacatttttctgggataagtatgaaaaatcaaattggtttatggaacaaattattgcgactgcaaatcaggaattgagtagtcgtaaggtgaaattcctattagatgtacctcaacaagatggaggacaatgggacatggtggttgctctgtttgagaaatatggtgtcgttcctaaaacagtttatcctgaatctgtttcatcaagtgctagtcgtgaactaaatcaatatttgaataaactcttacgccaagatgcacagattctacgagaattaatagcacagggagcagatggggcaactgttcaaaataaaaaggaagaattgcttcaagaaatttttaactttttagcaatgaaccttggcttgccaccgcaatcttttgattttgcttatcgtgataaagacaatcattatcagtctgataaaaatattacaccgaaagcattttatcaaaaatatgttaatcttgacctatcagattatgtttctattatcaatgctccaactgtagataagccttatggacaatcctatacagttgagatgcttggaaatgttgtcggagggccagctgttaaatatttaaaccttgatatgaaacggtttaaagagttagcgattgcgcaaatgaaatcaggagaaactgtgtggtttggttcagacgtaggtcaagtatcaaatcgtcaaaagggtatcctagcaactacgacttatgattttaattcatctatggatattaaacttagccaagacaaagcgggccgcctagattatagtgaaagtttaatgacacatgctatggtcttaacgggagtagaccttgatgaatctggacaacctttaaaatggaaagttgagaactcttggggagagaaagttggtaaggatggttattttgtagcttcagatgcttggatggatgaatatacttaccaaatagtcgttcgtaaagaattgcttactaaagaagaattagaggcttacaacgcagagccaattactttagcgccgtgggatccgatgggagcattagctaat

SEQ ID NO: 9392 - protein, 444 aa, Streptococcus agalactiae; identical to SEQ ID NO: 608

SEQ ID NO: 9393 - DNA, 2208 bp, Streptococcus agalactiae
ttgaagtatgcttttggcattataatgggatttattatcttagctattgtaataggtgggctcctatttgcatactacgttagtcgttctccgaaattaaccgatcaagctttaaaatccgttaactctagtttggtttatgatggtaataataaacttattgccgatttaggctcagaaaagcgtgaaagtgttagtgcggatagcattccactaaatttggttaacgctatcacttctatcgaagataaacgtttctttaaacatagaggtgtcgatatttatcgtattttaggtgcagcttggcataatcttgttagtagtaatacgcaaggtggttcaacccttgatcaacagttgattaaactggcttacttttctaccaataaatctgaccaaacgttaaaacgtaaatcacaggaagtttggcttgcgcttcaaatggagcgtaaatacaccaaagaagaaattcttactttctatattaataaagtttatatgggaaatgggaattatggtatgagaacaacagctaaatcatactttggtaaagacctaaaggaattatctattgcacaacttgctttgctcgctggtattcctcaagcacctacacaatatgacccttataaaaacccagaatctgctcaaacaagacgtaataccgttcttcagcagatgtatcaagataaaaacatttctaaaaaggaatacgaccaagctgttgcaactccagtaactgatggcttaaaagaattaaagcaaaaatctacttatccaaaatatatggataactacttaaaacaagttattagtgaagttaaacaaaaaactggtaaagatatctttactgctgggctaaaagtgtatactaatatcaacactgatgcacaaaaacaactatatgacatctacaacagtgacacttacatcgcttatccaaacaatgaattacaaatagcatctaccatcatggatgcgactaatggtaaagtcattgcacaattaggcgggcgtcatcagaatgaaaatatttcatttgggacaaatcaatctgtcttaacagaccgcgattggggttctacaatgaaacctatctcagcttatgcacctgctattgatagtggtgtctataattcaacaggtcaatcattaaacgactcagtttactactggcctggtacttctactcaactatatgactgggatcgtcaatatatgggttggatgagtatgcagaccgctattcaacaatcacgtaacgtccctgctgtcagagcacttgaagccgctggattagacgaagcaaaatctttccttgaaaaattaggcatatactatccagaaatgaactattcaaatgctatttcaagtaacaacagtagcagtgatgcaaaatatggtgcaagtagtgagaaaatggcagcggcttactcggcttttgcaaacggcggaacttactataaaccgcaatatgttaataaaattgaatttagcgatggaaccaatgatacttatgcagcgtctggtagccgtgcgatgaaagagactactgcctacatgatgacggatatgctgaaaacagtactaacatttggtactggtactaaagcagctatccctggtgttgcacaagctggtaagactggtacttccaactatacggaagatgagttagctaaaattgaagcaactactggtatctacaatagcgccgttggtacaatggctcctgatgaaaactttgtcggctatacttctaagtacacaatggcaatttggactggttataaaaatcgccttacaccactttatggtagccaactggatattgctactgaggtttatcgtgcaatgatgtcctacctaactggcggatacagtgcagattggacaatgccagaagggctctatcgaagcggaagctacttgtatatcaatgggacaactacaaccggcacttactcttcttctgtctataagaatatctatcaaaattctggacagtcaagtcaaagcagtagttcaacatcctctgagaaacaaaaagaggataagaatacagcaaatgatgccaattcatcatccccacaagtcgaaacacctaataatggtaatgctactacccctaataattccaatcaaactgtgccaggaactggacatggtaatggtaatggtaacaacaatacagtacctaacggtaat

SEQ ID NO: 9394 - protein, 736 aa, Streptococcus agalactiae
MKYAFGIIMGFIILAIVIGGLLFAYYVSRSPKLTDQALKSVNSSLVYDGNNKLIADLGSEKRESVSADSIPLNLVNAITSIEDKRFFKHRGVDIYRILGAAWHNLVSSNTQGGSTLDQQLIKLAYFSTNKSDQTLKRKSQEVWLALQMERKYTKEEILTFYINKVYMGNGNYGMRTTAKSYFGKDLKELSIAQLALLAGIPQAPTQYDPYKNPESAQTRRNTVLQQMYQDKNISKKEYDQAVATPVTDGLKELKQKSTYPKYMDNYLKQVISEVKQKTGKDIFTAGLKVYTNINTDAQKQLYDIYNSDTYIAYPNNELQIASTIMDATNGKVIAQLGGRHQNENISFGTNQSVLTDRDWGSTMKPISAYAPAIDSGVYNSTGQSLNDSVYYWPGTSTQLYDWDRQYMGWMSMQTAIQQSRNVPAVRALEAAGLDEAKSFLEKLGIYYPEMNYSNAISSNNSSSDAKYGASSEKMAAAYSAFANGGTYYKPQYVNKIEFSDGTNDTYAASGSRAMKETTAYMMTDMLKTVLTFGTGTKAAIPGVAQAGKTGTSNYTEDELAKIEATTGIYNSAVGTMAPDENFVGYTSKYTMAIWTGYKNRLTPLYGSQLDIATEVYRAMMSYLTGGYSADWTMPEGLYRSGSYLYINGTTTTGTYSSSVYKNIYQNSGQSSQSSSSTSSEKQKEDKNTANDANSSSPQVETPNNGNATTPNNSNQTVPGTGHGNGNGNNNTVPNGN

SEQ ID NO: 9395 - DNA, 597 bp, Streptococcus agalactiae
atggttaactatccacatcagcttattcggaaaacaacagttacaaaatcaaagaaaaagaaaatcgattttgccaaccgtggtatgtcatttgaagctgctatcaatgcaaccaatgactactatttgtctcacgaattagctgtcattcataagaaaccaacgccagtacaaatcgtcaaggtagattatcctaaacgtagtcgtgctaagattgtagaagcttattttagacaagcttctactactgattattctggtgtttacaaaggttactatattgactttgaagccaaagaaacccggcagaaaactgctatgcctatgaaaaattttcatgctcaccaaatagagcacatggcaaatgtattacagcaaaaagggatttgctttgtcttgcttcatttttccacacttaaggaaacctatctactccctgctaatgagttaatttcattttatcagattgataaaggcaataaatcaatgcctattgattatatcagaaaaaatggatttttcgtaaaggagagtgcctttcctcaagtcccttacttagatattattgaagaaaaattattaggcggtgattacaat

SEQ ID NO: 9396 - protein, 199 aa, Streptococcus agalactiae; identical to SEQ ID NO: 612

SEQ ID NO: 9397 - DNA, 516 bp, Streptococcus agalactiae
atgaagtcaactattcttgtaacaggttacaaaaattttgaattagggattttccaggataaggatcctcggattactattataaaaaaggctattgataaggattttagacgcttcttggaaaatggagcagactggtttatttttatgggaaatttagggtttgagtactgggctttggaagttgctcttgatttacaaaaagaatatgattttcaaattgcgacaatttttacctttgagaaccatggccaaaattggaatgaggctaataaagctaagttggcactctttaagcaagttgactttgttaaatatactttcccaagctatgaaaacccgggtcaatttaaacaatacaatcattttctcattaacaacacacaaggtgcatatcttttttatgattctgaaaatgaaactaatttaaaatttttgctagaaatgatggagaaaaaggaagcttatgatatttctttcctaacttttgatcgcttaaatgaaatatatgaggaa

SEQ ID NO: 9398 - protein, 172 aa, Streptococcus agalactiae; identical to SEQ ID NO: 614

SEQ ID NO: 9399 - DNA, 120 bp, Streptococcus agalactiae
atgaaatatatgaggaatgatcgttttttcggatatgagaacgttttacgcttgatttttccatttaatttaggtattatttactttgatataaaggataggacttatattaaaacgatt

SEQ ID NO: 9400 - protein, 40 aa, Streptococcus agalactiae; identical to SEQ ID NO: 4970

SEQ ID NO: 9401 - protein, 330 aa, Streptococcus agalactiae
ATGGCAAGTATTATTTATAGCCCAAAAGATATTTTTGAGCAAGATTTTAAAGTTAGTATGCGGGGATATGACAAGAAAGAAGTCGATGTATTTCTGGATGATGTCATCAAAGATTACGAAAATTATCTTGAGCAAATTGAGAAGCTCCAAATGGAAAATAGACGTCTACAACAAGCTTTAGACAAAAAAGAAAGCGAAGCTTCAAATGTAAGAAATTCAGGGACAGCTATGTATAATCAAAAACCGATTGCCCAATCTGCAACCAATTTTGATATTTTAAAACGCATTAGCCGCCTTGAGAAAGAAGTTTTTGGAAGACAAATTAGAGAA

SEQ ID NO: 9402 - protein, 110 aa, Streptococcus agalactiae; identical to SEQ ID NO: 616

SEQ ID NO: 9403 - protein, 1152 aa, Streptococcus agalactiae
ATGAAAGAATCATTCAAATTAATAGCAACTGCTGCTGCTGGTTTAGAAGCCATTGTTGGTAGAGAAATCAGAAACCTAGGAATTGACTGCCAAGTTGAGAACGGTAGAGTCCGTTTCCACGGAGATATCAAAACAATCATTGAAACGAACCTATGGCTACGAGCTGCCGATCGTATAAAGATTATTGTAGGAGAGTTTCCAGCACGTACTTTTGAGGAACTTTTTCAGGGTGTATATGGCCTTGACTGGGAAAATTATTTACCGTTAGGGGCAAAATTTCCTATTGCTAAAGCAAAGTGTGTCAAGTCAAAATTGCACAATGAACCTAGTGTACAAGCCATTTCTAAAAAAGCTGTTGCTAAGAAACTTCAAAAAGTCTTTCACCGTCCTGAAGGAGTTCCCTTACAAGAAAATGGAGCTGAATTTAAAATAGAAGTTTCTATTTTAAAAGATAAAGCGACTGTCATGATTGATACGACTGGATCAAGTCTCTTCAAACGTGGCTACCGTGCAGAAAAAGGTGGTGCACCAATTAAAGAAAACATGGCAGCAGCTATTATTCAATTATCTAATTGGTTCCCTGATAAGCCATTGATTGATCCAACTTGTGGTTCAGGTACTTTTTGTATTGAAGCTGCTATGATTGGAATGAATATAGCTCCTGGTTTTAATCGTGATTTTGCCTTTGAGGCGTGGCCATGGGTAGATCAAAGTCAAGTACAAAAGGTTCGTGATGAAGCTGAGAGTAAAGCAAACTATGATATTGATTTAGATATTTCAGGTTTTGATTTAGACGGTCGTATGGTAGAAATTGCTAGAAAAAATGCAGAAGAAGCAGGACTTGGAGATGTTATCAAATTGAAACAAATGCGTCTTCAAGATTTAAAAACAGATAAAATTAACGGTGTTATTATCTCCAACCCACCATATGGTGAACGACTCCTGGATGACAAAGCAGTGGACATTTTGTATAATGAGATGGGACAAACATTTGCGCCTTTAAAAACTTGGAGCAAGTTTATCCTAACTAGTGACGAAGGATTTGAAAAAAAATACGGCTCACAAGCTGATAAAAAACGTAAGCTTTACAATGGTACTTTAAAAGTTGATTTGTACCAATATTACGGTGAACGTGTGAGACGTCAAGTAAAA

SEQ ID NO: 9404 - protein, 384 aa, Streptococcus agalactiae
MKESFKLIATAAAGLEAIVGREIRNLGIDCQVENGRVRFHGDIKTIIETNLWLRAADRIKIIVGEFPARTFEELFQGVYGLDWENYLPLGAKFPIAKAKCVKSKLHNEPSVQAISKKAVAKKLQKVFHRPEGVPLQENGAEFKIEVSILKDKATVMIDTTGSSLFKRGYRAEKGGAPIKENMAAAIIQLSNWFPDKPLIDPTCGSGTFCIEAAMIGMNIAPGFNRDFAFEAWPWVDQSQVQKVRDEAESKANYDIDLDISGFDLDGRMVEIARKNAEEAGLGDVIKLKQMRLQDLKTDKINGVIISNPPYGERLLDDKAVDILYNEMGQTFAPLKTWSKFILTSDEGFEKKYGSQADKKRKLYNGTLKVDLYQYYGERVRRQVK

SEQ ID NO: 9405 - protein, 1461 aa, Streptococcus agalactiae
ATGTCAGAAGATCAAAAACACCCATTTTTTGAACCAAAAAAAGAAACTGATGGTCTTGAATTTAAAGATGCTAAAGAAATGACAGTAGAAGAGGCTGTTAGAAAAGATTCTGAAATTAAGGCTGGTATTACCGAAGAAGATAGTATTCTTGATAAATACATCAAACAACATCGTGATGAAGTAGCTTCACAAAAGTTTGAGACAAAATCAAGCGATTTTGCAAACCTTGATACGGCATCTTTAGATGATTTTATCAAGAAACAGCGCGAAGAATTATCAGCGATGTTAGCTGCAGAAGAGCTTTCTAAAAAGTTGGATAATTCAGTCTCTCAAGAACAAGATACAGAAGCTAATGCTGTCTCACCTAAAGAAGAATCTTCACAAGAACAAGAAAATAGTGTAACCCCAGTTCCTCCTCTGAATACGGAAGCAGAACCAACTGCAACAGAACCAGATTCGACTATTGCTGATTCAGAGGAGTATAAATCCTCTTCTAAGAAGCGTGGAGGTATCGTAGGAACATTGATTGCTCTTATTTTACTTCTAATAGTAGCAATCTTTGGTTACAACTATTTCAAGAATAATAATTCGACAAATTCTCAAACTGCAACAAGTCAAAGTTCTAGTTCTAAGGCTACGACGACTTCATCAGAAGAAGATAAAAAAGCTAGTCAGAACTTAGATAATTTCAACAAATCTTATGCTAACTTTTTTGTTGATGATAAGAAAACCCAACTCAAAAATAGCGAATTTGATAAATTGTCAGAATTAGAAAAGAAAGTTGATGCTTTAAAAGGAACTAAATACTACGGTAAAGTAAAAGTTAAATTTGATAGTCTAAAACGTCAAATTGATGCTGTTAAAGCTGTTAACGACAAGTTTAAGTCGCCTGCTGTAGTTGATGGTAAGAAGAGTGAAAAATTAGAGGTAAAAGATGGAGCGAATTTTGACTCTTTAGATAGTAAAACTCTTAATACTGGTAATGCTAGTCTAGATAGTTTACTTCACTCCATCGTTTCAACTGGTCGTAATCAGGTAAAACAATCCGAAGAACAGGCTTCGTCTAATAAGGTTTCAGACACTCAAATAACTGAACAACCAAACGTAACTAACGGTCAATCTTCCTCATCAGCTGCTACAATAAATAATCAGGCAGCTGGCACTGCATCAGGTAATTTGGAACGTAACCGTAGTCGAGTACCGTATAATAATGCTGCTATTGCGGATACAGGAAATCCTGCCTGGATATTTAACCCAGGAGTATTAGAGAAAATCGTGGCCACTTCACAGGCGCGAGGCTATTTCTCTGGAAATAACTATATTCTTGAACCTGTAAATATTATCAATGGTAATGGTTATTACAATATGTTTAAATTAGATGGCACTTATTTGTTCTCTATCAATGCCAAGACAGGTTACTTTGTAGGTAACGCTCCTGGAAGAGCTGATAGTTTAGATTAT

SEQ ID NO: 9406 - protein, 487 aa, Streptococcus agalactiae
MSEDQKHPFFEPKKETDGLEFKDAKEMTVEEAVRKDSEIKAGITEEDSILDKYIKQHRDEVASQKFETKSSDFANLDTASLDDFIKKQREELSAMLAAEELSKKLDNSVSQEQDTEANAVSPKEESSQEQENSVTPVPPLNTEAEPTATEPDSTIADSEEYKSSSKKRGGIVGTLIALILLLIVAIFGYNYFKNNNSTNSQTATSQSSSSKATTTSSEEDKKASQNLDNFNKSYANFFVDDKKTQLKNSEFDKLSELEKKVDALKGTKYYGKVKVKFDSLKRQIDAVKAVNDKFKSPAVVDGKKSEKLEVKDGANFDSLDSKTLNTGNASLDSLLHSIVSTGRNQVKQSEEQASSNKVSDTQITEQPNVTNGQSSSSAATINNQAAGTASGNLERNRSRVPYNNAAIADTGNPAWIFNPGVLEKIVATSQARGYFSGNNYILEPVNIINGNGYYNMFKLDGTYLFSINAKTGYFVGNAPGRADSLDY

SEQ ID NO: 9407 - protein, 480 aa, Streptococcus agalactiae
ATGACAAAAGAAGTTGTCGTAGAGAGTTTTGAATTAGATCACACCATCGTTAAAGCACCCTACGTTCGTTTAATTTCAGAAGAAGTTGGACCGGTCGGAGACATCATTACTAACTTTGATATCCGCCTTATTCAGCCTAATGAAAATGCTATTGATACTGCTGGTTTACATACTATCGAGCACCTTCTGGCGAAGTTAATCCGCCAACGAATTAATGGTTTGATTGATTGTTCTCCTTTTGGTTGTAGAACTGGTTTTCACATGATTATGTGGGGAAAACAGGATGCTACTGAAATTGCTAAAGTCATCAAATCTAGTCTAGAGGCTATTGCTGGTGGGGTCACTTGGGAAGACGTTCCTGGAACAACCATTGAATCTTGTGGAAATTATAAAGACCACAGTCTCCACTCTGCTCAAGAATGGGCGAAATTAATTCTTTCCCAAGGGATTTCTGACAATGCTTTTGAGCGCCACATTGTC

SEQ ID NO: 9408 - protein, 160 aa, Streptococcus agalactiae; identical to SEQ ID NO: 624

SEQ ID NO: 9409 - protein, 1605 aa, Streptococcus agalactiae
ATGTTTAATATTATATTAGCAATGGTTTGTGCACTCATTGGTTTGATTATTGGTTATGTGGCTATTTCAATGAAAATGAAATCATCAAAAGAAGCTGCAGAACTAACTCTTTTAAATGCAGAACAAGATGCCGTTGATTTACGTGGTAAAGCAGAAATTGAAGCAGAACACATCCGTAAAGCAGCGGAACGTGAAAGTAAAGCTCACCAAAAAGAATTACTTTTAGAAGCAAAAGAAGAGGCTAGAAAATATCGTGAAGAGATCGAAAAGGAATTTAAATCTGATAGACAAGAGTTGAAACAGATGGAGGCACGTTTAACAGATCGTGCATCATCTCTTGATCGTAAAGATGAAAATCTATCTAACAAAGAAAAAATGTTAGATAGCAAAGAACAAAGTCTAACCGATAAATCTAGACATATTAATGAGCGCGAACAGGAAATTGCTACTTTAGAAACAAAAAAAGTAGAAGAATTGTCACGCATCGCAGAGCTTAGTCAAGAAGAAGCTAAAGATATCATTTTAGCTGATACCGAAAAAGATTTAGCTCATGATATTGCGACACGTATTAAAGAAGCAGAACGTGAAGTAAAAGATCGATCAAACAAGATAGCAAAAGACTTGCTAGCCCAAGCTATGCAACGTTTAGCTGGTGAATATGTTACTGAACAAACAATTACAACTGTTCATCTCCCTGATGATAATATGAAGGGACGTATCATTGGTCGTGAAGGACGTAATATTCGTACTCTGGAAAGTTTGACAGGTATTGATGTTATCATAGATGATACGCCAGAAGTCGTTGTCTTATCAGGTTTCGACCCCATTCGTCGTGAAATTGCTCGTATGACTTTAGAATCTTTGATTCAAGATGGACGTATCCATCCAGCTCGTATTGAAGAGTTGGTTGAAAAAAATCGTTTGGAAATGGATCAACGTATCCGTGAGTATGGTGAGGCAGCAGCTTATGAGATTGGTGCACCAAATCTGCATCCTGATTTGATAAAAATTATGGGACGTTTGCAGTTCCGTACATCATATGGTCAAAATGTACTTCGTCATTCAGTTGAAGTTGGTAAACTTGCAGGTATTTTGGCTGGAGAACTAGGAGAAAATGTTGATTTAGCTCGTCGGGCTGGATTCCTCCATGATATGGGGAAAGCTATTGATCGCGAAGTTGAAGGCAGTCACGTTGAAATTGGTATGGAATTTGCTCGTAAGTACAAAGAGCATCCGATTGTTGTTAATACTATTGCAAGCCACCATGGTGATGTAGAACCTGACAGCGTTATTGCAGTAATTGTTGCTGCTGCAGACGCCCTTAGTTCAGCACGACCAGGTGCGCGTAATGAGTCAATGGAAAATTATATCAAACGTCTGCGTGATTTAGAAGAAATTGCTAATGGCTTTGAGGGAGTGCAAAATGCCTTTGCACTTCAAGCCGGACGTGAAATTCGTATCATGGTACAACCTGGTAAAGTTTCTGATGATCAAGTAGTTATTATGTCGCATAAGGTACGTGAAAAAATCGAACAAAACTTGGATTATCCAGGTAATATTAAGGTAACAGTTATTCGTGAAATGCGAGCTGTTGATTTTGCAAAA

SEQ ID NO: 9410 - protein, 535 aa, Streptococcus agalactiae; identical to SEQ ID NO: 626

SEQ ID NO: 9411 - protein, 99 aa, Streptococcus agalactiae
TTGTCATATTTTGAAATGACAAAAATATCTAAAAAGTTTACTTCTGATTTTTTATACTATGATTATAGTAAAGGAGAACCAAATGGCAAAAGATATAAT

SEQ ID NO: 9412 - protein, 33 aa, Streptococcus agalactiae
MSYFEMTKISKKFTSDFLYYDYSKGEPNGKRYN

SEQ ID NO: 9413 - protein, 894 aa, Streptococcus agalactiae
ATGGCAAAAGATATAATTAAGGTTGATCATATATTTAAAAGCATCGGGCAAAAAACGATTTTAGAAGATATATCATTTAGTATAGCTTCTAACCAATGTGTAGCATTGATTGGACCTAATGGTGCAGGGAAAACAACTCTGATGTCAACTTTGTTAGGTGATATTAGTATTTCTTCAGGATCATTGACGATTTTTAATCTGCCTGCACACCACAATAGGTTAAAATATAAGGTGGCCATCTTACCACAAGAAAATGTATTGCCCTCAAAGTTTACAGTGAGAGAACTCATTGATTTCCAAAGGTGTTTATTTCCAGAAGTGCTGCCAATGTCTCTGATTTTAGACTATCTACAGTGGAGTGATACGCACTTGCAACAATTTACAGAGACTTTATCTGGAGGGCAAAAACGACTTTTAGCTTTTGTTTTAACTTTGGTTGGTAAGCCCCAATTACTATTTTTAGATGAACCTACTTCCGGAATGGATACTTCCACACGTCAACGATTTTGGGAGCTGATTGCGACACTAAAAAAAGAAGGTGTCACAATTGTCTATTCTAGTCATTATATCGAAGAGGTAGAACATACAGCTGATAGGATTTTAGTACTTCATAAAGGAAAGTTATTACGCGATACAACCCCCTTTGCCATGAAGCAAGAAAAAACCGAAAAGTTATTCACCGTTCCGCTTAGTTATCAAAAATTATTACCTACCTATTTGATTACAGAGTGTGAAGCCAAGAGTGATAGTATAACGTTTGTTACTGGGGAGGCTGAAGCTGTATGGAAAATACTGGCAGATAATGGTTGTCCTATTGAAGCTATTGAGATGACCAATAGAACTTTGTTAAATCGTATTTTTGAGACTACTAAGGAGGTAAAACATGAGAATCTT

SEQ ID NO: 9414 - protein, 298 aa, Streptococcus agalactiae; identical to SEQ ID NO: 628

SEQ ID NO: 9415 - protein, 738 aa, Streptococcus agalactiae
ATGAGAATCTTTAAAGCATTATTGAAAATGGAATTTCTTTTGACAAAACGTCAACTTGCCAATCTCATTATGGCTATAGGTATGCCAGTGGCTTTTTTTCTATTTTTTTCAGGATTTATGGGCGAAGGACTCACTAAAGCCATCGAAGCTATATACGTTCGTAATTATATGATAACGATGGCAGGATTCTCAAGTCTTAGCTTTGCTTTTTTTACTTTTCCATTTTCTATGAAAGATGATCAACTCTCAAACCGAATGCAATTATTAAGACACTCACCAGTACCAATGTGGCAATATTATCTAGCAAAAATTATTCGTATTTTATTTTACTATTGCCTAGCAATAACTGTTGTTTTCCTAACTGGGCATATTTTAAGGCAAGTTAGTATGCCAATAGAACAATGGATGCAGAGCTTTTTATTGCTATTAGGAGGAGCAACATGTTTTATTCCTTTTGGATTGCTCGTCTCCTACTTTAAAAATACTGAACTAATGTCAATGGTAGCCAATATTTGTTATATGTCATTAGCTGTTCTTGGTGGCATGTGGATGCCAATTACAATGTTCCCAAAATGGTTGCAAGCTTTATCAAAGTTAACCCCTACTTACCATTTGACTCAAGTTATCCTTAGTCCGTTTGCTAATAGTTTTGCTGGTTTTTCTCTTATTATTCTGATAGGCTATGGTATTATAATGTTAGTTATCGCTTATCTACTATCTCAGAAGAGGCATTCAATT

SEQ ID NO: 9416 - protein, 246 aa, Streptococcus agalactiae; identical to SEQ ID NO: 630

SEQ ID NO: 9417 - protein, 1053 aa, Streptococcus agalactiae
ATGTATTTTATTCCGTTAGTATTTTTGATTTACCCCATAGGAGGGATTCTCTATTATCACTACCCTTTTTGGACTTTATTTTTTACGCTAGCTTTTGTAGGAGCATATTTATACTCTGTTATTATCAGGGGCGAATCAAAGTATCACATGATTGCCTGGTCTACAATGTTGACATATATTTTCTACATGACAATTTTTATAAATAGTGGTTTCATCTGGTATATTTACTTTCTGAGTAATTTACTCGTCTATCGCTTTAGAGATAAATTGAAGTCTTTTAGATTCATTAGTTTTGCTTGTACTCTAGCCACAGTGGTATTTTTATGCTTCTTTAAGGCATCAGACTTTGGTGATAGAATCATGTTTCTAATTGTTCCTATTTTTTGTATCGGTTACATGTGGATTGCTATTGAAAATAGAAATAGCGAAGAACAAAGAGAAAAAATTGCAGAGCAAAATCAGTATATCAATATTTTGTCAGCTGAAAATGAACGTAACCGTATAGGGCGTGATTTGCATGATAGTTTAGGACATACATTTGCTATGATGACACTAAAGACAGAACTAGCGTTAAAGTTGTTAGAAAAAAGGAACTATGATAAGGTACAAAAAGAACTATCAGAATTAAATCATATTAGTCATCAATCGATGAGTGAGGTCCGTCAAATTGTTTCTAACCTCAAGTATCGTACAGTAGTGGAAGAAATTGATGAGTTGTACCGCTTGTTTCAATTATCTAACATTAAGTTAACAGTTGTTAATAAGTTAGAGACGTCACAACTAAGTCCAGTAACACAATCTACAATCACAATGATATTAAAGGAATTATCCAATAATATTGTTAAGCATGCTGAAGCTGATAGCGTGGAGTTGAGTTTAGTAAGGCAAGGTGCTACTATAAATATTGAGATGATTGATAATGGTTGTGGTTTTACAAACCTTGACGGAGATGAGTTGCATAGTATTCAAGAGAGATTAACTATCGTTGAAGGGACACTAACGATTTTGTCCCGAAGTAAACCAACTCATATTCAGGTGGTATTGAAAGAGGTA

SEQ ID NO: 9418 - protein, 351 aa, Streptococcus agalactiae
MYFIPLVFLIYPIGGILYYHYPFWTLFFTLAFVGAYLYSVIIRGESKYHMIAWSTMLTYIFYMTIFINSGFIWYIYFLSNLLVYRFRDKLKSFRFISFACTLATVVFLCFFKASDFGDRIMFLIVPIFCIGYMWIAIENRNSEEQREKIAEQNQYINILSAENERNRIGRDLHDSLGHTFAMMTLKTELALKLLEKRNYDKVQKELSELNHISHQSMSEVRQIVSNLKYRTVVEEIDELYRLFQLSNIKLTVVNKLETSQLSPVTQSTITMILKELSNNIVKHAEADSVELSLVRQGATINIEMIDNGCGFTNLDGDELHSIQERLTIVEGTLTILSRSKPTHIQVVLKEV

SEQ ID NO: 9419 - protein, 588 aa, Streptococcus agalactiae
ATGAAATTACTTGTTGCTGAGGATCAGTCCACGCTACGAGATGCTATGTGCCAATTACTTTTGATGGAAGAAAGTGTTTCTACTATTGATCAAGCTGGAAATGGTGGAGAAGCTATTGCCATTTTATCCAATAAAGCCATAGATGTTGCAATATTGGATGTTGAGATGCCGATATTATCAGGTTTAGATGTCTTAGAGTGGGTTAGAAAATACCAGAATGTTAAGGTCATAATTGTAACAACCTTTAAGCGGTCAGGTTATTTCCAAAGGGCTATTCGTTCAAATGTAGATGCTTATGTTTTGAAAGACCGCTCAGTAGCTGATTTGATGAAAACGATTCAAAAAGTTTTATCTGGGGGTAAAGAATATTCGCCTGAATTAATGGAAAACGTTATATCTAATCCTTTGAGTGAGCAAGAAATAAAAATTCTTTCCCTAATTGCTCAAGGGAAGACCAGCAAAGAAATTGCATGCACTTTATTTTTATCGAATGGTACAGTTCGTAATTACACGTCAAATATTTTTGATAAATTAGGAGTTAATAATCGTTTGGAGGCACTTAAAATAGCACGAGAAAAGGATTGGCTG

SEQ ID NO: 9420 - protein, 196 aa, Streptococcus agalactiae
MKLLVAEDQSTLRDAMCQLLLMEESVSTIDQAGNGGEAIAILSNKAIDVAILDVEMPILSGLDVLEWVRKYQNVKVIIVTTFKRSGYFQRAIRSNVDAYVLKDRSVADLMKTIQKVLSGGKEYSPELMENVISNPLSEQEIKILSLIAQGKTSKEIACTLFLSNGTVRNYTSNIFDKLGVNNRLEALKIAREKDWL

SEQ ID NO: 9421 - protein, 702 aa, Streptococcus agalactiae
ATGCAAAAATTTAAAGAACGTTTTGATACGCTTAGTGATGCAATTTTGGCCATTGCTATGACGATTTTAGTTTTGGAGATAAAAACTCCGGCTACGATGGGTGATATTGGTGACTTTACACGGAACATAGGTTTATTTATTGTTAGCTTTGTTGTTGTTTTTAATTTTTGGTACGAAAGGGCACAAAATAGCCTAGATGCTCAAAAGACTAATGATGAAATTATAGCTCTTGATATCATTGAACACCTAGGTATTTGTTTGATTCCTCTCTTTACTAAATTTATGATTTCTTTTGAGAATCATAATTTTGCTGTTATGGCTTATGGACTCTTAACGTTATTAGTTGGTCTCACATCAGACATTATTCGGATTCGTTTGGCAAGTTATGATTTAGTGACCATTCCTAGTGAATTGAAAGAGCGGGTTATAAAAGTCATGACAACTTTTGCCATTCGTTCAGTTGTGGTTCGCTTTATCATCATTATCCTCGCTTATTTTCTACCTGAGGTAGGGATATTTGCATATTTAGTCATACCGCTCTTTATGTTTTGGCGTCGCTCTAGAGCAGGAAAATACTATGCTAAAAAGGGCATTGAGGCACCATCTTATATCAAGCTTTTTATCCAAATTGGAGAGAGAGCTCCTGAGGATTTTACTAATTCAAGTAGTGGAATAGGTGGGGTAAAAAGACTCTATAAAAAA

SEQ ID NO: 9422 - protein, 234 aa, Streptococcus agalactiae; identical to SEQ ID NO: 636

SEQ ID NO: 9423 - protein, 627 aa, Streptococcus agalactiae; identical to SEQ ID NO: 4991

SEQ ID NO: 9424 - protein, 209 aa, Streptococcus agalactiae [sequence omitted]

SEQ ID NO: 9425 - protein, 312 aa, Streptococcus agalactiae
ATGATGTTAAAACCTTCTATCGACACTTTGTTGGATAAAGTTCCTTCAAAATATTCTTTAGTTATTTTACAAGCTAAGCGTGCTCATGAATTGGAAGCTGGTGAGAAAGCCACTCAAGATTTTAAATCTGTGAAATCAACACTTCGCGCTTTAGAAGAAATCGAGTCAGGTAATGTTGTAATTCACCCAGATCCATCAGCAAAACGTGCCTCAGTTCGCGCTCGTATCGAAGCTGAACGCCTTGCTAAAGAAGAAGAAGAACGTAAAATCAAAGAGCAAATTGCTAAAGAAAAAGAAGACGGCGAAAAAATT

SEQ ID NO: 9426 - protein, 104 aa, Streptococcus agalactiae; identical to SEQ ID NO: 640

SEQ ID NO: 9427 - protein, 2388 aa, Streptococcus agalactiae
ATGGCAAGAAAATTAGCACAGGTTATTGTTGATATTCCTCTGATGCAGACAGATAAACCATTTTCGTATGCCATTCCTAAAGATTTGGAAGATTTGGTACAAGTAGGAGTACGCGTTCATGTTCCTTTTGGAAGAGGAAATCGTCTTTTGCAAGGCTTTGTTGTCGGTTTCAGAGATGATGATGAATTAGAGACTAAGGATATTGCGGAGGTCCTAGATTTTGAACCTGTTTTAAATCAGGAACAACTAGACTTAGCTGATCAGATGCGCCATACTGTCTTTTCTTATAAAATATCTATTTTGAAATCAATGTTACCAAGTCTTTTGAATTCGCAATATGATAAACTCTTGTTAGCAACAGACACATTACCATCAGAAGATAGAGAAGATCTATTTGGTCATAAAACGGAAATTGTCTTTTCAAGTTTGTCTTCTCAAGATGCCAAAAAAGCAGGCAGATTAATTCAAAAAGGTTTCATAGAAGTTCAATATTTAGCCAAAGATAAGAAAACAATAAAAACAGAAAAGATTTACAAAATCAACAGAACTCTGTTAGAAAAGAGCCAAATAGCAGCAAGAGCGAAAAAGAGACTGGAGTTGAAAGAATTCCTGTTAGAAAATCCTCAACCAGGGCGCCTCACAGCTTTAAACAAACAATTTTCATCTCCTGTGGTTAATTTTTTCAGAGAAGAAGGAATCATTGAAGTCATTGAAAAAGAAGCTAGTAGATCTGATAATTATTTTAAAGGAATCCTAAAAACGGATTTTTTGGATTTAAATCAGGAACAAGCTAAAGTAGTTAAAATAGTTGTTGACCAAATTGGTAAGGAACAGAATAAACCCTTCTTGTTGGAGGGGATTACAGGGTCTGGTAAGACAGAGGTATATCTTCATATCATTGATAACGTTTTAAAGTTGGGAAAAACAGCGATTGTTCTCGTTCCAGAAATTTCTTTAACTCCCCAGATGACGAATCGTTTTATTTCTCGTTTTGGAAAGCAAGTTGCTATTATGCACTCGGGCTTGTCAGAAGGTGAAAAATTTGATGAGTGGCGAAAGATAAAATCAGGTCAAGCTAAAGTTGTCGTTGGAGCTCGTTCAGCAATTTTTGCTCCTTTGGAAAATATCGGAGCCATCATTATAGATGAGGAACATGAATCAACTTATAAGCAAGAATCTAACCCAAGGTATCATGCGCGCGATGTGGCCTTGCTACGTGCAGAATATTATAAAGCTGTGTTACTAATGGGATCAGCAACTCCAAGTATCGAAAGCCGAGCTAGAGCTAGTCGGGATGTTTATAAATTTTTAGAATTAAAACATCGTGCTAATCCTAAAGCACGTATTCCTCAGGTTGAAATTATTGATTTTAGAAATTTTATTGGTCAACAAGAAGTTAGTAATTTCACATCATATTTACTAGATAAAATCCGAGATAGATTAGATAAGAAAGAGCAAGTGGTTCTTATGCTCAATCGTAGAGGTTATTCTAGTTTTATTATGTGTCGAGACTGCGGCTACGTTGATCAATGTCCTAATTGTGACATTTCTCTGACTTTACATATGGCTACAAAGACCATGAATTGTCATTATTGTGGGTTTGAAAAGCCTATTCCAAGAACATGTCCAAATTGCAATAGTAAAAGTATCTCTTACTATGGTACTGGAACCCAAAAAGCTTATGAAGAACTTTTGAAAGTTATCCCAGACGCAAAGATTTTACGGATGGATGTTGATACGACAAGGCAAAAAGGCGGTCATGAGTCTATTTTGAAGCGTTTCGGAAATCATGAAGCTGATATTTTATTGGGAACACAGATGATTGCTAAGGGATTGGATTTTCCAAATGTTACTTTAGTTGGAGTACTAAATGCAGATACTTCTCTGAATTTACCTGATTTTCGATCATCAGAGCGAACTTTTCAGCTATTAACTCAAGTGGCTGGACGTGCTGGGCGTGCTGAAAAAGAAGGAGAGGTTGTCATTCAAACTTATAATCCTAATCATTATGCTATTCAATTAGCCCAAAAGCAAGATTTTGAAGCTTTTTATCAATATGAAATGAATATCCGTCGACAACTTGGTTATCCTCCTTATTATTTTACAGTTGGTTTAACATTATCGCATAAAGATGAAGAGTGGTTAATACGAAAATCTTATGAAGTATTAAGTTTATTGAAGCAAGGCTTTAGTGATAAAGTAAAGTTGTTAGGTCCAACGCCAAAACCAATTGCAAGAACACATAACCTTTATCACTACCAAATTATTATCAAGTATCGATTTGAGGACAACCTTGAACTTGTTTTGAATCGCTTATTAGACATGACTCAAGACAAGGAGAATAGAGATCTTCGCTTAGCAATAGACCACGAACCGCAAAATATGATG

SEQ ID NO: 9428 - protein, 796 aa, Streptococcus agalactiae; identical to SEQ ID NO: 642

SEQ ID NO: 9429 - protein, 933 aa, Streptococcus agalactiae
ATGACAAAATTATTATTCATGGGGACCCCTGATTTTTCAGCGACGGTTTTAAAAGGTATTTTAGCAGATGGTAAGTATGATGTTTTAGCTGTTGTGACGCAACCAGATCGTGCTGTAGGTCGTAAAAAAGAAATTAAAATGACCCCTGTAAAAGAAGTGGCCTTGGAAAACAACATTCCTGTGTATCAGCCGGAAAAACTATCTGGAAGTCCAGAATTAGAACAACTAATGACCCTAGGTGCAGATGGTATTGTAACAGCTGCTTTTGGTCAATTCTTACCAACAAAGCTTTTGGAATCGGTAGGTTTTGCAATTAATGTACATGCTTCTCTATTGCCAAAATATCGTGGTGGGGCACCAATTCATTATGCCATTATTAATGGCGAAAAAGAAGCTGGGGTTACCATCATGGAAATGGTTGCAAAGATGGATGCAGGGGATATGGTATCAAAAGCTTCCGTTGAGATAACTGATGAAGACAATGTAGGGACAATGTTTGATAGACTCGCCGTTGTTGGTCGTGACCTTTTATTAGATACGCTTCCAGGTTATCTATCAGGTGATATTAAGCCGATACCACAAAATGAAGAAGAGGTAAGTTTTTCTCCTAATATTAGTCCAGATGAAGAGAGAATTGATTGGAATAAATCATCGCGCGACATTTTTAACCATGTTCGAGGGATGTATCCATGGCCAGTTGCACATACCCTTTTGGAGGGAAATCGTTTTAAACTTTATGAAGTAACAATGTCAGAAGGAAAGGGCTCACCGGGTCAAGTGATCGCTAAGACAAAGAACTCATTGACAGTAGCAACTGGTGACGGAGCTATTGAACTCAAATCAGTTCAACCAGCAGGGAAACCTCGTATGGATATAAAAGACTTTTTAAATGGTGTTGGTCGTAATTTAGAAATAGGAGATAAATTTGGCGAA

SEQ ID NO: 9430 - protein, 311 aa, Streptococcus agalactiae; identical to SEQ ID NO: 644

SEQ ID NO: 9431 - protein, 1320 aa, Streptococcus agalactiae
TTGGCGAATGATTGGAAAAAGAGTGCGCGTGGTTTAGCTTTAATGACTTTAGAGGAAGTTTTTGATAAAGGAGCTTATTCTAATATCGCACTTAATAAGAGTTTAAAAAAATCTAGACTATCAGATAAAGATCGTGCCTTAGTAACAGAAATTGTCTATGGAACTGTGGCTAGAAAAATAACGCTAGAATGGTATCTATCACACTTTATAGTTGATCGTGATAAGCTTGAATTATGGGTATATCATCTCTTGCTACTGAGCCTTTATCAACTACTCTATCTGGACAACATCCCAGATCACGCTATTGTTAATGATGCTGTCACTATTGCTAAGAATCGAGGCAATAAAAAGGGTGCTGAAAAGTTAATTAATGCCGTTTTACGAAGAGTAAGTTCGGAGACGCTCCCTGAAATTGCATCAATAAAACGCCAAAACAAACGTTACTCTGTTGCTTATTCCATGCCAGTGTGGCTCGTAAAAAAATTAATTGACCAATATGGTGAGACAAGAGCTTTAGCTATTATGGAGAGTTTATTTGAGCGAAATAAAGCCAGTCTTCGTGTGACTGACTTATCGCAAAAACAAACTATCAAAGAAACTTTAAATGTTAGAGATTCACATATTGCAGAGACAGCTTTAGTTGCAGACTCAGGAAATTTTTCATCGACATCATTTTTCCAAGATGGCCTCATTACTATCCAAGATGAATCTAGTCAATTAGTTGCTCCAACACTCAAAGTCTCAGGTAATGACCAAGTATTGGATGCATGTAGTGCACCAGGAGGAAAAACAAGTCATATCGCCTCATATTTGACTACAGGGGCAGTAACTGCTTTAGATTTGTATGATCATAAATTGGAATTGGTTATGGAAAATGCAAAACGCCTAGGTCTGTCAGATAAGATAAAAACTAAAAAGTTAGATGCAAGTAAAGCTCATGAGTATTTTCTTGAGGATACTTTTGACAAAATTTTAGTAGACGCACCTTGTTCAGGTATCGGGCTAATTCGCCGTAAACCAGATATTAAGTACAATAAAGCTAATCAAGACTTTGAAGCACTCCAAGAGATTCAATTGTCTATCCTATCTAGCGTTTGTCAAACGCTACGTAAAGGTGGTATAATAACCTATAGCACTTGTACCATTTTTGAGGAAGAAAATTTTCAAGTTATTGAAAAATTCTTAGAAAACCACCCCAATTTTGAGCAAGTAGAACTGAGTCATACACAAGAGGATATTGTAAAGAGAGGCTGTATTAGTATAAGCCCTGAACAATATCATACAGATGGCTTTTTTATTGGACAAGTCAAACGTATCTTG

SEQ ID NO: 9432 - protein, 440 aa, Streptococcus agalactiae
MANDWKKSARGLALMTLEEVFDKGAYSNIALNKSLKKSRLSDKDRALVTEIVYGTVARKITLEWYLSHFIVDRDKLELWVYHLLLLSLYQLLYLDNIPDHAIVNDAVTIAKNRGNKKGAEKLINAVLRRVSSETLPEIASIKRQNKRYSVAYSMPVWLVKKLIDQYGETRALAIMESLFERNKASLRVTDLSQKQTIKETLNVRDSHIAETALVADSGNFSSTSFFQDGLITIQDESSQLVAPTLKVSGNDQVLDACSAPGGKTSHIASYLTTGAVTALDLYDHKLELVMENAKRLGLSDKIKTKKLDASKAHEYFLEDTFDKILVDAPCSGIGLIRRKPDIKYNKANQDFEALQEIQLSILSSVCQTLRKGGIITYSTCTIFEEENFQVIEKFLENHPNFEQVELSHTQEDIVKRGCISISPEQYHTDGFFIGQVKRIL

SEQ ID NO: 9433 - protein, 735 aa, Streptococcus agalactiae
ATGGAAATATCTCTTTTAACAGATATTGGGCAACGTCGTTCCAATAATCAAGATTTTATTAATCAATTTGAAAATAAAGCCGGCGTCCCACTAATCATCTTAGCAGATGGTATGGGAGGACATCGTGCAGGAAATATTGCTAGCGAGATGACTGTAACTGATCTAGGAAGTGATTGGGCGGAGACAGATTTTTCTGAGTTATCAGAAATTCGTGATTGGATGCTTGTCTCTATTGAAACAGAGAATCGCAAAATATATGAATTAGGTCAGTCAGATGATTACAAAGGTATGGGAACTACCATTGAAGCAGTTGCCATTGTAGGAGATAATATTATTTTCGCACATGTAGGAGATTCACGTATCGGTATCGTTCGTCAAGGAGAGTATCATTTATTGACGAGTGATCATTCTCTTGTTAATGAATTGGTAAAAGCTGGCCAATTAACAGAAGAAGAAGCTGCTAGTCATCCTCAAAAAAATATTATTACGCAATCAATTGGTCAAGCCAATCCAGTCGAACCTGATTTAGGAGTTCATCTACTTGAAGAAGGTGACTACCTTGTAGTTAATAGTGATGGACTAACTAATATGTTGAGTAATGCCGATATTGCTACAGTACTAACACAAGAAAAAACCTTAGATGATAAGAATCAAGATTTAATCACTCTAGCAAACCATAGAGGAGGTCTTGATAATATCACTGTGGCACTAGTTTACGTTGAAAGTGAGGCGGTT

SEQ ID NO: 9434 - protein, 245 aa, Streptococcus agalactiae; identical to SEQ ID NO: 648

SEQ ID NO: 9435 - protein, 1887 aa, Streptococcus agalactiae
ATGGCGGATGTTTATCTAGCTCGAGATCTAATTTTAGATAATGAAGAGGTCGCAATAAAAGTATTGCGAACCAATTATCAAACAGATCAGATTGCGGTTGCTCGCTTCCAGAGAGAAGCACGAGCAATGGCTGAGCTGACACATCCTAATATTGTCGCTATTCGTGATATAGGTGAAGAAGACGGACAGCAGTTCTTAGTAATGGAATATGTTGATGGATTCGATTTAAAAAAGTATATTCAAGACAATGCACCCCTATCAAATAATGAAGTTGTTCGAATCATGAATGAAGTCCTTTCAGCCATGTCACTGGCACATCAGAAAGGTATCGTACACCGTGATTTAAAACCTCAAAATATTTTATTAACTAAAAAAGGGACTGTAAAAGTTACAGATTTCGGTATTGCGGTAGCGTTTGCTGAAACTAGTTTAACGCAAACGAATTCTATGTTAGGTAGTGTTCATTATTTATCGCCAGAGCAGGCGCGTGGTTCAAAAGCGACTGTTCAGAGTGATATTTATGCCATGGGAATCATGCTTTTTGAAATGTTAACTGGCCATATTCCTTATGATGGGGATAGTGCAGTTACTATTGCCCTACAGCACTTCCAAAAACCACTACCATCAATCCTTGCAGAAAATAAAAGCGTTCCACAAGCTTTGGAAAACATTGTCATTAAAGCAACAGCTAAAAAGCTAACAGATCGCTATAAGACAACTTATGAGATGGGACGTGATTTATCAACTGCTCTAAGCTCGACACGTCACCGTGAACCAAAACTTGTTTTTAATGATACTGAGAGTACTAAGACACTACCCAAAGTAACATCTACAGTATCATCTCTAACGACAGAACAACTGTTGCGTAATCAAAAACAGGCCAAAACAACAGAAAAAATAACTCCTGATTCTGCGAGTAACGATAAAACGAAGTCTAAAAAGAAGGCTTCTCATCGACTTCTTGGTACAATCATGAAATTATTCTTTGCACTCTGTGTTGTAGGAATAATTGTATTTGCTTATAAAATTTTAGTAAGTCCTACGACTATTCGTGTTCCAGATGTTAGCAACAAAACAGTAGCTCAAGCAAAAATGACATTGGAAAATTCTGGATTGAAAGTAGGAGCTATTCGTAATATTGAGAGTGATAGTGTTTCAGAAGGACTTGTCGTAAAAACAGACCCTGCTGCAGGACGTTCTCGCAGAGAAGGGGCTAAAGTTAATCTTTATATTGCCACTCCAAACAAGAGTTTCACTCTAGGTAATTATAAGGAACATAATTACAAAGATATCCTCAAAGATCTTCAAGGCAAAGGTGTTAAAAAATCTTTAATCAAGGTTAAGCGTAAAATTAATAATGATTATACTACTGGTACAATCTTAGCACAGTCGCTTCCAGAAGGAACATCTTTTAATCCTGATGGTAATAAGAAATTAACACTTACGGTTGCTGTTAATGATCCAATGATTATGCCTGATGTAACAGGTATGACTGTTGGAGAAGTAATAGAAACCTTGACAGACCTCGGATTAGATGCAGATAATCTTGTCTTCTATCAAATGCAAAATGGCGTTTATCAAACAGTAGTAACACCTCCATCTTCAAGTAAGATAGCAAGTCAGGATCCTTATTACGGAGGAGAAGTTGGATTAAGGAGAGGAGATAAAGTTAAGCTGTATCTTCTTGGTTCTAAAACAACGAATAACTCATCATCTACGCCAATAGATTCTTCGGCTTCAAGCTCAACAGGAACAACTACCTCGGATTCTGTAAGCTCATCAACGGATGCTAGCACTTCTGATAGTAGTAGCACTTCTACAAGTAGTTCAACACTACCAAGTGATAGTACAACTAATACAGGAACAGCTAACAATCCATTAACTCAA

SEQ ID NO: 9436 - protein, 629 aa, Streptococcus agalactiae; identical to SEQ ID NO: 650

SEQ ID NO: 9437 - protein, 693 aa, Streptococcus agalactiae
ATGAAAAAATTTCAGTTTTTTCTACTTGTTGAAGCCGTTGTCTTAGTTATGGGATTAATGAAAATTTTATCTGATGACTGGACAAGTTTTATTTTTATTCTCGCTTTGATTCTTTTAGCCTTAAGATTTTATAACAACGATAGTCGTCATAATTTTCTGTTAACGACAAGTTTGTTATTACTATTTTTAATCTTTATGCTTAACCCTTACATTATTGCAGCCGTTGTTTTTGCAGTTTTGTATGTTCTAATCAATCATTTCTCGCAAGTTAAGAAAAAAAATCGTTATGCTTTGATTCAATTTAAGAATCATCAATTAGATGTTAAGACAACACGAAACCAATGGTTAGGTACTGATCAACACGAAAGTGACTTTTATGCTTTTGAAGATATTAATATTATAAGAATCTCTGGGACTGATACAATTGATTTAACAAATGTTATTGTATCTGGGCAGGATAATGTTATTATAATTCAAAAAGTTTTTGGTGATACTAAAGTATTGGTTCCTTTAGACGTTGCCGTAAAGGCTGATATTAGTTCTGTTTACGGTAGTGTACAGTACTTTGATTTTGAGGAGTATGATCTAAGAAATGAATCTATAAAATTGTCACAAGAGGAAGAATATTACCTTTTGAAACGTGTCAAATTAGTTGTAAACACTATCGCTGGGAAAGTTGAGGTTAGTCGTAAA

SEQ ID NO: 9438 - protein, 231 aa, Streptococcus agalactiae; identical to SEQ ID NO: 652

SEQ ID NO: 9439 - protein, 1017 aa, Streptococcus agalactiae
ATGAAAAAGCACCACTACTTTTTAGCTTTCTTCTATGGAAGTGTCATTATATTTGCCATTTGTTTTGTCATTATTGATAGTTTGGGTGTTAATTTGGTGCACCTCTATCAAACGTCTCGTTTGTGGCTGATTGAACAATTGATTTTCTCTATTTTCTTTCTATCTTTAGCGGTAACTATCCTTTTATTGCTAACTTGGTTTTTATTAGATGATAATAGTAAACGTCAAATTAACCATAATTTACGTCGCATTTTAAATAACCAATCAATAAATGTTACCGATGATGGTACTGAAATATCGACCAATATTCAACGGCTCTCTAAAAAAATGAATTTAATGACAGCAAGTCTACAATCTAAGGAAAATAGTCGTATTTTAAAAAGCCAAGAAATTGTGAAACAAGAACGTAAGCGTATTGCACGTGATTTACACGACACAGTTAGTCAGGATTTGTTCGCTGCTTCCATGGTTTTGTCAGGGATAGCACAGAATGTTTCTCAGCTAGACGTTGATCAGGTTGGCTCGCAATTATTAGCAGTAGAAGAAATGCTTCAGCATGCACAAAATGATTTGAGAATTCTGCTACTTCATTTGAGGCCAGTTGAATTAGAAAATAAGACCCTATCTGAAGGATTCAGAATGATATTGAAAGAATTGACCGATAAGAGCGACATTGAAGTTGTTTATCATGAATCAATTCTAACCTTACCCAAAAAGATTGAAGACAATATTTTTAGAATTGGTCAAGAATTTATCAGTAATACTTTAAAGCATTCACAAGCCAGTCGTCTCGAAGTTTACCTTAATCAAACAGAGAATGAATTGCAGTTAAAAATGATTGATAATGGTATTGGATTTGATATGGATTCTGTCTATGATTTAAGTTATGGGTTAAAAAATATTGAAGATCGAGTAGAAGATTTAGCAGGAAATTTACAGCTTCTCAGTCAGCCTGGTAAAGGAGTTGCTATGGATATAAGATTACCTTTAGTAAATCAGAGTGAGGATAAAAATGGA

SEQ ID NO: 9440 - protein, 339 aa, Streptococcus agalactiae; identical to SEQ ID NO: 654

SEQ ID NO: 9441 - protein, 639 aa, Streptococcus agalactiae
ATGGATAAAATAAAAATTGTACTTGTTGATGACCATGAGATGGTTCGTCTCGGTTTAAAAAGTTTTTTAAACTTACAAGCTGATGTTGAAGTAATAGGTGAGGCCTCAAATGGTTTAGAAGGCATAAAAAAAGCACTGGAGTTACGTCCAGACGTTGTTGTTATGGACTTAGTAATGCCTGAAATGGACGGTGTAGAAGCAACCTTAGCATTATTGAAGGATTGGCCAGAAGCTGCCATTTTAGTCTTAACATCTTACTTGGATAATGAAAAAATTTACCCTGTTATTGAAGCAGGTGCCAAAGGCTATATGTTAAAGACCTCAAGCGCAGCAGAGATTCTTAATGCCATTCGTAAAGTTTCAAGGGGAGAACAAGCTATTGAAAATGAAGTAGATAAGAAAATTAAGGCTCATGATAAATGTCCAGCTTTACATGAGGGCTTAACAGCAAGGGAACGTGATATCCTTAATTTATTAGCCAAAGGTTATGACAATCAAAGGATTGCTGATGAATTATTTATCTCGTTAAAGACTGTTAAAACTCATGTTTCTAATATTTTGGGAAAACTAAATGTAGCAGATCGAACTCAAGCAGTTGTCTATGCTTTCCAACACCATTTGGTACCACAAGATGATGAA

SEQ ID NO: 9442 - protein, 213 aa, Streptococcus agalactiae; identical to SEQ ID NO: 656

SEQ ID NO: 9443 - protein, 1398 aa, Streptococcus agalactiae
ATGGACGCAAAAACTAAATATAAAGCAAAAAAAATAAAGGCAGTGTTTTTTGATATTGATGACACGCTTCGTGTTAAAGATACAGGTTATATGCCACCATCAATCTTAAAAGTTTTTAAAGCTTTGAAAGATAAAGGAATCGTTGTAGGTATTGCTTCAGGAAGAGCACGATATGGCGTTCCAAAAGAAGTTCAAGATTTAAATGCCGATTATTGTGTAAAATTAAATGGAGCTTACGTTAAGGACAAGGATAAGAATATTATCTTCCATCGTCCTATTCCAGCTGAATATGTAGAGCAATATAAGAAATGGGCGGACACTGTTGGTATTAAGTACGGTTTAGCTGGTCGTCATGAGGCAGTTTTATCAGATCGTGATGATTTGGTAAATGATGCGATTGATATTGTGTATTCTGATCTCGAAGTTAATCCAGATTTCAATAAAGAACATGATATTTATCAGATGTGGACATTTGAAGATAAAGGAGATAGCCTTCATCTACCTGAACCGTTAGCTGAACATCTTCGCTTGATACGTTGGCATGATCATTCTTCAGATGTTGTGTTAAAAGGAACATCGAAGGCTTTAGGTGTTTCTAAAGTTGTTGAACATTTGGGCTTAAAGCCAGAGAATATCTTGGTTTTCGGAGATGAGCTCAATGATTTAGAACTCTTTGATTATGCTGGACTAGCTGTGGCGATGGGAGTGTCACACCCAGAAGCTCAAAAAAAAGCAGATTTTATCACAAAAAAAGTAGAAGAAGATGGCATTTTGTATGCCCTGGAGGAACTAGGTTTGATAGAAAAAGAATTAACATTTCCACAAGTAGATATTGAAAATACAGAAGGTCCTGTGGCTGTCATTAAAACAAATCACGGGGATATGACTGTAAAACTCTTCCCGGATCATGCTCCTAAAACGGTAGCAAACTTTATTGGTTTAGCTAAACAAGGTTATTATGATGGTATTATCTTCCATCGTATTATTCCAGATTTTATGATTCAGGGTGGTGATCCAACTGGTACAGGTATGGGTGGTGAATCTATCTATGGGGAAAGTTTTGAAGACGAATTTTCCGAGGAATTATATAATGTTCGCGGAGCTCTTTCAATGGCTAATGCTGGACCAAATACGAATGGCAGCCAATTTTTCATCGTCCAAAATACAAAAATTCCTTATGCGAAAAAGGAATTAGAGCGAGGTGGTTGGCCAACACCAATTGCTGAGTTGTATGCTGGACAAGGTGGTACACCGCATCTAGATCGTCGCCACAGTGTATTTGGACAATTAGTAGACCAAAGTTCTTTTGAGGTACTTGATGAGATTGCGGCAGTAGAGACTGGTTCTCAAGACAAACCATTGGAAGATGTTGTTATTTTAACGATTGAGGTTAAAGAA

SEQ ID NO: 9444 - protein, 466 aa, Streptococcus agalactiae; identical to SEQ ID NO: 658

SEQ ID NO: 9445 - protein, 372 aa, Streptococcus agalactiae
TTGAGGTTAAAGAATAAAATGAAGATTGGCGATAAGTTAAAGGGAACAGTCACTGGCATTAGGCCTTATGGAGCCTTTGTTTCTCTTGAGGATGGTAGGACTGGACTTATCCATATTTCTGAAATTAAAACAGGTTACATTGATAATATTTATGATGTTCTTAGTGTAGGTGATGAAGTCTATGTTCAGGTTATAGATGTAGATGAATTTACACAAAAAGCAAGTTTATCGCTTCGGACCCTTGAAGAAGAGAGACATCATATTCAGCATCGTCATCGATTTTCTAACAATCGTCTTAAGATAGGTTTCAAACCACTTGAGGAAAATTTACCTAGTTGGGTTGAGGAAGGTCTAGCCTACTTGAATAATAAA

SEQ ID NO: 9446 - protein, 124 aa, Streptococcus agalactiae; identical to SEQ ID NO: 660

SEQ ID NO: 9447 - protein, 774 aa, Streptococcus agalactiae
ATGACAAATGAAAAAGGTATTGTATTCAACATTCAACATTTTAGTATTCACGATGGTCCAGGTATTCGAACAACCGTTTTCTTAAAGGGTTGTCCTCTTAGATGTCCTTGGTGTGCTAATCCCGAGTCGCAAAAAATGGTTCCAGAAACAATGAGAGATGCCATTACTAATGAAAGCGTCATCGTGGGCGAAGAAAAATCGGTTGATGATATTATTGAAGAAGTTTTAAAAGATATTGATTTTTACGAAGAATCTGGTGGGGGCATAACGCTATCTGGCGGTGAAATATTTGCACAATTTGAATTTGCCAAGGCAATTTTAAAACGTGCTAAATCACTGGGAATCCACACGGCTATTGAAACAACTGCTTATACTAGACATGAACAATTCATAGATCTTATCCAATACGTTGATTTTATTTACACCGATTTAAAACATTACAATAGCCTCAAACACCAAGAAAAGACGATGGTTAAGAATGCTTCAATCATCAAAAACATTCATTATGCTTTTGCCAACGGTAAAACGATTGTGCTACGTATTCCTGTCATACCTAATTTTAACGATTCATTAGAAGATGCTGAAGAATTTGCTTGTTTATTTGATCGCCTAGATATCCGTCAAGTGCAACTCTTACCTTTCCACCAATTTGGGCAAAACAAATATCAATTACTTAATCGTCAATATGAAATGGAAGAGATCGCTGCACTACACCCAGAGGATCTACTCGATTATCAAGCTATTTTTAGCAAGTATAATATTCACTGCTACTTT

SEQ ID NO: 9448 - protein, 258 aa, Streptococcus agalactiae; identical to SEQ ID NO: 662

SEQ ID NO: 9449 - protein, 753 aa, Streptococcus agalactiae
ATGAATAGATTAGAAAATATTATTAGTTTAGTATCCCAGTACCAAAAAATAGATGTTAATACACTCTCGGAGTTGTTGCAAGTTTCTAAAGTAACGATACGTAAAGATTTAGATAAACTAGAAGGCAAAGGGCTTTTGCATAGAGAGCACGGTTATGCAGTTTTAAACAGTGGGGATGACCTTAATGTTAGGTTATCTTTTAACCATAAAACTAAAAAAGAAATTGCTGCCTTAGCTGCAAATATGGTGTCTGACAATGACACTATCTTAATAGAATCAGGCTCTACTTGTGCTCTTTTAGCAGAAAATATCTGTCAGACAAAGCGAAATGTCACTATTTTGACCAACTCTTGCTTTATTGCTAACTATTTACGAGAGTATGATTCATGCCAAATTGTCTTACTTGGTGGTGAGTATCAATCAAGTTCACAGGTTACGGTAGGTCCTCTCTTGAAAAAGATGATTTCACTTTTTCATGTCTCGTTAGCTTTTGTTGGGACTGATGGTTTTGATCCAAAACTAGGATTTATGGGTAGAGATTTAATGCGTTCTGAAGTTGCACAAGAGATGGCGAATGCTGCCGATGAAGTCATTATTTTAACAGATTCTAGTAAGTTTAATCAGACTGCATTGGTGGAACAGCTTCCGTTGTCAACTGTATCACAAGTTATTACAGATAAACATCCAAATTCGGAAATTGCTAATTTGTTCCAAGAAGCAGAGATTACCATTCAATCTTTATTACAAGTACCA

SEQ ID NO: 9450 - protein, 251 aa, Streptococcus agalactiae; identical to SEQ ID NO: 664

SEQ ID NO: 9451 - protein, 981 aa, Streptococcus agalactiae
ATGAAATTAGAGCGTCAAAAATTGTTAGCTAAAGTAGCTTACCTTTACTATATGGAAGGGAAAAGCCAATCTGAGATTGCCAATGAATTAGGAATTTATCGTACAACAATAAGTCGTATGTTAGCCAAAGCGAGAGAAGAAGGTCTTGTTAGAATCGAAATTTCAGATTTTAATCCAGAAATTTTTCAGTTAGAATCCTATTTTAAAAGTAAATATCACCTTAAAGATATTGAGATTGTTTCTTCGCGAAAAGATAGCGATACTTCAGAGATAGAGAAGGATTTAGCACATGTAGCTGCAGCTATGATTCGAAAAAAAATTAAAGAGAATGAAAAGGTGGGGATTGCTTGGGGGAGGACACTTAGTAAAGTAGTTGAAGCAATGCGTCCTCATCCGGTTTCTCAAGTTTCTTTTGTTCCTTTGGCCGGAGGTCCAAGTCATATTAATGCACGCTATCACGTTAATACTCTGGTTTACGAAATGTCAAGGCGTTTCCAAGGAAGTTGTACTTTCATTAATGCAACTCTAGTTCAAGAAAACGCTAATTTAGCGAAAGGAATATTAACTTCAAAATATTTTGAGGGGCTAATGGATAATTGGGAAAAACTTGATGTGGCAATTGTGGGCGTTGGTGGTAAACCTAAAAGCAATGAACAACAGTGGCTTGACCTTTTAAATCAAGATGATTTTCAATGCTTGGATGAAGAAGCAGCTGTAGGTGAAATTACTTGTCGTTTTTTTAATCATTCAGGTGATCCTGTGAATCAACATTTAGCTAAAAGGACAATAGGAATTACCTTAGAACAACTACAGAAAGTTCCTAATAGAATAGCGGTTGCTCATGGCAATTATAAGGCTGCGGCACTCTTAGCCGTTTTAAAAAAGGGGTATATTAATCATTTAGTTACTGATTTTTCCACAGCCTTAAATATTTTAAGATTAGATAAAGACACCTTTGTGGATACTATATATCAAAAGAGC

SEQ ID NO: 9452 - protein, 327 aa, Streptococcus agalactiae
MKLERQKLLAKVAYLYYMEGKSQSEIANELGIYRTTISRMLAKAREEGLVRIEISDFNPEIFQLESYFKSKYHLKDIEIVSSRKDSDTSEIEKDLAHVAAAMIRKKIKENEKVGIAWGRTLSKVVEAMRPHPVSQVSFVPLAGGPSHINARYHVNTLVYEMSRRFQGSCTFINATLVQENANLAKGILTSKYFEGLMDNWEKLDVAIVGVGGKPKSNEQQWLDLLNQDDFQCLDEEAAVGEITCRFFNHSGDPVNQHLAKRTIGITLEQLQKVPNRIAVAHGNYKAAALLAVLKKGYINHLVTDFSTALNILRLDKDTFVDTIYQKS

SEQ ID NO: 9453 - protein, 321 aa, Streptococcus agalactiae
ATGGAAATCATAGTCGCAGACCAAATTATTATGGGGCTCATTTTGAATGCTGGGGATGCTAAACAACATATCTATCAAGCCTTAAAACTTGCAAAAGAAGGAAATTTTGCAGAAAGTAAGATTGAAATAGAACTAGCAGATAGTGCACTCCTAGAAGCTCATAATCTTCAAACACAATTCCTTGCACAAGAAGCAGGAGGGACAAGGACAGATATCTCAGCACTCTTTATTCATTCTCAGGATCATTTGATGACAAGTATTACTGAGATTAACTTGATTAAAGAAATTATTGATTTACGCCAGGAATTACATATTCAAAAA

SEQ ID NO: 9454 - protein, 107 aa, Streptococcus agalactiae; identical to SEQ ID NO: 668

SEQ ID NO: 9455 - protein, 318 aa, Streptococcus agalactiae; identical to SEQ ID NO: 5023

SEQ ID NO: 9456 - protein, 106 aa, Streptococcus agalactiae; identical to SEQ ID NO: 670

SEQ ID NO: 9457 - protein, 1299 aa, Streptococcus agalactiae
ATGTCAAAGTTTGATAGTCAGAAAATAATTACTCCGATTATGAAGTTTGTCAATATGCGAGGGATTATTGCACTCAAAGATGGCATGCTAGCAATTCTACCACTAACAGTTGTTGGGAGTCTCTTTTTAATATTAGGGCAGCTTCCATTTAAAGGTCTTAATCAAGCCATAGCTAATGTTTTTGGACCAGAATGGACAGAACCATTTATGCAAGTTTATTCAGGAACTTTTGCGATTATGGGCTTGATTTCCTGTTTTGCAATTGCTTATGCTTATGCTAAAAATAGTAGTGTAGAACCGTTACCTGCTGGCGTTTTATCACTTTCGTCTTTCTTTATTTTAATGAAATCATCTTATATTCCTGTAAAAGGAGAAGCAATAGCGGATGCTATTTCTAAGGTTTGGTTTGGCGGTCAGGGGATTATTGGAGCAATTATTATTGGCTTAGTAGTTGGTGCTATCTATACATGGTTTATCCAACATCATATTGTTATAAAAATGCCAGAGCAAGTACCACAGGCAATAGCAAAACAATTTGAAGCTATGATTCCAGCTTTTGTTATCTTTCTTTTATCGATGATTGTTTATTTGATTGCTAAGGTAACAACTGGAGGTACCTTTATTGAGATGATTTATGATATCATTCAAGTACCGTTGCAAGGCTTAACAGGCTCACTTTATGGAGCAATTGGGATTGCTTTCTTTATTTCATTCTTATGGTGGTTTGGTGTCCATGGCCAATCTGTGGTGAATGGTATTGTGACTGCTTTGTTACTATCCAATTTAGATGCCAATAAGTCTTTATTAGCAGCAAATCGCTTAACATTAGATAATGGCGCTCACATTGTAACACAGCAGTTTTTGGATAGTTTCTTGATTTTATCGGGCTCAGGAATAACTTTTGGACTAGTTATTGCGATGCTTTTTGCAGCAAAATCAAAACAATACAAGGCACTTGGGAAAGTGGCCGCTTTTCCCGCAATTTTCAATGTTAACGAGCCAATCGTCTTTGGCTTTCCAATCGTAATGAATCCTGTGATGTTTCTGCCTTTTATTTTAGTACCAGTTTTGGCAGCTTTAATTGTTTATGGAGCTATTGCGGTTGGTTTTATGCAACCATTCTCAGGTGTTACTTTACCATGGAGTACTCCAGCAATTATTTCTGGATTCATGGTAGGTGGTTGGCAAGGTGCACTCGTCCAAATAGTCATTTTAGCTATCTCAACTGCTGTTTACTTCCCATTCTTTAAAATCCAAGATAATATTACTTACAAAAATGAATGTGAAATGGAAAGGGGA

SEQ ID NO: 9458 - protein, 433 aa, Streptococcus agalactiae
MSKFDSQKIITPIMKFVNMRGIIALKDGMLAILPLTVVGSLFLILGQLPFKGLNQAIANVFGPEWTEPFMQVYSGTFAIMGLISCFAIAYAYAKNSSVEPLPAGVLSLSSFFILMKSSYIPVKGEAIADAISKVWFGGQGIIGAIIIGLVVGAIYTWFIQHHIVIKMPEQVPQAIAKQFEAMIPAFVIFLLSMIVYLIAKVTTGGTFIEMIYDIIQVPLQGLTGSLYGAIGIAFFISFLWWFGVHGQSVVNGIVTALLLSNLDANKSLLAANRLTLDNGAHIVTQQFLDSFLILSGSGITFGLVIAMLFAAKSKQYKALGKVAAFPAIFNVNEPIVFGFPIVMNPVMFLPFILVPVLAALIVYGAIAVGFMQPFSGVTLPWSTPAIISGFMVGGWQGALVQIVILAISTAVYFPFFKIQDNITYKNECEMERG

SEQ ID NO: 9459 - protein, 2454 aa, Streptococcus agalactiae
ATGACCAAACAATTACTCACTCAAAAATATACAAATGATGTTCAACAAAATTCTCAAAAGCATTTTGGCTATTTGACAGAGCGCATGTATTCTTATCGCGATAAGGTTCTTGATAAGAAACCATTCATAGATGCAGAACGTGCTATCTTGGTAACTGAAGCCTATCAAAAGCATCAGGAAAAACCTAATGTTTTAAAGAGAGCTTACATGTTGCAAAATATTTTGGAAAAAATGACAATCTATATTGACGATGAGACAATGATTGTCGGTAACCAAGCTTCATCTGATAAAGATGCTCCTATTTTTCCAGAATACACTCTAGAATTTGTTGTAAATGAACTAGACCTTTTTGAAAAACGAGATGGTGATGTCTTTTACATTACAGAAGAAACCAAAGAACAAATTAGAAATATTGCACCTTTCTGGGAAAATAATAATTTACGGGCTCGTGCGGGCGTTATGCTTCCAGAAGAAGTTCAAGTTTATATGGAGACAGGCTTCTTTGGGATGGAAGGTAAGATGAATTCTGGGGATGCTCACTTAGCTGTCAACTATCAGAAGTTACTAGAAGAAGGGCTTATTGGCTTTGAAAAAAAAGCAAGAAAAGCTAAAGCTGACTTAGATTTAACAAAGCCTGAGAGTATTGACAAATATCATTTCTATGATTCTATTTTAATTACAATAGAAGCTGTTAAAACCTATGCAGAGCGTTTTGCTATCCTAGCAAAAAAACAAGCTAAAACAGCAAATGCTAAGAGACGTCAGGAATTGTTAGATATCGCTAGTATTTGTGAACGAGTGCCCTATTACCCAGCTGAAACGTTTGCAGAAGCCGTTCAATCGGTTTGGTTTATTCAGTGTATTCTTCAAATAGAATCAAACGGTCATTCTCTATCTTATGGACGCTTTGATCAATACATGTATCCATATGTTAAATCTGACTTAGAAGCTGGACGTGAGACTGAGGATTCGATCGTTGAGCGCCTAACTAACCTATGGATTAAAACAATAACTATTAATAAGGTTCGTAGCCAAGCTCATACGTTTTCGTCTGCTGGTAGTCCTCTTTACCAAAATGTAACGATTGGAGGACAAACACGACATAAGGAAGATGCTGTTAATCCTTTATCATTTCTAGTACTAAAATCAGTCGCTCAGACACACTTACCACAGCCTAATCTAACGGTTCGTTATCATGCTAACCTAGACAAGTCATTCATGAATGAAGCTATTGAAGTTATGAAATTAGGCTTTGGTATGCCAGCTTTTAATAATGATGAAATTATTATTCCATCATTTATTAAAAAAGGAGTTTCCGAAGAAGATGCCTATGATTATTCAGCGATTGGTTGTGTCGAAACAGCAGTTCCTGGGAAATGGGGTTATCGTTGTACCGGCATGAGCTATATCAACTTCCCTAAAGTGTTATTAATTACAATGAATGACGGTATTGACCCGGCTTCTGGGAAGAGATTTGCGCCTTCTTATGGGCATTTCACCCAGATGACCTCATATAAAGAACTTAAAGAAGCTTGGGACAAAACACTTCGTTACTTAACTCGAATGAGCGTTATTGTTGAAAATGCTATTGATATTAGTCTCGAAAGAGAAGTACCTGATATTCTTTGTTCAGCTTTAACTGATGATTGTATTGGACGAGGTAAGCACTTAAAAGAAGGTGGTGCAGTATATGACTACATATCTGGTCTACAAGTTGGAATCGCTAATCTTTCAGACTCACTTGCTGCGCTTAAAAAATTAGTATTTGAAGAAAAACGCCTAACCACATTAGAAGTATGGCAAGCATTGCAGAGTGATTACGCAGGTCCGCGTGGTGAAGAAATTCGTCAAATGTTGATCAATGAAGCACCAAAATATGGAAATGATGATGACTACGCGGATAGTTTAGTACGTGAGTGTTATGATGTTTATGTTGAAGAAATTGCTAAATATCCCAACACACGCTATGGACGTGGACCAATCGGTGGTATTCGCTATTCAGGAACGTCCTCTATTTCAGCAAATGTAGGCCAAGGACGAGGTACTTTAGCAACTCCAGATGGTAGGCATGCAGGAACTCCATTAGCTGAAGGTTGTTCACCATCTCATAATATGGACAAAAAGGGACCTACCTCTGTTTTGAAATCAGTTTCGAAGTTACCAACTGATGAGATTGTCGGCGGTGTACTCCTTAACCAAAAAGTCAACCCTCAAACCTTGGCAAAAGAAGAAGATAAACAAAAATTAATTGCCTTACTTAGAACATTCTTCAATCGCCTTCATGGTTACCATATCCAGTATAATGTTGTCTCACGTGAGACTTTGATTGATGCTCAGAAGCACCCTGAAAAACACCGCGATTTGATTGTGCGTGTAGCAGGTTATTCTGCATTCTTTAATGTCCTATCTAAGGCAACTCAAGATGATATTATTGCACGTACAGAACATGCTCTT

SEQ ID NO: 9460 - protein, 818 aa, Streptococcus agalactiae
MTKQLLTQKYTNDVQQNSQKHFGYLTERMYSYRDKVLDKKPFIDAERAILVTEAYQKHQEKPNVLKRAYMLQNILEKMTIYIDDETMIVGNQASSDKDAPIFPEYTLEFVVNELDLFEKRDGDVFYITEETKEQIRNIAPFWENNNLRARAGVMLPEEVQVYMETGFFGMEGKMNSGDAHLAVNYQKLLEEGLIGFEKKARKAKADLDLTKPESIDKYHFYDSILITIEAVKTYAERFAILAKKQAKTANAKRRQELLDIASICERVPYYPAETFAEAVQSVWFIQCILQIESNGHSLSYGRFDQYMYPYVKSDLEAGRETEDSIVERLTNLWIKTITINKVRSQAHTFSSAGSPLYQNVTIGGQTRHKEDAVNPLSFLVLKSVAQTHLPQPNLTVRYHANLDKSFMNEAIEVMKLGFGMPAFNNDEIIIPSFIKKGVSEEDAYDYSAIGCVETAVPGKWGYRCTGMSYINFPKVLLITMNDGIDPASGKRFAPSYGHFTQMTSYKELKEAWDKTLRYLTRMSVIVENAIDISLEREVPDILCSALTDDCIGRGKHLKEGGAVYDYISGLQVGIANLSDSLAALKKLVFEEKRLTTLEVWQALQSDYAGPRGEEIRQMLINEAPKYGNDDDYADSLVRECYDVYVEEIAKYPNTRYGRGPIGGIRYSGTSSISANVGQGRGTLATPDGRHAGTPLAEGCSPSHNMDKKGPTSVLKSVSKLPTDEIVGGVLLNQKVNPQTLAKEEDKQKLIALLRTFFNRLHGYHIQYNVVSRETLIDAQKHPEKHRDLIVRVAGYSAFFNVLSKATQDDIIARTEHAL

SEQ ID NO: 9461 - protein, 666 aa, Streptococcus agalactiae
ATGGAATTTTTACTTGACACTTTAAATTTAGAAGCTATAAAAAAATGGCATCATATACTGCCACTAGCAGGTGTAACTTCAAATCCCACCATTGCTAAGAAAGAAGGAGATATACATTTTTTCCAACGCATTCGTGATGTTCGAGAAATTATTGGACGTGAAGCAAGTTTGCATGTTCAAGTAGTGGCCAAAGATTATCAAGGAATATTGGATGATGCTGCTAAAATACGCCAAGAAACGGACGATGACATTTATATCAAAGTCCCAGTTACGCCAGATGGATTAGCAGCAATTAAAACGTTAAAAGCAGAAGGTTATAATATTACAGCCACAGCAATATACACCAGTATGCAAGGTCTTTTGGCTATATCAGCTGGAGCAGACTACCTAGCACCTTACTTTAACCGAATGGAGAACCTTGATATTGATGCGACACAAGTTATTAAGGAATTAGCGCAAGCAATAGAGCGGACAGGTTCTTCTAGCAAAATTTTAGCAGCTAGTTTTAAAAACGCTTCACAAGTAACGAAGGCCTTATCACAGGGTGCTCAATCAATCACCGCGGGACCAGATATTTTTGAATCAGTCTTTGCGATGCCATCTATTGCAAAAGCTGTTAACGACTTTGCAGATGATTGGAAAGCCAGTCAACACTCAGAACATATT

SEQ ID NO: 9462 - protein, 222 aa, Streptococcus agalactiae; identical to SEQ ID NO: 676

SEQ ID NO: 9463 - protein, 1086 aa, Streptococcus agalactiae
ATGAAAGTTTTCGCAAGTCCATCGCGCTATATACAAGGAAAGGATGCTTTATTCCAAAGTATTGAACATATCAAATCTTTAGGTCAGACTCCACTTATCCTTTGTGATGATGTTGTTTATAATATCGTTGGAGAAAGGTTTTTATCTTATCTACAAGACGATTTGTTACCACATCGTGTTTCCTTTAACGGAGAAGCATCTGATAATGAAATCAATCGTGTCGTTGCTGTTGCGAAAGAAAAGAATAGTGACCTTATTATTGGACTTGGTGGTGGAAAAACTATTGACTCTGCAAAGGCAATTGCAGATAAAGTTAATTTACCAGTGGTCATTGCACCAACAGTAGCTTCAACAGATGCCCCAACATCAGCGTTATCAGTAATCTATACAGATGAAGGAGCTTTTGAAAAATATATTTTTTATTCAAAGAATCCAGACTTAGTTTTAGTTGATACTCAAGTAATTGCCCAAGCGCCAAAACGTTTACTAGCTTCTGGGATAGCAGATGGCTTAGCTACTTGGGTTGAAGCGAGAGCAGTCTTACAAAAAAATGGGATAGCGATGGCTGGCGGTAGACAGACTTTAGCGGGCGTGGCAATTGCCCAAGCATGTGAGCGTACTTTATTTAATGATAGTTTACAAGCTTTAGCGGCTTGTGATGCCAAAGTGGTTACAAAAGCTTTAGAAAATGTTATTGAAGCTAATACCTTACTTAGTGGTTTAGGTTTTGAAAGTGCAGGATTAGCTGCAGCTCATGCTATTCATAATGGTTTTACTGCCTTGAGTGGAGATATTCATCACTTAACCCATGGTGAAAAAGTTGCCTATGGAACGTTGACGCAACTTTTCCTCGAAAATAGACCAAAGGAAGAAATTGATCGCTACATTAATCTTTACCAAGCGATTGGAATGCCAACTACACTTGCAGAACTCCATTTGGGTGATGCAACATATGAAGAACTTTTAAAAGTTGGTCAGCAAGCAACAATTGAAGGTGAAACAATACATGAAATGCCATTCAAAATTAGTGCAGAGGATGTCGCTGCAGCCCTGTTAACGGTTGACCGTTATGTTTCAAATCATCAA

SEQ ID NO: 9464 - protein, 362 aa, Streptococcus agalactiae; identical to SEQ ID NO: 678

SEQ ID NO: 9465 - protein, 924 aa, Streptococcus agalactiae
ATGTCAAAAATTTATAATTCTATTACAGACTTAATCGGAAATACACCCATTATTCAATTACATCATATTGTTCCAGAAGGAGCTGCAGAGGTGTACGTTAAGTTAGAATCCTTTAACCCAGGTTCATCTGTCAAAGATCGTATCGCTCTAGCTATGATTGAAGATGCAGAGCAAAAAGGGATTCTTAAAGCCGGAGATACAATCGTAGAACCTACATCTGGTAATACAGGTATCGGTTTGGCTTGGGTAGGAAAAGCTAAAGGGTATAATGTTATTATTGTTATGCCAGAAACCATGTCAATTGAACGTCGTAAAATCATTCAAGCCTATGGTGCTCAATTAGTACTAACACCTGGTAGTGAAGGGATGAAGGGAGCTATTGCTAAGGCAAAAGAAATTTCTGCAGAGCAAAATGCTTGGCTACCCCTGCAATTTAATAATCAAGCCAATCCAGAAATCCACGAAAAAACGACTGGTAGGGAAATTATCGAGACTTTTGGTGAAAAAGGTTTAGATGCTTTTATCGCAGGTGTGGGAACTGGTGGGACAATTACTGGTGTCTCTCGTGCATTAAAAAAAGTCAATCCTGATGTCGCTATTTATGCTGTAGAAGCTGATGAATCTGCAATCCTTTCTGGTGAGCAACCTGGGCCTCATAAAATACAAGGGATTTCTGCAGGTTTCATTCCAGAAACATTGGCTACAGATTCTTATGATCATATCATTCGCGTTACATCTGACGATGCTATTGAAACAGGACGTATCATCGGCGGACTAGAAGGTTTCCTCGCAGGAATTTCTGCTTCAGCTGCTATTTATGCTGCTATTGAAGTGGCCAAACAACTAGGAAAAGGGAAAAAGGTTTTAGCTCTTCTCCCTGATAATGGCGAACGTTACTTATCAACAAGCCTGTATGATTTTGAA

SEQ ID NO: 9466 - protein, 308 aa, Streptococcus agalactiae; identical to SEQ ID NO: 680

SEQ ID NO: 9467 - protein, 642 aa, Streptococcus agalactiae
ATGAACTATAAAACGATAAAATCAGACGGAATTGTCGAAGAAGAAATTAAAAAATCGCGATTTATTTGTCATCTAAAGCGAGTAGAGTCCGAAGAGGAGGGGCGTAATTATATTACGCAAATCAAGAAAGCGCACTACAAAGCCAATCATTCGTGTTCAGCTATGGTTATTGGCGAAAAAGGGGATATAAAACGATCTAGTGATGATGGAGAACCTAGTGGTACAGCAGGTATCCCTATGCTAACCGTACTTGAAAAGCAAGGCCTGACAAATGTTGTTGCCGTCGTTACACGGTATTTTGGAGGTATCAAATTAGGCGCAGGGGGGCTTATTCGTGCCTACTCTGGTAGCGTAGCTAATACCATCAAAGAGATCGGGGTAGTAGAAGTTAAAGAACAAATTGGTATTCGTATTCAATTAACTTATCCTCAATATCAAACTTTTGACAACTTCCTAAAAGAGCACCACCTTCAGGAGTTTGAAACAGAATTTTTAGAAGCTGTAACCTGTAAAATATACGTTGACCCTAAGGAATTTGAACACACAATAACTAATTTGACAGAGTTCTACCAAGGAAAAGCTTTGTTAACTGAAGAAGGGAGTCAAATTGTTGAAATTCCCTTTAAGGCTGAAACCGATAAA

SEQ ID NO: 9468 - protein, 214 aa, Streptococcus agalactiae; identical to SEQ ID NO: 682

SEQ ID NO: 9469 - protein, 1287 aa, Streptococcus agalactiae
ATGGAAAATTATTTAGGTAGGCTTTGGACAAAAGCACAATTATCTGAGCAACTTAGAAAAATTGCAATTAGCTTGCCATCTTTTATAAAGAAAGGAAGCGACTATATTTGTACCCGATGCTCTAGTTCTGTTGCTAAAAATTGCCAATTACCAACTGGAAATTATTATTGTAGAGAATGTATAGTTTTTGGAAGAGTTACTAGTAATGAAAATTTATATTATTTCCCACAAAAAACATTTTCTAAAACGAATTCTTTAAAATGGAAAGGGGAACTGACACCTTATCAAAATGAGGTTTCAGAAGAGTTGTTGAAAGGTATTTCAAGTAAGGAAAATCTTCTTGTTCATGCTGTGACAGGGGCTGGTAAAACAGAAATGATATACCACTCTGTCGCCAAAGTAATTGATACTGGAGGAAGCGTTTGTATTGCCAGTCCTAGAATTGATGTTTGTTTAGAATTGTATAAGCGACTTTCAAACGATTTTAGATGTGCCATAACATTAATGCATGGAGAATCTCCTTCTTATCAGAGATCCCCTTTAACTATTGCCACAACACATCAATTGTTAAAATTTTATCATGCTTTTGATTTGCTAATTGTTGATGAAGTTGATGCTTTTCCGTATGTCGACAACCCGATACTATACCAGGGTGTAAAACAGGCCTTAAAGGAAAACGGAACAAGTATTTTTCTGACTGCAACTTCAACGACTGAGTTAGAAAGAAAAGTTGCAAGAAAAGAACTAAAAAAATTGCATCTAGCTAGGAGATTTCATGCCAATCCGTTAGTGATACCCGAGATGGTTTGGGTAAGTGGTATCCAGAAAAGCTTGCAGACACAAAAACTACCTCCCAAATTATATCAGTTGATAAATAAACAGCGACAAACGAGATATCCTTTGTTATTATTTTTCCCCCATATTTCAGAAGGTCAAGTATTCACCGAAATTTTAAGACAAGCCTTTCCTATGGAAAAAATTGGTTTTGTTTCAAGTAAGAGCACATCTAGGTTAAAGTTAGTGCAAGATTTTCGAGATAACAAATTGTCTATCCTAGTGTCAACTACCATTCTAGAGAGAGGAGTAACTTTCCCTAGCGTCGACGTTTTTGTTATACAAGCAAATCATCATTTGTTTACGAAAAGTTCCTTGGTACAAATTTCAGGAAGAGTTGGAAGAGCATTAGAAAGGCCCGAAGGGCTCCTTTACTTCCTTCATGATGGGAAAAGTAAATCGATGCACCAAGCTATAAAGGAGATTAAAAACATGAATCATATAGGAGGATTT

SEQ ID NO: 9470 - protein, 429 aa, Streptococcus agalactiae
MENYLGRLWTKAQLSEQLRKIAISLPSFIKKGSDYICTRCSSSVAKNCQLPTGNYYCRECIVFGRVTSNENLYYFPQKTFSKTNSLKWKGELTPYQNEVSEELLKGISSKENLLVHAVTGAGKTEMIYHSVAKVIDTGGSVCIASPRIDVCLELYKRLSNDFRCAITLMHGESPSYQRSPLTIATTHQLLKFYHAFDLLIVDEVDAFPYVDNPILYQGVKQALKENGTSIFLTATSTTELERKVARKELKKLHLARRFHANPLVIPEMVWVSGIQKSLQTQKLPPKLYQLINKQRQTRYPLLLFFPHISEGQVFTEILRQAFPMEKIGFVSSKSTSRLKLVQDFRDNKLSILVSTTILERGVTFPSVDVFVIQANHHLFTKSSLVQISGRVGRALERPEGLLYFLHDGKSKSMHQAIKEIKNMNHIGGF

SEQ ID NO: 9471 - protein, 663 aa, Streptococcus agalactiae
ATGACTTGTTTGTTATGTCATGAAATAGATTTATCGCAATTAACTTTTGTGGAACTTATGCTTCTAAAACCAAAGCAAAACGTAATTTGTCAAACGTGCAAGGGTAGTTTTGAAGCACTTAGTAGGGAGATGGGTTGCCAAACATGTTGCAAGCAAATTCCCCAAAAACAATGTCAAGATTGTATTTATTGGGGTAAAAAAGGTATAGAGGTAAATCATTTTTCCCTTTATAGATACAATGAAGCAATGAAAAAATATTTTTCTCTTTTTAAATTTCAAGGGGATTATTTGTTGAAAGATGTTTTTACAAAAGAAATAAAAGCTGCTCTAAAAAAGTATAAGGGCTACACTATAGTGCCAGTTCCCTTGAGTCATGAAGGATACCAAAATAGGCAATTTAATCAAGTGATTGCTTTTCTACAATCGGCAAATATACCTTACAAAAATATTCTTTCTAAAAAAGATGGAGGTAAGCAATCGGCTAATAATAAAGAAGAAAGACTCAAACAAGTTCAGCAATTTACATTAAAAAATGAGGCTGAGTTAGGGGACAACCTTTTAATTGTTGATGATATTTATACAACAGGCGCAACAATAGCACAAATCAGGAAACTATTAGAAGAAAAAGGTATAAAAAATATAAAAAGTTTTTCATTAGCACGC

SEQ ID NO: 9472 - protein, 221 aa, Streptococcus agalactiae; identical to SEQ ID NO: 686

SEQ ID NO: 9473 - protein, 552 aa, Streptococcus agalactiae
ATGATTAAATACAGTATTCGTGGTGAAAACATCGAAGTAACAGAAGCTATTCGTGAGTATGTTGAGACCAAACTCTCTAAAGTTGAAAAATACTTTAATGAAGCACAAGAATTAGATACTAGAGTCAACCTCAAAGTATACAGAGAGAAGACCGCAAAAGTTGAAGTAACAATCTTAATAGATTCTATTACTTTACGAGCAGAAGATGTTTCACAAGATATGTATGGGTCAATTGACTTAGTTGTTGATAAAATTGAGCGTCAAATTCGTAAAAATAAAACTAAAATTGCGAAAAAATATCGTGAAAAGATTCCAGCAAGTCAAGTTTTCACAACAGAATTTGAGGCTGAGCCAGATGAAGAAGCAGTAAGCCAAAGAATTGTACGTACTAAGAATGTTAATCTAAAACCAATGGATGTTGAGGAAGCATTGTTGCAAATGGAACTTTTAGGTCATGATTTCTTTATCTATACAGATGCAGAAGATAATACGACAAATGTCCTTTACAAGCGTGAAGATGGCGAACTAGGTTTAATTGAAGCTAAAGGAAAT

SEQ ID NO: 9474 - protein, 184 aa, Streptococcus agalactiae; identical to SEQ ID NO: 688

SEQ ID NO: 9475 - protein, 456 aa, Streptococcus agalactiae
ATGAGAAAATATATAAAATGGTTAATTCCCATATCAATTTTTGGGATGATACTTGGAGGCTGTCAAATGAATAGTGAACATAAAAGTCAGTCAAACGAAGTAAAAAATAGCAAGCAATCAGAAGTGAAGAAAGATAAAAAAATGACAAAAAAAGAACAATTAGCCTATCTCAAAGAGCATGAGCAAGAAATCATAGATTATGTAAAATTACATAACAACCAAATTGAGTCCGTTCAATTCGATTGGTCAAGTGTAAAAGTAGAACAAAGCGGGAATGGAACTCCACAAGGGGGTGATTATAATCTTTCACTGAGAGGAAAGTTTAATCATCTACAAAATTCAAAATTAATAGTTGATTTTTATTTAGCTCATAAAAATGATATCCCAAATATCAAATCAATGGGAATGCTAAATAAGCCGTATATACATAAAAATGGTATTTGGCACATTTATGAA

SEQ ID NO: 9476 - protein, 152 aa, Streptococcus agalactiae; identical to SEQ ID NO: 504

SEQ ID NO: 9477 - protein, 1631 aa, Streptococcus agalactiae
TTGAGTAATTGGAACTTAGATAATTTTGATAACTTACATAGCTCTTTAGCAGAAAGTGCATATAATAGTCGACCTAATTCATTTCCTGAATTATTTGAGACTGACTCAGTAACAGAAGTAAAATTTTCTCAACCCTCAGAAGATAACAAAGGTCAAATCACACAGGGTGGCACTAACCTCCCCAATGATGGTATTGTCTACCTGCAACCAGATAAGTCCTTAAAATCTATTGATGAAAATGTAAAGGTCCTCATTCCAGATGTCAATGGAGGCTATCACACTGAGCATTATGTTACTCATTCTTATCAAAAAGGTGTGCTTACTGACGATAAGGCAGGTTTTAATGCTTACTACCTGTCAGATACTGAAAAAATAGATAGCACTACAAAGCACACTTATCTAGCCATTCGTGGTAGTGATGGGATTGGTCTAGATACACTAAACGATTGGGTTAGTAACAATGCAATGTTTGCTGTCTCTAACAAGTATATTCCACAAGCGAAATTGGCTAATAAGGCTATGAAAGAAAAAATTGCCGAGCTAAAAGGAAAAGCGCCTGGAGCTATTATGGATGTTACTGGTCACTCACTCGGTACGATTGTATCTTCTCAAGCAGTTGTTAATCTTAGCTATGCAGAATTGGAGAATGTTGGTCAAGTAGTCCTTTTCGATGGCCCTGATGTATCAAGAAGCTTGGAAAAAATGGAAGGCATTTCTGCTAAAAAAATCCAAGAAGCTGGGAAGCATGTTACCTACTATGTCAATCCCTTTGATATAGTTAGTATGCTTAATCGTGAAAAGCCATGGAAAGACCAATTCGGGAAAGTAAATGTCATTGTTCCTAGTAAATATACGGGTACTTTTGATGAGCAATCTTCTCACGATTTTGGTGCCTTCCAAATTGATAGTAGCGGAAATCCTTTAGTTGCTTCTGAAAGCTATCATCCAGAATTATTAACATCTGGTCAAGACTTAGCTAGACTCGAAAAAAAATTCATAAAGAATCTTTTAGGAGAGCATTATGATTCGGATAAGCTAGGACCAGTACTCAAAGGCGCTCTGACTGGGGACCTGACTCGACTAATGCAACATTAAAAGCTTGTGGTATCAGTGTCACTGTAAACGAAGCTAAAAAACTGTACGATAACTTCCAAAAAGACTACAAAGCCATAATTTCCAAAGCTAAAAAAGATGGCCTCGAGTGGGATCGCAAAAACATCGCAAGCTTCCATAGTAGGATCAAATCAGCATCAGGCAGTCAACGGATTTTACTTAGAACTCAAATGCTCTATATGGCAACGCAATTAGCAGAAGCAGATGTTTCAGAAAAAGTCTCTGCAACAAAAAAACATATTAGTGAAGCTAAGGATACGATTGTAGAAATATCGACATCCACTATTTCATCAGCTGAAATAATGGCTATGCACCTTGACCAATCAGAAGTTGATGCTCTGGTTTCAGATATAAAAATGTCAACAGTTTGGAATGATGGCGTAGAGACTTCTGATTATGAAGCACTTGATCACTATAAAACAAAAATGACCACATTTACGACCAATTTGGTAACAGTTGCACAAAATTTAACAGCTCAAGATGAGCAACTAGCTGGTGATATTGTCACGAACTTATCC

SEQ ID NO: 9478 - protein, 544 aa, Streptococcus agalactiae
MSNWNLDNFDNLHSSLAESAYNSRPNSFPELFETDSVTEVKFSQPSEDNKGQITQGGTNLPNDGIVYLQPDKSLKSIDENVKVLIPDVNGGYHTEHYVTHSYQKGVLTDDKAGFNAYYLSDTEKIDSTTKHTYLAIRGSDGIGLDTLNDWVSNNAMFAVSNKYIPQAKLANKAMKEKIAELKGKAPGAIMDVTGHSLGTIVSSQAVVNLSYAELENVGQVVLFDGPDVSRSLEKMEGISAKKIQEAGKHVTYYVNPFDIVSMLNREKPWKDQFGKVNVIVPSKYTGTFDEQSSHDFGAFQIDSSGNPLVASESYHPELLTSGQDLARLEKKFIKNLLGEHYDSDKLGPVLKGALTGDLTRLIATLKACGISVTVNEAKKLYDNFQKDYKAIISKAKKDGLEWDRKNIASFHSRIKSASGSQRILLRTQMLYMATQLAEADVSEKVSATKKHISEAKDTIVEISTSTISSAEIMAMHLDQSEVDALVSDIKMSTVWNDGVETSDYEALDHYKTKMTTFTTNLVTVAQNLTAQDEQLAGDIVTNLS

SEQ ID NO: 9479 - protein, 270 aa, Streptococcus agalactiae
ATGTCCAAAGAATTGAAATTGCCCTTGAATGAAATGTTGAAAGAACAAGAAAGAATAGCTATTAAGGCAATAGTTGCTACAGCAAAAAGCACTATTACGGATACTGGAACAAATTTAAAAGCAACTTTAGAGTCAGATGCCCAAGACCTAAAAAACTATGCATCCACCTATAACGCCAATATCACGGATGGTCTTGAAGGCCAGTCAGCTCAAGCAGCATCTGATTTCTTGACACAACTTCCAAAACCAGAGTTAGATAATCCAGTCAAT

SEQ ID NO: 9480 - protein, 90 aa, Streptococcus agalactiae; identical to SEQ ID NO: 508

SEQ ID NO: 9481 - protein, 348 aa, Streptococcus agalactiae
ATGATAGATACAAAAAAACTGCAAGAACTCGATCAAGAATATGATCAAAATCTCAGAAACATTTATCGTAACAGAGAGCAACTAGAAGATGACTTTCACTTGTTTATGGCAAGAACAGACAGCCTAAAAGAGTCTGTCTATCAAGCAACTTTAGGACAAGGTTGGGAATTACCCCAAGAAGCTCATGCACACCTATATAATATGGATGATAATAAGGATACATTCATATCAGAATTCAATGAATATATGGAAAAGCTTGAAGAAAAGGAAATAGATCTTCGAAGAGTTTATAATGATAGAGTAGATGAATTGTATCAGAAGGCTAAGCAAAACGAAGCAAAAAAAGGA

SEQ ID NO: 9482 - protein, 116 aa, Streptococcus agalactiae; identical to SEQ ID NO: 510

SEQ ID NO: 9483 - protein, 579 aa, Streptococcus agalactiae
ATGAACAATAAAAACAAATGGACTATAATTTTACTTATTTTTACTATCATCGTAATTGATGTTAGCTTACTATTTGGCGGGAATCGTTTAAGTTTACCAATCAAATTATTAATTTTATTAGTAACCAGTATAGCAGAATTTTGTTCGATTTTTATAATGATAAAAGTTCCGACTCCTCAAAAATATAAGAAAGAACCATTTGGATTAAAAGCAAAATTTTATTCTATTGTACTCTTTCTCTCGACTATTCTTTATACAATTGGGATATGGAATGTGACGCCAGCTTCCCCATACAATGTTAAAGAATCAATTCTTGGAGTTGGCATTTTAATACAAGTAGTTTTCTTCATTTATTTTCTATTAAAAAAAATTAACGAAAGTCCCGATGAACGCTTTTATAGTAATTTAGCATTGTCAGCTTCTTTGATGTTTTTGATATCAATAATGTTATTAATTCTTATAGCTATTTACCTTAATATATATGGAACGTTAGAGTTAAAATCAGGCTACCTTTATATTATGGTAGGTTTATTATTACTAATGTTTGCTGTTACATATTACTTTCTTGAGGGACGGAGA

SEQ ID NO: 9484 - protein, 193 aa, Streptococcus agalactiae
MNNKNKWTIILLIFTIIVIDVSLLFGGNRLSLPIKLLILLVTSIAEFCSIFIMIKVPTPQKYKKEPFGLKAKFYSIVLFLSTILYTIGIWNVTPASPYNVKESILGVGILIQVVFFIYFLLKKINESPDERFYSNLALSASLMFLISIMLLILIAIYLNIYGTLELKSGYLYIMVGLLLLMFAVTYYFLEGRR

SEQ ID NO: 9485 - protein, 216 aa, Streptococcus agalactiae
ATGGGGAAAGAAACAAAAATTATCAGTTCTTTAAAACAGGTTAGAGAAGATATCGGAATGACTCAACAAGAGTTAGCTATTCGGATAGGTGTTAGGAGAGAAACAATTGGTCATTTAGAAAATAACAGGTATAATCCTTCTCTAGAGATGGCACTTAAAATTGTTAAGATTTTCGACATGAAGATAGAAGATATTTTTCAATTAAGGAAAGAGGAT

SEQ ID NO: 9486 - protein, 72 aa, Streptococcus agalactiae
MGKETKIISSLKQVREDIGMTQQELAIRIGVRRETIGHLENNRYNPSLEMALKIVKIFDMKIEDIFQLRKED

SEQ ID NO: 9487 - protein, 558 aa, Streptococcus agalactiae
TTGAATAAATTTTTTTTAGAATCAGAGAGACTTATTATAAGGCCACTAGAAGAAAGTGATTATGATAGTTGGTATACTAGTTTTATGAATCGTGGACCATCTTTAACTCCATTTGATGATGGGATACTTGATATGTCTATGTGTGACATTAATTGGTTTAAAAATTTAGTAAATTTACAAAGGAAAGAATGGGAAAGTGACATAGTATATATATTTGGTGTTTTTCTAAAAAGCGGTGAGCACGTAGGAATGTTAAATATTGTTACCCTTGCAAGAGCAGATATGCAATGGGGAGAATTGGGATATGTTTTTCATAATCAATTTTGGAGTAATGGCTATGCATTTGAGTCAATCTTGGCATTACTTAATAGTACTTATGAAAAATTGGGTTTTCATCATATTGAAGCACAGATTACTCCTGGGAATGAACGATCGGAAAAGTTGGTTAGAAGATTGGGATTAACCTATGAGACAACTCGAAAAGATTTTTCATTTGAGAATGGAAAATGGACAGATAAACTGATTTATAGTATAAATTTACATAATAATAATTTAGAA

SEQ ID NO: 9488 - protein, 186 aa, Streptococcus agalactiae
MNKFFLESERLIIRPLEESDYDSWYTSFMNRGPSLTPFDDGILDMSMCDINWFKNLVNLQRKEWESDIVYIFGVFLKSGEHVGMLNIVTLARADMQWGELGYVFHNQFWSNGYAFESILALLNSTYEKLGFHHIEAQITPGNERSEKLVRRLGLTYETTRKDFSFENGKWTDKLIYSINLHNNNLE

SEQ ID NO: 9489 - protein, 576 aa, Streptococcus agalactiae
ATGAATAATTTGGATACACTATATTGTAAATTAGCAATGTGCAACACAGTACTAACGGAAAGATTACGACTCCAGCCTGTTGAATTAACTAATGTAAATGATTTTTTAGAATTTTCATCTGATTCTGAAACAGTATTCTATATGCAACGTTATAAAGCTAATACCGTAGAAGAAGCACAAGTCGTTTTAGCAAATGTTTGTATGAAATCACCATTAGGAATTTATGCAATGATTGAAAAAGAATCACAGAAGATGATAGGTATTATTGAATTAGAAATCAGAGATGAATTTTCTGCAGAATTTGGTTATATTTTAAATAAAAATTATAATGGAAAAGGTTATATGACAGAAGCTTGTTCAAAATTGATGTCAATTGGATTTGAACATCTAGACTTGGAAAGAATTTATGCTAGATTTGACATTAATAATAAAAAATCTGGAAATGTTATGGAACGGATAGGTATGAAAAAAGAAGGCGAGCTTCGTCATCTTGCAAAAAATCCAAAAGGTGAGTGGAAAACAAGAGCGTATTATTCTATTTTAAAAGAAGAATATTTTAATAAAGTTAATACTAAA

SEQ ID NO: 9490 - protein, 192 aa, Streptococcus agalactiae
MNNLDTLYCKLAMCNTVLTERLRLQPVELTNVNDFLEFSSDSETVFYMQRYKANTVEEAQVVLANVCMKSPLGIYAMIEKESQKMIGIIELEIRDEFSAEFGYILNKNYNGKGYMTEACSKLMSIGFEHLDLERIYARFDINNKKSGNVMERIGMKKEGELRHLAKNPKGEWKTRAYYSILKEEYFNKVNTK

SEQ ID NO: 9491 - protein, 678 aa, Streptococcus agalactiae
GTGGGTGATGTCGTTGAAAATTTTACGGAAGGTAAAAATCCGAAGATTGATACACTTAATGGGAAAACAGTTAGAATAGAAAAAATAAATCCAGATCATTTTGAAGACTTATTTCAAGTTTATGGAGAATTGTCTACTGAAGATAGTTTAACTTATATATCTTTTAGCAAATTTAATAGTAAGAATGAATTTGATGTCTTTTTCCAAACTCTATTAAAATCAGAAGATCCTTATTATTTAGCTATTGTTGATAATAATACTGGTAAAGTATTAGGGACTTTTTCATTAATGCGTATTGATACAAAAAATAGAGTTGTTGAAATGGGATGGGTGGTTTATTCATCAAAACTAAAACAAACAAGGATAGCAACAGAAGCTCAATATTTGGTTATGAAATATGTTTTTGAAGAACTCTGTTACCGCCGTTATGAGTGGAAATGTGATAGTTTGAATGCACCATCTAATAATTCTGCAAAACGACTTGGTTTTACTTTTGAAGGAACTTTTAGACAAGCTGTCGTATATAAGGGTCGTAACAGAGATACAAATTGGTATTCTATTTTAGATAAAGAGTGGCCAGAGAAAAAAACACGGTTTGAAAAATGGCTAGATGATTCAAACTTTGCTGTAAATGGGTATCAAATCAGATCACTATCAAGCATTGAGCAGAAGACAAAA

SEQ ID NO: 9492 - protein, 226 aa, Streptococcus agalactiae; identical to SEQ ID NO: 522

SEQ ID NO: 9493 - protein, 945 aa, Streptococcus agalactiae
ATGATAAAAACAAAGTTTAGTGATCCACTGGAACAATTAGCCAAAAAAAGGAAAAGGAAAACATTATTCAAGACCGTAGTATTGGCATTAATAACTGTACTATTAGTAGTTGGAATAGCTTTTAAAGGATTTACATATTTAACTTCAAAAAATGGTCAAAAAACATATCATAACTTTGAACTACTTTCTGAAATAGCATATCCAAATATTTCCTATGATAGTCTCTATTACCAGCCAAGCGGTCAGTTTACTGGTAAAGTACATGCTGATAGATTTAAAGATATCGATGGGGTTCAAATTCCATATTCTAGTTTTGAAGAAAATTATAGTATCTCAGGTACTTTTGGCACAAATGCTGATGAAAAATCAGAAAAGAATGGCTTGTATGATCGAGGTACTAGACAAAAAGTTCCACAATTTTTCAATAAAAATGTTAAGTATAAAAAAGGAGAAGCCAAAACAACTCCAACAAATGATTTAAAATATGTAAATAAATTGAATAATGATCTTATTGAAATTGCAATAACTTTTGATAAGTCCTATAGTTACAAAGAAATAAAAACAATGATACCAAATAATATAAAACAAAATTGGTTATGGATAGGTACAAGCACAGAATTAGATACATCATATTGGCCAACAAAGTATCAATTCGGTACAGATCCTGAAACTTTGAATACACCACAAATATTCATAGATAAAATAAAAGAAAACTTAAAAGGTAACTCAAAAGTATACTTTAATAATATAAATATCTACTCAGATTTAGAAAAGTATGCCAAAAAATACGACAAGGTAAATAATAGCGACAAATTAAAATTTTCGGGAATAATATTAACAGGTAAAGCCGAAAACTTTAAACAACTTAAAGAAAAAGAATGGGTACATGCTTCAAGTATAGGGGCAAACATAGAATATAAGCCCTATTATAAATTAGATAAAGAA

SEQ ID NO: 9494 - protein, 315 aa, Streptococcus agalactiae; identical to SEQ ID NO: 524

SEQ ID NO: 9495 - protein, 489 aa, Streptococcus agalactiae
ATGTCAATTTTAGATGACTATGAAAAAGAATTACTAGTTATTTCACATCAAATAATAGCTTACCTTATTAAGTCAGGTGTTAATCCTAGTCAAGCACAGGATGTTACTCAAGACGTCTTTTTACAAATACTAGAATCTGATTTCTCCCTTCCACTTGATAAAATAAAAGCTTGGATGTATCGTACTACAATTAGGAGGTATATTGATCTTTATCGAAGAAATAAACGCTATAACGAAATCCTGCAAAAAGAATTCTTTATAGAAAATAATTTGTATTACACCGAATCAGAGAAGTTTTTTGAATTACATGAAGCAATATTACACTTGAAGAAAGATTATCAAACTTTAATAGATTTATATTATTTTAATGATTTTTCAATTAAAGAAATATCTGAAATTACTGGACAATCACAAAGTACAATTAAAATAAGACTTATGCGAGCTAGAAGAGAAGTTAAAAAATATTTAGAAAAGGATAATTTTAAAATA

SEQ ID NO: 9496 - protein, 163 aa, Streptococcus agalactiae; identical to SEQ ID NO: 526

SEQ ID NO: 9497 - protein, 159 aa, Streptococcus agalactiae; identical to SEQ ID NO: 4875

SEQ ID NO: 9498 - protein, 53 aa, Streptococcus agalactiae; identical to SEQ ID NO: 4876

SEQ ID NO: 9499 - protein, 605 aa, Streptococcus agalactiae
ATGAAAAATAATATTATTTTTTCTATGAACAGTATATTAATGACCAAGAGATGCCAAAAGGAAAACAAAAAGTTATTTTATCCGCTATAGAGCTCTTTGCCTCACAAGGCTTCCATGGAACTTCCACTGCTCAACTAGCTAAAAATGCAGAAGTTAGCCAAGCAACTATATATAAATATTTTGAAACTAAAGACAAGCTTTTGGTCTTTATTCTCGAGTTAATCGTACAAACTATTGGACGCCCCTTCTTTACAGAATTATCTACATTTTCTACTAAAGAGGAACTAATTCATTTCTTTGTACAGGACCGTTTTAAATTTATTGAAAAAAATAATGATCTCATTAAAATATTGATGCAAGAATTATTAATCAATAGTGAAACATCAACTATTTTTACTAAGCTAATAAATTCAACTGATCCAAACATTACTAAAATTTTCAACTGTTTAAGTGAAGGAAATTCGTTGAATAAAATGGAAATACTTCGAGCAGTAATCGGACAGTTCATTACTTTCTTTATTCAATTATATATCCTTAATATAAAGCCTGAAAATCTAGAGGAAGAACTAAAACAAATAGAAAAACAAATATTAAAATTACTGAGC

SEQ ID NO: 9500 - protein, 202 aa, Streptococcus agalactiae; identical to SEQ ID NO: 528

SEQ ID NO: 9501 - protein, 107 aa, Streptococcus agalactiae
ATGTACGTAAGGATTACCTAACGTTTCTTCAAATCTTCTGGTACTTCTTCTATTTTTAATATTTTACCATCGCAAATATCTTTGGACTAAAACGATACCGTAAAGTA

SEQ ID NO: 9502 - protein, 37 aa, Streptococcus agalactiae
  VARIANT 24: Xaa = Any Amino Acid
MYGQGLPNVSSNLLVLLLFLIILXIANIFGLKRYRKV

SEQ ID NO: 9503 - protein, 543 aa, Streptococcus agalactiae
ATGCTAAGCAAAAGAATTTCTGCAGAGCAAAATGCTTGGCTACCCCTGCATTTTATATCAAAAGCCAATCCAGAAATCCACGAAAAAACGACTGGTAGGGAAATTATCGAGACTTTTGGTGAAAAAGGTTTAGATGCTTTTATCGCAGGTGTGGGAACTGGTGGGACAATTACTGGTGTCTCTCGTGCATTAAAAAAAGTCAATCCTGATGTCGCTATTTATGCTGTAGAAGCTGATGAATCTGCAATCCTTTCTGGTGAGCAACCTGGGCCTCATAAAATACAAGGGATTTCTGCAGGTTTCATTCCAGAAACATTGGCTACAGATTCTTATGATCATATCATTCGCGTTACATCTGACGATGCTATTGAAACAGGACGTATCATCGGCGGACTAGAAGGTTTCCTCGCAGGAATTTCTGCTTCAGCTGCTATTTATGCTGCTATTGAAGTGGCCAAACAACTAGGAAAAGGGAAAAAGGTTTTAGCTCTTCTCCCTGATAATGGCGAACGTTACTTATCAACAAGCCTGTATGATTTTGAA

SEQ ID NO: 9504 - protein, 181 aa, Streptococcus agalactiae
MLSKRISAEQNAWLPLHFISKANPEIHEKTTGREIIETFGEKGLDAFIAGVGTGGTITGVSRALKKVNPDVAIYAVEADESAILSGEQPGPHKIQGISAGFIPETLATDSYDHIIRVTSDDAIETGRIIGGLEGFLAGISASAAIYAAIEVAKQLGKGKKVLALLPDNGERYLSTSLYDFE

SEQ ID NO: 9505 - protein, 835 aa, Streptococcus agalactiae
ATGGGTATCGGTATTATTATTGCCAGCCATGGTAAATTTGCTGAAGGTATTCATCAATCAGGTTCAATGATCTTTGGTGAACAAGAAAAAGTTCAAGTTGTAACTTTCATGCCAAATGAAGGACCAGATGATTTGTATGGACACTTCAACAATGCTATCGCACAATTTGATGCTGATGATGAGGTGCTTGTGTTAGCTGACCTTTGGAGTGGGTCACCATTTAACCAAGCAAGCCGTGTTATGGGAGAAAATCCTGAACGTAAAATGGCTATCATCACTGGTCTCAATTTGCCAATGCTTATCCAAGCCTATACTGAGCGTATGATGGACGCTAATGCAGGTGTTGAACAAGTTGCCGCAAATATTATTAAAGAGTCTAAGGAAGGTATCAAAGCCCTTCCAGAAGAACTTAATCCTGTTGTAGAAGCTACTCCTGTAGCAGGTGTTCCTGCAGATGTTCCTGCGGAAGTTAAACAAAGTGGATCTATCCCTGAAGGAACTGTTATTGGAGATGGCAAGCTTAAAATTAATCTTGCTCGTATTGACACACGTCTTTTACATGGTCAAGTTGCAACTGCATGGACTCCAGCATCAAAAGCAAACCGTATTATCGTTGCTTCTGATGAAGTTTCTAAAGATGAACTTCGTAAACAATTGATTAAGCAAGCTGCTCCTGGAGGAGTCAAAGCAAACGTTGTCCCAATTAGTAAATTAATTGAAGTAGCTAAAGACCCACGTTTCGGAAACACACGTGCCTTGATCTTATTTGAAACTGTACAAGATGCACCGTGCAATTGAAGGTGGTGTGGAAATCCCTGAATNNNNNTTAATTAAT

SEQ ID NO: 9506 - protein, 279 aa, Streptococcus agalactiae
  VARIANT 263, 275, 276: Xaa = Any Amino Acid
MGIGIIIASHGKFAEGIHQSGSMIFGEQEKVQVVTFMPNEGPDDLYGHFNNAIAQFDADDEVLVLADLWSGSPFNQASRVMGENPERKMAIITGLNLPMLIQAYTERMMDANAGVEQVAANIIKESKEGIKALPEELNPVVEATPVAGVPADVPAEVKQSGSIPEGTVIGDGKLKINLARIDTRLLHGQVATAWTPASKANRIIVASDEVSKDELRKQLIKQAAPGGVKANVVPISKLIEVAKDPRFGNTRALILFETVQDAXRAIEGGVEIPEXXLIN

SEQ ID NO: 9507 - protein, 810 aa, Streptococcus agalactiae
ATGACAAAGAAAATTATCGCCGTAGATTTAGACGGTACTCTATTACATAATAATAACACTATTTCTGACTACACCGCTGATACACTTCGAAAAGTTCAAGCTCAAGGACACAAAGTAATTATTACAACCGGACGCCCATACCGTATGGCACTCGCTCATTATTTACGCCTAGATTTAAAAACACCAATGATAAATTTTAATGGTGCTTTAACTCATATCCCCGAAAAAAAGTGGGCGTTTGAGCGTAGTGCAACGATTGATAAAAAATTACTCCTTGAAACCTTAAATTTATCAGATGCTATCCAAGCCGATTTTATTGCTAGCGAATACCGTAAAAATTTTTACATTACTATGGATAATCGTGATAAAATTAACCCACAATTATTCGGTGTCAATGAAATTACTGATAAAATGGCATTAGATGTTACTAAAATCACACGCAATCCAAATGCTCTATTGATGCAAACACGTCATAAAGATAAGTATGAGTTAGCTAAAGAGTTACGACAACATTTTAATCACGAACTAGAAGTAGATTCTTGGGGTGGTCCATTGAATATACTCGAATTTTCACCTAAAGGTGTTAACAAAGCTTATGCTCTCAAACATTTATTAAAATCACTCAATTTTTCACAAGAAAATTTGATTGCCTTTGGAGATGAACACAATGACACCGAGATGCTGGCCTTTGCACATACAGGATATGCTATGAAAAATGCTAATCCAACTCTACTTCCATATGCCGACCAACAAATCCAATGGACAAACGAAGAAGATGGTGTTGCTAAAACTCTAGAAAAATTATTATTG

SEQ ID NO: 9508 - protein, 270 aa, Streptococcus agalactiae
MTKKIIAVDLDGTLLHNNNTISDYTADTLRKVQAQGHKVIITTGRPYRMALAHYLRLDLKTPMINFNGALTHIPEKKWAFERSATIDKKLLLETLNLSDAIQADFIASEYRKNFYITMDNRDKINPQLFGVNEITDKMALDVTKITRNPNALLMQTRHKDKYELAKELRQHFNHELEVDSWGGPLNILEFSPKGVNKAYALKHLLKSLNFSQENLIAFGDEHNDTEMLAFAHTGYAMKNANPTLLPYADQQIQWTNEEDGVAKTLEKLLL

SEQ ID NO: 9509 - protein, 582 aa, Streptococcus agalactiae
ATGAAAAAGTTAATTTGGAGTCATCTTTTTGCCATAGTCAGTATTTTAGGGATATGGTATTATCATGTAAAAATTGATCATTTGATGGTAATTCTATTGGCATCAGTCTTGTCGTTAGAGATGGGATTCATTGCTTATTATAGTCGTAATATTTTTATTCGTCTTTTAGCAAGTTTAGGTCTTTTATTTTTTTACCCACAGAGTTTAGGGATTTTTCTTAGTTTGGTGAGCTTAGAGTGGTCAACAAAAGACATTTGGCAGTCTAATCACTTTATGCAATATATGGCATACCTTCTTGCAATTCTTTTTATTATCTCTTCAGCTTTACTAAGCTTGAAGCTATTGGTAAATGCATATGATATTAGTAAAAGGTATCAATTAGCAACTGTTATACCTGTAATGCTTTTTAGTAGTTTTGCCTTTTGCTTAGAAAAATCAGGATCATTAGGTTTAGAAGGAATCATTTTAAATCCGTCAGCATTTTTTAATGGAATACAGACTAATATGGCTAACCTTGATTTTAAAGCCTTGTCTTGCCTTTTTTTAGTACAATTATTACTTTGGGGAATATTAATGGAAGAC

SEQ ID NO: 9510 - protein, 194 aa, Streptococcus agalactiae; identical to SEQ ID NO: 746

SEQ ID NO: 9511 - DNA, 609 bp, Streptococcus agalactiae
atgaaagtaaaactatttgcgatacatctattttttattgttatttcttttgggattaaatattatcatttgcagggaccaaatttgatttggaatatgactctagccctaatagcgttagattttgcataccttactagtttatttaagaaaaaaattcttatcggtctttttgcacttgcttggttttttttctatcctaataccttttatatgttgacggatatcattcatatgcattttgtcggagacgttctttataataagacaaatttaatactttatatcttgtatgtatctagtatcttgtttggttttttatcaggtatcgaaagtttttctgtgattatgcgtaaatttagaattagcaatatatttttaagatggggaattattggaattgtatcatttgtttcaagttttggtattcatattggtcgttatgcccgtctaaattcatgggatatcttaacgaagccacaagtggtaattaacgaacttttagcggttccgagtagggattcattccactttattttaggatttacatttttacaggtattgtgtcttatttttatggattattctgcagggaaaaagcttgaaaag

SEQ ID NO: 9512 - protein, 203 aa, Streptococcus agalactiae; identical to SEQ ID NO: 748

SEQ ID NO: 9513 - DNA, 1419 bp, Streptococcus agalactiae
atggaaaagttttttaagctaaaggaacacgggacgacaattcggactgaaatcactgctggtctaacgactttctttgcaatgtcgtacattttgtttgtaaatccagctattttatctcagactgggatgccagcacaaggagttttcttagcgacgattattggtgccgttgtagctacatctgttatggctttctatgctaaccttccctatgcacaagctcctgggatgggattaaatgctttctttacatatacagttgtctttgcattgggatatacatggcaagaagccttagctatggtatttatttgtggtttgatttctctgattattactttaacgaaagttagaaagatgattattgagtctatcccaacaactttaaaatcagccattacagcaggaatcggaacttttttagcatacgttgggattaaaaatgctggttttttgaaattttcaattgatcctgggacgtatgatgttgttggaaagggtgctgcgaaaggattggctactattacagcaaattcttcagcaacgccagggctagtgtcgtttgataatccagccattttattatctttgattggtttaagcattaccatcttctttattgtaaagggtatccgtggagggattattctatcgatattaacaacgaccctcttaggtattttaatgggagtggttaagttagatgctattaattgggaagcaactaacctctcggcctcttttagagatttgaagcaagtatttggagttgcattaggagagaaaggattaatttctttattttctaatccttcacgtctaccaagtgtattaatggccattcttgctttttcactgactgatatttttgataccattggaacgctcattggtaccggagaaaaagttggtatcttagcaacgactggtgataatcatgaatctaagagtttagacaaagcactctattcagacttaattgggacaacttttggtgctatttgtggaacatctaacgttacaacctatgttgagtcagcagcaggaatcggagctggtggtcgtacaggattgacagccttagtagttgctggtttgtttgctatatctagtttttttagtccactagtatctatcgttccgagtcaagctactgcaccaatattggttattgttggtattatgatgctttcaaatttaaaagatatcaaatgggatgatatgtcagaagctatcccagctttctttacttctctttttatggggtttacttatagcattacttatggtattgcagctggtttcttgacctatacactagctaaagtcatcaaaggacaagcaaaagatattcatgtggtactgtggattttagatatattatttattctaaactttatcagcttggctattttg

SEQ ID NO: 9514 - protein, 473 aa, Streptococcus agalactiae; identical to SEQ ID NO: 750

SEQ ID NO: 9515 - DNA, 507 bp, Streptococcus agalactiae
atgctatggggctgtcagaatcagcaaactgttggaagacagagatatttctggtataatatctctatgttttatactcaaaatgaagaagagcttattgccctagggcaaaaactgggtactgttttaaagtcaggagatatcgtattattgactggtaatttaggtgcaggcaaaacaactcttacaaaaggtattgcaaagggattagacataaaacaaatgattaagagcccaacttacactattgttagagaatatgaagggcgtgtaccactttaccatttggatgtttatcgtattggagatgatcctgattctattgacttagatgacttcttgtttggtcaaggagtaacagttattgaatggggagagttgcttagtgataaccttatcaataactacttagaaattgttattacgaggagcaatcaaggacgtcaggttcagttagaagcttatgggcatcgcgcaagagaaattattgaggcgattcaagatgtc

SEQ ID NO: 9516 - protein, 169 aa, Streptococcus agalactiae; identical to SEQ ID NO: 752

SEQ ID NO: 9517 - DNA, 558 bp, Streptococcus agalactiae
atgggcatcgcgcaagagaaattattgaggcgattcaagatgtctaaacaatttgctgttgattttatagaagcttcgagagaggaagcatctgcgatccttgaatttttaaatactgttactgaggaaacagattttattttgcatacggtgagcaatcaactatctttgtcagaaatggaaacgtttattgaaaataccttaatgacgaaaaattgcatttgtttgattgctaaattaaaaaataaagtgatcggcttgataacaatcattagtcagtctgatattgaaattgaacacgttggggatctttttattgccgttcagaaggattattggggatatggtattggtcatattctcatggaagaagcaatagaatgggcgtcagataacgatattacacgccgcttagaactatcagtccaaggacgtaatgaacgtgctattcacctctaccaaaaattcggttttgaaatagatgggcttcaaacaagaggtattaaaagagaaaatggagaatttctagacatttacagaatgagtaagttgatagat

SEQ ID NO: 9518 - protein, 186 aa, Streptococcus agalactiae; identical to SEQ ID NO: 754

SEQ ID NO: 9519 - DNA, 1305 bp, Streptococcus agalactiae
atgaaaatttggaaaaaaataaccttaatgttttctgcaattattttaacaacagtaattgcattgggagtctatgttgcctcagcttataatttttcgactaatgaattgtctaagacttttaaagattttaagctagctaaatcaaaaagtcatgctattgaagaaacaaagccgttttcaatactattaatgggggtggacacaggttcagagcatcgaaaatctaagtggtcaggaaatagcgattctatgatcttagtcactataaatcctaaaactaataaaacaacgatgacaagcttagaacgtgacgtattgattaaattgagtggtcccaaaaataatggacagactggagtagaagcaaagctaaatgcagcctatgcttctggtggtgcggaaatggcattgatgactgttcaagacttattagatattaatgttgattactttatgcaaattaatatgcaaggattagttgatttagtcaatgctgttggtggtataacagtaactaataaatttgactttccaatatcaattgctgccaatgaaccagagtacaaggctgttgttgaaccagggacacataaaataaatggagaacaagcacttgtttattctcgtatgcgctatgatgatccagagggagattatgggcgtcaaaaaagacaacgtgaagtaattcaaaaagtccttaaaaaaatattggcgttaaatagtattagttcatacaaaaaaattctttccgcagtaagtaataacatgcaaactaatattgagatatcatcaaaaacgattcctaatttgttagcttataaagattcattggaacatattaaatcttatcagttgaagggtgaagacgctactttatcagatggtggctcttatcaaattttaactaagaaacatctacttgcagttcaaaatagaattaagaaagaactggataaaaagcgtagtaaaactctgaagacaagcgcgattctatatgaagattactatggtactactgctagtaatgattcttctacttattcatcaacacaagagaataattataatacaacaccttattcagaagcaccaccaagttacagtggtaatactacttatagttctgagactaatcaaacaactcatcaaaattactataatagtagcactcctgctagtaactatagcagtaacactaacacaggtcaggctgattcaagtggaagtgtcaataatcataacggggctgcaacgcctaatccaaacacaggaacgcaaccagtaccaggtcaaactaatcca

SEQ ID NO: 9520 - protein, 435 aa, Streptococcus agalactiae; identical to SEQ ID NO: 756

SEQ ID NO: 9521 - protein, 294 aa, Streptococcus agalactiae; identical to SEQ ID NO: 5129

SEQ ID NO: 9522 - protein, 98 aa, Streptococcus agalactiae; identical to SEQ ID NO: 758

SEQ ID NO: 9523 - protein, 417 aa, Streptococcus agalactiae
ATGGATAATTGTATTTTTTGTAAAATCATCAGTGGAGAAATCCCTTCATCAAAAGTTTATGAAGATGATGAAGTATTAGCTTTTCTCGACATTACACAAACTACGACCGGGCACACCCTTCTTATTCCTAAAAAACATGTTCGAAATGTGTTAGAGATGGATGAAAAAACTGCACAGATAACCTTTGAACGCTTGCCTAAAGTGGCGCGTGCTGTCCAAGCTGCTACAAAAGCCAAAGGAATGAATATTATTAACAACAATGAGGAAATTGCTGGACAAACTGTTTTTCATGCACACGTCCACCTTGTTCCCCGCTTTGATGAATCAGACGGTATCAAAATTCACTACACTACTCATGAACCCGACTTTGAGGCACTTGCAAAATTAGCCAAAGAAATTAGAAAAGAGATTCAATTA

SEQ ID NO: 9524 - protein, 139 aa, Streptococcus agalactiae; identical to SEQ ID NO: 760

SEQ ID NO: 9525 - protein, 501 aa, Streptococcus agalactiae
TTGAAATTAAATAAAATAATATTATCTACTGCAGCTCTTACTGCTCTCTTTTTAGGATATAATAGCGTTACTGCGGATACATATAATAACTATCAGCCACATAGATCAAATAATATGGATTTAACTGAGGAATATAACTATAATAACCAGATAGAACTTCAGGAGCGTATAAAAAAACTAAATATACCTTTTAAAGAAAAACTTGCCTTACTTAGAAAGGTTAAATCAAGACAAGATTCTTATGTATTAGACACATTAAGAAAAGAAGTTGAAAATAAAAACAGTGAGTATTCAGAACTAGAGCAAGAATATCAAAGAATTTCAGCTCTTATTGATGCTAAGTTTCCGCAAGGGAAATCTAGTTTAGCAGAAAAATTACATAAAGAACTAATTTGGGACTTGGATGGTGTTAAATATGATGAGGGTATTTCTAAGAGAACTGCTCTAAAAAAATTAGAAGGTAAAATCAACGAATATACTAAAAAATACAGTTATTTATTC

SEQ ID NO: 9526 - protein, 167 aa, Streptococcus agalactiae; identical to SEQ ID NO: 762

SEQ ID NO: 9527 - protein, 255 aa, Streptococcus agalactiae
TTGTCATTCTCTCTATCTTTGATATACTTTATTAACTATTATAACAAAATAAGAAAGGGAAGGTCTATTCTTATGGATAATTGTACTTTAGAATTCCCTTATAGTTTTGAAAATAACTTTAAACCTATTTTGTCCGCTTTTACATCTAATGAAATGCCAAGCTACCCCATGCTCCCATTATGTTTACAAAAAGCACCTCCATCACTCATCGGACAAAAAAAGACACCTCAAAAAGGTGTCTTTTTAGTATCAATA

SEQ ID NO: 9528 - protein, 85 aa, Streptococcus agalactiae
MSFSLSLIYFINYYNKIRKGRSILMDNCTLEFPYSFENNFKPILSAFTSNEMPSYPMLPLCLQKAPPSLIGQKKTPQKGVFLVSI

SEQ ID NO: 9529 - protein, 723 aa, Streptococcus agalactiae
ATGTTAAAAATTGAAAATGTTACAGGGGGGTATGTTAATATCCCAGTTTTAAAAAATATTTCTTTTGAAGTAAATGATGGAGAGTTAGTTGGATTAATTGGGCTTAATGGTGCAGGAAAATCAACCACTATTAACGAGATTATTGGTATTTTGAGACCCTATCAAGGAGATATTACAATTGATGGTATTAGTCTTGAAGCCGACCAAGAACTTTATAGAAAGAAAATAGGCTTTATTCCTGAGACACCAAGTCTCTATGAGGAGCTAACTCTCAGGGAACATTTAGAAACGGTAGCTATGGCGTATGATATTGCCACCGATGAAGTTATGGCACGTGCGCAAAAACTATTAGAGATGTTTCGTCTAACAGATAAATTAGACTGGTTTCCAATGCATTTTTCAAAGGGAATGAAACAAAAGGTTATGATTATTTGTGCTTTTGTTGTATCTCCAAGTTTATTTATTGTTGATGAACCATTTTTAGGTTTGGATCCACTAGCTATTTCAGATTTGATTAATCTTCTAGCAGAAGAAAAAGCTAAAGGGAAATCTATTTTGATGTCAACACACGTATTAGATTCTGCCGAAAAAATGTGTGATCGTTTTGTTATTTTACATAAAGGAGAAATACGGGCAGTTGGAACCCTAGAGGAATTACGGGCTATTTTTGGAGACAGTAATGCTAATTTAAATGACATCTACATAGCTCTGACAAAAGAGGTG

SEQ ID NO: 9530 - protein, 241 aa, Streptococcus agalactiae; identical to SEQ ID NO: 764

SEQ ID NO: 9531 - DNA, 1032 bp, Streptococcus agalactiae
atgaaaaagttatttaataaacgtcgaagtctctttttaactcaaaatagtaaatatttgagatacgtctttaacgatcattttgtattagtattaatgtttttgtcaggttttttgttatatcagtatagccagttactaaaagactttccaaaaacacattggccaattatcgtgattgtgtcaatcattatcttaatgttactagcgatggggggaatagccagctatttagaaccggctgataaacaatttttacttataaaagaagaagcaataaaggaaattataaattctgctaaaaaacggacttatatcttttggttggttattcaaaccttatttttagtattaatatcaccaattttgataaagttaggcttgtcagtttttatgattacattgttaatttttggtctaggaataatcaaatggttggtaataacttacaaggtaaaggtcttttataacaatcaaaatttgaactgggatgcagctataaatcatgagcaggaaagaaaacagagtatattaaaatttttctctttgtttacaaatgttaaaggaatttcgacaagtgtaaaacgtcgttcatttttagatggtattttaaaacttatttctaaaacgccatcgcgtttatggactaacttatttgtgagggcatttctaagaagctcagattatcttggtttaacaataaggttggtaactttaaatatcttatcagtcatctttgttaacgaaacctacctcgcccttgctctggcatttgtatttaactacttattattgttccaactattagctttaggtcaccattttgattatcaatacatgaatcagctctatccagttagattaaatgctaaagcaagtcagctaaaaggttttctcagagtattatcatatgctgtgacagtaattgatagcatacttataagagaattgaaacctgttatattattgatagttttgatgttaattgtgacggaatattacatcccttacaaaataaagaagatgattgac

SEQ ID NO: 9532 - protein, 344 aa, Streptococcus agalactiae; identical to SEQ ID NO: 766

SEQ ID NO: 9533 - DNA, 798 bp, Streptococcus agalactiae
gtgacaatatcaaatcaagaattgacgcttactcccttaagaggaaaaagtggcaaagcctatattggtacttatccaaatggtgaacgtgtctttgtcaaatataatacgacacctattttgccagccttagctaaggaacagattgcgccacaactactgtgggcacgccgtacaagtaatggcgatatgatgagtgctcaagaatggttagatggtcgaacattgactaaagaagatatgggtagtaaacagattattcatattttattgcgcctgcacaagtctcgtcccttagtaaatcagctgttacaattagggtataaaattgaaaacccttatgatttgttgatggattgggaaaaacaaactcctattcaaatccgggaaaacacttatttgcaatctattgtgactgagttaaagcgtagtttacctgagtttcgaacagaggttgcaacaatcgttcacggagatatcaaacatagcaactgggttattacaacaagtggtttaatttatttggttgattgggattctgttcgtttaacagatcgcatgtatgacgttgcatatattttaagtcattatattccacaaaaacactggaaagattggctgtcttactacggttataaagataatgagaaagtctggagcaaaattatctggtatgggcaattttcatatttatcacagataatcaaatgttttgataaacgagatatggagcatgtcaatcaagaaatttatgaattacgaaagtttagagagttaattaaaaagcataatgcgagt

SEQ ID NO: 9534 - protein, 266 aa, Streptococcus agalactiae; identical to SEQ ID NO: 768

SEQ ID NO: 9535 - DNA, 633 bp, Streptococcus agalactiae
atgcgagttagaaaacgtaagggtgcagaggaacacttagaaaataatcctcactatgttatttcaaatccagaagaagccaaagggcgttggcatgagatttttggaaataataaccccattcacatagaagttggttctggaaaaggggcttttatcactggtatggcagagcaaaatccagatatcaattatattggaattgatattcaattgtcagtgctttcctatgctttggataaagttctagatagcggtgctaagaatatcaaattactattagttgatggttctagtctatcaaactactttgatactggcgaagttgatttgatgtatcttaactttagtgatccatggcctaagaaaaagcatgagaaacgtcgattgacctataagactttcttggatacctataaagacatacttcctgagcagggggaaattcattttaaaacagataatagaggtttatttgaatatagccttgctagcttttctcaatacggtatgactttaaaacaagtttggttagatttacatgcaagtgattaccagcaaaatatcatgactgagtacgaacgcaaattttcaaataaaggacaggttatctatcgtgtagaagcacgattt

SEQ ID NO: 9536 - protein, 211 aa, Streptococcus agalactiae; identical to SEQ ID NO: 770

SEQ ID NO: 9537 - DNA, 381 bp, Streptococcus agalactiae
atgggtggcgactatgtgctcagtattttaattgataaacccggaggcattacggttgaagatacagcacaattgacagacgttgtaagtcccttacttgacacaattcaaccagatccatttccagaacagtatatgcttgaagtctcaagtcctgggttggaaagaccacttaaaacagcagaagcattatcaaatgctgttgggtcttatatcaatgtaagtctgtataaatccattgataaagttaaaatatttgaaggtgacttattatcatttgatggtgaaaccttgacaattgattatatggacaaaacacgtcataaaactgtagatattccctatcagacggttgcaaaagcccgtcttgcggttaaactt

SEQ ID NO: 9538 - protein, 127 aa, Streptococcus agalactiae; identical to SEQ ID NO: 772

SEQ ID NO: 9539 - DNA, 1137 bp, Streptococcus agalactiae
atgctagaagccttccgtattttggaagaagaaaaacacattaataaagaagatattattgatgcagttactgagtcactaaaatctgcctataagcgtcgttatggtcaatcagaatcatgcgttattgaatttaacgagaagaaagcagactttaccgtctatactgttcgtgaagttgttgatgaagtttttgatagccgtttggaaattagcctaaaagatgcccttgctattagctcagcgtatgaacttggtgataagattcgctttgaggaatctgttacagaatttggacgcgtggcagctcagtcagcaaaacaaactattatggaaaaaatgcgtcgtcaaatgcgtgaagtaaccttcaatgaatacaaacaacacgaaggtgaaattatgactggtactgttgaacgatttgaccaacgttttatttatgtcaatctcggttcacttgaggcgcaattatcgcatcaagatcagattcctggagagagctttaaatctcatgatatgattgatgtttatgtctataaagtggagaataatcctaaaggagtcaacgtttttgttagccgtagtcatccagagtttatcaaacgcattatggagcgagaaattccagaagtatttgatggaactgttgagattatgagcgtctctcgtgaggctggagatcgtactaaagttgctgtacgcagtcataattcaaacgttgatgcgattggaacaattgttggacgcggtggaagtaacattaaaaaagttatcagtaatttccatcctaaacgcgttgatgctaaaacaggattggagatcccggttgaagaaaacattgatgttattcaatgggttgaagatccagcggaattcatttacaatgctattgcaccagccgaagttgatatggtactttttgatgatgaagatacaaaacgtgctactgtagttgttccagatagcaagttatcgctagctattggtcgccgaggacaaaatgtgcgtttagcagctcatttgactggctatcgtattgatattaaatctgcaagtgaatacgaaaaaatggaagcgcaagaacttcaaactgaggaagtagctcaagaatctgaagttatttcagataaggcagaa

SEQ ID NO: 9540 - protein, 379 aa, Streptococcus agalactiae; identical to SEQ ID NO: 774

SEQ ID NO: 9541 - protein, 294 aa, Streptococcus agalactiae
ATGGCTAAAACAAAAAAAATACCTTTAAGAAAATCAGTTGTTTCTGGTGAAGTGATCGATAAGCGAGATCTTTTACGAATTGTTAAAAATAAAGAAGGACAGGTTTTTATAGATCCTACCGGAAAGCAAAATGGTCGAGGTGCCTACATAAAATTGGACAATGATGAAGCTATCCTAGCGAAAAAGAAACGAGTGTTTGATCGCAGTTTTTCGATGGAAGTTTCTGATGAATTCTATGATGAACTATTGGCATATGTCGACCATAAGGTCAAAAGAAGAGAGTTAGGCCTTGAA

SEQ ID NO: 9542 - protein, 98 aa, Streptococcus agalactiae; identical to SEQ ID NO: 776

SEQ ID NO: 9543 - protein, 300 aa, Streptococcus agalactiae
TTGAATAATTCAGAAAAAGTATTAAATCTCATTGGGTTAGCACAGCGTGCGGGGCGCCTTATTACAGGTGAAGAATTGGTTATTAAAGCAATTCAAAATCAACAAGTATCGCTAATCTTTCTAGCAAATGATGCTGGCCCAAATTTGACGAAAAAAGTAACTGATAAAAGTAATTACTACAAAACAGAAGTCTCCACAGTGTTTTCAACACTGGAATTAAGTGATGCGTTAGGCAAACCAAGAAAAGTGGTTGCTGTCGCAGACGCTGGATTTTCAAAGAAAATGAGGACTCTTATGGCA

SEQ ID NO: 9544 - protein, 100 aa, Streptococcus agalactiae; identical to SEQ ID NO: 778

SEQ ID NO: 9545 - protein, 2724 aa, Streptococcus agalactiae
GTGGTTGAGCAAGCTCAATCGCTTGGCTTACCTGTAAAAAGTCATGCTTCTAGCGTTGAAGAAAATGATGCTACACGTATTGTTGAGAGTTTTAGCTCTTCTAAAACTAAAGCTCCAACAAATTCTGTTCAAACTAATCAAGGTGTGAAAACAGAATCTAAAACTGTTGAAACCAAACAAGGCTTGTCCGATGATAAACCTTCAACTCAACCTGTAGCTAAACCGAAACCACAAAGTCGTAACTTTAAGGCGGAGCGCGAGGCTCGTGCTAAAGCTGAAGCGGAGAAGCGTCAACATAATGGGGATCACCGTAAGAATAATCGCCATAATGATACACGCTCTGACGACAGACGCCATCAAGGTCAAAAGCGTTCAAATGGTAATCGTAATGATAACCGACAAGGTCAGCAAAATAACCGTAATAAAAATGATGGGCGTTATGCTGATCATAAACAGAAACCCCAAACGCGTCCTCAGCAACCTGCAGGCAATCGCATTGACTTTAAAGCTCGAGCAGCAGCTTTGAAAGCTGAGCAAAATGCTGAATACTCACGTCATAGTGAGCAGCGTTTCCGTGAAGAGCAAGAAGCCAAACGTCAAGCAGCTAAGGAGCAAGAACTAGCTAAAGCAGCAGCGTTAAAAGCGCAAGAAGAAGCTCAAAAAGCTAAGGAAAAACTTGCTTCTAAACCTGTTGCTAAGGTAAAAGAAATTGTCAATAAAGTAGCCGCTACGCCATCACAGACAGCAGATAGTCGTCGTAAAAAACAAACTCGTTCTGATAAGTCTCGTCAATTTTCAAATGAAAATGAAGATGGACAAAAGCAAACAAAAAATAAGAAAAACTGGAATAATCAAAACCAAGTGAGAAATCAAAGAAATAGTAACTGGAATCATAATAAGAAAAATAAAAAAGGTAAGACTAATGGAGCTCCAAAACCAGTAACAGAGCGTAAATTCCATGAATTACCAAAAGAATTTGAATATACTGAGGGCATGACCGTTGCGGAAATTGCAAAACGTATTAAACGCGAACCAGCGGAAATTGTTAAAAAACTCTTTATGATGGGAGTTATGGCAACGCAGAATCAATCATTAGATGGAGACACTATTGAGCTATTGATGGTTGACTACGGGATTGAAGCACATGCTAAGGTTGAAGTTGATGAAGCTGATATTGAACGCTTCTTTGCAGATGAGGATTACCTTAATCCTGATAACTTAACGGAACGTCCGCCTGTTGTTACTATCATGGGACACGTTGATCATGGTAAAACAACTCTTCTTGATACTCTACGTAATTCACGTGTCGCTACTGGCGAAGCTGGTGGAATTACTCAACATATTGGTGCTTATCAGATTGAAGAAGCTGGCAAGAAAATTACTTTCTTGGATACACCAGGGCATGCGGCCTTTACTTCTATGCGTGCGCGTGGTGCATCAGTAACTGATATTACTATCCTTATCGTTGCCGCTGATGATGGTGTTATGCCGCAGACAGTTGAGGCAATTAATCACTCTAAAGCTGCGGGTGTCCCAATTATTGTTGCTATCAACAAAATTGATAAACCTGGTGCAAATCCAGAACGCGTTATCAGTGAATTAGCTGAGCATGGTGTCATCTCTACTGCATGGGGTGGTGAGTCTGAATTTGTTGAAATTTCAGCTAAGTTTGGTAAAAATATTCAAGAATTACTTGAGACAGTTCTTTTAGTTGCTGAAATGGAAGAATTAAAAGCAGATGCAGATGTTCGTGCTATTGGTACTGTTATTGAAGCCCGTCTTGATAAAGGTAAGGGAGCCGTTGCAACGCTTCTTGTCCAACAAGGTACTTTAAATGTACAAGATCCAATCGTTGTTGGTAATACATTTGGACGTGTTCGTGCGATGACTAATGATCTTGGGCGTCGTGTCAAAGTTGCGGGTCCATCTACACCAGTTTCTATTACTGGTTTGAACGAAGCTCCAATGGCTGGTGATCATTTTGCTGTTTATGCAGATGAGAAAGCTGCGCGTGCTGCAGGTGAAGAACGTGCAAAACGTGCTCTCTTAAAACAACGCCAAAACACGCAACGTGTTAGCCTCGAGAACTTATTTGATACCCTTAAAGCTGGTGAAGTTAAGTCAGTTAATGTTATTATCAAAGCTGATGTGCAAGGTTCTGTAGAAGCACTTGCAGCTTCTCTCCTTAAGATTGATGTTGAAGGAGTAAAAGTTAACGTTGTTCACTCAGCAGTTGGTGCTATTAATGAGTCTGATGTAACACTTGCTGAAGCATCAAATGCTGTTATTATAGGATTTAACGTACGCCCTACTCCACAAGCTCGTCAACAAGCAGATGCTGATGATGTCGAAATTCGTCAACATAGCATTATCTATAAAGTTATCGAAGAAGTTGAAGAAGCGATGAAAGGTAAACTTGATCCTGAATACCAAGAAAAAATCCTTGGTGAAGCCATTATTCGTGAGACCTTTAAAGTTTCAAAAGTGGGAACTATTGGTGGATTTATGGTTATCAATGGTAAAGTTACTCGTGATTCAAGTGTTCGTGTTATCCGTGATGGTGTTGTCATTTTTGATGGTAAATTAGCAAGTCTTAAACACTATAAAGATGATGTTAAAGAAGTCGGCAATGCTCAAGAAGGTGGTCTAATGATTGAGAATTATAACGATCTCAAAGAAGATGACACTATTGAAGCATACATTATGGAAGAAATTAAACGTAAA

SEQ ID NO: 9546 - protein, 908 aa, Streptococcus agalactiae
MVEQAQSLGLPVKSHASSVEENDATRIVESFSSSKTKAPTNSVQTNQGVKTESKTVETKQGLSDDKPSTQPVAKPKPQSRNFKAEREARAKAEAEKRQHNGDHRKNNRHNDTRSDDRRHQGQKRSNGNRNDNRQGQQNNRNKNDGRYADHKQKPQTRPQQPAGNRIDFKARAAALKAEQNAEYSRHSEQRFREEQEAKRQAAKEQELAKAAALKAQEEAQKAKEKLASKPVAKVKEIVNKVAATPSQTADSRRKKQTRSDKSRQFSNENEDGQKQTKNKKNWNNQNQVRNQRNSNWNHNKKNKKGKTNGAPKPVTERKFHELPKEFEYTEGMTVAEIAKRIKREPAEIVKKLFMMGVMATQNQSLDGDTIELLMVDYGIEAHAKVEVDEADIERFFADEDYLNPDNLTERPPVVTIMGHVDHGKTTLLDTLRNSRVATGEAGGITQHIGAYQIEEAGKKITFLDTPGHAAFTSMRARGASVTDITILIVAADDGVMPQTVEAINHSKAAGVPIIVAINKIDKPGANPERVISELAEHGVISTAWGGESEFVEISAKFGKNIQELLETVLLVAEMEELKADADVRAIGTVIEARLDKGKGAVATLLVQQGTLNVQDPIVVGNTFGRVRAMTNDLGRRVKVAGPSTPVSITGLNEAPMAGDHFAVYADEKAARAAGEERAKRALLKQRQNTQRVSLENLFDTLKAGEVKSVNVIIKADVQGSVEALAASLLKIDVEGVKVNVVHSAVGAINESDVTLAEASNAVIIGFNVRPTPQARQQADADDVEIRQHSIIYKVIEEVEEAMKGKLDPEYQEKILGEAIIRETFKVSKVGTIGGFMVINGKVTRDSSVRVIRDGVVIFDGKLASLKHYKDDVKEVGNAQEGGLMIENYNDLKEDDTIEAYIMEEIKRK

SEQ ID NO: 9547 - protein, 348 aa, Streptococcus agalactiae
ATGGCTAATCATCGTATTGATCGCGTTGGAATGGAAATTAAACGTGAAGTCAATGAGATTTTGCGTCTCCGAGTTAATGATCCACGTGTACAAGATGTCACAATTACTGATGTTCAGATGTTGGGTGACCTTTCAATGGCTAAAGTATTTTATACTATTCATTCGACACTTGCTTCTGATAATCAAAAAGCACAAATTGGTTTAGAAAAAGCAACTGGTACTATTAAGCGTGAACTTGGCAAAAACCTTACTATGTATAAAATACCAGATTTACAATTTGTTAAAGATGAATCTATTGAATACGGAAATAAGATTGATGAAATGTTGCGCAATCTAGATAAAAAAGAT

SEQ ID NO: 9548 - protein, 116 aa, Streptococcus agalactiae; identical to SEQ ID NO: 786

SEQ ID NO: 9549 - protein, 1002 aa, Streptococcus agalactiae
TTGAAACCGTCCTTCAAAAAACTATTGCTACTATTTAGTATTATCACCATTTTATCCATCGCCTGTACACCACATGCAAAAGCAAGTGGGCGTTCATGGAAAAGTTGGTTTATCGAACAATACTTTTGGCTAAAGCGCGATAAAAGTTATTATAAAGTTCAAGATGAAAGCTCATTTCAAAAGTACTTAAATGCTAGCCGTGAACAATCTGATAAGGGTTATTACTTAGACCCAAACTCTGTTAATGGAGGGCTTGTTCAAGAGAGACTTTTTGATATGCAAGTCTATTCTTGGAATGACAACGGTAAAGCTAATCAAAAGACCATTTTCTATTTAGCTGGTGGCTCTTACTTAAATAATCCAACGCCTTACCATATCAGCATGCTTAAGACGCTCTCAACTAGTCTTGATGCAAAAATTATTTTACCAATTTATCCAAAAACTCCTCGTTATACCTATGATTATGCTATCCCTAGATTGGTTAACCTTTATAGACACTTTCATGAAAAAAACGCTAATCTCACTTTGATGGGTGATTCAGCTGGCGGAGGATTAGCACTAGGATTAGCGCATGCATTGTCTCACCAATCAGGGCAAGAGGCTATTCCTCAACCTAAAAATATTATCCTCTTATCTCCATGGCTAGATGTGACAATGAAACATCCAGAAATTCCCAAATACGAAGATACTGATCCTATCCTATCTGCTTGGGGTCTCGCACGTGTAGGTGAAATTTGGGCAAATGGTTCTAATAATACTAACCATACATATGTTAGTCCTAAAAATGCCCCTGCTACTAAACTCGCTCCTATTACGTTATTTACTGGAACACGAGAAATATTCTTCCCAGATATTCGCGATTATGCTGCACAACTCCAAGCAGCTAATCACCCCGTTAACTATATTGCACAAGAGGGAATGAATCATGTTTATCCAATTTACCCTATTGAAGAAGCTAAAACAGCACAGTATCAAATGATTGATATCATCAATAAAACTCCT

SEQ ID NO: 9550 - protein, 334 aa, Streptococcus agalactiae; identical to SEQ ID NO: 788

SEQ ID NO: 9551 - DNA, 414 bp, Streptococcus agalactiae
atgactatttcaagcgcagaatgggaaattatgagagtggtttgggcacagcagaatacaaccagtaatgagatactagcagttttactagagaagtatgattggactccttcaactgtcaaaaccttattaagaaggctcttagataaaggctacgtgagcagagaaaaaatgggaaaaggatttagctattctcctttaattgatgaagatttagctatgatgtcagaggtagatagtgtatttcaaaaagtttgccagaccaaacatgttgctattgttagacacttattggaaagtataccaatgacagagaaggatcgattaaatttgcaatcatcactagaagctaagaaaggcaaaacacttgaacgtgtagcttgtaattgcattcctggtcagtgtcaatgccat

SEQ ID NO: 9552 - protein, 138 aa, Streptococcus agalactiae
MTISSAEWEIMRVVWAQQNTTSNEILAVLLEKYDWTPSTVKTLLRRLLDKGYVSREKMGKGFSYSPLIDEDLAMMSEVDSVFQKVCQTKHVAIVRHLLESIPMTEKDRLNLQSSLEAKKGKTLERVACNCIPGQCQCH

SEQ ID NO: 9553 - DNA, 2232 bp, Streptococcus agalactiae
atggctaatagaaaagaaacatttttgattgatgggatgacttgtgcatcttgtgctttaacgatagaaaaagctgtcaacaagttagaccatgtggatagtgcagtagtaaatttagcaacagagaaaatgacagttacgtttgatgatacaaccttatcgccaaatgtgattgaagagtgtgtttctgagagtggatacgaagcatcgcttttcaaagaggaaacttctaaaagccaatctgaacggcaccaattagccattgaaaagatgtggcatcgcttttggatgtcagcagttgcaactatacctcttctctatatttccatgggaccaatgattaacttatggttaccatcatttttgatgccagataagggacctctaaactatggtatgatacaattattgttaacactaccggtgatgtattttgggcgtatcttttaccaaaatggttttaaagcactttttaaaaggcatcccaatatggattcattagttgctatagccacaacagcggctttcatttatagcttatatggattgtacgaaatattacagggtgacatacactacgctcaccagctttatttcgaatctgttgcagttattttaacacttattactctaggaaaatattttgaaatattatccaaagggcgtacttcggcctcgattgaaaaattattaactttatcagcaaaagaagcaagagttatcaaagatggtgaagactatatggttcctttggataaagttaaaataggtgaaacaattcttgtcaaacctggagaaaaaattcctcttgatggccatgttgtagcaggagaatcaagtattgatgaatccatgttaacaggtgaaagtattccagttgaaaaaaaggttggtagtaaggtttacggtgccagcattaatgggcaaggtagcttaacgattttcgttgaaaaagaagctggcggttcccttctatcacaaattattaacttagtagaagctgcacagacaagtaaggctccaattgctaacttagcagacaaagtatcaggagtctttgtcccttttgttattgtcattgcaattttatcaggcttgagttggtacttaattctggggcaaagttttgccttctctctgaagattatgattgcagtcttagtgattgcttgtccatgtgctttagggttggcaactcctacagctattatggtggctagtggtaaagcagctgagaatggtattttatttaaaggtggtgaagtgttggaaaaggctcaccacattgatacaatagtttttgataaaacaggaaccttgaccaaagggaaaccagaagtagttgctatcaaaacatatgggggagataaagaggagtttttaggtcaggtagcatcagtagaaaaactttcaaatcatccacttagccaaacaattgttaataaagcaaaagagaaagaacttcccttaagggaagtcatggcttttaaaaatattttgggttacggtttgagtgcaactattaatggtaaaactatgcttgtaggtaatgctaacttaatgactaagaacgatgttaatttagatttagcaaaggctgatatagaaatagctcaagaagaagcacaaactgtggtttacgtttccgaaaatggagtgttgagcggtttaataactttaacggaccagctaaagacagatagccaagaaacagttaagcagttacaaagattaggatttaatttagttttacttactggtgataataaggctagtgcagatgccatagcacaaaaattgggtatcacgacagttgtttcagaagttttacctgatcagaaagcaaacgttattttagaacttaaagaaaaaggcggacagattgcgatggttggtgatggcatcaatgatgctcctgcgctagctagcagtgatgtaggtatctctatgagttctggaacagatattgctattgaatcagcagatatcgtgttgatgaaacctgagttaacagatctcttaaaagcaatgactatcagtaaacaaacgattcaaattattaaggaaaatttattttgggctttcttttataacgttttagcgattccagtggcaatgggtgttttacatctttttggtggtcccttactcaatcctatgttggcaggcttagctatggcgtttagttcagtttcagtagttttaaacgcacttcgcttaaaagtcttaaaa

SEQ ID NO: 9554 - protein, 744 aa, Streptococcus agalactiae; identical to SEQ ID NO: 792

SEQ ID NO: 9555 - DNA, 204 bp, Streptococcus agalactiae
atgaaacatacctatcgagttagtggcatgaaatgtgatggttgtgccaaaacagtttctgataagttatcaagtgtgattggtgttgacgaggttaatgttgatttgactaaaaatcaagttgtcgtaagtggaaaaacattcaaatggcttttaaaacgttctttaaaagacacaaagtattcactagaagaggaaataaat

SEQ ID NO: 9556 - protein, 68 aa, Streptococcus agalactiae; identical to SEQ ID NO: 794

SEQ ID NO: 9557 - DNA, 612 bp, Streptococcus agalactiae
atgtcaattgatatttggaacattttaagtttggttggaaccgtagcttttgcaagttcgggagctattgtggcgattgaggaagaatttgatattctagggctttttatcttaggttttgtaacggcatttggtggtggagctattagaaatgtactaattggcttgcctattgaaacactttggagtcaaggaattgctttttatgcagcagcagcagctattttatttattatgattttccctaatttgttgagtggtaagggacgggatgccgaagttgtatcagatgctattgggttagcagcgtttagtgttcaaggagcactatatgcgactcaatctcatcaacctcttagtgctgtcattgtcgcagcagtactaactggtgcaggtggtggtattgtcagagatgttctggctggccgaaaacctggagtactaagaagtgaaatatatgcaggttggtcaatattagtggggatcattttatattttaaaattgctaaaacaacaactgactattatttgttagtgttagttgtaactagcctaaggatgttgggttataagaaacaatggcacttgccagttgtcagaccacgtaagaaa

SEQ ID NO: 9558 - protein, 204 aa, Streptococcus agalactiae; identical to SEQ ID NO: 796

SEQ ID NO: 9559 - DNA, 810 bp, Streptococcus agalactiae
atgataaaattaattgctattgatatggatggaacgcttttaaatgatgaaaagaaaattccaaaggaaaatatccaagctattaaagaagcaactcaagcaggtattaaaattgtactgtgtactgggcgaccgatgtcaggtatacttccttattttaatgaactaggtttaacaaaagaggagtatattatcatgaataatggttgtagcacttatagcacgaaagattggcaattgattgattctgcaactttaacacatgatgaactcatctttcttgaggaggttgttaaagaatttcccaacgtttgtttaacattaacagctgaaaatacattttacgctgttggagaggaagttcctgaaattgttgcttatgatgctgatttagtttttacaaaagcaaagtcaacaagtttagatgctcttcgcaatcaagaagaaattgtctttcaagcaatgtacatgggattagatgcagatgtaactgcttttcaagaagctgttgaagaagccttaatctcgaaatttagtggagttcgaagccaagactatatttatgagattatgcctcaaggagtaacaaaagcaagaggcttaaaatccttgatagcaaaattaggactggatattaatcaagttatggccatcggtgatgctcctaacgatattgaattattagatttagttcccaatagcgttgctatggggaatgcatcagatgagattaaatctagatgtaaatatataacggtggataataacaaagcaggggttgctaaagctatttatgactatgctttacgt

SEQ ID NO: 9560 - protein, 270 aa, Streptococcus agalactiae; identical to SEQ ID NO: 798

SEQ ID NO: 9561 - protein, 2640 aa, Streptococcus agalactiae
ATGACAAACAAGAATAAATTACTTTTAATTGATGGCTCATCTGTAGCCTTTCGTGCTTTTTTTGCTCTTTATAATCAAATTGACCGCTTTAAAAACAATTCTGGACTTCATACTAATGCCATATATGGTTTCCATTTGATGTTGAATCATATTTTAGGTCGTGTCCAGCCTAGTCATATTTTAGTGGCTTTTGATGCCGGAAAAACTACTTTCCGTACGGAAATGTATGCAGATTATAAAGGTGGGCGTGCTAAAACTCCGGATGAATTTCGTGAACAATTTCCTTACATTCGTCAACAATTAGATGTCTTAGGCATCAAACATTATGAATTGGAACATTATGAAGCCGATGATATCATTGGTACTCTTGCAAAACAAGCCGAAGCTAGTAATGAACATTTTGATATAACGGTGGTTTCTGGGGATAAAGATTTAATTCAATTAACAGACACTAACACGGTAGTAGAAATCTCTAAAAAGGGAGTTGCTGAGTTTGAAGAATTCACGCCAGCTTACCTTATGGAAAAAATGGGAATTACGCCGAGTCAATTTATTGATTTAAAAGCTTTGATGGGAGATAAATCAGATAATATTCCTGGGGTTACTAAAATCGGTGAAAAAACTGGCTTGAAGTTGCTATCAGAATATGGTTCCTTAGAAGGGATCTATGAAAATATTGAGGCTATGAAACAGTCTAAGATGAAAGAAAACCTTATCAATGATAAGGAGCAAGCTTTCTTATCAAAGACCCTAGCTACAATCAACATAGCATCACCTATAACAATCGGCTTAGAAGATATCCTTTATAGTGGACCGCAAGATATAAAAGCCTTGTCTCAATTTTATGATGAGATGGATTTTAAACAGTTTAAAGCAGCTCTGGGTGAGGAGACAAGTCAGGAAGATTTTGAGGTTGACTTTACTGAAGTGGAGCAATTAAAAACAGAAATGTTCTCCGATAATGATTTTTATTACTTTGAGATGTTGGGTGATAACTACCATGTAGAAGATTTAATTGGGATAGCTTGGGGAAATAGCGATACAATCTACGCTACTAGTAATGTATCGTTATTGCAAGAAGCTTTATTTAAAAAAGCTTTATCAAAACCTATCAAAACTTATGATTTTAAAAGAAGTAAGGTCCTTTTAAATCGTTTTAATATTGATTTACCAGAGCCAGCCTTTGATACTAGATTGGCCAAGTACCTTTTGTCTACTACTGAGGATAATCTAGTATCAACAATTGCTAGGTTATATACAAATCTGCCACTGGATACTGATGATGCTGTTTATGGGAAAGGTGCTAAACGCGCTATACCAGAAAAAACACGATTTCTTGAGCATCTAGCTAAAAAAGTAAAAGTTTTAGTGGATTCTGAGGCTAATATTATGCAACAGCTTAAAGCTAATGAGCAAGAAGAATTGCTGTTTGAAATGGAGCAACCTTTAGCGAATGTTTTAGCTAAAATGGAAATTCGAGGTATTAAGGTTAAGAAAAATACCTTGAATGAAATGGCCATTGAAAATCAAAAAGTCATCGAAACATTAACACAAGAAATCTATGAATTGGCTGGGCAAGAGTTTAATATTAATTCTCCAAAACAGTTAGGAAAGTTGTTGTTTGAAACGTTAGGTCTTCCTGTAGAAATGACTAAAAAAACAAAAACAGGTTATTCAACTGCAGTAGATGTATTAGAGCGCTTAGCTCCGATTTCTCCTCTTGTAACTAAAATTTTAGAGTACCGTCAAATCACTAAATTGCAATCAACCTATATTATTGGTTTACAAGATTATATTTTAGAAGATGGTAAAATTCATACACGTTATGTTCAAGATTTGACTCAGACAGGTCGTCTTTCAAGTTCTGACCCAAACCTTCAAAATATACCAGTTAGACTAGAGCAAGGACGGCTTATCCGAAAAGCTTTTGTTCCATCAGAAGACAATGCTGTTTTATTGAGTTCAGATTATTCTCAAATAGAATTGCGCGTGTTAGCACATATTTCAAAAGACGAACATTTGATCGCTGCCTTTAAAGAGGGAGCTGATATTCATACTTCAACAGCTATGCGTGTTTTTGGTATCGAAAAACCTGAGAATGTCACTCCCAATGATCGTCGAAATGCTAAGGCTGTTAATTTTGGAATTGTTTATGGTATTTCAGATTTTGGTCTATCGCATAATTTAGGAATACCTCGTAAACTAGCGAAGCAATATATTGACACCTATTTTGAGCGTTATCCTGGAATAAAAAACTATATGGAAACAGTTGTTCGTGAAGCAAAAGATAAGGGTTACGTTGAAACACTTTTCCATCGTCGTCGTTCATTACCAGATATTAATTCTCGTAATTTTAACATTCGCCAATTTGCAGAGCGCACAGCAATCAATTCACCAATCCAAGGAAGTGCAGCTGATATTCTTAAAATTGCAATGATAAATTTAGATAGGGTACTTGATAAAGGTGGTTATAAATCAAAAATGCTGTTGCAAGTTCATGATGAAATTGTACTTGAAGTCCCTAACGAGGAGATAGGAGCAATCAGGGAGTTGGTTACAAAAACAATGGAGTCAGCAATTAGTTTATCGGTACCTTTGATTGCAGATGAGAACGCAGGTGAGACTTGGTATGAAGCGAAG

SEQ ID NO: 9562 - protein, 880 aa, Streptococcus agalactiae
MTNKNKLLLIDGSSVAFRAFFALYNQIDRFKNNSGLHTNAIYGFHLMLNHILGRVQPSHILVAFDAGKTTFRTEMYADYKGGRAKTPDEFREQFPYIRQQLDVLGIKHYELEHYEADDIIGTLAKQAEASNEHFDITVVSGDKDLIQLTDTNTVVEISKKGVAEFEEFTPAYLMEKMGITPSQFIDLKALMGDKSDNIPGVTKIGEKTGLKLLSEYGSLEGIYENIEAMKQSKMKENLINDKEQAFLSKTLATINIASPITIGLEDILYSGPQDIKALSQFYDEMDFKQFKAALGEETSQEDFEVDFTEVEQLKTEMFSDNDFYYFEMLGDNYHVEDLIGIAWGNSDTIYATSNVSLLQEALFKKALSKPIKTYDFKRSKVLLNRFNIDLPEPAFDTRLAKYLLSTTEDNLVSTIARLYTNLPLDTDDAVYGKGAKRAIPEKTRFLEHLAKKVKVLVDSEANIMQQLKANEQEELLFEMEQPLANVLAKMEIRGIKVKKNTLNEMAIENQKVIETLTQEIYELAGQEFNINSPKQLGKLLFETLGLPVEMTKKTKTGYSTAVDVLERLAPISPLVTKILEYRQITKLQSTYIIGLQDYILEDGKIHTRYVQDLTQTGRLSSSDPNLQNIPVRLEQGRLIRKAFVPSEDNAVLLSSDYSQIELRVLAHISKDEHLIAAFKEGADIHTSTAMRVFGIEKPENVTPNDRRNAKAVNFGIVYGISDFGLSHNLGIPRKLAKQYIDTYFERYPGIKNYMETVVREAKDKGYVETLFHRRRSLPDINSRNFNIRQFAERTAINSPIQGSAADILKIAMINLDRVLDKGGYKSKMLLQVHDEIVLEVPNEEIGAIRELVTKTMESAISLSVPLIADENAGETWYEAK

SEQ ID NO: 9563 - protein, 438 aa, Streptococcus agalactiae
ATGGTTTATCATTTTCAAAATCCAAGTGATTTTATGTTAAAAAATTATTTAACAAAAGCAAAGACCATCGCAGTTGTAGGACTGTCAGACCGTCAAGAAACTGCAGCTTATCAAGTATCAAAAATAATGCAAGAAGCAGGTTATCAAATTATTCCAGTTAATCCTAAAAATGCAGGACAGAAAATACTTGGGCAAATGACATATGCCTCACTTAAGGATGTCACTGAACATATTGATATTGTTAATATTTTTCGACGTAGCGAGTATTTACCTGATATTGCAAGAGAATTTTTAGAAGTAGACGCTGATATTTTCTGGGCTCAGCTTGGACTTGAAAGTCAAGAAGCAGAGACAATTCTAAAGCAAGCAGGACACAAACAGATTGTCATGAATAAATGTCTGAAAGTTGAATGCCAAAAATTACACTCAGAAACTAAC

SEQ ID NO: 9564 - protein, 146 aa, Streptococcus agalactiae
MVYHFQNPSDFMLKNYLTKAKTIAVVGLSDRQETAAYQVSKIMQEAGYQIIPVNPKNAGQKILGQMTYASLKDVTEHIDIVNIFRRSEYLPDIAREFLEVDADIFWAQLGLESQEAETILKQAGHKQIVMNKCLKVECQKLHSETN

SEQ ID NO: 9565 - protein, 477 aa, Streptococcus agalactiae; identical to SEQ ID NO: 5181

SEQ ID NO: 9566 - protein, 159 aa, Streptococcus agalactiae; identical to SEQ ID NO: 804

SEQ ID NO: 9567 - protein, 1563 aa, Streptococcus agalactiae
ATGAAAATATCACAATACAATAAATGGTCAATTCGCCGATTGAAAGTTGGAGCTGCATCTGTAATGATTGCTAGTGGAAGCATTGTTGCTTTAGGGCAATCTCATATTGTTTCAGCAGATGAGATGTCCCAACCTAAAACAACCATTACAGCTCCAACAGCTAACACTTCTACAAATGTAGAAAGTAGTACTGATAAGGCATTATCAAAAGTTACTACGATGGAGACAAGTTCAGAAATGCCTAAAATGCAAAATATGGCAAAAGTTGAAAAAACGAGTGACAAACCTATGATGGTGGCTACCTCTGTTAGAAAAATGATGGCAACGCCGACACCTGTAGCGATGACCAAAACGACTAGTGTAGATGAGGTAAAGAAATCAACTGATACTGCTTTTAAACAGACAGTAGACGTTCCGGCTCATTATGTTAATGCAGCAAAAGGGAATGGCCCATTTCTAGCAGGTGTAAATCAAACGATTCCATATGAAGCGTTTGGTGGAGATGGCATGTTAACGCGTTTAATCCTTAAATCTTCTGAAGGAGCAAAATGGTCAGATAATGGTGTTGATAAAAATAGTCCATTATTACCATTGAAAGGCTTAACTAAAGGTAAATATTTCTATCAAGTTTCTTTAAATGGTAATACGACAGGTAAAGAGGGACAAGCTCTCTTAGATCAAATTAAAGCTAATGATAAACATAGCTACCAAGCCACAATTAGAGTTTATGGTGCTAAAGATGGTAAAGTTGATTTAAAAAACATGATTAGCCAAAAAATGGTAACCATTAACATTCCTCACATTACAACTGATATGGAAGTAAAAAATTCTCTAAAGATGGCCTTTAAAGAAAAAGTAGACGTCCCAGCAAAATATGTTAGTGCTGCAAAAGCTAAAGGTCCATTTTTAGCAGGTGTTAACGAAACGATTCCATATGAAGCGTTTGGTGGGGATGGCATGTTAACGCGTTTAATCCTTAAAGCTTCAGAGGGAGCAAAATGGTCAGACAATGGTGTTGATAAAAATAGTCCATTATTACCGTTAAAAGATTTAACTAAGGGTAAATACTTCTACCAAGTCTCTCTTAATGGCAATACAGCCGGTAAAAAAGGCCAAGCTCTCTTAGATCAAATTAAGGCAAATGGAAGCCATACTTATCAAGCAACTATCACTATTTATGGTACGAAAGATGGCAAAGTTGATATGAATACTATTTTAGGACAAAAGACAGTGATGATTCATATTAATGTCGCTAAAAAAGATATGAATAGCACATCAATGATGATGAAAAAAGATAAGATGACAATGCCTATGAAGAAAGAAATGACTTCATCTAAAATAAATACCGGTATGATGATGTCTAACAACAAGATGTCAGCTAATATGCAAATGTCATCACAAGCCAAATCAAATGATAAAGCTGGTAAAAAAATGTCTATGATGTCTAAAAATTTACCTAATACAGGTGAAACAAAGCAACAAAATGTAGGTGTGCTAGGTATGCTTAGTCTAGCCTTTGCGACAGGTCTAACTGCGCTAGGCCTTAAAAAATCTAAACAAAGA

SEQ ID NO: 9568 - protein, 521 aa, Streptococcus agalactiae
MKISQYNKWSIRRLKVGAASVMIASGSIVALGQSHIVSADEMSQPKTTITAPTANTSTNVESSTDKALSKVTTMETSSEMPKMQNMAKVEKTSDKPMMVATSVRKMMATPTPVAMTKTTSVDEVKKSTDTAFKQTVDVPAHYVNAAKGNGPFLAGVNQTIPYEAFGGDGMLTRLILKSSEGAKWSDNGVDKNSPLLPLKGLTKGKYFYQVSLNGNTTGKEGQALLDQIKANDKHSYQATIRVYGAKDGKVDLKNMISQKMVTINIPHITTDMEVKNSLKMAFKEKVDVPAKYVSAAKAKGPFLAGVNETIPYEAFGGDGMLTRLILKASEGAKWSDNGVDKNSPLLPLKDLTKGKYFYQVSLNGNTAGKKGQALLDQIKANGSHTYQATITIYGTKDGKVDMNTILGQKTVMIHINVAKKDMNSTSMMMKKDKMTMPMKKEMTSSKINTGMMMSNNKMSANMQMSSQAKSNDKAGKKMSMMSKNLPNTGETKQQNVGVLGMLSLAFATGLTALGLKKSKQR

SEQ ID NO: 9569 - protein, 684 aa, Streptococcus agalactiae
ATGACACAAAAATTATTATTAGTTGACGATGAATTTGAAATTATTGATATTAATAGACGTTATCTAGAGCAAGCAGGATATGAAGTGTCAGTAGCTGCGGATGGCATAGAAGCACTCAAAGAGGTAGATGAGAATCGTTTTGACCTAATTATTAGTGATATTATGATGCCTAAAATGGATGGCTATGATTTTATTAGTGAAGTTCTAGTTCGAGAACCCAACCAACCTTTTCTCTTTATAACCGCTAAAGTATCTGAACCAGATAAAATTTACTCTTTGAGTATGGGTGCAGATGACTTTATTTCCAAGCCTTTCAGTCCTAGGGAATTAGTTTTACGTGTTAAAAATATTCTAAGACGTATCTATGGGAATCATCAACAATCTGAAGTGTTGACGATTGGTGATTTGGTTATCGACCAAAAACAACGTTTGGTAATGGTGGACTGCAATACAATTTCCTTAACCAATAAATCATTTGACTTGCTTTGGATATTAGCAAATCATTTGAATCGTGTTTTTTCAAAAACAGAGCTTTATGAACGTGTCTGGGGCGAAGAATTTTTAGATGACACTAATACTTTGAATGTTCATATCCATGCCTTACGCAATGACCTTGCTAAATTTAGTACAGACAATACCCCAACTATCAAAACAGTTTGGGGATTAGGGTATAAATTAGAGGAA

SEQ ID NO: 9570 - protein, 228 aa, Streptococcus agalactiae; identical to SEQ ID NO: 808

SEQ ID NO: 9571 - DNA, 1035 bp, Streptococcus agalactiae
atgaaattaaaatattatattgttattggttaccttatttctatgttaataactgtagcaggtgttttctttgggcttaatcatatgctgattgagactcgaggtgtttactacatcctttcagttacaattattgcctgtattgtaggtggtatagttaatttgttcttattatcaagtgtatttacatctttgaaaaagttaaaacaaaaaatgaaggatatttctcaaagatgttttgatacaaaagcacaaatttgttcaccacaagaattcaaggatttagagacagcctttaaccaaatgtcttcggagttagagtcaacgtttaaatctctaaacgagagtgaacgcgaaaaaacaatgatgattgcacaactttcacatgatatcaagactccaattacttctatacaatcaacagtagaaggtattttagatggtattatatctgaagaagaagttaactattatctcaataccatttctcgtcaaacaaaccgtcttaaccatctggttgaagaattaagttttattacattagagactatgtcagacacggctgaacctcataaagaagaaacaatttatctggataaactactgattgatattttatctgaatttcaattggtgtttgaaaaagaaaatcgccaagtaatgattgatgttgcgccagatgtttcgaaattatctagtcaatatgataaattatcacgaattttattgaatttgattagcaatgcagtcaaatattctgatcctggaagtcccttgactatcaaggcctattcaaatcgtcaagatatcgttatcgatattattgaccaaggctatgggataaaagatgaagatcttgcttctatttttaatcgtctttatcgtgtagaatcttcacgaaatatgaagacaggaggacatggtctaggtctttatattgcgcgacaacttgcacatcaactgaatggggatattttggtcgaaagtcagtatcaaaaaggcagtaagttctctttagtacttaaattacaaaaa

SEQ ID NO: 9572 - protein, 345 aa, Streptococcus agalactiae; identical to SEQ ID NO: 810

SEQ ID NO: 9573 - DNA, 738 bp, Streptococcus agalactiae
atgacgaattcagaaattaaaaatgaggcaaaaactatattaagcaatcttcaaggtaagaatcaactttttttactcccgattctccttagtattattacgttatatatatcattttattatcaatataataatatgacactacttgatttttttgtacctcttccagtttatttcttttacacactttttattatttcagtcagttttgtaatgttagatgtcgtcaaaaatcagaaactaaacgttagattctcggacaatacttatgtattttcaagccatattttctggaaattactctcagtacttgttctaaaaggactaattttatctttcttttatctactaagtacttttggtctactaatcatcatttcaagttttaggctacttttgagtggtaaccttatccttgcccctgttttaatagttgttagtagcctaattactactaaggcagttataaaactcgttcaacaatattactcctatagtatctcaactttagtattttacactcaattagaaagtggaaactatgagggaccgtctaaagtactggttgctagtcgagaactaatgaatggtaataaacttagactcttccttttagacttaagttttattggttggcagttccttacaatcttcagtttcggattagtctatatctatctccttccttaccaaactactgcgcgcttaatcttttatagaaacattacaaaaaatagc

SEQ ID NO: 9574 - protein, 246 aa, Streptococcus agalactiae; identical to SEQ ID NO: 812

SEQ ID NO: 9575 - DNA, 555 bp, Streptococcus agalactiae
  misc_feature 550, 551, 552, 553, 554: n = A,T,C or G
atgactgatcatccaataaaatatcgattaattaaacaggaaaaacacacaggagccagacttggtgaaataatcacaccacatggtacatttccgacaccaatgtttatgcctgttgggacacaagcaactgttaagacacaatctcctgaagaactaaaagaaatgggttcaggaattattctatcaaatacctaccatttatggttacgtccaggtgatgaattgattgctaaagctggaggtttacataaattcatgaactgggatcaggctattctaacagacagtggaggctttcaggtttattctttggctgatagtcgaaacatcactgaagaaggagtaacctttaaaaaccatttaaatggtgcgaaaatgtttttatcaccagaaaaagctatttcaattcaaaataaccttggttctgatattatgatgagttttgatgagtgtccacaattttaccagccttatgattatgtaaaaaaatcaattgagcgaacaagccgttgggcagaacgtggattaaatgcccaccgccgtcctnnnnnt

SEQ ID NO: 9576 - protein, 185 aa, Streptococcus agalactiae
  VARIANT 184, 185: Xaa = Any Amino Acid
MTDHPIKYRLIKQEKHTGARLGEIITPHGTFPTPMFMPVGTQATVKTQSPEELKEMGSGIILSNTYHLWLRPGDELIAKAGGLHKFMNWDQAILTDSGGFQVYSLADSRNITEEGVTFKNHLNGAKMFLSPEKAISIQNNLGSDIMMSFDECPQFYQPYDYVKKSIERTSRWAERGLNAHRRPXX

SEQ ID NO: 9577 - DNA, 507 bp, Streptococcus agalactiae
atggatttccaggttatccaatggagggctgcggtcggagaaacacatgatgagatgaatgcagttcttgattttactgttccaatgcttccgaatgataagcctcgttatttgatgggagttggtgcaccagatagtttaatagacgccgttatccgaggagtagatatgtttgattgcgtcttacctactcgtattgctcgaaatgggacatgtatgacaagtcaaggtcgcttagttgttaagaatgctaaatttgcagaagattttacgcctcttgatccaaattgcgattgctatacttgtaaaaattatacacgcgcttatattcgtcacttattgaaagcagatgaaacttttggtattcgtttgactagttaccataatctttatttccttgtcaatcttatgaaagatgtcagacaagctattatggatgataatcttctagaattccgtcaagattttatggagcgctatggctatggcatgaataaccgtaatttt

SEQ ID NO: 9578 - protein, 169 aa, Streptococcus agalactiae
MDFQVIQWRAAVGETHDEMNAVLDFTVPMLPNDKPRYLMGVGAPDSLIDAVIRGVDMFDCVLPTRIARNGTCMTSQGRLVVKNAKFAEDFTPLDPNCDCYTCKNYTRAYIRHLLKADETFGIRLTSYHNLYFLVNLMKDVRQAIMDDNLLEFRQDFMERYGYGMNNRNF

SEQ ID NO: 9579 - DNA, 306 bp, Streptococcus agalactiae
atgcaagagtactttggtattggtcttgatagtagcagccgctgttaccactatcatactaaattggatattgtcgctttaaaatgtgctgtttgtcaaaaatattatgcttgttataaatgtcatgatgcactcgaggagcattgttttgcagcaacaaaatctgatgaaacgtttcctgtcttatgcggttcttgtcgtcagatgttgacattaaaagagtataaaactggtttttgtccttattgtcgtatgctttttaatccaaattgtcaacgccatgattctatttatttttcgaaggag

SEQ ID NO: 9580 - protein, 102 aa, Streptococcus agalactiae
MQEYFGIGLDSSSRCYHYHTKLDIVALKCAVCQKYYACYKCHDALEEHCFAATKSDETFPVLCGSCRQMLTLKEYKTGFCPYCRMLFNPNCQRHDSIYFSKE

SEQ ID NO: 9581 - protein, 537 aa, Streptococcus agalactiae
ATGTTTCACACAAAAAGCCTAATCCAGATGGCTATGATGGCTACTTTATTGGTGGTACTTGGTTTCATTCCTGCTCTACCACTTGGTTTCATTCCGGTCCCTATCGTCTTACAAAACCTAGGGGTTATGATGGCTGGTGTTATTTTGGGCGGAAGAAAAGGGAGTTTATCTATTTTGCTCTTCTTTCTTGTCGGTTTAGTTATTCCTGTATTCTCAGGTTTACGTTCGACTATACCTGTATTGACAGGACCAACAGCTGGTTATGTTATTGCTTGGTTGTTTGTTCCTTTGCTTATCTCATATGGTGTAAAATTAGTAAATAAAAAGAATTTTATAGCTATTTTCCTTATTGTATGGCTAGCAGGGGTCCTTTTTGTAGATGTAGCAGGAGCAGTTTGGCTGGCATCTTATACGAACATCCCATTAGATAAATCACTTCTTCAAAACTTAGTATTTATCCCAGGAGATACAATAAAAGCCATTATAGCTGCTGTTGTTGCTGTTAAATATAAAGATAGTTTTTTCTTGACTGAAAAA

SEQ ID NO: 9582 - protein, 179 aa, Streptococcus agalactiae; identical to SEQ ID NO: 818

SEQ ID NO: 9583 - protein, 774 aa, Streptococcus agalactiae
ATGAAATTAACAACGTTAGGTTGTTGGGGTGGTTATCCTTATAAAGATGGAGGAACCACAAGTTTTCTATTAACTGGAGAAAATAATTTTCACTTATTAATAGATGCGGGAAGTCGTTCAATCAATGAGCTAGAAAAAGAAATAAGCCCGTTGGATTTGGATGCAGTTATCATCAGTCATTATCATCCAGATCATGTAGCAGATTTGGGTGTGTTGTATCATTATCGTTTGCTATACCCTAAAGATAAATGGGAACCCAAAGTATTGCCAGTTTATGGACATAATGAGGATGATTATGAGTTTTCTAAATTGACATTACCTAACGTTGCTCAAGGAATTGCTTATCATACCAATGGAGTTGAGCAAGTTGGTCCCTTCAATATTACGTTTATCAAAACAGTCCACCCAGTCGTCTGCTATGCCATGAGGATTACAGAAAGAGAAACTGGTCAAGTATTAGTCTTTACAGGAGATTCTGGGTATTTTGCTGACCTTGTACCTTTTACAAAAGGCGCAGATTTATTTTTAGCAGACGTTTATCTTTACGAGGGAAATGAAAATCATATTGCACATTTGACTAGTAAAGAAGCAGGTGAGATTGCTTATAACGCTAAAGTTAAGAAATTAGTTTTAACACATGTTCCGCAGTTTCCGGGAGAAGGAATAAACCCCGAAAATCATTTGGAAGAACTTCGACTACAGTCTGAAAAGTATGCAGGTGGCATCTCTGTTGATTTAGCTCAGCCACATAAATCTTGGGACTTAGGAAAACTA

SEQ ID NO: 9584 - protein, 258 aa, Streptococcus agalactiae; identical to SEQ ID NO: 820

SEQ ID NO: 9585 - protein, 504 aa, Streptococcus agalactiae
ATGCAGAAATTTACCCAAGAAGAAAAAGAATGGTTTATGACAGAAGCTCTAAAGGAGGCAAAATCCTCCTTAGAGAAAGAAGAAATTCCTATAGGTTGTGTCATTGTAAAAGATGGTCATATTATTGGAAGAGGACATAATGCTCGTGAAGAGTTTAATAAAGCTATTTTACATGCTGAAATCATGGCTATTAACAATGCAAATGAGAAGGTAGGGAATTGGCGCTTATTAGATACTACTTTATTTGTTACTGTAGAACCTTGTGTAATGTGTAGTGGAGCTATTGGCTTAGCTAGAATTCCCCACGTTATATATGGCGCTAAGAATACGAAATTTGGAGCAGCGGGAAGTCTCTATGATATTTTAAGTGATAGCCGACTTAATCATAGAGTTGAGGTTGAAACCGGCATTTTAGAAGATCAATGCGCTAAAATAATGCAGGATTTCTTTCGAAAAGGACGACAACGCAAGAAAGAAGCTAAACTAAGTGAAAAAACTAAGATT

SEQ ID NO: 9586 - protein, 168 aa, Streptococcus agalactiae; identical to SEQ ID NO: 5200

SEQ ID NO: 9587 - protein, 132 aa, Streptococcus agalactiae
ATGTGTGCTCTTTTTATTTTCAAAAGTCAAAGTGTTTTTGGAAATAATTATGAAAGTTTCATAAAAATTGGTAGCGTTTCAAAAAATATGAAAATACAGTTAAAAAACCTTGAAAAAAAACTCACAAAAGAG

SEQ ID NO: 9588 - protein, 44 aa, Streptococcus agalactiae
MCALFIFKSQSVFGNNYESFIKIGSVSKNMKIQLKNLEKKLTKE

SEQ ID NO: 9589 - protein, 1347 aa, Streptococcus agalactiae
ATGACACATATTACATTTGACTATTCAAAAGTCTTGGGTCAATTTGTAGGCGAACACGAGTTAGACTACCTACAACCACAAGTAAGTGCAGCAGATGCTTTCCTTCGTCAAGGGACTGGTCCTGGCTCAGATTTTCTCGGATGGATGGACCTCCCAGAAAACTATGACAAAGAAGAATTTTCTCGCATTCAAAAAGCCGCTGAAAAGATTAAATCAGATAGCGAAGTACTCGTGGTTATTGGTATTGGTGGTTCGTACCTTGGCGCAAAAGCAGCAATTGACTTTTTGAATAATCATTTTGCTAATTTGCAAACCGCAGAAGAACGTAAAGCGCCTCAGATTCTTTATGCTGGAAATTCTATTTCATCTACTTACCTTGCCGATTTAGTTGAATACGTCCAAGATAAAGAATTCTCAGTAAATGTCATTTCAAAATCAGGTACAACAACTGAACCAGCGATTGCTTTCCGTGTATTTAAAGAACTTCTAGTTAAAAAGTACGGTCAAGAAGAAGCTAATAAACGTATCTACGCTACAACTGATAAAGTTAAAGGTGCCGTAAAAGTTGAAGCAGATGCTAACAATTGGGAAACATTTGTAGTTCCTGATAATGTTGGTGGTCGTTTCTCAGTACTGACAGCCGTAGGTCTTCTTCCAATTGCTGCTTCAGGAGCAGATATTACTGCTCTTATGGAAGGCGCAAATGCTGCTCGTAAAGATTTATCTTCAGATAAAATCTCTGAAAACATTGCTTATCAGTACGCTGCAGTTCGTAATGTTCTTTATCGCAAAGGTTATATCACAGAGATTTTAGCTAACTACGAACCATCATTACAATACTTTGGTGAATGGTGGAAACAATTAGCAGGTGAATCAGAAGGTAAAGATCAAAAAGGTATCTATCCTACATCAGCAAACTTCTCAACTGATCTTCACTCACTTGGTCAATTTATTCAAGAAGGTTACCGTAACCTCTTTGAGACAGTTGTTCGCGTTGAGAAACCTCGTAAAAATGTGACTATTCCTGAATTAACCGAAGATTTAGATGGTCTTGGTTATCTTCAAGGAAAAGATGTAGATTTTGTTAATAAAAAAGCAACAGATGGTGTACTCCTTGCTCATACAGATGGTGGGGTTCCAAATATGTTTGTAACGCTTCCTACACAAGACGCTTACACCCTTGGTTACACTATTTACTTCTTTGAGTTAGCAATTGGCCTTTCAGGTTATCTTAACTCAGTAAATCCATTTGATCAACCAGGGGTAGAAGCATATAAACGTAATATGTTTGCTCTTCTAGGTAAACCTGGATTCGAAGAGCTTAGCGCTGAATTGAATGCACGTCTT

SEQ ID NO: 9590 - protein, 449 aa, Streptococcus agalactiae; identical to SEQ ID NO: 824

SEQ ID NO: 9591 - DNA, 525 bp, Streptococcus agalactiae
atggaaaagaaattattaagaaaagaagttttgataaccttaaaatctcaacctcaagcttacaaatcagaagttgactgtaaacttttagaggcttttataaaaactaaagcttatcaaaatagttgtgtaattgctacttacctatcttttgactacgaatacaatacacaacttcttattaaacaagctttatgtgatggcaaacgtgtccttgttcccaaaacttatccaaaaggtaaaatgatttttgtggactatcaaaaagataacttgaggacaacaccgtttggcttattagaacctgttaatgatagagctgttgaaaaagctagtatagacttaattcatgtgcccggacttatctttaacaataaaggttttcgtataggttatggtgcaggttattttgatcgctatttgagtgattttgaaggtgatactattagtactatttataggtgtcagagacaggattttgtagaagagaagcatgacgtagcagttaaggaggtattatgtcta

SEQ ID NO: 9592 - protein, 175 aa, Streptococcus agalactiae; identical to SEQ ID NO: 826

SEQ ID NO: 9593 - DNA, 675 bp, Streptococcus agalactiae
atgtctatgaagaagttcgctaaagagtatccgacgacagtactcttggtcagtctgacaacccttgtttttttattgatgcaactaacttatggaagtcaagcggagtctagccaagttatttttcaatttggtggaatacaaggtgattatctaaaagcatatccaacaaatctatggagactaataagtcctatctttgttcatattggttgggaacattttttattaaatggtttagctctgtatttcgtaggacaaatgggggaaagtatttggggaagtttgagatttctaattctctatattttatctggcttaatgggtaatatttttacgctattttttactccacatgtggtggcagcaggagcctcaacgtctttatttggtgttttttctgctatagcaatcgcagggtattttggaaaaaatccttatttaaaacaagttggaaaatcatatcaagtgatgatcttgttaaatttattttttaatatcttcacacccggagtgagtttagcaggccatgttggtggtttagttggtggagtattggtggctatttttttgacaaaacaaaatggttctttattatttaaaacttggcaaagtattttagctttaatgatatttattattgtatcgatcagcttaataggtctatcgttggta

SEQ ID NO: 9594 - protein, 225 aa, Streptococcus agalactiae
MSMKKFAKEYPTTVLLVSLTTLVFLLMQLTYGSQAESSQVIFQFGGIQGDYLKAYPTNLWRLISPIFVHIGWEHFLLNGLALYFVGQMGESIWGSLRFLILYILSGLMGNIFTLFFTPHVVAAGASTSLFGVFSAIAIAGYFGKNPYLKQVGKSYQVMILLNLFFNIFTPGVSLAGHVGGLVGGVLVAIFLTKQNGSLLFKTWQSILALMIFIIVSISLIGLSLV

SEQ ID NO: 9595 - DNA, 1041 bp, Streptococcus agalactiae
gtgaacagaaaaattattggcttaactctactatctttatctgtactaacattaacagcatgtggtaatcgttcagataagtctgcaaataaatcagatatcaaagttgcgatggtaactaatcaaggtggagtagacgataaatcgtttaatcaatcagcttgggaagggctacaaaagtggggaaaaaagaaggggttgacaaaaggtaatggctttgattatttccagtcatctaatgaatcagatcatgctaataaccttgatacggcagcctctagtggttataatttaatttttggtattggatttggtcttcatgatactattgaaaaagtatcagaaaataataaagatgttaaatacgttattgtagatgatatcattaaaggtaaagaaaatgtagctagtgttacttttgcagacaatgaagctgcttacttagctggagttgctgcagctaagacaactaagacaaaaacagttggttttatcggagggatggaaggcgtcgttgttaagcgatttgaagcaggatttaaggctggagtaaaatcaattgatccggctattaaagttgcggtatcttatgcaggctcatttacagatgcagctaaaggtaaaacgattgctgccacacagtatgcaacaggtgttgatgttatttaccaggctgctggtggtacaggagcaggaatttttagtgaggctaaaactgaaaatgagacccgcaaggaatctaacaaagtctgggtaattggtgttgacagagatcaaagtcaagaaggcaattatgtttcaaaagatggtaagaaagcaaactttgttctggcatctactataaaagaggtggggaaatctctccaatctgtagcagaattaacagagaaaaaacaatatccaggagggaaagtaacagtttttggtctaaaggatagtggtgtagatattaaagagcatcaattgtctagtgagggatctgttgctgtcaaaaaagctaaagaggatattgtttcagggaaaatacaagttcctatgaaa

SEQ ID NO: 9596 - protein, 347 aa, Streptococcus agalactiae
MNRKIIGLTLLSLSVLTLTACGNRSDKSANKSDIKVAMVTNQGGVDDKSFNQSAWEGLQKWGKKKGLTKGNGFDYFQSSNESDHANNLDTAASSGYNLIFGIGFGLHDTIEKVSENNKDVKYVIVDDIIKGKENVASVTFADNEAAYLAGVAAAKTTKTKTVGFIGGMEGVVVKRFEAGFKAGVKSIDPAIKVAVSYAGSFTDAAKGKTIAATQYATGVDVIYQAAGGTGAGIFSEAKTENETRKESNKVWVIGVDRDQSQEGNYVSKDGKKANFVLASTIKEVGKSLQSVAELTEKKQYPGGKVTVFGLKDSGVDIKEHQLSSEGSVAVKKAKEDIVSGKIQVPMK

SEQ ID NO: 9597 - DNA, 897 bp, Streptococcus agalactiae
atgaaagtcagaaaagcagttatccctgccgctggtttaggaacacgttttttacctgctactaaagctttagctaaagaaatgcttccaatcgttgataaaccaactattcaatttattgttgaagaagcactaaaatctggaattgaagatattttagttgtaactggtaaatcaaaacgttctatagaagaccactttgattcaaattttgaattagaatataacctaaaagagaaagggaaaaacgaacttctcaaacttgttgatgaaacaactggcattcgactccattttattcgacaaagtcatcctcgtgggcttggagatgctgtgctacaagcaaaagccttcgttggtaatgaaccttttgttgttatgctaggtgatgatctaatggatattaccaataataaagttattcctctcaccaaacaattaattaatgactttgaagctactcatgcatcaacaattgctgttatggaagttccacatgaagatgtttctgcttatggtgttattgctccacaaggagaaggagttaatggtctatatagcgttaacactttcgttgaaaaaccttctcccgaagaggctccaagtaatttggcaatcattggtcgctacttgttaactccagaaatttttaatattttagaaactcaaaaacctggtgcaggaaatgagattcaactaaccgatgctatcgatactttaaataaaacgcaacgtgtttttgctagaaaatttacaggagaccgttacgacgttggtgacaagtttggttttatgaaaacatctattgattatgctcttcaacacccacaagttaaagatgacttgaagaaatatatcattgatttaggaaaatctctagaaaaaacatctaagaag

SEQ ID NO: 9598 - protein, 299 aa, Streptococcus agalactiae; identical to SEQ ID NO: 5216

SEQ ID NO: 9599 - DNA, 1014 bp, Streptococcus agalactiae
atgacaaaacaaaaaattgccgttcttggacctggttcatgggggactgctcttgcacaagtattaaatgacaatggacatgaggtacgcttatggggaaacgtggttgaacaaatagaagagattaatactaaccatactaatcaacgttacttcaaagatattaccttagattccaaaataaaagcctacactaatcttgaggaagcgattaataatgttgacagcattttattcgtcgtcccaactaaagttacaagacttgttgctaaacaagtggctaatcttttaaagcataaagttgttcttatgcatgcttctaagggactagaacctggtactcatgaacgactttctacaattttagaagaagaaatctctgaacaatatcgtagtgatatcgttgttgtttcaggtcccagtcatgctgaagaagccatcgttcgtgatattactttgattactgctgcttcaaaagatattgaagcagctaagtatgtccaaaaattgtttagtaatcattattttagactttatactaacactgatgtcgtaggagtagaaacagctggtgctctaaaaaatattattgctgttggtgctggagcactacacggtcttggttatggtgataatgctaaagcagctattattacgcgtggtttagctgagataacacgtcttggtgtacaattaggggccgaccctctcactttcagtggtttatccggagttggagatttaattgtgactggtacatctgttcattctcgcaactggagagcgggagatgctttaggacgtggtgagaaacttgaagatattgaaaaaaatatggggatggttattgaaggtatctcaacaactaaagttgcttacgaaatcgcccaaaacttaaatgtttacatgcccattacagaagctatttataaatcaatatatgaaggggctaatatcaaagatagcattttagatatgatgtccaatgaatttcgttcagagaatgaatggcac

SEQ ID NO: 9600 - protein, 338 aa, Streptococcus agalactiae
MTKQKIAVLGPGSWGTALAQVLNDNGHEVRLWGNVVEQIEEINTNHTNQRYFKDITLDSKIKAYTNLEEAINNVDSILFVVPTKVTRLVAKQVANLLKHKVVLMHASKGLEPGTHERLSTILEEEISEQYRSDIVVVSGPSHAEEAIVRDITLITAASKDIEAAKYVQKLFSNHYFRLYTNTDVVGVETAGALKNIIAVGAGALHGLGYGDNAKAAIITRGLAEITRLGVQLGADPLTFSGLSGVGDLIVTGTSVHSRNWRAGDALGRGEKLEDIEKNMGMVIEGISTTKVAYEIAQNLNVYMPITEAIYKSIYEGANIKDSILDMMSNEFRSENEWH

SEQ ID NO: 9601 - protein, 327 aa, Streptococcus agalactiae
TTGAAAAAAACCTATCGGGTAAAAAGTGATAAGGATTTTCAAATGATTTTCAGCAGAGGTAAAAATGTTGCTAATCGAAAATTTGTTATCTACTATTTAGAAAAAGAACAAAAACACTTTCGTGTGGGAATCTCTGTTAGTAAGAAATTAGGAAATGCTGTTGTTCGTAACGCTATTAAAAGAAAAATTAGGCATGTTTTACTCTCTCAGAAAACAGCGCTGCAAGATTATGATTTTGTCGTGATTGCGCGTAAAGGTGTAGAGGAATTGGACTATCAAGCATTAGAAAAAAATCTTATACACGTTTTAAAAATAGCAGGACTCATC

SEQ ID NO: 9602 - protein, 109 aa, Streptococcus agalactiae; identical to SEQ ID NO: 832

SEQ ID NO: 9603 - protein, 813 aa, Streptococcus agalactiae
TTGAAGAAAAAACTTAAAACATTTAGCTTAATATTGCTGACAGGCTCTTTATTGGTTGCTTGCGGACGAGGAGAAGTATCTAGTCATTCAGCCACATTATGGGAGCAAATAGTTTATGCATTTGCTAAATCAATACAATGGCTCTCCTTTAACCATTCAATTGGTTTGGGAATAATCTTATTCACTCTAATAATCAGAGCGATTATGATGCCGCTTTATAATATGCAAATGAAATCCAGCCAAAAGATGCAGGAAATTCAGCCAAGGCTCAAGGAATTACAAAAAAAATATCCAGGGAAAGATCCTGATAACCGTTTAAAGCTAAATGATGAAATGCAATCTATGTATAAAGCTGAGGGAGTTAACCCATATGCAAGTGTATTACCTCTTCTAATTCAGTTACCTGTCCTATGGGCTCTTTTCCAAGCTTTGACTAGGGTTTCTTTCTTAAAAGTAGGAACATTTTTGAGCCTAGAATTATCACAGCCGGACCCATATTATATTTTACCTGTACTGGCGGCCTTATTTACCTTTTTATCAACTTGGTTAACTAACAAAGCAGCTGTTGAAAAAAATATTGCTTTAACTCTTATGACTTATGTTATGCCGTTTATCATATTGGTAACAAGCTTTAACTTTGCTAGTGGTGTTGTTTTATACTGGACGGTGTCTAATGCTTTTCAAGTATTTCAAATTCTATTATTGAACAACCCATACAAGATTATAAAGGTTCGAGAAGAAGCAGTAAGAGTGGCACATGAAAAAGAACAAAGAGTTAAACGTGCTAAGAGAAAAGCAAGTAAGAAAAGAAAG

SEQ ID NO: 9604 - protein, 271 aa, Streptococcus agalactiae; identical to SEQ ID NO: 834

SEQ ID NO: 9605 - protein, 885 aa, Streptococcus agalactiae
ATGAAAAAGAACAAAGAGTTAAACGTGCTAAGAGAAAAGCAAGTAAGAAAAGAAAGTAGGAAAACCATGGTATTATTTACAGGAGCGACTGTAGAAGAAGCTATTGAAAAAGGACTACAAGAGTTAAACATTTCACGATTGAGGGCACATATAAAAGTTGTATCACGTGAGAAAAAAGGTTTTTTGGGCTTTGGTAAAAAGCCAGCAAAAGTTGAAATAGAAGGTATCACCGACGAAGTAACTGATATTAATGAATCGGTAGCGTTAAAAAATATTAAGAATGTACCGTCTAGCGTAGATGTGGTGGAAGAATATATAGAGGAGGTTGATGAAACGCTTGAAAAAGAAGACGTATCACAACCAGAACTTCCAAAAATTGATGATAAAAACGTTGTAACTACAAGTGAAGCTATTGAAAAAATTGACCTACTTCCTAATATTGAAGTAGCAGCTGCTCAGGTGACTAAATACGTTGAAAATATCATCTATGAGATGGATTTAGATGCAACAATAGAAACTACGACAAGTAAGCGACAAATAAATCTCCAAATAGAAACGCCAGAAGCTGGGCGCATCATTGGTTATCATGGAAAAGTATTAAAATCGTTGCAGTTGTTAGCACAAAATTATCTTCATGACCGCTTTTCTAAGAGTTTTTCAGTATCCATTAATGTCCATGACTACGTTGAGCATCGTACAGAAACTTTAATTGATTTTTCTAAAAAAATAGCTAGGCGTGTTTTAGAGACTAATGAACCTTACCATATGGATCCTATGAGTAACAGTGAGCGAAAAACTGTTCATAAAACAATTGCAACTATAGAGGGTGTTGAAAGTTATTCTGAAGGTAACGATCCTAATAGATTTGTAGTAGTTACTAAGAAA

SEQ ID NO: 9606 - protein, 295 aa, Streptococcus agalactiae; identical to SEQ ID NO: 836

SEQ ID NO: 9607 - protein, 114 aa, Streptococcus agalactiae
TTGGATAATTTAATCAGGTTAGCTGAGATTTTTGACGTGAGCTTAGATGAACATGTTTTAGCTAAAACAAATGAAGTTAAAGTTGAACGTATTTATGAAAAAAATCTTGATCTG

SEQ ID NO: 9608 - protein, 38 aa, Streptococcus agalactiae
MDNLIRLAEIFDVSLDEHVLAKTNEVKVERIYEKNLDL

SEQ ID NO: 9609 - protein, 1113 aa, Streptococcus agalactiae
ATGGCTTTAACAGCAGGTATTGTAGGCTTACCAAATGTTGGTAAATCAACTTTATTTAACGCAATTACAAAAGCAGGAGCAGAAGCTGCTAATTATCCTTTTGCGACTATTGATCCCAATGTTGGTATGGTAGAAGTACCAGATGAGCGTCTACAAAAATTGACAGAATTGATTACGCCTAAAAAAACAGTTCCGACAACCTTTGAATTTACTGATATTGCAGGTATTGTTAAAGGTGCTTCGAAGGGGGAAGGTCTAGGTAATAAATTTTTAGCTAATATTCGTGAAGTGGATGCTATTGTTCATGTGGTACGTGCTTTTGATGATGAAAATGTTATGCGTGAACAAGGTCGTGAGGATGCCTTCGTTGATCCTATAGCAGATATTGATACTATTAATCTTGAATTAATCTTAGCTGATTTAGAGTCAATCAATAAACGTTATGCGCGTGTTGAAAAAATGGCACGAACTCAAAAAGATAAAGAATCAGTAGCAGAGTTCAATGTTTTACAAAAGATTAAACCTGTTTTGGAAGATGGGAAATCAGCTCGTACCATTGAGTTTACAGAAGAGGAAGCAAAAGTTGTTAAAGGTCTCTTTTTATTAACAACTAAACCTGTTTTATATGTTGCTAATGTTGATGAGGACAAAGTAGCTGATCCTGATGATATCGACTATGTTAATCAAATTCGTGCATTTGCAGAAACAGAGAGTGCAGAAGTAGTTGTGATTTCTGCTCGAGCTGAAGAAGAAATATCTGAACTTGATGATGAAGATAAGTTAGAATTTTTAGAAGCTATTGGATTAACAGAATCTGGTGTTGATAAATTAACACGAGCTGCTTATCATCTTTTAGGCCTTGGAACTTACTTTACTGCTGGTGAAAAAGAGGTTCGCGCTTGGACATTTAAGCGTGGTATAAAAGCTCCACAAGCTGCGGGTATTATCCATTCAGATTTTGAAAGAGGTTTTATTCGTGCAGTAACGATGTCATATGATGACCTTATTCAATATGGATCTGAAAAAGCAGTAAAAGAAGCTGGCCGGTTACGTGAAGAAGGAAAAGAGTATATTGTTCAAGATGGCGATATCATGGAATTCCGTTTCAATGTC

SEQ ID NO: 9610 - protein, 371 aa, Streptococcus agalactiae
MALTAGIVGLPNVGKSTLFNAITKAGAEAANYPFATIDPNVGMVEVPDERLQKLTELITPKKTVPTTFEFTDIAGIVKGASKGEGLGNKFLANIREVDAIVHVVRAFDDENVMREQGREDAFVDPIADIDTINLELILADLESINKRYARVEKMARTQKDKESVAEFNVLQKIKPVLEDGKSARTIEFTEEEAKVVKGLFLLTTKPVLYVANVDEDKVADPDDIDYVNQIRAFAETESAEVVVISARAEEEISELDDEDKLEFLEAIGLTESGVDKLTRAAYHLLGLGTYFTAGEKEVRAWTFKRGIKAPQAAGIIHSDFERGFIRAVTMSYDDLIQYGSEKAVKEAGRLREEGKEYIVQDGDIMEFRFNV

SEQ ID NO: 9611 - protein, 573 aa, Streptococcus agalactiae
ATGGTAAAAATGATTGTTGGATTAGGAAATCCAGGAAGTAAATATAATGATACAAAACATAATATTGGATTTATGGCTGTTGACAGAATTGTAAAAAACCTTGACGTCAACTTTACAGAAGATAAAAATTTTAAAGCAGAGATAGGTAGTGATTTTATCAACGGTGAAAAAATTTATTTTATCAAACCAACTACTTTTATGAATAACAGTGGTATTGCTGTAAAAGCCCTACTTACTTACTACAACATTTCTATTAAGGATATGATTATCATATATGATGATTTAGACATGGAAGTCGGTAAAATACGTTTTCGTCAAAAAGGATCTGCTGGGGGACATAATGGTATCAAGTCTATTATTGCTCATTTAGGTACTCAAGAATTTGATCGTATTAAAGTAGGTATAGGACGTCCGAATGGACGTATGACAGTTATTAATCATGTTCTAGGGAAGTTTGATAAAAATGATGAAATTATGATATCAAATACTCTTGATAAGGTTGACAATGCTGTCAATTATTATTTACAGACGAATGATTTTCAAAAAACAATGCAGAAATACAACGGTTTAAAA

SEQ ID NO: 9612 - protein, 191 aa, Streptococcus agalactiae
MVKMIVGLGNPGSKYNDTKHNIGFMAVDRIVKNLDVNFTEDKNFKAEIGSDFINGEKIYFIKPTTFMNNSGIAVKALLTYYNISIKDMIIIYDDLDMEVGKIRFRQKGSAGGHNGIKSIIAHLGTQEFDRIKVGIGRPNGRMTVINHVLGKFDKNDEIMISNTLDKVDNAVNYYLQTNDFQKTMQKYNGLK

SEQ ID NO: 9613 - protein, 3491 aa, Streptococcus agalactiae
ATGAATATTATAGAATTATTTAGCCAAAATAAAGTGGTGCGGACATGGCACTCTGGATTAGTAACTAATAGTCGCCAATTAGTTATGGGGTTTTCAGGAGCAAGTAAAGCTATTGCCATAGCATCAGCCTACGAGAAGTTATCTAAAAAAATTATGGTAGTCACTGCCACTCAAAACGATTCTGATAAATTATCAAGTGATATATCAAGTTTAATTGGAGAAGATAACGTTTATCAATTTTTTGCTGATGACGTTCCTGCAGCAGAGTTTATTTTCTCTTCATTAGATAAATCAATTTCACGACTCAGTGCCTTGAGGTTTCTAAAAGATCCAGAAAAAAACGGTGTTTTGATTACTAGTATCAGTGGTTTAAGGTTACTATTACCAAATCCGGAAGTTTTCTCGAAAAGTCAATATAAGTTTGAAATCGGTCAAGAATGTTATTTAGATAAATTGAGTAAGAACCTAGTCAATTTAGGTTATCAGAAAGTTTCTCAAGTATTTAGTCCTGGTGAATTTAGCCAAAGAGGAGATATTTTAGATATTTTTGAGATGACACAAGAATATCCTTATCGCTTGGAATTCTTCGGAGATGAAATAGATGGCATCAGGCAGTTTGATATTGACACTCAAAAGTCTCTTAAACAATTAGAGTCAGTACAGATTTCGCCAGCAGATGATATTATTTTACAAGATGCAGATTTCGAGCGTGCAAAGAAAAAACTTGAGGGCTATCTAGTAACAGCTAGTGAGGTACAACGCGCCTATTTGAGCGAGGTTTTATCTACAACTGAAAATCATTTTAAGCACTCAGATATTCGTCGTTTTCTAAGTATCTTTTATGAAAAAGAATGGGGAATATTAGACTATATTCCTGAGGGAACTCCACTTTTTGTTGATGATTTTCAAAAAATTGTAGATCGAAATGCTAAGTTAGATTTAGAAATAGCTAGCCTTCTGACGGAAGATTTACAACAAGGCAAGTCTCATTCTAGTTTGAACTATTTTTCAGATCCTTATAAGCAATTAAGACAATACCAACCAGCAACCTTCTTTTCAAATTTCCACAAAGGATTAGGAAATCTGAAATTTGATAAACTTCATCATTTTACTCAATATGGAATGCAAGAATTTTTTAATCAATTTCCATTGTTGGTCGATGAAATCAATCGTTATAAGAAATCTGGAGCGACAGTACTGTTGCAAGTAGATTCTCAAAAAGGTTTAAATCTCCTTCAAGAAAATTTAAAAGAATATGGGTTAGATTTAATCATTTCAGATAAAAACGATATCGTTCCAAAGGAGTCACAACTTATTGTTGGGCATCTTTCAAATGGTTTTTATTTTGCAGATGAGAAAATTGTTCTGATTACTGAACGTGAGATTTATCATAGGCGTGTTAAAAGGAAAATTAGACGCAGTAATATTAGTAATGCAGAACGTCTAAAAGATTATAATGAACTTTCAGTTGGCGATTATGTTGTTATAATGTTCATGGCGTAGGAAAATTTTTAGGTATAAACAATGAGATACAAGGTATTCATCGTGATTATCTGACTATTCAATATCAAAATGCTGATCGTATCTCTATCCCCGTAGAACAAATTGAACTTCTAACAAAATATGTCTCTGCAGATGGCAAAGAGCCTAAAATTAATACGTTAAATGATGGTCGCTTCAAAAAAGCAAAACAGAGAGTTGCAAAGCAAGTAGAAGATATTGCTGATGATTTGTTGAAACTTTATGCAGAGCGTAGTCAATTACAAGGATTTGCATTTTCTCCTGACGATAATATGCAAAATGACTTTGATAATGATTTTGCATATGTAGAGACAGAGGATCAATTGCGGTCTATAAAAGAAATTAAACAGGATATGGAAGGTAATCGTCCGATGGATCGATTATTGGTTGGAGACGTTGGTTTTGGTAAGACAGAGGTTGCTATGCGTGCGGCTTTCAAAGCTGTCAATGACCATAAACAAGTTGCTGTTTTAGTCCCAACAACAGTTCTAGCTCAGCAGCATTTTGAAAATTTTAAAGAACGTTTTAGCAATTATCCTGTTACAGTTGATGTACTTAGTCGTTTTCGTAGCAAAAAAGAACAAACAGATACACTAAAAAGATTATCTAAGGGCCAAGTTGATATTATTATTGGAACACATCGGCTTCTCTCTCAAGATGTTGTATTTTCGGATTTAGGGTTAATAGTTATTGATGAGGAACAGCGATTTGGTGTAAAGCATAAAGAAAAGTTAAAAGAATTAAAAACAAAAGTTGATGTCTTAACTTTGACAGCGACCCCAATACCTAGAACATTACATATGTCAATGCTTGGCATTAGAGACTTATCAGTGATTGAAACACCTCCAACCAATCGTTATCCTGTGCAGACTTACGTTTTGGAGACAAATCCTGGTTTAGTTAGAGAAGCTATTATTCGTGAGATAGACAGAGGAGGACAGGTTTTTTATGTTTACAATAAAGTTGACACTATTGATCAGAAAGTTTCAGAACTTCAGGAGTTAGTACCAGAAGCTAGTATTGGTTTTGTTCATGGTCAAATGTCTGAAATTCAATTAGAAAATACATTAATAGACTTTATCAATGGAGATTACGATGTTTTAGTTGCAACGACAATAATTGAGACAGGAGTCGATATTTCAAATGTTAATACCCTCTTTGTTGAAAATGCAGATCATATGGGCTTGTCAACCCTTTATCAATTAAGAGGCCGTGTGGGTAGAAGTAATCGCATTGCTTATGCTTACCTTATGTACAGACCTGATAAAGTTTTAACAGAAATTTCTGAGAAAAGACTAGATGCAATCAAAGGGTTTACAGAATTGGGATCTGGTTTTAAAATAGCGATGCGTGATTTATCTATACGTGGTGCAGGAAATATTTTAGGAGCTTCACAAAGTGGTTTTATTGATTCGGTTGGATTCGAGATGTATTCACAGCTTCTAGAGCAAGCGATTGCCACCAAACAAGGGAAATCATTAATTCGTCAAAAAGGTAATGCTGAATTAGCCTTACAAATTGACGCCTATTTACCAGCAGAATATATATCAGATGAGCGCCAAAAAATAGAAATATATAAGCGTATTCGTGAATTAGAAACTAGGGCTGATTATGAAACCTTACAAGATGAGTTAATAGATCGTTTTGGAGAATATCCTGATCAAGTTGCATACCTTTTAGAAATAGGACTTTTAAAAGCTTATCTGGACCTTGCCTTTACTGAATTAGTAGAAAGAAAAGGTAATGAAATAAGCATCCTATTTGAAAAAGCATCTTTGAAGTATTTTTTAACTCAAGATTATTTTGAAGCACTATCAAAAACTCAACTTAAGGCTAGAATTAGCGAAACAAATGGTAAGATGGAAGTTGTTTTTAATATCAAACATAAGAAAAATTATGAAATTATTGAAGAACTTCTAAAATTTGCCGAATGTTTTATCGAGATTAAGTCACGTAAACCAGTAGAAGAA

SEQ ID NO: 9614 - protein, 1165 aa, Streptococcus agalactiae
  VARIANT 507: Xaa = Any Amino Acid
MNIIELFSQNKVVRTWHSGLVTNSRQLVMGFSGASKAIAIASAYEKLSKKIMVVTATQNDSDKLSSDISSLIGEDNVYQFFADDVPAAEFIFSSLDKSISRLSALRFLKDPEKNGVLITSISGLRLLLPNPEVFSKSQYKFEIGQECYLDKLSKNLVNLGYQKVSQVFSPGEFSQRGDILDIFEMTQEYPYRLEFFGDEIDGIRQFDIDTQKSLKQLESVQISPADDIILQDADFERAKKKLEGYLVTASEVQRAYLSEVLSTTENHFKHSDIRRFLSIFYEKEWGILDYIPEGTPLFVDDFQKIVDRNAKLDLEIASLLTEDLQQGKSHSSLNYFSDPYKQLRQYQPATFFSNFHKGLGNLKFDKLHHFTQYGMQEFFNQFPLLVDEINRYKKSGATVLLQVDSQKGLNLLQENLKEYGLDLIISDKNDIVPKESQLIVGHLSNGFYFADEKIVLITEREIYHRRVKRKIRRSNISNAERLKDYNELSVGDYVVHNVHGVGKFLGXETIEIQGIHRDYLTIQYQNADRISIPVEQIELLTKYVSADGKEPKINTLNDGRFKKAKQRVAKQVEDIADDLLKLYAERSQLQGFAFSPDDNMQNDFDNDFAYVETEDQLRSIKEIKQDMEGNRPMDRLLVGDVGFGKTEVAMRAAFKAVNDHKQVAVLVPTTVLAQQHFENFKERFSNYPVTVDVLSRFRSKKEQTDTLKRLSKGQVDIIIGTHRLLSQDVVFSDLGLIVIDEEQRFGVKHKEKLKELKTKVDVLTLTATPIPRTLHMSMLGIRDLSVIETPPTNRYPVQTYVLETNPGLVREAIIREIDRGGQVFYVYNKVDTIDQKVSELQELVPEASIGFVHGQMSEIQLENTLIDFINGDYDVLVATTIIETGVDISNVNTLFVENADHMGLSTLYQLRGRVGRSNRIAYAYLMYRPDKVLTEISEKRLDAIKGFTELGSGFKIAMRDLSIRGAGNILGASQSGFIDSVGFEMYSQLLEQAIATKQGKSLIRQKGNAELALQIDAYLPAEYISDERQKIEIYKRIRELETRADYETLQDELIDRFGEYPDQVAYLLEIGLLKAYLDLAFTELVERKGNEISILFEKASLKYFLTQDYFEALSKTQLKARISETNGKMEVVFNIKHKKNYEIIEELLKFAECFIEIKSRKPVEE

SEQ ID NO: 9615 - protein, 270 aa, Streptococcus agalactiae
GTGAGATTAGACAAGTATCTAAAAGTGTCGCGTATCATTAAGCGTCGTCCCGTTGCTAAAGAAGTTGCAGACAAAGGACGTGTCAAGGTGAATGGCGTATTAGCAAAGTCATCAACTGACCTAAAGCTTAATGACCAAGTTGAAATTCGTTTTGGTAATAAATTGTTGACCGTTAAAGTATTAGAAATGAAAGATAGCACTAAGAAAGAAGATGCTATCAAGATGTATGAAATTATTAATGAAACAAGGATAGAAACAGATGAGCAAGCC

SEQ ID NO: 9616 - protein, 90 aa, Streptococcus agalactiae; identical to SEQ ID NO: 32

SEQ ID NO: 9617 - protein, 369 aa, Streptococcus agalactiae
ATGAGCAAGCCTAATGTTGTTCAGTTAAATAATCAATATATTAACGATGAGAATCTAAAAAAACGTTACGAAGCTGAGGAGTTACGCCGAAAAAATCGTTTAATGGGTTGGGTTCTTATTTTTGTCATGCTTTTATTTATTTTACCCACTTATAATTTAGTTAAGAGTTACAGAACTTTACAAGAACGTCGTCAAGAAGTTGTAAAATTAACGAAAGACTATCAGACATTAACTAATAGAACTGAGAACCAGAAGTTACTAGCAAAACAACTAAAAAATCCAGATTACGTTCAAAAATATGCTCGAGCGAAGTATTATTTCTCTAAGACTGGCGAAATGATTTACCCATTACCAGACCTTTTACCAAAA

SEQ ID NO: 9618 - protein, 123 aa, Streptococcus agalactiae; identical to SEQ ID NO: 34

SEQ ID NO: 9619 - protein, 132 aa, Streptococcus agalactiae
ATGAATAATTTAATTGAAACAATAGAACATTTTCTAGCCTACTCGGATGACAAACTAGAAGAGTTAGCTGATAAGAACTATCAACTTAGGCAAATAATTGTAGAAAAAGAAAAGATTGAGAGCAGAGAAAAG

SEQ ID NO: 9620 - protein, 44 aa, Streptococcus agalactiae
MNNLIETIEHFLAYSDDKLEELADKNYQLRQIIVEKEKIESREK

SEQ ID NO: 9621 - protein, 1284 aa, Streptococcus agalactiae
ATGAAGAAAGTTTTAACCTTCTTATTATGTAGCTTATATTTTGTATCAATCCCAGCTATAAGTACCGAGGAGCCACTAACGCTTTCTCAAAATAGACGATACGCCTTAACTCAGACAGTTGTGGATAAGGAAATGTATTTTGATACTATTCCAGAGAGACCAACTACAAAAATTGAAATAAGCAGTTTTCAAGATGAAGCTTTAACCATAACAGGAGAGACTTTAGTTCCAAATACTTTATTGTCGATTGTTTCTCTTACAATTAATTCAAATGGAATTCCAGTATTTACTTTGTCCAATGGACAGTTCATAAAGGCTAGTCGTGAAGCTATTTTTAATGATTTAGTTTCTAAGCAGCAATCTGTCTCATTGGATTATTGGTTAAAACCTTCTTTTGTGACTTATGAAGCACCTTACACAAATGGTGTTAGTGAAGTTAAAAATAATTTAAAACCTTATTCCAGAGTGCATTTAGTAGAACAAGCAGAAACAGAACATGGTATTTATTATAAAACGGACAGTGGTTTTTGGATATCAGTAGAAGATCTATCGGTTGCTGATAATCGTATGGCTAAGGTTCAAGAAGTATTATTGGAAAAATATAATAAAGATAAATATGGTATATACATCAAACAATTAAATACACAGACAGTAGCTGGTATTAATATTGATAGGTCAATGTACTCTGCAAGTATTGCAAAATTAGCAACACTTTATGCTAGCCAAGAGCAAGTAAAATTAGGAAAACTGTCATTGGACAGCAAATTTGAATACAAAGATAATGTTAATCAATTTCCTAATAGCTATGCTCCAAGTGGTAGTGGGAAATTAGAGAAAAAAGCTGATCATAAATTATATACCGTTAAGGAGTTACTTGAAGCAACTGCCAAGGAATCAGATAATGTTGCAACAAATATGCTAGGTTATTATGTCAATAATCAATACGATTCAATGTTTCAAACACAAGTAGACACAATTTCTGGTATGCACTGGGATATGAAGAAACGCCAGATTTCTCCACAAGCTGCGGGTAAAATGATGGAAGCAATTTATTATCAAAATGGAGATATTGTTAATTACCTATCAAAGACTGATTTTGATAATACAAGAATCCCTAAAAATATACCAGTTAAAGTAGCACATAAAATTGGAGATGCTTATGACTACAAACATGATGCGGCTATTGTTTATGCAGAACAACCTTTTATTATGATTATCTTTACGGATAAATCATCTTACGATGATATCACTAAGATTGCTGACGACGTTTACCAGGTTTTAAAA

SEQ ID NO: 9622 - protein, 428 aa, Streptococcus agalactiae
MKKVLTFLLCSLYFVSIPAISTEEPLTLSQNRRYALTQTVVDKEMYFDTIPERPTTKIEISSFQDEALTITGETLVPNTLLSIVSLTINSNGIPVFTLSNGQFIKASREAIFNDLVSKQQSVSLDYWLKPSFVTYEAPYTNGVSEVKNNLKPYSRVHLVEQAETEHGIYYKTDSGFWISVEDLSVADNRMAKVQEVLLEKYNKDKYGIYIKQLNTQTVAGINIDRSMYSASIAKLATLYASQEQVKLGKLSLDSKFEYKDNVNQFPNSYAPSGSGKLEKKADHKLYTVKELLEATAKESDNVATNMLGYYVNNQYDSMFQTQVDTISGMHWDMKKRQISPQAAGKMMEAIYYQNGDIVNYLSKTDFDNTRIPKNIPVKVAHKIGDAYDYKHDAAIVYAEQPFIMIIFTDKSSYDDITKIADDVYQVLK

SEQ ID NO: 9623 - protein, 1272 aa, Streptococcus agalactiae
ATGTATAACACTATTTTGAAAGATACCTTATCTAAAGGGTTATTTACCGCTCATCAGAAAGTTCTAATTGCTGTTTCTGGTGGCATTGATTCAATAAATTTGTTGCAATTTTTATACCAGTATCAAAAAGAGTTATCGATTAGTATTGGTATTGCACACATAAATCATGGACAGCGAAAAGAATCAGAAAAAGAAGAAGAATATATCAGACAGTGGGGACAGATACATGATGTCCCTGTCTTTATCTCTTATTTTCAAGGAATATTTTCAGAAGATAGAGCGCGTAACCATCGCTACAATTTTTTTTCAAAAGTTATGCGTGAAGAAGGTTACACGGCTTTAGTAACAGCTCACCATGCTGATGATCAAGCTGAAACTGTATTTATGAGAATTTTAAGAGGAAGCAGGCTACGCTATTTATCAGGGATTAAGCAAGTGAGTGCTTTTGCAAACGGTCAATTGATTAGACCATTTCTTCCATATAAAAAGGAGTTATTACCAAATATTTTTCATTTTGAAGATGCTAGCAACGCTTCGTCTGATTATTTAAGAAATCGAATAAGAAACGTCTACTTTCCTGCTTTGGAAAGAGAAAATAATCAATTGAAAGATTCTCTCATAACTCTCTCTGAGGAAACAGAGTGTTTATTCACGGCTTTAACAGACCTAACAAGGAGCATCGAAGTAACAAACTGCTATGATTTTTTAAGGCAAACTCATTCTGTCCAAGAATTTTTATTGCAAGATTACATTAGCAAATTTCCAGATTTACAAGTGAGTAAAGAACAGTTCAGAGTAATATTAAAATTGATTAGAACTAAAGCCAATATTGACTATACTATTAAATCGGGCTATTTTCTTCATAAGGATTACGAGAGTTTTCATATTACAAAAATCCATCCTAAGACGGATAGTTTTAAGGTTGAAAAAAGATTAGAATTGCATAATATACAAATATTCTCACAATATTTATTTTCCTATGGAAAATTCATTTCTCAAGCAGACATTACTATTCCTATTTATGATACTTCTCCGATTATTTTAAGAAGAAGAAAAGAAGGGGATAGGATATTTTTAGGAAATCACACTAAAAAAATTCGCCGTCTATTTATTGATGAGAAAATAACTCTAAAAGACAGAGAAGAAGCTGTTATTGGGGAGCAAAATAAAGAGTTGATATTTGTGATTGTTGCAGGTAGAACATATTTGAGAAAACCTTCTGAACATGATATAATGAAGGACAAACTTTATATTGAAAATTTAGAAAAAAGG

SEQ ID NO: 9624 - protein, 424 aa, Streptococcus agalactiae
MYNTILKDTLSKGLFTAHQKVLIAVSGGIDSINLLQFLYQYQKELSISIGIAHINHGQRKESEKEEEYIRQWGQIHDVPVFISYFQGIFSEDRARNHRYNFFSKVMREEGYTALVTAHHADDQAETVFMRILRGSRLRYLSGIKQVSAFANGQLIRPFLPYKKELLPNIFHFEDASNASSDYLRNRIRNVYFPALERENNQLKDSLITLSEETECLFTALTDLTRSIEVTNCYDFLRQTHSVQEFLLQDYISKFPDLQVSKEQFRVILKLIRTKANIDYTIKSGYFLHKDYESFHITKIHPKTDSFKVEKRLELHNIQIFSQYLFSYGKFISQADITIPIYDTSPIILRRRKEGDRIFLGNHTKKIRRLFIDEKITLKDREEAVIGEQNKELIFVIVAGRTYLRKPSEHDIMKDKLYIENLEKR

SEQ ID NO: 9625 - protein, 540 aa, Streptococcus agalactiae
ATGCTTGAAAATGATATAAAAAAAGTTTTATATTCAGAAGAAGATATTATTCTGAAAACGAAAGAATTAGGAGCTAAATTAACTGCAGATTATGCAGGTAAGAATCCATTATTAGTAGGTGTATTAAAGGGGTCAGTGCCTTTTATGGCTGAACTATTAAAGCATATTGATACACATGTTGAAATTGATTTTATGGTTGTTTCAAGCTATCATGGTGGTACAACTAGTAGTGGAGAAGTTAAAATTTTAAAAGATGTCGATACTAATATTGAAGGAAGAGATGTAATCTTTATTGAAGACATCATTGATACTGGACGTACATTAAAATACCTTCGAGATATGTTTAAGTATCGTCAAGCTAACTCTGTCAAAGTTGCAACCCTTTTTGATAAGCCAGAAGGGCGATTGGTAGATATTGATGCTGATTACGTTTGTTACGATATCCCAAATGAATTTATTGTGGGATTCGGTTTAGACTATGCTGAAAACTATCGTAACCTACCTTATGTCGGTGTGTTAAAAGAAGAAATTTACTCAAAA

SEQ ID NO: 9626 - protein, 180 aa, Streptococcus agalactiae; identical to SEQ ID NO: 42

SEQ ID NO: 9627 - protein, 1974 aa, Streptococcus agalactiae
ATGAAAAATAATAAAAATAATGGTTTTCTGAAAAATTCCTTTATTTACATATTATTGATTATTGCGGTTATTACAACCTTTCAATACTATTTAAAAGGATCTAGCTCTCAAAACCAGCAAATTTCTTATACAAAACTTGTTAAACAATTAAAAGCTGGAGAAATTAAGTCTATTTCATACCAGCCAAGTGGTGGTGTTGTTGAAGTTAGTGGGACATATAAGAAAGCCAAAACAATTAAATCAGCTAATAGTTTTACTTTTTTAGGTGGTAGTGTTGCTACTAAAGTTACAGGATTTAATTCTGTTATACTACCAAATGACTCTTCAATAAAATCTCTTGTTAGCGCTGCTGAAGAAAATAACACTAATATTCAGGTCAAACATGAAAGTTCAAGTGGGACATGGATTTCTTATATTGCCAGTTTTTTACCTTTAGTTATCATGATTGGTTTCTTTATGATGATGATGAACCAAGGTGGTGGCGGTGGCGCTCGTGGTGCCATGAGCTTTGGTAAAAATAAAGCAAGATCATCTAGTAAAGATGAGGTTAAAGTTCGATTTTCGGATGTTGCTGGAGCAGAGGAAGAAAAGCAAGAATTAATAGAAGTCGTTGACTTCCTTAAAGATCCTAAACGATATAAATCTCTAGGTGCCCGAATTCCAGCAGGGGTTCTATTAGAAGGACCTCCAGGGACAGGTAAAACCCTATTAGCAAAAGCTGTTGCCGGTGAAGCAGGGGTTCCATTCTTTAGTATTTCCGGTTCAGATTTTGTTGAAATGTTTGTCGGTGTTGGAGCTAGTCGAGTACGCTCTTTGTTTGAAGACGCTAAAAAAGCTGAACGTGCTATTATTTTCATTGATGAAATTGATGCTGTTGGACGTCGACGTGGAGCTGGTATGGGTGGCGGAAACGATGAACGTGAACAAACGCTCAACCAACTTTTAATTGAAATGGATGGTTTTGAAGGAAACGAAAGTATTATCGTTATCGCTGCTACCAACCGTAGTGACGTGTTAGATCCCGCATTACTGCGTCCAGGACGTTTTGATAGAAAAGTTCTAGTTGGACAACCTGATGTAAAAGGTCGTGAAGCAATTCTGAGAGTACATGCTAAAAATAAACCATTAGCAGATAATGTTGACTTAAAAGTAGTAGCTCAACAAACCCCAGGATTTGTTGGTGCTGATTTGGAGAATGTTCTCAATGAAGCTGCTTTAGTTGCTGCGCGACGAAATAAAAAAGTTATTGATGCTTCAGATATTGATGAAGCAGAAGACCGTGTAATTGCTGGTCCTTCTAAAAAAGATCGTACTATTTCTGACAGAGAAAGAGCTATGGTTGCTTACCATGAAGCTGGGCACACAATTGTCGGTTTGATTCTTTCAAATGCGCGAGTTGTTCATAAAGTTACTATCGTACCACGTGGTCGTGCAGGTGGATATATGATTGCTTTACCTAAAGAAGATCAAATGCTTCTTTCAAAAGATGATATGAAAGAGCAATTAGCAGGTCTTATGGGAGGACGTGTAGCGGAAGAAATTATTTTCAACGCTCAGACAACAGGTGCCTCAAATGACTTCGAACAAGCCACTGCCATGGCCCGCGCTATGGTAACTGAATATGGTATGAGCGAGAAACTTGGACCAGTTCAATACGAAGGTAACCACGCAATGATGGCTGGCCAAATGTCACCTGAAAAATCATATTCTGCTCAAACTGCACAACTTATTGATGATGAAGTTCGTCACCTTCTTAATGAAGCACGTAATAAGGCAGCTGATATTATCAACGAAAACCGTGATACTCATAAATTAATTGCAGAAGCCCTCTTAAAATATGAGACTCTTGATGCTGCTCAGATTAAGTCGATTTTCGAGACAGGTAAAATGCCTGAGACAGAAAATGATGAAGATAAAGCAAGAGCGTTATCATACGATGAAATCAAAGAAAAAATGCAAGAAGAAGATAAAAAA

SEQ ID NO: 9628 - protein, 658 aa, Streptococcus agalactiae
MKNNKNNGFLKNSFIYILLIIAVITTFQYYLKGSSSQNQQISYTKLVKQLKAGEIKSISYQPSGGVVEVSGTYKKAKTIKSANSFTFLGGSVATKVTGFNSVILPNDSSIKSLVSAAEENNTNIQVKHESSSGTWISYIASFLPLVIMIGFFMMMMNQGGGGGARGAMSFGKNKARSSSKDEVKVRFSDVAGAEEEKQELIEVVDFLKDPKRYKSLGARIPAGVLLEGPPGTGKTLLAKAVAGEAGVPFFSISGSDFVEMFVGVGASRVRSLFEDAKKAERAIIFIDEIDAVGRRRGAGMGGGNDEREQTLNQLLIEMDGFEGNESIIVIAATNRSDVLDPALLRPGRFDRKVLVGQPDVKGREAILRVHAKNKPLADNVDLKVVAQQTPGFVGADLENVLNEAALVAARRNKKVIDASDIDEAEDRVIAGPSKKDRTISDRERAMVAYHEAGHTIVGLILSNARVVHKVTIVPRGRAGGYMIALPKEDQMLLSKDDMKEQLAGLMGGRVAEEIIFNAQTTGASNDFEQATAMARAMVTEYGMSEKLGPVQYEGNHAMMAGQMSPEKSYSAQTAQLIDDEVRHLLNEARNKAADIINENRDTHKLIAEALLKYETLDAAQIKSIFETGKMPETENDEDKARALSYDEIKEKMQEEDKK

SEQ ID NO: 9629 - protein, 531 aa, Streptococcus agalactiae
ATGAGATTACCTAAAGAAGGCGACTTTATTACAATTCAAAGTTACAAACATGATGGTAGTTTACACCGAACTTGGCGTGACACCATGGTATTAAAAACAACCGAAAATGCCCTCATTGGTGTTAATGATCATACTTTAGTAACAGAAAATGATGGTCGACGCTGGGTGACACGAGAGCCTGCAATAGTATACTTTCATAAAAAATACTGGTTTAACATTATCGCTATGATACGTGAAACTGGTGTCTCCTACTATTGTAATCTAGCAAGTCCGTATATCTTGGACCCTGAAGCACTCAAGTATATTGACTATGACCTTGATGTCAAAGTATTTGCAGATGGTGAAAAAAGACTACTAGATGTGGACGAATATGAACAGCATAAAGCTCAGATGAACTATCCTACCGATATTGATTATATATTAAAGGAAAATGTAAAAATATTGGTAGAATGGATAAATGAGAATAAAGGCCCCTTTTCATCATCATATATCAATATCTGGTATAAACGGTACCTTGAATTGAAAAAGCGC

SEQ ID NO: 9630 - protein, 177 aa, Streptococcus agalactiae; identical to SEQ ID NO: 838

SEQ ID NO: 9631 - protein, 774 aa, Streptococcus agalactiae
ATGAAAATAACCAAAATCGAAAAGAAAAAAAGACTTTACACTCTAGAGCTAGACAATACCGAAAATTTATATATAACAGAAGATACTATCGTTCATTTTATGTTAAGTAAAGGGATGATAATTAATGCCGAGAAACTTGAAAATATTAAAAAATTTGCCCAACTATCATACGGTAAAAATCTAGGTCTTTATTATATTTCTTTCAAGCAGAGAACCGAGAAAGAAGTTATTAAATATCTTCAACAACATGATATTGATTCTAAAATTATTCCACAAATTATTGATAATCTAAAAAGTGAGAATTGGATAAACGATAAAAACTACGTGCAATCTTTCATACAGCAAAATCTAAATACTGGCGATAAGGGACCATACGTGATAAAACAAAAATTATTGCAAAAAGGTATCAAAAGTAAAATAATTGAATCTGAACTTCAAGCTATAAACTTTCAAGACTTAGCATCCAAAATAAGCCAAAAACTCTATAAAAAATATCAAAACAAACTTCCACTAAAAGCATTAAAAGATAAATTGATGCAGAGCTTAACTACAAAAGGATTTGATTATCAGATAGTGCATACCGTAATTCAAAACCTTGAAATTGAAAAAGATCAAGAACTTGAAGAAGACCTCATTTATAAAGAATTAGATAAACAATACCAAAAATTATCAAAAAAACATGACCAGTATGAATTAAAGCAACGTATAATCAATGCCTTAATGCGTAAAGGATACCAGTACGAAGATATCAAAAGTGCTTTAAGAGAATATTTA

SEQ ID NO: 9632 - protein, 258 aa, Streptococcus agalactiae; identical to SEQ ID NO: 840

SEQ ID NO: 9633 - protein, 1352 aa, Streptococcus agalactiae
ATGAATGTGGTTTTAAAACAGCGAATTCCTTTAAAAATTAAACGAATGGGAATTAATGGTGAAGGAATAGGTTTTTATAAAAAAACACTAATCTTTGTTCCAGGGGCCCTCAAGGGAGAAGAGGTGTTTTGTCAGATTTCTTCTGTTAGACGTAATTTTGCAGAAGCTAAACTGTTAAAGATAAATAAAAAATCTAAAAATAGGGTAGAACCCCCTTGTTCTATTTATAAAGAATGTGGGGGATGCCAAATAATGCACCTTCAATATGATAAGCAGCTAGAGTTTAAAACGGATGTTATTCGACAGGCTCTAATGAAATTTAAACCAGAGGGATATGAGAATTATGAAATCCGTAAAACGATAGGTATGTCGGAACCTGAACACTATCGTGCTAAATTACAATTTCAAGTGCGTTCGTTTGGAGGGAATGTAAAGGCAGGTTTATATGCACAAGGGACACATCGATTGATTGATATCAAAGATTGTTTAGTGCAAGATAGCCTTACTCAGGAAATGATAAATCGAGTTGCAGAACTTTTAGGAAAATATAAATTGCCTATTTATAATGAACGTAAAATAGCTGGTGTCCGTACTGTTATGATTCGACGAGCACAAGCGAGTGGAGAGGTTCAACTGATCTTTATCACAAGTAAAAGACTTGATTTTGATGATGTTGTTATTGAATTAGTTCGAGAGTTTCCTGAGTTAAAGACAGTTGCTGTAAATATCAACGCTAGTAAAACAAGTGATATCTATGGTCAAATAACAGAAGTTATTTGGGGTCAAGAATCCATCAATGAAGAAGTATTAGATTATGGTTTTTCGTTATCACCACGTGCTTTTTATCAACTTAATCCTAAACAAACACAAATTTTATATAGTGAGGCAGTTAAGGCCTTAGATGTGAAGGAAGATGATGATTTAATTGACGCTTATTGTGGAGTAGGAACGATTGGACTTGCTTTTGCTGGAAAAGTTAAAAGTGTTCGTGGAATGGATATTATCCCTGAGGCTATTCAGGATGCTAAAGAGAACGCACTTTATATGGGTTTTACTAATACACATTACGAAGCTGGAAAGGCAGAGGATATTATCCCTAGGTGGTATAGTGAGGGATTTCGCGCTAATGCGTTAATCGTGGATCCTCCCGCACAGGTTTAGATGATAAATTGCTAAATACTATACTAAAAATGCCTCCAGAAAAAATGGTTTACGTTTCTTGTAATACATCCACGCTTGCTAGAGACTTAGTAACATTAACAAAAGTATACCATGTCCACTACATCCAATCCGTTGACATGTTTCCACATACAGCAAGGACCGAGGCTGTAGTGAAACTACAACGTAAGGAA

SEQ ID NO: 9634 - protein, 451 aa, Streptococcus agalactiae
MNVVLKQRIPLKIKRMGINGEGIGFYKKTLIFVPGALKGEEVFCQISSVRRNFAEAKLLKINKKSKNRVEPPCSIYKECGGCQIMHLQYDKQLEFKTDVIRQALMKFKPEGYENYEIRKTIGMSEPEHYRAKLQFQVRSFGGNVKAGLYAQGTHRLIDIKDCLVQDSLTQEMINRVAELLGKYKLPIYNERKIAGVRTVMIRRAQASGEVQLIFITSKRLDFDDVVIELVREFPELKTVAVNINASKTSDIYGQITEVIWGQESINEEVLDYGFSLSPRAFYQLNPKQTQILYSEAVKALDVKEDDDLIDAYCGVGTIGLAFAGKVKSVRGMDIIPEAIQDAKENALYMGFTNTHYEAGKAEDIIPRWYSEGFRANALIVDPPRTGLDDKLLNTILKMPPEKMVYVSCNTSTLARDLVTLTKVYHVHYIQSVDMFPHTARTEAVVKLQRKE

SEQ ID NO: 9635 - protein, 459 aa, Streptococcus agalactiae
ATGATAATAAATTCATTCGATAATAGTAGAAAAGCGATTATTAATCCTGAAGATATTAATTCACCAATAAAAGGTTTTCCAAAGACTGTTATTACCTGTTTCGCGCGGGAGACTTTCAATCGTATTTTAGAAGAATTGCCTCATCGTGAAATTGCTAGAACTAGTGTAGCAAACTTAGAAATTCCCATTTATGAATTAGAATTTAAAGGACAAAAGATTGGCTTTTTCAATGCTTATGTTGGTGCTTCAGCTTGCGTAGCAATCTTGGAAGATATTATAGTATTTGGAATGGAAAGTTTAATTGTTTTTGGAACATGTGGCGTCCTTGATTCGTCAATTGAGGAGACATCCATTATTATTCCAAGAAGTGCTATTAGGGATGAAGGGACATCATTTCATTATTCGGAAGCAAGTTCTGAAATTGCAGTAAACACAAATTCAATTTTTTTACTCTGCGGA

SEQ ID NO: 9636 - protein, 153 aa, Streptococcus agalactiae; identical to SEQ ID NO: 846

SEQ ID NO: 9637 - protein, 426 aa, Streptococcus agalactiae
ATGTGGAATGTAAAAACTTTTGATAATTTAACTACACATGAGTTGTTTCAAATATATAAATTAAGAGTATCTGTATTTGTGGTTGAACAAGATTGTCCTTATCAAGAGGTTGATGATGAAGATTTGATTTGTTTGCATGGGATGAATTGGGTAGATGGTCAATTGGCAGCTTATTATAGATTGATACCAGAAGATGATAAGGTGCATTTGGGACGTGTGATTGTTAATCCAGACTTTAGAAAAAAGGGATTAGGAAATCAATTAGTGGAATATGCGATTAAATTTAGTGAGGCAAATTACCCTAATAAACCTATTTATGCTCAGGCCCAAGCTTATTTACAAGATTTTTATCAATCTTTCGGATTTCAACCTGTCTCAGATATCTATCTAGAAGATAATATTCCTCATCTTGATATGGTTTTATTA

SEQ ID NO: 9638 - protein, 142 aa, Streptococcus agalactiae; identical to SEQ ID NO: 848

SEQ ID NO: 9639 - protein, 3699 aa, Streptococcus agalactiae
GTGGATAAACATCACTCAAAAAAGGCTATTTTAAAGTTAACACTTATAACAACTAGTATTTTATTAATGCATAGCAATCAAGTGAATGCAGAGGAGCAAGAATTAAAAAACCAAGAGCAATCACCTGTAATTGCTAATGTTGCTCAACAGCCATCGCCATCGGTAACTACTAATACTGTTGAAAAAACATCTGTAACAGCTGCTTCTGCTAGTAATACAGCGAAAGAAATGGGTGATACATCTGTAAAAAATGACAAAACAGAAGATGAATTATTAGAAGAGTTATCTAAAAACCTTGATACGTCTAATTTGGGGGCTGATCTTGAAGAAGAATATCCCTCTAAACCAGAGACAACCAACAATAAAGAAAGCAATGTAGTAACAAATGCTTCAACTGCAATAGCACAGAAAGTTCCCTCAGCATATGAAGAGGTGAAGCCAGAAAGCAAGTCATCGCTTGCTGTTCTTGATACATCTAAAATAACAAAATTACAAGCCATAACCCAAAGAGGAAAGGGAAATGTAGTAGCTATTATTGATACTGGCTTTGATATTAACCATGATATTTTTCGTTTAGATAGCCCAAAAGATGATAAGCACAGCTTTAAAACTAAGACAGAATTTGAGGAATTAAAAGCAAAACATAATATCACTTATGGGAAATGGGTTAACGATAAGATTGTTTTTGCACATAACTACGCCAACAATACAGAAACGGTGGCTGATATTGCAGCAGCTATGAAAGATGGTTATGGTTCAGAAGCAAAGAATATTTCGCATGGTACACACGTTGCTGGTATTTTTGTAGGTAATAGTAAACGTCCAGCAATCAATGGTCTTCTTTTAGAAGGTGCAGCGCCAAATGCTCAAGTCTTATTAATGCGTATTCCAGATAAAATTGATTCGGACAAATTTGGTGAAGCATATGCTAAAGCAATCACAGACGCTGTTAATCTAGGAGCAAAAACGATTAATATGAGTATTGGAAAAACAGCTGATTCTTTAATTGCTCTCAATGATAAAGTTAAATTAGCACTTAAATTAGCTTCTGAGAAGGGCGTTGCAGTTGTTGTGGCTGCCGGAAATGAAGGCGCATTTGGTATGGATTATAGCAAACCATTATCAACTAATCCTGACTACGGTACGGTTAATAGTCCAGCTATTTCTGAAGATACTTTGAGTGTTGCTAGCTATGAATCACTTAAAACTATCAGTGAGGTCGTTGAAACAACTATTGAAGGTAAGTTAGTTAAGTTGCCGATTGTGACTTCTAAACCTTTTGACAAAGGTAAGGCCTACGATGTGGTTTATGCCAATTATGGTGCAAAAAAAGACTTTGAAGGTAAGGACTTTAAAGGTAAGATTGCATTAATTGAGCGTGGTGGTGGACTTGATTTTATGACTAAAATCACTCATGCTACAAATGCAGGTGTTGTTGGTATCGTTATTTTTAACGATCAAGAAAAACGTGGAAATTTTCTAATTCCTTACCGTGAATTACCTGTGGGGATTATTAGTAAAGTAGATGGCGAGCGTATAAAAAATACTTCAAGTCAGTTAACATTTAACCAGAGTTTTGAAGTAGTTGATAGCCAAGGTGGTAATCGTATGCTGGAACAATCAAGTTGGGGCGTGACAGCTGAAGGAGCAATCAAGCCTGATGTAACAGCTTCTGGCTTTGAAATTTATTCTTCAACCTATAATAATCAATACCAAACAATGTCTGGTACAAGTATGGCTTCACCACATGTTGCAGGATTAATGACAATGCTTCAAAGTCATTTGGCTGAGAAATATAAAGGGATGAATTTAGATTCTAAAAAATTGCTAGAATTGTCTAAAAACATCCTCATGAGCTCAGCAACAGCATTATATAGTGAAGAGGATAAGGCGTTTTATTCACCACGTCAGCAAGGTGCAGGTGTAGTTGATGCTGAAAAAGCTATCCAAGCTCAATATTATATTACTGGAAACGATGGCAAAGCTAAAATTAATCTCAAACGAATGGGAGATAAATTTGATATCACAGTTACAATTCATAAACTTGTAGAAGGTGTCAAAGAATTGTATTATCAAGCTAATGTAGCAACAGAACAAGTAAATAAAGGTAAATTTGCCCTTAAACCACAAGCCTTGCTAGATACTAATTGGCAGAAAGTAATTCTTCGTGATAAAGAAACACAAGTTCGATTTACTATTGATGCTAGTCAATTTAGTCAGAAATTAAAAGAACAGATGGCAAATGGTTATTTCTTAGAAGGTTTTGTACGTTTTAAAGAAGCCAAGGATAGTAATCAGGAGTTAATGAGTATTCCTTTTGTAGGATTTAATGGTGATTTTGCGAACTTACAAGCACTTGAAACACCGATTTATAAGACGCTTTCTAAAGGTAGTTTCTACTATAAACCAAATGATACAACTCATAAAGACCAATTGGAGTACAATGAATCAGCTCCTTTTGAAAGCAACAACTATACTGCCTTGTTAACACAATCAGCGTCTTGGGGCTATGTTGATTATGTCAAAAATGGTGGGGAGTTAGAATTAGCACCGGAGAGTCCAAAAAGAATTATTTTAGGAACTTTTGAGAATAAGGTTGAGGATAAAACAATTCATCTTTTGGAAAGAGATGCAGCGAATAATCCATATTTTGCCATTTCTCCAAATAAAGATGGAAATAGGGACGAAATCACTCCCCAGGCAACTTTCTTAAGAAATGTTAAGGATATTTCTGCTCAAGTTCTAGATCAAAATGGAAATGTTATTTGGCAAAGTAAGGTTTTACCATCTTATCGTAAAAATTTCCATAATAATCCAAAGCAAAGTGATGGTCATTATCGTATGGATGCTCTTCAGTGGAGTGGTTTAGATAAGGATGGCAAAGTTGTAGCAGATGGTTTTTATACTTATCGCTTACGTTACACACCAGTAGCAGAAGGAGCAAATAGTCAGGAGTCAGACTTTAAAGTACAAGTAAGTACTAAGTCACCAAATCTTCCTTCACGAGCTCAGTTTGATGAAACTAATCGAACATTAAGCTTAGCCATGCCTAAGGAAAGTAGTTATGTTCCTACATATCGTTTACAATTAGTTTTATCTCATGTTGTAAAAGATGAAGAATATGGGGATGAGACTTCTTACCATTATTTCCATATAGATCAAGAAGGTAAAGTGACACTTCCTAAAACGGTTAAGATAGGAGAGAGTGAGGTTGCGGTAGACCCTAAGGCCTTGACACTTGTTGTGGAAGATAAAGCTGGTAATTTCGCAACGGTAAAATTGTCTGATCTCTTGAATAAGGCAGTAGTATCAGAGAAAGAAAACGCTATAGTAATTTCTAACAGTTTCAAATATTTTGATAACTTGAAAAAAGAACCTATGTTTATTTCTAAAAAAGAAAAAGTAGTAAACAAGAATCTAGAAGAAATAATATTAGTTAAGCCGCAAACTACAGTTACTACTCAATCATTGTCTAAAGAAATAACTAAATCAGGAAATGAGAAAGTCCTCACTTCTACAAACAATAATAGTAGCAGAGTAGCTAAGATCATATCACCTAAACATAACGGGGATTCTGTTAACCATACCTTACCTAGTACATCAGATAGAGCAACGAATGGTCTATTTGTTGGTACTTTGGCATTGTTATCTAGTTTACTTCTTTATTTGAAACCCAAAAAGACTAAAAATAATAGTAAA

SEQ ID NO: 9640 - protein, 1233 aa, Streptococcus agalactiae
MDKHHSKKAILKLTLITTSILLMHSNQVNAEEQELKNQEQSPVIANVAQQPSPSVTTNTVEKTSVTAASASNTAKEMGDTSVKNDKTEDELLEELSKNLDTSNLGADLEEEYPSKPETTNNKESNVVTNASTAIAQKVPSAYEEVKPESKSSLAVLDTSKITKLQAITQRGKGNVVAIIDTGFDINHDIFRLDSPKDDKHSFKTKTEFEELKAKHNITYGKWVNDKIVFAHNYANNTETVADIAAAMKDGYGSEAKNISHGTHVAGIFVGNSKRPAINGLLLEGAAPNAQVLLMRIPDKIDSDKFGEAYAKAITDAVNLGAKTINMSIGKTADSLIALNDKVKLALKLASEKGVAVVVAAGNEGAFGMDYSKPLSTNPDYGTVNSPAISEDTLSVASYESLKTISEVVETTIEGKLVKLPIVTSKPFDKGKAYDVVYANYGAKKDFEGKDFKGKIALIERGGGLDFMTKITHATNAGVVGIVIFNDQEKRGNFLIPYRELPVGIISKVDGERIKNTSSQLTFNQSFEVVDSQGGNRMLEQSSWGVTAEGAIKPDVTASGFEIYSSTYNNQYQTMSGTSMASPHVAGLMTMLQSHLAEKYKGMNLDSKKLLELSKNILMSSATALYSEEDKAFYSPRQQGAGVVDAEKAIQAQYYITGNDGKAKINLKRMGDKFDITVTIHKLVEGVKELYYQANVATEQVNKGKFALKPQALLDTNWQKVILRDKETQVRFTIDASQFSQKLKEQMANGYFLEGFVRFKEAKDSNQELMSIPFVGFNGDFANLQALETPIYKTLSKGSFYYKPNDTTHKDQLEYNESAPFESNNYTALLTQSASWGYVDYVKNGGELELAPESPKRIILGTFENKVEDKTIHLLERDAANNPYFAISPNKDGNRDEITPQATFLRNVKDISAQVLDQNGNVIWQSKVLPSYRKNFHNNPKQSDGHYRMDALQWSGLDKDGKVVADGFYTYRLRYTPVAEGANSQESDFKVQVSTKSPNLPSRAQFDETNRTLSLAMPKESSYVPTYRLQLVLSHVVKDEEYGDETSYHYFHIDQEGKVTLPKTVKIGESEVAVDPKALTLVVEDKAGNFATVKLSDLLNKAVVSEKENAIVISNSFKYFDNLKKEPMFISKKEKVVNKNLEEIILVKPQTTVTTQSLSKEITKSGNEKVLTSTNNNSSRVAKIISPKHNGDSVNHTLPSTSDRATNGLFVGTLALLSSLLLYLKPKKTKNNSK

SEQ ID NO: 9641 - protein, 906 aa, Streptococcus agalactiae
ATGAAAACGATAAAAGATTGGCAAATAAATATTTGCTTAGCGACCTATAATGGTCAAAAATACCTTCGCCAGCAATTAGATAGCATAATACAACAAGGTTATACTGACTGGATTTGTTTAATAAGGGACGATGGATCTACTGATGATACAGTAGCTATTATTAAAGAATATGTTAATAGAGATTCACGTTTTATATTTATTAATTCTAACGATGACAGAAAGTTAGGAAGTCACCGCAGTTTTTACGAGTTGGTTAACTATAAAAAAGCAGATTTTTATGTTTTCTCAGACCAGGATGATGTTTGGAAAGAAAATCGTTTAGAACGTTACCTTGAAGAAGCAGAGAAATTTAACCAAGAACTACCATTGCTTGTTTATTCGAACTGGACTTCTGTAGATGAAAAATTAACAGTATTGAAAGAACATAATCCAGCAACAGTTATTCAAGAACAAATTGCCTTTAACCAAATAAATGGTATGGTTATCATGATGAATCATGAGTTAGCAAAGCTTTGGGAATATCGTCAAATTGGCGCCCATGATTCTTATGTTGGAACTCTAGCTTACGCCGTTGGAAATGTGGCTTATATTTCTGACAGTACAGTCCTTTGGCGTAGACAAGTAGGGGCAGAGTCGCTAAACAATTACGGGAGACAATATGGGGTGGCTACGTTTTGGCAGATGATAAATACTTCTTTTGATCGTGCTTCGCTTATTTTTGCTCAAGTATCCGATAAAATGTCCCTGGAGCGTAAACTCTTCTTTAGTCGTTTTATAGAATTAAAAAATGCCAATCTAATGAGAAGGATTTATCTTTTATCAAAATTAAAACTCCGTCGGAAATCATTGAAAGAAACAGTTGCTATGACTATCCTACTTTTAACAGGTTACGGTAAACCAAAAGCA

SEQ ID NO: 9642 - protein, 302 aa, Streptococcus agalactiae
MKTIKDWQINICLATYNGQKYLRQQLDSIIQQGYTDWICLIRDDGSTDDTVAIIKEYVNRDSRFIFINSNDDRKLGSHRSFYELVNYKKADFYVFSDQDDVWKENRLERYLEEAEKFNQELPLLVYSNWTSVDEKLTVLKEHNPATVIQEQIAFNQINGMVIMMNHELAKLWEYRQIGAHDSYVGTLAYAVGNVAYISDSTVLWRRQVGAESLNNYGRQYGVATFWQMINTSFDRASLIFAQVSDKMSLERKLFFSRFIELKNANLMRRIYLLSKLKLRRKSLKETVAMTILLLTGYGKPKA

SEQ ID NO: 9643 - protein, 1008 aa, Streptococcus agalactiae
ATGCAATCATACTATGATCGTTCTCAATCGCCACTTGACTATGCCTTGTCAGAAAAAGCTTTTCCTATGCGTTCTGTTAATTGGAATAAGCTAAACGATGACAAAGACTTAGAGGTATGGAACAGAGTAACTCAAAATTTCTGGTTACCTGAAAAGATCCCAGTTTCTAATGACCTTAATTCTTGGAGAACATTGGATGCTGATTGGCAGCAATTAATTACTCGGACTTTTACTGGTCTAACCTTATTAGATTCTGTGCAGGCTACTGTTGGTGATATTGCTCAGATTAAGCATTCTCAGACAGATCATGAACAAGTTATTTATGCTAACTTTGCCTTTATGGTGGCTATTCATGCGCGATCGTATGGAACGATTTTTTCAACCTTATGCACTAGCCAACAAATTGAGGAAGCACATGAATGGGTAGTAGATACTGAAAGTCTACAAGCTCGATCACGTATACTTATTCCTTTTTATACTGGTGATGATCCTTTGAAATCTAAGGTTGCTGCAGCCATGATGCCAGGATTTTTGTTATATGGTGGCTTTTACCTTCCTTTTTACCTTTCAGCCAGAGGAAAATTACCAAATACGTCTGATATTATTCGTTTAATTTTACGAGATAAGGTAATTCATAACTATTACAGTGGCTATAAGTATCAACAGAAAGTTGCTAAATTATCTGTAGAAAAGCAAGCCGAAATGAAGACATTTGTCTTTGACCTCCTTTATCAGTTGATTGATTTAGAAAAAGCCTATCTTTACGAACTATATGATGGTTTTGATTTGGCTGAAGATGCAATCAGGTTTAGCATTTACAATGCTGGTAAATTTTTACAAAATTTAGGATATGATTCTCCATTTACAGAAGAAGAGACTCGTATATCTCCTGAGGTTTTTGCACAACTTTCGGCGCGTGCAGATGAAAATCATGATTTCTTCTCAGGAAACGGCTCTTCATATATTATGGGGATTACAGAAGAAACATTGGATGAAGATTGGGAGTTT

SEQ ID NO: 9644 - protein, 336 aa, Streptococcus agalactiae; identical to SEQ ID NO: 854

SEQ ID NO: 9645 - protein, 411 aa, Streptococcus agalactiae
ATGGATAGTACAGTGCAGGTTGTCTATTTTTCATCGAAATCTAACAATACCCATCGTTTTGTTCAAAAGTTGGCTTGGTCTAACCAGCGTATTCCATCAGATGGTAGCAATATATTGGTTACTGAGGATTATATTTTGATTGTGCCTACTTACGCTGGAGGAGGAGATGATACCAAAGGCGCAGTTCCAAAACAAGTTGTACAGTTTTTAAATGTTCGACAAAATCGGGAACATTGCCAAGGGGTTATTTCTTCTGGAAATACCAATTTTGGTGACACTTATGCCATTGCTGGACCTATTATTGCTCGAAAATTAAATGTTCCTTTGCTTCATCAATTTGAATTACTGGGAACACAAGAAGATGTTACAAGGGTAAAGGAGTTACTTTGCCAATTCACTAGAAAGGATAAA

SEQ ID NO: 9646 - protein, 137 aa, Streptococcus agalactiae
MDSTVQVVYFSSKSNNTHRFVQKLAWSNQRIPSDGSNILVTEDYILIVPTYAGGGDDTKGAVPKQVVQFLNVRQNREHCQGVISSGNTNFGDTYAIAGPIIARKLNVPLLHQFELLGTQEDVTRVKELLCQFTRKDK

SEQ ID NO: 9647 - protein, 2166 aa, Streptococcus agalactiae
ATGACACAATCAGATGCATATCTCTCGTTGAACGCGAAGACACGCTTTAGAGATCGCACAGGTAATTATCATTTTGCTTCGGATAAAGAGGCTGTTGAACAATATATGATAGAACATGTTGAACCTAATACAATGACGTTCACATCACTAATTGAAAAGCTAGATTATTTGGTTTCTAATAACTACTATGAATCGGACCTTCTAAAACAATATAACCTTGAGTTTATTTGCCAAATTTTTGAGCATGCATACGCTAAGAAATTTGCTTTTCTAAATTTTATGGGGGCTTTAAAATTTTATAATGCTTATGCTCTTAAAACAGAAGACAATCGTTATTATTTGGAACACTATGAAGATCGTGTTGTAATGAATGCTCTGTTTTTAGCTGCTGGTGATGAAAAAGCTGCCTATGACCTAGTAGATGACATGCTAGCAAATCGCTTTCAACCAGCAACACCTACCTTTTTAAATGCAGGGAAAAAACGTCGTGGTGAATATATCTCTTGCTATTTGTTGCGCATTGAAGACAATATGGAATCTATTTCTCGTGCTATTAGTACAAGCCTTCAGTTATCAAAACGAGGTGGTGGGGTAGCACTTTGCTTAACCAACTTACGGGAATTTGGTGCTCCAATAAAAGGTATTAAAAATCAAGCTACTGGTATTGTACCTGTCATGAAATTACTAGAAGATTCTTTTTCTTACGCCAATCAATTAGGACAAAGACAAGGAGCTGGTGCAGTTTACTTACACGCTCACCATCCTGAAGTATTAACGTTTTTAGATACTAAACGTGAGAATGCCGATGAGAAAATTCGAATTAAATCTCTTTCCCTAGGACTTGTTATTCCTGATATTACTTTTGAATTGGCTAAGGCAAATAAAGATATGGCCTTGTTTTCACCGTATGACATTGAGCGAGTATATGGTAAACCAATGTCTGATATCTCTATCACAGAAGAATATGAAACTTTATTAGCCAATGCGGATATTCGTAAAACCTTTATTAGTGCACGAAAACTATTTCAAACGATAGCAGAGCTTCATTTTGAATCTGGTTATCCTTATATCTTATTTGAAGATACTGTAAATGCTAAAAACCCTCACAAAAAAGAGGGACGAATTGTTATGTCTAATTTATGTTCTGAGATTGCCCAAGTTAATACAGCCAGTCAATTTTCAGAAGACCTGACTTTCACTAAGGTTGGACATGATGTTTGTTGTAATTTAGGTTCTATTAATATTGCGCGTGCTATGGATCAAGCGGCGGATTTTGAAAAATTAATTGCTAATAGCATTAGAGCCCTTGATCGTATATCTCGAACTTCTGATTTAGATAGTGCTCCATCTATTAAAAAAGGTAATGCAGCTAATCATGCTGTTGGTTTAGGTGCTATGAATTTGCATGGATTTTTGGCGACTAACCATATTTATTACGATTCTCAAGAAGCTATTGATTTTACAGATTGCTTCTTTTACGCTATGGCTTATTATGCCTTTAAAGCTTCTAACCATTTAGCAAAAGAAAAAGGAACCTTTGAAGGCTTCTCGGAATCAAGTTATGCTGATGGCAGTTATTTCTATCAATATACCGAACAAAACTTTGAGCCAAAAACACAGCGTGTTAAAAATCTACTAGCTGAGTATGGCCTGACTCTACCAAGCCAAGAGGACTGGAGAAAGCTTGTGCAAAGTATTAAAGAGATAGGATTAGCTAATGCGCATTTATTAGCTGTTGCTCCGACAGGGTCAATCAGTTATCTTTCTTCTTGTACTCCGAGCCTCCAACCAGTTGTATCACCTGTCGAAGTACGCAAGGAAGGAGCACTGGGGAGGGTTTATGTACCTGCTTATAAGATTGATGCAGATAATTATGTCTACTACAAAAAAGGAGCTTATGAAGTGGGACCTGAGGCGATTATCAATATTGCAGCTGCCGCTCAAAAACACATTGATCAAGCTATTTCGCTAACGCTTTTCATGACAGATCAAGCAACTACGCGAGATTTAAATAAAGCCTATATTCAAGCATTTAAACAAAAATGTGCCTCTATTTATTATGTACGAGTGAGACAGGACATCCTAGAAGGTAGCGAGAGTTATGATGATGATATGCTGGATGATTTCACTTCATCGGACTTAGAAGACTGTCAGTCCTGCATGATT

SEQ ID NO: 9648 - protein, 722 aa, Streptococcus agalactiae
MTQSDAYLSLNAKTRFRDRTGNYHFASDKEAVEQYMIEHVEPNTMTFTSLIEKLDYLVSNNYYESDLLKQYNLEFICQIFEHAYAKKFAFLNFMGALKFYNAYALKTEDNRYYLEHYEDRVVMNALFLAAGDEKAAYDLVDDMLANRFQPATPTFLNAGKKRRGEYISCYLLRIEDNMESISRAISTSLQLSKRGGGVALCLTNLREFGAPIKGIKNQATGIVPVMKLLEDSFSYANQLGQRQGAGAVYLHAHHPEVLTFLDTKRENADEKIRIKSLSLGLVIPDITFELAKANKDMALFSPYDIERVYGKPMSDISITEEYETLLANADIRKTFISARKLFQTIAELHFESGYPYILFEDTVNAKNPHKKEGRIVMSNLCSEIAQVNTASQFSEDLTFTKVGHDVCCNLGSINIARAMDQAADFEKLIANSIRALDRISRTSDLDSAPSIKKGNAANHAVGLGAMNLHGFLATNHIYYDSQEAIDFTDCFFYAMAYYAFKASNHLAKEKGTFEGFSESSYADGSYFYQYTEQNFEPKTQRVKNLLAEYGLTLPSQEDWRKLVQSIKEIGLANAHLLAVAPTGSISYLSSCTPSLQPVVSPVEVRKEGALGRVYVPAYKIDADNYVYYKKGAYEVGPEAIINIAAAAQKHIDQAISLTLFMTDQATTRDLNKAYIQAFKQKCASIYYVRVRQDILEGSESYDDDMLDDFTSSDLEDCQSCMI

SEQ ID NO: 9649 - protein, 3165 aa, Streptococcus agalactiae
ATGACAAAAAAACATCTTAAAACGCTTGCCTTGGCACTTACTACAGTATCAGTAGTGACATACAGCCAGGAGGTATATGGATTAGAAAGAGAGGAATCGGTCAAACAAGAACAAACCCAGTCAGCTTCAGAAGATGATTGGTTCGAAGAAGATAATGAGAGGAAAACAAATGTTTCTAAAGAGAATTCTACTGTTGATGAAACAGTTAGTGATTTATTTTCTGATGGAAATAGTAATAACTCTAGTTCTAAAACCGAGTCAGTAGTAAATGACCCTAAACAAGTCCTCAAAGCAAAACCAGAGGTTACACAAGAAGCAAGCAATTCTAGTAATAATGCTAGCAAAGTAGAAGTATCAAAACAGGATACAGCTTCAAAAAAGGAAATCATAGAAACATCAACTTGGGAGGCAAAAGATTTCGTAACTAGAGGGGATACTTTAGTAGGTTTTTCAAAATCTGGAATTAATAAGTTATCTCAAACATCACACTTAGTTTTACCAAGTCATGCAGCAGATGGAACTCAATTGACACAAGTAGCTAGCTTTGCTTTTACTCCAGATAAAAAGACGGCCATTGCAGAATATACAAGTAGGCTAGGAGAAAATGGGAAACCGAGTCGTTTAGATATTGATCAGAAGGAAATTATTGATGAGGGAGAAATATTTAATGCTTACCAGTTGACTAAGCTTACTATTCCAAATGGTTATAAGTCTATTGGTCAAGATGCTTTTGTGGACAATAAGAATATTGCTGAGGTTAATCTTCCTGAAAGTCTCGAGACTATTTCAGACTATGCTTTTGCTCACATGTCTTTAAAACAAGTAAAGTTACCAGATAACCTAAAGGTCATTGGAGAATTAGCTTTTTTTGATAACCAGATTGGTGGTAAGCTTTACTTGCCACATCACTTGATAAAATTAGCAGAACGCGCTTTCAAATCTAATCGTATTCAAACAGTTGAGTTTTTGGGAAGTAAGCTTAAGGTTATAGGAGAAGCAAGTTTTCAAGATAATAATCTAAGTAATGTTATGCTTCCGGATGGACTTGAAAAAATAGAATCAGAAGCTTTTACAGGAAATCCAGGAGATGAACATTACAACAATCAGGTCGTATTGCGCACACGGACAGGCCAAAATCCACATCAACTTGCGACTGAGAATACTTACGTCAATCCGGACAAATCATTGTGGCGTGCAACGCCTGATATGGATTATACCAAATGGTTAGAGGAAGATTTTACCTATCAAAAAAATAGTATTACAGGTTTTTCAAATAAAGGCTTACAAAAGGTAAGACGTAATAAAAACTTAGAAATTCCAAAACAACACAATGGTATTACTATTACTGAAATTGGTGATAACGCTTTTCGCAATGTTGATTTTCAAAGTAAAACTTTACGTAAATATGATTTGGAAGAAATAAAGCTCCCCTCAACTATTCGGAAAATAGGTGCTTTTGCTTTTCAATCTAATAACTTGAAATCCTTTGAAGCAAGTGAAGATTTAGAAGAGATTAAAGAGGGAGCCTTTATGAATAATCGTATTGGAACTCTAGACTTGAAAGACAAACTTATCAAAATAGGTGATGCTGCTTTCCATATTAATCATATTTACGCCATTGTTCTTCCAGAATCTGTACAAGAAATAGGACGTTCAGCTTTTCGACAAAATGGTGCACTTCACCTTATGTTTATCGGAAATAAGGTTAAAACAATTGGTGAAATGGCTTTTTTATCCAATAAACTGGAAAGTGTAAATCTCTCTGAGCAAAAACAATTAAAGACAATTGAGGTCCAAGCTTTTTCGGATAATGCCCTTAGTGAAGTAGTCTTACCGCCAAATTTACAGACTATTCGTGAAGAGGCTTTCAAAAGGAATCATTTGAAAGAAGTGAAGGGTTCATCTACATTATCTCAGATTGCTTTTAATGCTTTTGATCAAAATGATGGGGACAAACGCTTTAATAAGAAAGTGGTTGTTAGGACACATAATAATTCTCATATGTTAGCAGATGGTGAGCGTTTTATCATTGATCCAGATAAGCTATCTTCTACAATGGTAGACCTTGAAAAGGTTTTAAAAACACTAGAAGGTTTAGATTACTCTACATTACGTCAGACTACTCAAACTCAGTTTAGAGAAATGACTACTGCAGGTAAAGCGTTGTTATCAAAATCTAACCTCCGACAAGGAGAAAAACAAAAATTCCTTCAAGAAGCACAATTTTTCCTTGATCGCGTTGATTTGGATAAAGCCATAGCTAAAGCTGAGAAGGCTTTAGTGACCAAGAAGGCAACAAAGAATGGTCATTTGCTTGAGAGGAGTATTAACAAAGCGGTATTAGCTTATAATAATAGTGCTATTAAAAAAGCTAATGTTAAGCGCTTGGAAAAAGAGTTAGACTTGCTGACAGATTTAGTCGAGGGAAAAGGACCATTAGCGCAAGCTACAATGGTACAAGGAGTTTATTTATTAAAGACGCCTCTACCATTGCCAGAATATTATATCGGATTGAACGTTTATTTTGACAAGTCTGGAAAATTGATTTATGCACTTGATATGAGTGATACTATTGGCGAGGGACAAAAAGATGCATATGGTAATCCTATATTAAATGTTGACGAGGATAATGAAGGTTATCATGCCTTGGCAGTTGCCACTTTAGCTGATTATGAAGGTCTTTATATCAAAGATATTTTAAATAGTTCCCTTGATAAGATTAAAGCAATACGTCAGATTCCTTTGGCAAAATATCATAGATTAGGATTTTTCCAAGCTATCCGAAATGCAGCGGCAGAAGCAGACCGATTGATTCCTAAGACACCTAAGGGGTACCTAAATACAGTCCCAAATTATCGTAAAAAACAAGTGGAGAAAAATTCAAAACCAGTTGATTATAAAACGCCGATTTTTGATAAGGCTTTACCTAATGAAAAGGTAGATGGTGATAGAGTGGCTAAAGGTCATAATATAAATGCGGAGACTAATAATTATGTAGCTGTAACACCAATAAGGTCCGAGCAGCAATTACATAAGTCACAGTCTGATGTAAATTTACCTCAAACAAGTTCTAAAAATAATTTTATATACAAGATTCTAGGATACGTTAGTTTATGTTTGCTTTTCCTAGTAACTTCTGGAAAAAAAGGAAAACGAGCAAGAAAA

SEQ ID NO: 9650 - protein, 1055 aa, Streptococcus agalactiae
MTKKHLKTLALALTTVSVVTYSQEVYGLEREESVKQEQTQSASEDDWFEEDNERKTNVSKENSTVDETVSDLFSDGNSNNSSSKTESVVNDPKQVLKAKPEVTQEASNSSNNASKVEVSKQDTASKKEIIETSTWEAKDFVTRGDTLVGFSKSGINKLSQTSHLVLPSHAADGTQLTQVASFAFTPDKKTAIAEYTSRLGENGKPSRLDIDQKEIIDEGEIFNAYQLTKLTIPNGYKSIGQDAFVDNKNIAEVNLPESLETISDYAFAHMSLKQVKLPDNLKVIGELAFFDNQIGGKLYLPHHLIKLAERAFKSNRIQTVEFLGSKLKVIGEASFQDNNLSNVMLPDGLEKIESEAFTGNPGDEHYNNQVVLRTRTGQNPHQLATENTYVNPDKSLWRATPDMDYTKWLEEDFTYQKNSITGFSNKGLQKVRRNKNLEIPKQHNGITITEIGDNAFRNVDFQSKTLRKYDLEEIKLPSTIRKIGAFAFQSNNLKSFEASEDLEEIKEGAFMNNRIGTLDLKDKLIKIGDAAFHINHIYAIVLPESVQEIGRSAFRQNGALHLMFIGNKVKTIGEMAFLSNKLESVNLSEQKQLKTIEVQAFSDNALSEVVLPPNLQTIREEAFKRNHLKEVKGSSTLSQIAFNAFDQNDGDKRFNKKVVVRTHNNSHMLADGERFIIDPDKLSSTMVDLEKVLKTLEGLDYSTLRQTTQTQFREMTTAGKALLSKSNLRQGEKQKFLQEAQFFLDRVDLDKAIAKAEKALVTKKATKNGHLLERSINKAVLAYNNSAIKKANVKRLEKELDLLTDLVEGKGPLAQATMVQGVYLLKTPLPLPEYYIGLNVYFDKSGKLIYALDMSDTIGEGQKDAYGNPILNVDEDNEGYHALAVATLADYEGLYIKDILNSSLDKIKAIRQIPLAKYHRLGFFQAIRNAAAEADRLIPKTPKGYLNTVPNYRKKQVEKNSKPVDYKTPIFDKALPNEKVDGDRVAKGHNINAETNNYVAVTPIRSEQQLHKSQSDVNLPQTSSKNNFIYKILGYVSLCLLFLVTSGKKGKRARK

SEQ ID NO: 9651 - protein, 387 aa, Streptococcus agalactiae
ATGATTACACAAGAAATGAAAGAGATTATTAATAGTCAGTTAGCAATGGTCGCGACGGTTGATGCTAAAGGTCAACCCAATATTGGTCCAAAACGTTCTATGCGTCTCTGGGATGATAAAACGTTTATTTATAATGAAAATACAGATGGTCAAACTCGTATTAACATTGAAGATAATGGGAAAATTGAAATTGCCTTTGTTGATCGTGAACGTCTTTTAGGTTACAGGTTTGTGGGAACTGCTGAAATTCAAACAGAAGGTGCTTATTACGAAGCAGCGAAAAAATGGGCAGAAGGACGCATGGGGGTTCCGAAAGCAGTTGGTATTATTCACGTCGAGCGTATTTTTAATTTACAATCTGGTGCTAATGCAGGTAAAGAAATCACT

SEQ ID NO: 9652 - protein, 129 aa, Streptococcus agalactiae; identical to SEQ ID NO: 5238

SEQ ID NO: 9653 - protein, 489 aa, Streptococcus agalactiae
ATGCTATCATTTCAAATTGTTGAAAAGCCAGCAATGATACTTGCTGGAGTAACTTTAGAAAATGTAAAGTCAAATCAAGAATGTCCTAAACTTTGGGAAAAGTTACATAAACAATATAATCCAGCAAAACTAAAAGAAAAAGGTATCCAGCAAGCCATTGGCATTTGTAAAACACAACCTGATTTTCGTTTCGATTACAGCGCCACTTATCGAGTAGAGACAAGTGTCCAAGCCCCAAAAGGGTTAGAAATTATTAGGATCCCAAGCGCTACCTATGCAGTCATTTCTGTTAAAGGTCCAATGCCATCGAGTCTTCAAGAAACATGGCGAAAAATAATACAAGGATTTTTTCAAGAGAATAATCTAAAACCAGCTAACTCGCCAAACTTAGAAATTTATTCATCTCAACATCCACAAGATACTGATTATCAAATGGAAATTTGGCTTGCTATCGCAGATATTACTAATAAATCGAAAACAAACTTAATC

SEQ ID NO: 9654 - protein, 163 aa, Streptococcus agalactiae
MLSFQIVEKPAMILAGVTLENVKSNQECPKLWEKLHKQYNPAKLKEKGIQQAIGICKTQPDFRFDYSATYRVETSVQAPKGLEIIRIPSATYAVISVKGPMPSSLQETWRKIIQGFFQENNLKPANSPNLEIYSSQHPQDTDYQMEIWLAIADITNKSKTNLI

SEQ ID NO: 9655 - protein, 120 aa, Streptococcus agalactiae
ATGCTGAGAGATTATCTAGAAGATATGTTGAAAAAAGAGGGTAAAGAAGTTTATCCATTTTCTAGATTAGCATCTCATTCAGCAAATCGTTGGTACCCTTATGAGACACCATGGCGTTAT

SEQ ID NO: 9656 - protein, 40 aa, Streptococcus agalactiae
MLRDYLEDMLKKEGKEVYPFSRLASHSANRWYPYETPWRY

SEQ ID NO: 9657 - protein, 159 aa, Streptococcus agalactiae
ATGCTTACTATTCAAGAAATAAAAGATACAACCTTTGAATTACAAGAAAATTTTAGAAGGTTAAATTATCCTATTAAACAAGTTGCTAAAGACTTGCAACTTAATATCAGTGAAGTTGAATCTCTTTTAAGTCTTGATGTTACTTATCCTGGAGATGTT

SEQ ID NO: 9658 - protein, 53 aa, Streptococcus agalactiae
MLTIQEIKDTTFELQENFRRLNYPIKQVAKDLQLNISEVESLLSLDVTYPGDV

SEQ ID NO: 9659 - protein, 159 aa, Streptococcus agalactiae
ATGAAAGAAAAACAAACAGCCGGACGTCGTCAATTAGAAGAATTTGCACCTGAATTTGCCAGATATAATGATGATATTTTATTTGGTGAGGTTTGGGCAAAAGAGGATCATTTAACAGATAAAACACGTTCTATTATTACTATATCTGCCTTAATTAGC

SEQ ID NO: 9660 - protein, 53 aa, Streptococcus agalactiae
MKEKQTAGRRQLEEFAPEFARYNDDILFGEVWAKEDHLTDKTRSIITISALIS

SEQ ID NO: 9661 - protein, 135 aa, Streptococcus agalactiae
GTGATTGTAACTGATAAAGGCGTTAAACATTGGCATGGTGCTAAAAAAGATTCTGAATTTGCACATATTGCGATTACAGCTGGTAAGAGTGAGTTTTATGAAGCTGTTAGTGATGAAGAATATTCAAGACTAGGT

SEQ ID NO: 9662 - protein, 45 aa, Streptococcus agalactiae
MIVTDKGVKHWHGAKKDSEFAHIAITAGKSEFYEAVSDEEYSRLG

SEQ ID NO: 9663 - protein, 255 aa, Streptococcus agalactiae
ATGCAAGAAACAACTAAGTCTATCTTTCCTAAGGGTGAAAAAAATCCATATGGTGAATTCTTTATTAGGCAATCCTATCTCGCAGCATTAGCAAAATCTCCAGATGGGAATGTTTCAGTTGGAAATGTAACCTTTGAATCTGGCTGTCGTAATAATTGGCATGTTCATTTGGACGGTTATCAAATCCTCCTCGTTACAGAAGGTTCAGGTTGGTACCAAGAAGAGAATAAAAAAGGCAGTTTCATTAGAACCAGG

SEQ ID NO: 9664 - protein, 85 aa, Streptococcus agalactiae
MQETTKSIFPKGEKNPYGEFFIRQSYLAALAKSPDGNVSVGNVTFESGCRNNWHVHLDGYQILLVTEGSGWYQEENKKGSFIRTR

SEQ ID NO: 9665 - protein, 396 aa, Streptococcus agalactiae
ATGTTAAAAATGCATATCAAAGAAGTTAGTAAAAAGACTGGCATTACGTCAGATACCATTAGGTATTATGAGAGAATTAATCTTATTCCCCCTATTCATCGGAGTGAATCAGGAATTCGTGAGTTCACACAAAACGATATTGATATTTTAGAATTTGTCCGCTATTTTAGAGGCGCAGGTGTTTCCGTTGAAAGTCTCATTGATTATATTCATTTGGTTGAAAAAGGCGATTCCACAATCCCAGCTAGGCTAGAAATTTTAAAAGATAAACGCAACAACCTTGAAGATAGGCTTCAAGGCCTCCAAGAAGCACTTAATCGTCTAAATCACAAAATAGACAATTATCAAAAAGTTCTTGTTCCTAGAGAACAAGAACTTTTTGATCCAACAACGAAA

SEQ ID NO: 9666 - protein, 132 aa, Streptococcus agalactiae
MLKMHIKEVSKKTGITSDTIRYYERINLIPPIHRSESGIREFTQNDIDILEFVRYFRGAGVSVESLIDYIHLVEKGDSTIPARLEILKDKRNNLEDRLQGLQEALNRLNHKIDNYQKVLVPREQELFDPTTK

SEQ ID NO: 9667 - protein, 570 aa, Streptococcus agalactiae
ATGGCAACTGGTTATCATGCTGCAGAAGTTAAAGAAGGTGATACGGTAGTTGTCATGGGAGATGGTGCTGTTGGACTCTGTGGTGTTATTGCTGCTAAAATGTTAGGTGCTAACCGTATCATTGCAATGAGTCGTCACAAAGATAGGCAGGAACTAGCATTGACTTTTGGTGCAACGGATATTGTCGAAGAACGGGGTGACGAAGCCGTTAAACGTGTTTTAGATTTAACCAATCAAGCAGGTGCCGATGCTATTTTAGAATGCGTTGGTACAGAGCAGTCTGTTGATACAGCTACCCAAATTGCTAGGCCTGGTGCTGTCATAGGACGTGTTGGTATCCCACAAAATCCAGACATGAATACCAATAATTTATTCTGGAAAAATATCGGCCTTAGAGGTGGCATTGCTTCTGTAACAACATTTGATAAGTCTGTCCTTTTAGATGCTGTTCTAACTCATAAAATTAACCCAGGCTTAGTTTTTACAAAATCCTTTGTATTAGATGATATTCAAAAGGCTTATGAAGCAATGGATAAACGTGACGCTATCAAATCCTTAGTGATTGTTGAC

SEQ ID NO: 9668 - protein, 190 aa, Streptococcus agalactiae
MATGYHAAEVKEGDTVVVMGDGAVGLCGVIAAKMLGANRIIAMSRHKDRQELALTFGATDIVEERGDEAVKRVLDLTNQAGADAILECVGTEQSVDTATQIARPGAVIGRVGIPQNPDMNTNNLFWKNIGLRGGIASVTTFDKSVLLDAVLTHKINPGLVFTKSFVLDDIQKAYEAMDKRDAIKSLVIVD

SEQ ID NO: 9669 - protein, 453 aa, Streptococcus agalactiae
ATGAAAGTAGCTACATTTATTGAACCTGGCAAAATGGTTATAACTGATACACCAAAACCAGTCATTGAACAAGAGACAGATGCTGTTATCAAAATTGTTAGAGCCTGTGTTTGTGGTTCAGACTTGTGGTGGTATCGTGGTATTTCAAAACGTGAAAGTGGTTCTTTTGCAGGTCATGAGACTATTGGTATCGTTGAGGAAGTTGGTACTAAAGTAACTGACGTGTCAAAAGGTGATTTTGTTATTGTTCCCTTTACACATGGCTGTGGCCAATGTCCGTCTTGTAAGGCTGGATTTGATGGAAATTGTACAAATCATCAAGCTGAAAAAAATGTAGATACCAAGGTCAATATCTACGTTATACTAATGCAAACTGGGCATTGGTTAAAATTCCTGGTCAACCTTCTGACTATGATAATGAGACACTTAACTCTCTTCTCACCTTATCAGATG

SEQ ID NO: 9670 - protein, 151 aa, Streptococcus agalactiae
MKVATFIEPGKMVITDTPKPVIEQETDAVIKIVRACVCGSDLWWYRGISKRESGSFAGHETIGIVEEVGTKVTDVSKGDFVIVPFTHGCGQCPSCKAGFDGNCTNHQAEKNVDTKVNIYVILMQTGHWLKFLVNLLTMIMRHLTLFSPYQM

SEQ ID NO: 9671 - protein, 852 aa, Streptococcus agalactiae
ATGACAGATACAATGATATTAAATGACAATCATAAAATACCAACTTTAGGTTTAGGTACGTGGATGATAGATAATGATAGGGTAGCTCAAGTTGTTAAAGATGCTATCGAATTAGGCTACCGCCATATTGATACTGCACAAGCATACAACAATGAAAAAGGGGGCGGTGTAGGGATTAAAGAATCTGGTATTACACGTGAATCTTTATTTGTTACGACTAAAATTGCCGCTGAACATAAAGATTATGAAAGTGCTACAAAATCAATTGATCGATCACTAGAAGCTTTAGGGCTTGATTATATTGATTTAATGATTATTCATAGTCCACAGCCTTGGAAGGAATGGCGTGAAACAGATAAACATTTTGACCAAGGAAATTTAGAAGCTTGGAGAGCTTTAGAGGATGCTCAAAAATCTGGTAAGGTAAAATCCATCGGTGTCTCAAACTTTTTAGAAAAAGACTTAGAAAATATCTTAAAAAATGGTTATGTTAAACCTGCTGTCAATCAAATCTTAGCTCACATCGGAAATACACCTTTCGACTTGATTGATTACTGTCAAAGTAAAGGTATTCAAGTTGAAGCTTATTCACCAATTGCACATGGACAAGCATTGAAATCTGATGGTATTCAAAAAATGGCTGAAAAATATGGGGTTAGTGTTGCTCAATTATGTATTCAATATTTACTACAATTAAACCTGATCGTTTTACCAAAGGCTTCTAGTAAAGAACATTTACAGTCTAATCTAGACTTTGACTTTGTAATTAGTGACGAAGATATGTCGATATTAAAATCACTTATGTTTGACGATTATGGGGAATTTTCTAACTTCCCTGTTTTTAGTGGAAAA

SEQ ID NO: 9672 - protein, 284 aa, Streptococcus agalactiae
MTDTMILNDNHKIPTLGLGTWMIDNDRVAQVVKDAIELGYRHIDTAQAYNNEKGGGVGIKESGITRESLFVTTKIAAEHKDYESATKSIDRSLEALGLDYIDLMIIHSPQPWKEWRETDKHFDQGNLEAWRALEDAQKSGKVKSIGVSNFLEKDLENILKNGYVKPAVNQILAHIGNTPFDLIDYCQSKGIQVEAYSPIAHGQALKSDGIQKMAEKYGVSVAQLCIQYLLQLNLIVLPKASSKEHLQSNLDFDFVISDEDMSILKSLMFDDYGEFSNFPVFSGK

SEQ ID NO: 9673 - protein, 303 aa, Streptococcus agalactiae
ATGACATCAAACAAAAAAGTGGCTATCGCTTTTATATTAAATATCAGCTTTTCCGTCCTTGAATTCATCTTTGGAAGTCTATTCTTCTCAGGAGCTATCTTAGCCGATGCTGTTCATGATTTTGGTGATGCAATAGCTATTGGCATCTCAGCTACTTTAGAAAAAAAATCTAAGAAAGATGAAGATACGATATTTTCATTAGGTTATAAACGTTTTAGCCTTTTAGGAGCTCTTATCACAAGTCTAATTCTTATAAGTGGATCTATCTTAGTCATGATAGAAAATATTCCAAANNNNNTTAAT

SEQ ID NO: 9674 - protein, 101 aa, Streptococcus agalactiae
  VARIANT 98, 99, 100: Xaa = Any Amino Acid
MTSNKKVAIAFILNISFSVLEFIFGSLFFSGAILADAVHDFGDAIAIGISATLEKKSKKDEDTIFSLGYKRFSLLGALITSLILISGSILVMIENIPXXXN

SEQ ID NO: 9675 - protein, 522 aa, Streptococcus agalactiae; identical to SEQ ID NO: 5259

SEQ ID NO: 9676 - protein, 174 aa, Streptococcus agalactiae; identical to SEQ ID NO: 886

SEQ ID NO: 9677 - protein, 1191 aa, Streptococcus agalactiae
ATGATTGATTCTTTATTGTTGAAATCATTACACAGTCTTCTAGGTCTAACTATTACTGTTTGTGATCAAAATTTTTCTGTTATCAGAGAGTATAAATCCGATAAAACTATTTCACTTTTTTACAATCATTACCTTATTTTAAGTAACTTTAGTAAAACTCAACATGATTTTTTATTTCATTATGGCTCTTTAGGAGAACTTTTTCTTGTCCACCATATTCAACAATATTATATTATCATCGGTCCCTGGCGTAGCAATGTTATTGACCCTTTACTTCTTAAGAAAAAGCTGACTGAAACACAAATCAATGCTAGTGAACAAGACTACTTTATTGATAGACTATCCCAATTACCTTTCTTCTCACTTAGTCAAATCCGAGAATTACTAATAGTAACCAATTATTGTCTAACTGGGGTTGTGAAAGATAAATTATCAGAGCCCTTACATTACTACACGAAAGGGTGGAGCAACTCCTTTGATCTAGATAAAATTAAGCAATTTTCTAAACAGAATATGAGTTCTTACAAATATCAGTATCATTTTGAAAATAATATTCTAAAAGCTGTTAAATCAGGTAGTGAATTTCTTTTGAAAGAAACAGTGGAACAATTTAGCAATTCTATCGTACCTATAATCAGTGGAGATGAATTGCGATCTGAAAAAAACTACTCCATCATGATTTATGATCGTCTCTCACAGGCTACCATCCAAGCAGGACTTGATATCGAAACAGCTTATCGAGCACGAGATCGTTTTATAAAAGAAAACGAGTCAACTATAAGTCTAAATGAAGTTTTAAAATTACGTGATACTGCTATCTTATTCTATACTCAACAAGTTCATTCTTTAAAAAAACATCTCGAAACCCCTCATTCTCAAACTATTGTCGCAGTGATTCGATATCTTGAAAATAATCTAAATCGCTTTATTAAAACAGAAGAAATAGCTAAAGAATGTCACATGAGTGAATCGAAGTTACGAAAACTATTTAAGCAAGAAAAACACATCACTATTCAACAATATTTTCTAAACTTAAAAATCGAAGCTGCTAAGCAATTACTAGATGAAAATAAGAAAGTAGAAGAAGTTTCCAATTTACTTGGATTTTCCACTTCTTCTAATTTTTCAAGGACATTTAAAAAAATAGTGGGAATTAGCCCACTAGAATATAAGCAAAAGCCTAAGACAATA

SEQ ID NO: 9678 - protein, 397 aa, Streptococcus agalactiae
MIDSLLLKSLHSLLGLTITVCDQNFSVIREYKSDKTISLFYNHYLILSNFSKTQHDFLFHYGSLGELFLVHHIQQYYIIIGPWRSNVIDPLLLKKKLTETQINASEQDYFIDRLSQLPFFSLSQIRELLIVTNYCLTGVVKDKLSEPLHYYTKGWSNSFDLDKIKQFSKQNMSSYKYQYHFENNILKAVKSGSEFLLKETVEQFSNSIVPIISGDELRSEKNYSIMIYDRLSQATIQAGLDIETAYRARDRFIKENESTISLNEVLKLRDTAILFYTQQVHSLKKHLETPHSQTIVAVIRYLENNLNRFIKTEEIAKECHMSESKLRKLFKQEKHITIQQYFLNLKIEAAKQLLDENKKVEEVSNLLGFSTSSNFSRTFKKIVGISPLEYKQKPKTI

SEQ ID NO: 9679 - protein, 1832 aa, Streptococcus agalactiae
ATGTTTAGAAGGTCTAAAAATAACAGTTATGATACTTCACAGACGAAACAACGGTTTTCAATTAAGAAGTTCAAGTTTGGTGCAGCTTCTGTACTAATTGGTCTTAGTTTTTTGAGTGGGGTTACACAAGGTAATCTTAATATTTTTGAAGAGTCAATAGTTGCTGCATCTACAATTCCAGGGAGTGCAGCGACCTTAAATACAAGCATCACTAAAAATATACAAAACGGAAATGCTTACATAGATTTATATGATGTAAAGAATGGATTGATCGATCCTCAAAACCTCATTGTATTAAATCCATCAAGCTATTCAGCAAATTATTATATCAAACAAGGTGCTAAATATTATAGTAATCCGAGTGAAATTACAACAACTGGTTCAGCAACTATTACTTTTAATATACTTGATGAAACTGGAAATCCACATAAAAAAGCTGATGGACAAATTGATATAGTTAGTGTGAATTTAACTATATATGATTCTACAGCTTTAAGAAATAGGATAGATGAAGTAATAAATAATGCAAATGATCCTAAGTGGAGTGATGGGAGTCGTGATGAAGTCTTAACTGGATTAGAAAAAATAAAAAAAGATATTGATAATAATCCAAAAACACAAATAGATATTGATAATAAAATTAATGAAGTCAATGAAATAGAGAAATTGTTAGTTGTATCGCTACCAGATAAAATTAAGTATTCGCCAGAGGCTAAGCATAGGACTGTTGAACAACACGCGGAATTAGATGCAAAAGATAGCATTGCAAATACAGATGAATTGCCATCAAATTCAACGTATAACTGGAAAAATGGTCATAAACCAGACACCTCAACATCAGGTGAAAAAGACGGAATTGTTGAAGTTCACTATCCAGATGGTACTGTTGATGATGTGAATGTTAAAGTAACCGTTACATCGAAAAAAACTGATAATACAGCTCCAACATTAACCGTCACTCCAGAGCAACAGACTGTTAAAGTGGATGAAGATATTACCTTTACGGTTACAGTTGAAGACGAAAATGAAGTTGAACTAGGTTTAGATGATCTTAAAGCTAAGTATGAAAATGATATCATTGGAGCTCGTGTTAAAATTAAGTATCTTACTAAAGAATCTAATAAGAAAGTCATGGAAGTGACAATTATGAAAGCTACTTTAGCAGATAAGGGCGCAATTACCTTTACTGCAAAAGATAAAGCAGGTAATCAAGCAGAACCTAAGACAGTTACCATCAATGTTCTTCCGCTTAAGGATAGCAACGAACCAAAAGGTAAGGACCAAACGGTCAAAGTAGGAGAAACACCGAAGGCAGAAGATTCTATTGGTAACTTATCAGATCTTCCGAAAGGTACAACAGTAGCCTTTGAAACTCCAGTTGATACGGCAACACCGGGAGACAAACCAGCAAAAGTTGTTGTGACTTACCCAGATGGTTCAAAAGATACTGTAGATGTGACTGTTAAGGTTGTCGATCCACGTACAGATGCCGATAAGAATGATCCAGCAGGTAAAGATCAGCAAGTCAAAGTAGGAGAAACACCGAAGGCAGAAGATTCTATTGGTAACTTATCAGATCTTCCGAAAGGTACAACAGTAGCCTTTGAAACTCCAGTTGATACGGCAACACCGGGAGACAAACCAGCAAAAGTTGTTGTGACTTACCCAGATGGTTCAAAAGATACTGTAGATGTGACTGTTAAGGTTGTCGATCCACGTACAGATGCCGATAAGAATGATCCAGCAGGTAAAGATCAGCAAGTCAAAGTAGGAGAAACACCGAAGGCAGAAGATTCTATTGGTAACTTACCAGATCTTCCGAAAGACAACAG

SEQ ID NO: 9680 - protein, 611 aa, Streptococcus agalactiae
MFRRSKNNSYDTSQTKQRFSIKKFKFGAASVLIGLSFLSGVTQGNLNIFEESIVAASTIPGSAATLNTSITKNIQNGNAYIDLYDVKNGLIDPQNLIVLNPSSYSANYYIKQGAKYYSNPSEITTTGSATITFNILDETGNPHKKADGQIDIVSVNLTIYDSTALRNRIDEVINNANDPKWSDGSRDEVLTGLEKIKKDIDNNPKTQIDIDNKINEVNEIEKLLVVSLPDKIKYSPEAKHRTVEQHAELDAKDSIANTDELPSNSTYNWKNGHKPDTSTSGEKDGIVEVHYPDGTVDDVNVKVTVTSKKTDNTAPTLTVTPEQQTVKVDEDITFTVTVEDENEVELGLDDLKAKYENDIIGARVKIKYLTKESNKKVMEVTIMKATLADKGAITFTAKDKAGNQAEPKTVTINVLPLKDSNEPKGKDQTVKVGETPKAEDSIGNLSDLPKGTTVAFETPVDTATPGDKPAKVVVTYPDGSKDTVDVTVKVVDPRTDADKNDPAGKDQQVKVGETPKAEDSIGNLSDLPKGTTVAFETPVDTATPGDKPAKVVVTYPDGSKDTVDVTVKVVDPRTDADKNDPAGKDQQVKVGETPKAEDSIGNLPDLPKVQQ

SEQ ID NO: 9681 - protein, 702 aa, Streptococcus agalactiae
GTGACTTACCCAGATGGTTCAAAAGATACTGTAGATGTGACTGTTAAGGTTGTCGATCCACGTACAGATGCCGATAAGAATGATCCAGCAGGTAAAGATCAGCAAGTCAAAGTAGGAGAAACACCGAAGGCAGAAGATTCTATTGGTAACTTATCAGATCTTCCGAAAGGTACAACAGTAGCCTTTGAAACTCCAGTTGATACGGCAACACCGGGAGACAAACCAGCAAAAGTTGTTGTGACTTACCCAGATGGTTCAAAAGATACTGTAGATGTGACTGTTAAGGTTGTCGATCCACGTACAGATGCCGATAAGAATGATCCAGCAGGTAAAGATCAGCAAGTCAAAGTAGGAGAAACACCGAAGGCAGAAGATTCTATTGGTAACTTATCAGATCTTCCGAAAGGTACAACAGTAGCCTTTGAAACTCCAGTTGATACGGCAACACCGGGAGACAAACCAGCAAAAGTTGTTGTGACTTACCCAGATGGTTCAAAAGATACTGTAGATGTGACTGTTAAGGTTGTCGATCCACGTACAGATGCCGATAAGAATGATCCAGCAGGTAAAGATCAGCAAGTCAATGGTAAAGGAAATAAACTACCAGCAACAGGTGAGAATGCAACTCCATTCTTTAATGTTGCAGCTTTGACAATTATATCATCAGTTGGTTTATTATCTGTTTCTAAGAAAAAAGAGGAT

SEQ ID NO: 9682 - protein, 234 aa, Streptococcus agalactiae
MTYPDGSKDTVDVTVKVVDPRTDADKNDPAGKDQQVKVGETPKAEDSIGNLSDLPKGTTVAFETPVDTATPGDKPAKVVVTYPDGSKDTVDVTVKVVDPRTDADKNDPAGKDQQVKVGETPKAEDSIGNLSDLPKGTTVAFETPVDTATPGDKPAKVVVTYPDGSKDTVDVTVKVVDPRTDADKNDPAGKDQQVNGKGNKLPATGENATPFFNVAALTIISSVGLLSVSKKKED

SEQ ID NO: 9683 - protein, 291 aa, Streptococcus agalactiae
ATGTCAACAGTAGCAGTAAGAGTAGATGATCAATTAAAAGATGATGCTACAGAACTTTTTCAATCCTTAGGGTTGGATATGAGTACAGCAGTAAAAATGTTTTTGATTCAGTCTGTTAAAACTCAAAGTATTCCTTTTGAAATAAAAAATCAATCATCTGTTTCTGATGAAGAATTTCAAAATTTGGTAGAAACAAAATTAAAAGGAATACGAGTTAAGGCTAGTGATCCAGAAAGTGTAAATGCGTTTTTTGGAGATGAAGATTTTTCAGAATATGAGGAATATTTTAAA

SEQ ID NO: 9684 - protein, 97 aa, Streptococcus agalactiae
MSTVAVRVDDQLKDDATELFQSLGLDMSTAVKMFLIQSVKTQSIPFEIKNQSSVSDEEFQNLVETKLKGIRVKASDPESVNAFFGDEDFSEYEEYFK

SEQ ID NO: 9685 - protein, 186 aa, Streptococcus agalactiae
ATGAGTGATATTGAGGTATATTCTGTATTAGTTTCACGTATTGAATATTCTGATGGTACAGGTTCAAAGGTTCGTCCTGCTGTAGTAGTCAAATTTAATGATGAAGTAATAAAAACTTTAAGATTTACTACTAAATATGAAAATAAGTCTGACAATATAAGAAGTCAGTATTTAGAAGTTATTGAT

SEQ ID NO: 9686 - protein, 62 aa, Streptococcus agalactiae; identical to SEQ ID NO: 894

SEQ ID NO: 9687 - protein, 369 aa, Streptococcus agalactiae
ATGAAAAAGAAATTATTAGGATTGATGATTTTAGCTATATCTACAGTATTTTTAGTTGCTTGTTCGACTAATTCGTTAAATGTAAAGTATTATAAAGTATATGATGGTGAAAAAACGTTAGTTTTAGAAATTAATGATGAATCAGGAATTTATCATAATGAAGGAAACTTTGTAGTAACTAATATTGATACTAAAAGTAAAAGTTTTGTACTTAAAGGTGGGTCTGCTAAGTATACTGTTTTATATGATGTTAAAAGTGATGGTAAATTGAATGTTGATTTAGGAAACTTTTATTATAATGCTTCTGGTAAGGAGACATATTATAAAGAAGGTAGCAAGGCTTTAGAAAAAGCATTAAGAGATAAAGAA

SEQ ID NO: 9688 - protein, 123 aa, Streptococcus agalactiae
MKKKLLGLMILAISTVFLVACSTNSLNVKYYKVYDGEKTLVLEINDESGIYHNEGNFVVTNIDTKSKSFVLKGGSAKYTVLYDVKSDGKLNVDLGNFYYNASGKETYYKEGSKALEKALRDKE

SEQ ID NO: 9689 - protein, 480 aa, Streptococcus agalactiae
TTGAAGAATATCTTCGATATGTATAAATACTATTTCTTTCAAAATCAATATCATCCCAAGTTACTCTATAAAATTGTTTACGAAAATAAACTATTCAAAGAAATAACCATTGATTTAGAAATTTCAAAGGAATGTTTAGAAATACGACTTTTCCATCTACTTAAAGATTATTCCAATTTGAACAATAAAGAAATAAGTACGATCGTTAGTAACTTTCAAAGAAATAAAAATCAAACCATGAATTTAGCTCTTTATGATATCAAACATAATATTATTTCTGAATACGAGCAAATAACTCCAAATAATCTGGAAAAAGCAACTCATCAATTAAATAAAAGCTATCTCATTTCCTCGCTTGATTTCATTGAATTAACAGATAACACTTTCCAAGAAAAACTAAGACAGAGTAACCCCATCTTCTTTTTGGTTCTTACTTTGATTTCGGTAAAAATACTTTTTATTGCTGGGATACAAATTATT

SEQ ID NO: 9690 - protein, 160 aa, Streptococcus agalactiae
MKNIFDMYKYYFFQNQYHPKLLYKIVYENKLFKEITIDLEISKECLEIRLFHLLKDYSNLNNKEISTIVSNFQRNKNQTMNLALYDIKHNIISEYEQITPNNLEKATHQLNKSYLISSLDFIELTDNTFQEKLRQSNPIFFLVLTLISVKILFIAGIQII

SEQ ID NO: 9691 - protein, 405 aa, Streptococcus agalactiae
TTGCTTGAACTAAAATTTCAACAAGAAAGAATGCTGAAAGGTTTGCATATAAAAAATACAGATCAATTGATTTTTTATGACTATAGGTTTGGTATGATATCAAATGATGCTGTTAACAAATTCTTGGCAAGCTCATTGGAAAAATTAGAAATAGAATCTAAGATGTCATCAACAGGTGCTAGACATACTTATGGAAGTTATTTGTTGGCTAACGGAGTAGATATTTGGGCGGTTGCAAAATTAATGGGGCATAAAGATATCAAACAATTAATAGAAAGATATGGTCATTTGCTTCTGGAAGTGGAAGAAAAGGAAAATAATCAGCTTTTAAATTCTTAATAATAAAGGTAGTTTTTAAAATGACTATCAAGAACAAATTAGAACAAAATAAAAGAAACCCTATTA

SEQ ID NO: 9692 - protein, 136 aa, Streptococcus agalactiae
MLELKFQQERMLKGLHIKNTDQLIFYDYRFGMISNDAVNKFLASSLEKLEIESKMSSTGARHTYGSYLLANGVDIWAVAKLMGHKDIKQLIERYGHLLLEVEEKENNQLLKFLIIKVVFKMTIKNKLRTKIKETLL

SEQ ID NO: 9693 - protein, 495 aa, Streptococcus agalactiae
ATGTTAACGATGCTTAACAATTCAGCTAAGGAGAAGGTCATAAAAGAGTACTTACGTGTCCTAAAACCTGGTGGACGTTTACTCACACATGATGTTTCTTATCAAGATGAAGACACTGCCAATCTGATCGATCAACTTAGACATACTATAAATGTTAACGTTGCTCCTCTAAAAATAGATGATTGGAAAAATTTATTCTTACAAAATGGTTTTTCAAGTTCAGAATATCAATTTGGAAAAATGAGTCTCATGTCCCCATTAGGAATGATTAAAGATGAAGGTTTATTCAATACCATTAAAATCATCAGCCGAGGACTGAAAAATGAACGATGCCCTCATCCAAAATTAATAAATGTTTTGGAAGGAAAACTTGAAATTATCCTTGGTGTTCAGAAACATATCCTTGAAAAAGATAGCCTTATTAGCCTCTCTCCAGAAGAAACACACCATTTAAGAGCTATTGAAAATAGTAAATTTCTCCAAATAGAATTAGAC

SEQ ID NO: 9694 - protein, 165 aa, Streptococcus agalactiae
MLTMLNNSAKEKVIKEYLRVLKPGGRLLTHDVSYQDEDTANLIDQLRHTINVNVAPLKIDDWKNLFLQNGFSSSEYQFGKMSLMSPLGMIKDEGLFNTIKIISRGLKNERCPHPKLINVLEGKLEIILGVQKHILEKDSLISLSPEETHHLRAIENSKFLQIELD

SEQ ID NO: 9695 - protein, 231 aa, Streptococcus agalactiae
ATGTCATACGAACAAGAATTTTTAAAAGACTTTGAAGAGTGGTTACAATCGCAAATAAGTATCAACCAAATGGCAATGGACAGTGCAAAGAAAGTTTTAGAGGAAGATAAGGATGAGCGAGCAGCAGATGCGTATATTCGTTATGAGAGTAAGTTAGACGCTTATCGCTTTTTGCAAGGGAAATTTAATAACTATCATAACCAAAAATCTTTCCATGATTTNNNNNTTAAT

SEQ ID NO: 9696 - protein, 77 aa, Streptococcus agalactiae
  VARIANT 74, 75, 76: Xaa = Any Amino Acid
MSYEQEFLKDFEEWLQSQISINQMAMDSAKKVLEEDKDERAADAYIRYESKLDAYRFLQGKFNNYHNQKSFHDXXXN

SEQ ID NO: 9697 - protein, 308 aa, Streptococcus agalactiae
ATGGCAAAGCGTATTAAACCGAATAAAAAAAGAGAGCTTTTTATAGCTAAAGGGATCAATTGGAAGGATGTTCGACTATCTCAACTTTACAAGAAGTCGCATCACCGAAAAAAAAGGCTCCTGAAGCGCCAAAGGTAGTCGATCTTTTAGAAGGTTTAACTGCTAATAAACAAGATGTTTTAAAAGAAGCTGGCCTTGTCAGCCTTGAAGCGTTTGCGAAAGTAAGTGAAGCAGATGTTTTAGCACTAAAAGGTATTGGTCCAGCAGCTATTAAACAGTTAGTTGATAATGGTGCTGTTTTTGCAAAA

SEQ ID NO: 9698 - protein, 103 aa, Streptococcus agalactiae
  VARIANT 28: Xaa = Any Amino Acid
MAKRIKPNKKRELFIAKGINWKDVRLSXTLQEVASPKKKAPEAPKVVDLLEGLTANKQDVLKEAGLVSLEAFAKVSEADVLALKGIGPAAIKQLVDNGAVFAK

SEQ ID NO: 9699 - protein, 213 aa, Streptococcus agalactiae
ATGACAGAAGCTGTCGCCGCTTTGATTGAAGTCGGTTTTACCCTCCTCAATCTCCACAAAATCGAAATCCGCTGCTATGATTACAATAAGCAAAGCCGGCGCGTGGCAGAAAAACTAGGATTCACCCTTGAAGCTACCATTCGTGCTCGTAAGGATAATCAAGGCAATCGCTGTGTCAATTTGATATATGGTTTGCTGAGGAGTGAGTGGGAG

SEQ ID NO: 9700 - protein, 71 aa, Streptococcus agalactiae
MTEAVAALIEVGFTLLNLHKIEIRCYDYNKQSRRVAEKLGFTLEATIRARKDNQGNRCVNLIYGLLRSEWE

SEQ ID NO: 9701 - protein, 582 aa, Streptococcus agalactiae
ATGATTAAGATACTTGGAGAAATCGTAGATAACCAGCTACCTGTTGTGGAAACGAATCGTCTGTTGTTGCGTCAACGCAAGTTAGAAGATGCTAAGGAGATATTTGAATTTGTCAAACTTGATGAGGTGAGTTATCCAGCAGGTTTTCCGGCTGTTAAAAGCTTGGAAGAAGAGATAACCTATATTCAAGAGATTTATCCAACTAATCTTGAAAAAGAAAAGTTACCCTCTGGTTATGCTATTACTCTAAAAGGCGATGATAAGGTAATTGGTTCAGTAGATTTTAACCATCGCCACGAAGACGACATTTTTGAAATTGGCTACCTGCTCCACCCTGATTATTGGGGACAAGGCATTGTGCCAGAAGCAGCTTCAGCCCTTGTGGAGATAGGTTTCACACTGCTAGGACTACATAAGATTGAGCTGGGATGCTATGACTATAATAAGCAAAGTCAGGCGGTTGCGCGCAAATTAGGTTTTACTTTAGAGGCTAATATTCGTGATCGAAGAGATGCCCAGGGGCAACGTTGTGGCGATATGCGCTTTGGTTTACTGCGAAGCGAGTGGGAGAAACAAAGAAGA

SEQ ID NO: 9702 - protein, 194 aa, Streptococcus agalactiae
MIKILGEIVDNQLPVVETNRLLLRQRKLEDAKEIFEFVKLDEVSYPAGFPAVKSLEEEITYIQEIYPTNLEKEKLPSGYAITLKGDDKVIGSVDFNHRHEDDIFEIGYLLHPDYWGQGIVPEAASALVEIGFTLLGLHKIELGCYDYNKQSQAVARKLGFTLEANIRDRRDAQGQRCGDMRFGLLRSEWEKQRR

SEQ ID NO: 9703 - protein, 564 aa, Streptococcus agalactiae
ATGAATATTATTATCATCGGAGCACAAGCTTCTGGGAAAATGACAATTGGTCAGGAAATCGCAAAACAGACAGGCATGACCTTATTCCATAACCATGATTCTATAGATTTTGTTTTACGCTTCATGCCATGGTCTCCAGATAGTATTGCTCTAACGGAGTCTATTCGCTTTAAATTTTTTGAAACGTTTGCTAAGACTGGTCAAGAAATGATTTTTACTATTGTAATTGATTTCAATGATTCAAGAGATGTAGTATTTCTAGAAAAGATTCAAACAGTTTTTCAATCTCACAACCAAGAGGTATTATTTGTAGAATTAGAAACAGAGCTAAGTGAGCGTCTCAAACGGAATCGCACAGAAAATCGCCTCAAGCATAAGCCTTCAAAACGTGATATCAAATGGTCAGAGAACGATATTTGTTCAACCATGGATTACGCTATCTTTAATCCTGAAGTAGCCCCAGAAGCACTTACATATTATCATAAAATCAATAATACTTGTTTAACTGCTACTGAAACAGCATATCTTATTATTCAAAAAATAAACCAAATCAAGGAGAAAAAC

SEQ ID NO: 9704 - protein, 188 aa, Streptococcus agalactiae
MNIIIIGAQASGKMTIGQEIAKQTGMTLFHNHDSIDFVLRFMPWSPDSIALTESIRFKFFETFAKTGQEMIFTIVIDFNDSRDVVFLEKIQTVFQSHNQEVLFVELETELSERLKRNRTENRLKHKPSKRDIKWSENDICSTMDYAIFNPEVAPEALTYYHKINNTCLTATETAYLIIQKINQIKEKN

SEQ ID NO: 9705 - protein, 2652 aa, Streptococcus agalactiae
ATGTCAAAAGAACTATCACCAAAATACAATCCTGCCGAGGTTGAGGAAGGCCGTTATCAAACTTGGCTTGACCAAGATGTTTTCAAGCCATCAGGGGATACTGAGGCTAAGCCTTATTCTATCGTGATTCCACCACCAAACGTTACGGGTAAATTGCACTTGGGTCACGCTTGGGATACAACTCTACAAGATATCATTATTCGTCAAAAGCGTATGCAGGGCTTTGATACACTCTGGCTTCCAGGTATGGACCACGCTGGTATAGCTACTCAAGCTAAGGTTGAGGAGCGCCTTCGTGAGCAAGGTATTTCACGTTATGATCTTGGTCGTGAAAAATTCCTAGATAAAGTTTGGGAATGGAAAGACGAGTATGCAGCAACTATTAAATCTCAGTGGGGGAAAATGGGTCTTTCGGTTGATTATAGTCGTGAGCGTTTTACCCTTGATGAGGGACTTTCAAAAGCGGTAAGAAAAGTCTTTGTTGATTTGTACAATAAAGGTTGGATCTATCGTGGGGAGTTCATCATTAATTGGGATCCAGCAGCTCGTACAGCCCTTTCAGATATTGAAGTTATTCACAAGGATGTTGAGGGTGCTTTCTATCATATGAATTATATGCTGGAAGATGGCTCACGCGCCCTAGAAGTAGCAACAACTCGTCCTGAGACTATGTTTGGAGATGTGGCTGTAGCGGTAAATCCAGAAGATCCACGTTACAAAGATTTGATTGGCCAAAATGTTATCCTTCCTATCATCAATAAACCTATTCCAATCATCGCTGATGAACACGCTGATCCAGAATTTGGAACAGGTGTGGTTAAGATTACGCCGGCTCACGACCCTAATGACTTTGCTGTAGGTCAACGCCACAACTTACCACAAGTTAACGTTATGAACGATGATGGTACTATGAATGAACTTGCGGATGAATTTAATGGTATGGATCGTTTCGAAGCTCGTAAGGCAGTAGTCGCTAAATTAGAATCGTTAGGAAACTTAGTAAAAATTGAAAAAATGACTCATTCTGTTGGTCATTCAGAACGAACAGGCGTTGTGGTTGAACCACGTTTATCTACTCAATGGTTCGTCAAGATGGATCAATTGGCTAAGAATGCCATTGCCAACCAAGATACAGAAGATAAGGTAGAGTTTTATCCACCACGATTTAACGATACTTTTATGAGTTGGATGGAAAATGTCCATGACTGGGTTATCTCTCGTCAATTATGGTGGGGACACCAAATTCCTGCATGGTACAACGTCAATGGTGAGATGTATGTTGGAGAAGATGCCCCAGAGGGTGACGGATGGACACAGGATGAAGACGTTCTAGACACATGGTTTAGTTCTGCTTTATGGCCGTTTTCAACAATGGGATGGCCAGACACCGAAGCAGCTGACTTCAAACGCTACTTCCCAACATCAACCTTGGTAACTGGATACGATATCATCTTCTTCTGGGTATCGCGCATGATTTTCCAATCTCTTGAATTTACAGGACGCCAACCATTCTCAAATGTTCTTATTCATGGACTCATCCGTGATGAAGAAGGACGTAAAATGTCTAAATCACTTGGCAACGGGATTGATCCGATGGATGTCATTGAGAAATATGGTGCGGATGCCCTTCGTTGGTTCCTCTCAAATGGTTCAGCCCCTGGTCAAGATGTGCGTTTTTCATACGAAAAAATGGATGCTTCGTGGAATTTCATTAATAAGATTTGGAACATTTCACGCTATATCCTTATGAATAACGAAGGTTTAACGTTGGATCAAGCCAGAGAAAATGTGGAAAAAGTTGTTAATAGTCAAGTTGGAAATGTAACAGACCGTTGGATTCTCCACAATTTAAATGAGACTGTGGGTAAAGTTACTGAAAACTTTGACAAGTTTGAATTTGGTGTTGCTGGTCACATCCTTTACAACTTTATCTGGGAAGAATTTGCTAATTGGTACGTTGAGTTAACAAAAGAGGTTCTTTATAGTGACAATGAAGAGGAGAAAGTTGTTACACGTTCTGTTCTTCTTTATACCTTAGATCAAATCTTGCGTCTTCTTCATCCAATCATGCCATTTGTGACAGAAGAAATTTTTGGACAATACGCAGAAGGATCAATTGTCCTTGCAAGTTATCCACAAGTTAACGCGACATTTGAAAATCAGACAGCTCACAAAGGCGTTGAAAGCTTGAAAGATTTGATTCGTTCAGTGCGAAATAGCAGAGCAGAGGTCAATGTTGCTCCATCTAAACCAATCACTATCTTGGTTAAGACAAGTGACAGCGAACTCGAAAGCTTCTTCAAAGACAATAGTAACTACATCAAACGCTTCACAAACCCAGAGACGCTTGAAATCAGCTCAGCGATTACTGCCCCAGAACTTGCCATGACTAGCATTATCACAGGTGCAGAAATTTTCCTCCCACTTGCTGACCTCCTTAACGTTGAAGAAGAGTTGGCACGACTTGAAAAAGAACTTGCTAAATGGCAAAAAGAACTAAATATGGTCGGCAAAAAACTCAGCAACGAGCGCTTTGTAGCTAACGCTAAACCAGAAGTCGTCCAAAAAGAAAAAGACAAACAGACCGACTACCAAACTAAATACGACGCAACTATAGCACGTATTGAAGAGATGAAAAAATTAAATAATGAT

SEQ ID NO: 9706 - protein, 884 aa, Streptococcus agalactiae
MSKELSPKYNPAEVEEGRYQTWLDQDVFKPSGDTEAKPYSIVIPPPNVTGKLHLGHAWDTTLQDIIIRQKRMQGFDTLWLPGMDHAGIATQAKVEERLREQGISRYDLGREKFLDKVWEWKDEYAATIKSQWGKMGLSVDYSRERFTLDEGLSKAVRKVFVDLYNKGWIYRGEFIINWDPAARTALSDIEVIHKDVEGAFYHMNYMLEDGSRALEVATTRPETMFGDVAVAVNPEDPRYKDLIGQNVILPIINKPIPIIADEHADPEFGTGVVKITPAHDPNDFAVGQRHNLPQVNVMNDDGTMNELADEFNGMDRFEARKAVVAKLESLGNLVKIEKMTHSVGHSERTGVVVEPRLSTQWFVKMDQLAKNAIANQDTEDKVEFYPPRFNDTFMSWMENVHDWVISRQLWWGHQIPAWYNVNGEMYVGEDAPEGDGWTQDEDVLDTWFSSALWPFSTMGWPDTEAADFKRYFPTSTLVTGYDIIFFWVSRMIFQSLEFTGRQPFSNVLIHGLIRDEEGRKMSKSLGNGIDPMDVIEKYGADALRWFLSNGSAPGQDVRFSYEKMDASWNFINKIWNISRYILMNNEGLTLDQARENVEKVVNSQVGNVTDRWILHNLNETVGKVTENFDKFEFGVAGHILYNFIWEEFANWYVELTKEVLYSDNEEEKVVTRSVLLYTLDQILRLLHPIMPFVTEEIFGQYAEGSIVLASYPQVNATFENQTAHKGVESLKDLIRSVRNSRAEVNVAPSKPITILVKTSDSELESFFKDNSNYIKRFTNPETLEISSAITAPELAMTSIITGAEIFLPLADLLNVEEELARLEKELAKWQKELNMVGKKLSNERFVANAKPEVVQKEKDKQTDYQTKYDATIARIEEMKKLNND

SEQ ID NO: 9707 - protein, 927 aa, Streptococcus agalactiae
TTGTCAAATGAAAAACTTATCAATAAAAATCATAGTCAATTAGATTTTGTAAATATACCAATAAATAAAGATGTGAAACTTTTTTTAGATCCTACTAAATTACATTCTAAAAATTTAAGTTCAGTATTTGAAAACGCTGCGCTAAAACTCCATTCATTTTTTTTAGAAGCCTACCGGCTTTATACAGAATTTGGGGAAAATGAAGTTCGTAATATACTTTGCTTTTCATCAGAATGTAATTTTATTCACTTAGGATATTCTAAAAGTAAATCTAGAGGAAAGGGAGTTTCTGAAAAAATGCTTTTTAATTTTTTTAAAAAAATAAGCGGATTTACTCCTTCAGAAAGGAAAAATTTACTTCATCCCACTTCAATAGCTATATTTGTTCCAAAATTTGCTGAAGATAGAACTTCTGATTTCCTTGTAAGCCTTTTAAAAAAAGAAATTGTAGAATATTCACTTGAACAGGCTAAACTACATCAGCTAAGAATTGAATATTCTAAATATGACTTTGGTCATTACTGGGATGATATATCACTAAGTTGGAAAACAATAAAACATTTTTACATAAAAGCTAATGATAGGCCTATTTTACTAATTCCAAAGTGTCTCGTTTCAAAAAAATATAAATTCTCTACATCACATTTCGTCAAAACTATAATATTCCCAAATAAAAAAAACTTAGAAAAGTATCAAGGAATAAATGGATATGATAAAAGTAATAGACCTAAACCAGCAACTCAGAAACAACTTATTGAGCACGAAATACGTTCACCTTATCTAAACTGCCCAGATAAGTGGAAAACTTACGCCATGGAGCAGCTATTACAAAATCACAATTGGTATAATGAATATTTCCTAAATATGAATAATTTTGCTGATAACCATATTATACCTGATGACGAACTTGATAGTTTAACCAATAAC

SEQ ID NO: 9708 - protein, 309 aa, Streptococcus agalactiae
MSNEKLINKNHSQLDFVNIPINKDVKLFLDPTKLHSKNLSSVFENAALKLHSFFLEAYRLYTEFGENEVRNILCFSSECNFIHLGYSKSKSRGKGVSEKMLFNFFKKISGFTPSERKNLLHPTSIAIFVPKFAEDRTSDFLVSLLKKEIVEYSLEQAKLHQLRIEYSKYDFGHYWDDISLSWKTIKHFYIKANDRPILLIPKCLVSKKYKFSTSHFVKTIIFPNKKNLEKYQGINGYDKSNRPKPATQKQLIEHEIRSPYLNCPDKWKTYAMEQLLQNHNWYNEYFLNMNNFADNHIIPDDELDSLTNN

SEQ ID NO: 9709 - protein, 957 aa, Streptococcus agalactiae
ATGTCAAAGGTAAGGTATGGTGTTGTGTCAACGGCAAAGGTGGCGCCCCGTTTTATTGAAGGAGTCCGCTTAGCAGGAAATGGTGAAGTTGTGGCTGTATCGAGTCGAACTCTTGAGTCTGCGCAAGCTTTTGCCAACAAATATCATCTCCCAAAGGCTTACGATAAGTTAGAGGATATGTTAGCAGATGAGTCAATTGATGTGATTTATGTGGCAACAATTAATCAAGACCATTATAAAGTTGCTAAAGCAGCTCTGTTAGCGGGAAAGCATGTGTTGGTAGAGAAGCCTTTCACATTGACTTACGACCAAGCGAATGAATTATTCGCTTTGGCAGAAAGTTGTAATCTGTTTTTGATGGAAGCACAAAAATCGGTATTTATTCCGATGACACAAGTGATTAAAAAATTACTTGCCTCTGGTGAAATAGGAGAAGTGATCTCCATATCATCTACAACAGCCTACCCAAACATTGACCATGTAACATGGTTTAGAGAACTTGAGTTAGGTGGAGGAACAGTGCATTTTATGGCGCCCTATGCCCTGTCTTATTTACAATATCTATTTGATGCGACTATAACTCATGCTAGTGGGACTGCGACTTTTCCAAAAGGTCAAAGCGATAGTCAATCCAAACTACTCTTGCAATTATCAAATGGGGTCCTCGTAGATATCTTCTTGACAACACGTCTAAATTTACCGCATGAAATGATTATTTACGGAACTGAAGGTCGTCTAATCATTCCACATTTTTGGAAAACCACTCATGCAAAATTGGTGAGAAATGATACTAGTGCGCGAACGATTCAAGTTGACATGGTTAGTGATTTTGAGAAAGAAGCTTATCATGTTAGTCAAATGATTTTAGAAGGGCAAAGGGTAAGTCATATCATGACGCCTCAGTTGACGCTGTCAGGTGTTAAGATTATAGAAGACTTATACCGTTCATGGGGGAAA

SEQ ID NO: 9710 - protein, 319 aa, Streptococcus agalactiae; identical to SEQ ID NO: 916

SEQ ID NO: 9711 - DNA, 900 bp, Streptococcus agalactiae
atgttttcgagcgattttggatttgagataattaatgttgacgatctatccttacaagaggagaaatttttaccttcagaattgctggcttatgcacgtgatgaaaatgagtcttctttcgtacgtgatattgaggagcatttgacacttgtttaccagcttctggatacgcaaggtcacgttgatgatgttcgtcatgtgccgagagtgataccagtgactctatttttgaaagaagatggcttgtttgtattagctaatcataaaaatattaaccttgtaaaaaaagcacttaatcgtgttgaaaaggtagattctccgaaacacctcttattatcattagtgactgctttctcaaagcaatattttgatgttttagatactatttctgaagaaagagataaactaatcaatgatttgcgtaaaagaccaaacaaatcgaacttggcaaggctggcaaatttacaaagtggaacagtacacttaatgatgggaactaagcaaaattttgaaatgctgaccgatttacaaaacattgagcaagataaagagaacactagaaatgaaaagatgcaacttcaagatgctattattgaagcaagacaattatctaacatgtgttccttaaattcacaggttttccaagaactttcttcttcttataataatgtcctcagcaataaccttaacgacaatgtaactactttaacaattatttccattggtatttccattattgctatggttaccagtttttatggaatgaatgttaagttgccttttgatagtgttgatgctgtctgggtattgattattttaattacgactatcattactattatgctctctattgttatgtacatttatgtccataaagaggataatcatcccaaacataaa

SEQ ID NO: 9712 - protein, 300 aa, Streptococcus agalactiae
MFSSDFGFEIINVDDLSLQEEKFLPSELLAYARDENESSFVRDIEEHLTLVYQLLDTQGHVDDVRHVPRVIPVTLFLKEDGLFVLANHKNINLVKKALNRVEKVDSPKHLLLSLVTAFSKQYFDVLDTISEERDKLINDLRKRPNKSNLARLANLQSGTVHLMMGTKQNFEMLTDLQNIEQDKENTRNEKMQLQDAIIEARQLSNMCSLNSQVFQELSSSYNNVLSNNLNDNVTTLTIISIGISIIAMVTSFYGMNVKLPFDSVDAVWVLIILITTIITIMLSIVMYIYVHKEDNHPKHK

SEQ ID NO: 9713 - DNA, 1062 bp, Streptococcus agalactiae
atgtcaatagaatcagattttttccggaaaaaacgttttattttttcatcgcttgaggagtttggatttatcaaatctgaccaagagtatatctattgtcaaacatttatggataatgactttaaagctattatcacgatttcattggatggaaagatagctggtaaggttattgatttggcacttgaagaagaatatttaccgcttcgagcagcaaattataatggttcgtttgttggcgaagtacgatcggcttatatggctatattaggtgatatttcagattcttgttgtaaggacttattatttaccaaagatcaaagtaatcgtttagcggagaagatagctaaaacttttgaagattcagttgattatccatttgcgaagcacccacaatatgcttcctatcgtgtatcaggtaaatggtatgctctgctttttccattgaagatgggaaaactagaaaatgttccagctcaactgtcagaagaagaggttgaagttttgaatattaaagtcaatcctcaagatatggaaatactcttacaaaaagaaggtgtttatccttcttatcatatgtctaaaaagacttgggtatctatcgttttagacaatactttgtctgatatagaaatttttaaattggtatcagatagtcgtaagcttgtttctcccaataaaaaatcaaattctgagccagagttttggattattcctgctaatcctaaattttacgatattgataaggagtttgcagagcatcaattgattgattggactcaaaaaggaaagattgcggtgggagattatgtgtttatttatattacagcacctattcgtgctttgcgctatgtctgtcaagtaatagaacgtgaccttaaaacaagtacttacttaggagcaagagatgtcaaagcttatatgcgactcaaactgataaggcaatttgaagattctacctatcctgtggcatttttagcagaacacggcgttaagactgtgagaggaccacggcgaatgaccaaggaattgcgacaagtcatggcaaaaacaattctagag

SEQ ID NO: 9714 - protein, 354 aa, Streptococcus agalactiae
MSIESDFFRKKRFIFSSLEEFGFIKSDQEYIYCQTFMDNDFKAIITISLDGKIAGKVIDLALEEEYLPLRAANYNGSFVGEVRSAYMAILGDISDSCCKDLLFTKDQSNRLAEKIAKTFEDSVDYPFAKHPQYASYRVSGKWYALLFPLKMGKLENVPAQLSEEEVEVLNIKVNPQDMEILLQKEGVYPSYHMSKKTWVSIVLDNTLSDIEIFKLVSDSRKLVSPNKKSNSEPEFWIIPANPKFYDIDKEFAEHQLIDWTQKGKIAVGDYVFIYITAPIRALRYVCQVIERDLKTSTYLGARDVKAYMRLKLIRQFEDSTYPVAFLAEHGVKTVRGPRRMTKELRQVMAKTILE

SEQ ID NO: 9715 - DNA, 168 bp, Streptococcus agalactiae
  misc_feature 155, 156, 157, 158, 159: n = A,T,C or G
atgaagaaaagctttattcatcagcaacaggagatttcttttgtccaaaatacttttacacaatatttgattgataaagtagaaatcgtcgaagtgcaaggacctattcttaatcaggtcggggatggtatgccagatatttatctggtattgannnnnttaattaat

SEQ ID NO: 9716 - protein, 56 aa, Streptococcus agalactiae
  VARIANT 52, 53: Xaa = Any Amino Acid
MKKSFIHQQQEISFVQNTFTQYLIDKVEIVEVQGPILNQVGDGMPDIYLVLXXLIN

SEQ ID NO: 9717 - DNA, 822 bp, Streptococcus agalactiae
gtgaaagtccttaatatacctgaagctgaatttgaagtcgttcactcattggctaaatggaaacgtcatactttggcaagatttgggtttaatgagggagaaggtcttttcgttcatatgaaagctcttcgtccagatgaagattctcttgatccaacacactcagtttacgtagatcagtgggactgggagaaggtcattcctgatggtagacgtaatttggactacctaaaagaaactgtggaaaaaatctacaaagctatccgcctaacagagcttgccgtggaagctcgttttgatattgaatccattttaccaaagcgtattacctttattcatacagaagaattggtagaaaaatacccagacttaagccctaaagagcgtgaaaatgccatcgctaaggagtatggcgcagtctttttgattggtattggtggagagttagcagatggtaaaccacatgatggtcgtgcaccggactatgatgactggacaacaccatcagaaaatggttttaaaggtctcaatggtgatattttagtatggaacgaacagcttggaactgcctttgaactatcatcaatgggaattcgagttgatgaagatgctcttaaacgtcaagttgttctcaccggtgatgaaggtcgtttagagtttgagtggcataagacgctattacgtggtttcttccctttgactattggtgggggaattggtcaatcacgattagctatgttcttgcttcgtaaaaaacatattggagaagtacagtcaagtgtctggccaaaagaagtcagagacacctttgaaaatatatta

SEQ ID NO: 9718 - protein, 274 aa, Streptococcus agalactiae
MKVLNIPEAEFEVVHSLAKWKRHTLARFGFNEGEGLFVHMKALRPDEDSLDPTHSVYVDQWDWEKVIPDGRRNLDYLKETVEKIYKAIRLTELAVEARFDIESILPKRITFIHTEELVEKYPDLSPKERENAIAKEYGAVFLIGIGGELADGKPHDGRAPDYDDWTTPSENGFKGLNGDILVWNEQLGTAFELSSMGIRVDEDALKRQVVLTGDEGRLEFEWHKTLLRGFFPLTIGGGIGQSRLAMFLLRKKHIGEVQSSVWPKEVRDTFENIL

SEQ ID NO: 9719 - DNA, 366 bp, Streptococcus agalactiae
atgactatttctcaacaacaataccaacacatgataacaaatagtgacttaatcgccatcacagataaggcgttagtaagcaaaagtcaacaatctgaagcgactatttttataggacgtcaaacttgccaatattgtagagctttcttaccaaaattattaaaatctaaagccacacttcattcaaaaatttactaccttgatagtcaaaaatacaaagggaaacgattgaagagttttttcaaaaagcatcatattaccactgttccaaatttagcacattatcaacgaggaaaaatgactaaatatcttgttcaaggaagccaagctacacctcaacaaatccaaactttcttaagccaaaaa

SEQ ID NO: 9720 - protein, 122 aa, Streptococcus agalactiae; identical to SEQ ID NO: 5306

SEQ ID NO: 9721 - protein, 750 aa, Streptococcus agalactiae; identical to SEQ ID NO: 5307

SEQ ID NO: 9722 - protein, 250 aa, Streptococcus agalactiae; identical to SEQ ID NO: 5308

SEQ ID NO: 9723 - protein, 288 aa, Streptococcus agalactiae
ATGGATTACAAGTTAGTGATGATTATTCTCATCTTAGTCATATTGATTTATTTGTTGTTGCGCCTTCACTATTTAGAAGAGTTGCTAAAACATTATCACTTCAAAAATGATGAAGGAGTTTGTTCATTATCAAGAACAAAAAATCCATTGTATCTATTAATGGCAATGATTACTTTTTTGCCAAACCTTATCAATTGGATAGCTAACGGTTTTGAGGCAATAGACATTGTTCGCCTGATTCCTGTGGTAGTCTTTTTATGGTTGTATTATTGTGGAGATGACGACGAA

SEQ ID NO: 9724 - protein, 96 aa, Streptococcus agalactiae; identical to SEQ ID NO: 930

SEQ ID NO: 9725 - protein, 483 aa, Streptococcus agalactiae
ATGACAAAGAAAGCTTTATTTACAGGTTCATTTGATCCTGTTACTAATGGACATTTAGATATTATTGAGCGCGCCAGCTATCTATTTGATCATGTTTACATTGGGTTATTTTATAACCTTGAGAAGCAAGGTTACTTTTCGATTGAGTGCCGTAAAAAAATGTTAGAAGAAGCTATCCGTCAGTTTAAGAATGTTTCAGTTTTAGTGGCGCAAGATAGACTAGCTGTTGACTTAGCAAGGGAAGTGGGAGCAAAATATTTTGTTCGAGGTCTGCGTAATAGCCAGGATTTTGATTATGAAGCCAATTTGGAGTTTTTTAATAAACAGTTGGCAGATGATATTGAGACAGTTTATTTATCAACGTCGCCATCTTTGAGTCCGATATCATCTAGTCGCATCCGTGAATTGATATATTTTAAGGCTTCTGTGAAGCCTTTTGTTCCAAAGAGTGTTGTTAGAGAAGTGGAGAAAATGAGTGAAGAA

SEQ ID NO: 9726 - protein, 161 aa, Streptococcus agalactiae
MTKKALFTGSFDPVTNGHLDIIERASYLFDHVYIGLFYNLEKQGYFSIECRKKMLEEAIRQFKNVSVLVAQDRLAVDLAREVGAKYFVRGLRNSQDFDYEANLEFFNKQLADDIETVYLSTSPSLSPISSSRIRELIYFKASVKPFVPKSVVREVEKMSEE

SEQ ID NO: 9727 - protein, 1071 aa, Streptococcus agalactiae
GTGAAGAATAAAGATCCAAAAAGAAAACATAAAAGTTTACTAGGTCTGCTTAAATGGTGGATTATAGGTTTTGCTTTTTTATTGTTAGTATTAGCAAGCCTTGTGGTGAGGCTACCTTATTATTTGGAAATGCCAGGTGGAGCTTATGATATCCGTTCGGTATTGAAAGTGAATAAAAAGGCTGATAAAGCTAAGGGTTCGTACAATTTTGTAGCGGTTTCTGTCAGTCAAGCAACGCCAGCTCAGGTTCTTTATGCTTGGTTAACTCCTTTTACAGAATTATCTAGTAAAGAGGAGACAACAGGTGGCTTTAGTAATGACGATTATCTCAGAATTAATCAATTCTACATGGAGACTTCTCAAAATGAGTCCGTCTATCAAGCTTTAAAGTTAGCTAATAAGCAAGTATCTCTTACTTATAAAGGAGTTTATGTGCTTAACTTAGCTAAAAATTCGACATTTAAAGATAGATTACATTTAGCTGATACAGTCACAGGAGTTAATGGCAAAAGTTTCAAAAATTCTTCTCAACTTATCAAATATGTTGCAGCTCTTCATCTAGGTGATAAAGTAAAGGTACAATACACAAGTCAAGGTAAAAAGAAAGAATCGGTTGGTAAAGTTATTAAACTATCAAACGGTAAAAATGGTATTGGTATCGGTTTGACAGACCATACAGAAGTATCATCTGATGTTCCTGTGGACTTTAATACTGAAGGTGTTGGAGGACCAAGTGCAGGTTTAATGTTTACTTTAGCGATTTACGACCAATTGGTTAAAGAAGATTTACGTAAAGGACGTAAGATTGCAGGTACTGGTACTATTGAGCAAAATGGGCATGTTGGCGATATTGGTGGAGCAGGTTTGAAAGTTGTTTCAGCGGCTAAAAAAGGAATGGATATTTTCTTTGTTCCTAATAATCCGATCGATAAAAATGCTAAAAAAGGCAAAACAAAGGTTCAGACGAATTATCAAGAGGCAAAAGCAGCAGCTAAGCGATTAGGTACGAAGATGAAAATTGTACCAGTTCAAAATGTTCAGCAAGCTATTGATTATTTGAAAAAAACAAAA

SEQ ID NO: 9728 - protein, 357 aa, Streptococcus agalactiae; identical to SEQ ID NO: 5314

SEQ ID NO: 9729 - protein, 1331 aa, Streptococcus agalactiae
ATGACAGAGCTTATAAGAATACTACATTTAAATGATCTGCACTCTCATTTTGAGAATTTTCCTAAGGTAAAACGATTTTTTCATGACAATCAAGCGCAGCCAATAGAGACGATTTCACTTGACTTGGGGGATAATATTGATAAAAGCCATCCTTTGACAGAAGCAAGCTCGGGCAAGGCTAATGTCCAATTGATGAATGAACTGGGTATTGAGCTTGCTACTATTGGTAATAATGAAGGAGTTGGTTTATCCAAAAAAGACTTGGACCAAGTCTACAAAGATTCAGATTTTACGGTTATTGTTGGTAATCTAAAAGATAACATAATCGAACCGAGTTGGGCAAAACCTTACATTATTTATGAGACACAGCAAGGAACTAAGCTTGCTTTTTTAGCTTATACTTTTCCTTATTATAAAACCTATGAACCTAATGGGTGGACGATAGAAGATCCAATTGACTGTCTTAAATGCCATTTACAAATAAATGAGATAAAAGAGGCAAATTGTCGTATTTTGATGAGTCATTTAGGTATTCGTTTTGATACAAGGATTGCTCAAGAATTTTCAGAAATTGACCTTATTATAGGTGCACATACACACCATTTATTTGAGGAAGGGGAGCTAATTACCGGTACATATCTTGCAGCAGCTGGTAAATATGGTCGCTTTGTTGGGAGTATTGATATAACTTTTGATAATCATACACTAAAAGATATTTTAATCTCAACATATGATACAAAACAACTAACTGGTTATCCTTCGGACAGTGACTGGGCTAAGGAGATTGAGTCAGAAGGTAAAGAACAGCTTAGAAAAGAAAGTTTAATATCCTTTCCAGCACCATTATCATTAGAAGAATCGTGTCAACTAGTCATGGATGCGATGCTGTTTACGCAGGTGCAGATGTTGCTATTATCAATTCTGGCTTAATTGTTCAGCCATTTGAAAAAGACTTTTCGAGGAAAAATCTGCATGAATCATTACCTCATAAAATGCGTCTCGCTAAATTGACAGTGAGTAGTCAAGAACTTTTAGAGATTTATGAAACTATTTATCAACAAGGTCAATTTTTAGCGCAACAAAAGATTCATGGTATGGGCTTTCGTGGCAAGTACTTTGGAGAAGTTTTACATTCGGGATTTGATTACAAAAATGGAAAAATAGTGTATAATGAGAAAGATATTGATGCCAAAGAAGAAGTGATTCTTGTAATCGTTGATCAGTATTATTTTGCATCGTATTTTGAGTGTTTAAAAACAAAAAAAGTAGACTTGCTTTTTCCTGAATTACTCAGAGATGTGGTAGCAGATTATTTAATAAATATGACACTA

SEQ ID NO: 9730 - protein, 444 aa, Streptococcus agalactiae
MTELIRILHLNDLHSHFENFPKVKRFFHDNQAQPIETISLDLGDNIDKSHPLTEASSGKANVQLMNELGIELATIGNNEGVGLSKKDLDQVYKDSDFTVIVGNLKDNIIEPSWAKPYIIYETQQGTKLAFLAYTFPYYKTYEPNGWTIEDPIDCLKCHLQINEIKEANCRILMSHLGIRFDTRIAQEFSEIDLIIGAHTHHLFEEGELITGTYLAAAGKYGRFVGSIDITFDNHTLKDILISTYDTKQLTGYPSDSDWAKEIESEGKEQLRKESLISFPAPLSLEESCQLVMDAMLFYAGADVAIINSGLIVQPFEKDFSRKNLHESLPHKMRLAKLTVSSQELLEIYETIYQQGQFLAQQKIHGMGFRGKYFGEVLHSGFDYKNGKIVYNEKDIDAKEEVILVIVDQYYFASYFECLKTKKVDLLFPELLRDVVADYLINMTL

SEQ ID NO: 9731 - DNA, 576 bp, Streptococcus agalactiae; identical to SEQ ID NO: 5317

SEQ ID NO: 9732 - protein, 192 aa, Streptococcus agalactiae; identical to SEQ ID NO: 940

SEQ ID NO: 9733 - DNA, 1104 bp, Streptococcus agalactiae
atgtctaaaaaaactgatacacccgactataaaccctctatttatagcttaactcgcgatgaactaatagcttgggctattgaacatggagaaaagaaattccgtgcttcacaaatctgggactggctctataaaaagcgtgtgcaaagcttcgatgaaatgactaacatttccaaagattttattgcacttttgaatgagaattttgttgtcaatcctctaaaacaacgtattgttcaagaatctgctgatggaactgttaaatacctttttgaattacctgatggcatgctgattgagacggttttgatgcgtcaacattatggtttatcagtatgtgtaacgactcaagttggttgtaacattggttgcactttctgtgcaagtggtttaataaagaaacaacgtgatcttaacaatggcgaaatcactgctcaaattatgcttgttcaaaaatattttgatgaacgtggacaaggtgagcgcgttagtcacattgtggtcatgggaataggtgaaccctttgataactataccaatgtattaaaattcttgcgtacagttaacgatgataatggattagctattggtgcacgtcacattacagtgtctacttcaggtttagcacataaaattcgtgaatttgcaaatgaaggtgtacaagttaacttagcagtatctcttcatgctccaaataatgaattacgatcaagtatcatgcgtattaatcgttctttccctcttgaaaagttgtttgcggctattgaatattatattgagacgactaaccgtcgtgtaacatttgagtatattatgttaaatggtgtcaacgataccccagaaaatgctcaagagttagcagatttaacgaaaaagattcgcaaattatcttatgtcaatttaattccttacaatcctgtctcagaacatgaccagtatagtcgtagtcctaaagagcgtgtggaagcattctatgacgttttgaagaaaaatggagttaattgtgttgttcgtcaagaacatggtacggacattgatgcagcttgcggacaattacgttcaaacacaatgaaacgcgatcgtcaaaaagcgaaggtagggcag

SEQ ID NO: 9734 - protein, 368 aa, Streptococcus agalactiae
MSKKTDTPDYKPSIYSLTRDELIAWAIEHGEKKFRASQIWDWLYKKRVQSFDEMTNISKDFIALLNENFVVNPLKQRIVQESADGTVKYLFELPDGMLIETVLMRQHYGLSVCVTTQVGCNIGCTFCASGLIKKQRDLNNGEITAQIMLVQKYFDERGQGERVSHIVVMGIGEPFDNYTNVLKFLRTVNDDNGLAIGARHITVSTSGLAHKIREFANEGVQVNLAVSLHAPNNELRSSIMRINRSFPLEKLFAAIEYYIETTNRRVTFEYIMLNGVNDTPENAQELADLTKKIRKLSYVNLIPYNPVSEHDQYSRSPKERVEAFYDVLKKNGVNCVVRQEHGTDIDAACGQLRSNTMKRDRQKAKVGQ

SEQ ID NO: 9735 - DNA, 513 bp, Streptococcus agalactiae
atgcttaaaagattacttactgaagatggggaattgacaaagattagtcgtcgtttcgtttggatgttagtgattatctattgtcttattattgtcaggatgtgttttgggcctcaaattatgattgagggggtatcaactccgaatgttcagcgcttcggaagaattgtagctcttttagtaccatttaattcttttcgtagtttagatcagctaactagctttaaagagattttttgggttattggtcaaaatgtagtgaatattttactgctgtttcctctcattatagggttactatccctaaagccaagtttacggaaatataaaagcgttatattacttgctttcttgatgtctcttttcatagagtgtactcaagttgttttagatattttaatagatgctaatcgggtttttgaaatcgacgatctatggacaaataccttaggcggccctttcgccctatggacttatcgaaatataaaaggttggcttctaactattagaaaa

SEQ ID NO: 9736 - protein, 171 aa, Streptococcus agalactiae
MLKRLLTEDGELTKISRRFVWMLVIIYCLIIVRMCFGPQIMIEGVSTPNVQRFGRIVALLVPFNSFRSLDQLTSFKEIFWVIGQNVVNILLLFPLIIGLLSLKPSLRKYKSVILLAFLMSLFIECTQVVLDILIDANRVFEIDDLWTNTLGGPFALWTYRNIKGWLLTIRK

SEQ ID NO: 9737 - DNA, 1743 bp, Streptococcus agalactiae
atgtctattataaaaaatttgtggtggttttttaaggaagaaaagaagcgctatcttattgggattttgtcattaagtttggttgcggtgttaaatcttatccctcctaaaatcatgggatcagttattgatgctattacaactggaaaattaacaagaccacaattactctggaatttattaggtttggttttgtcagctttagctatgtatgggctgcgttatatttggcgtatgtatattttagggacttcttacaaattgggtcaagttgtcagataccgtttatttgaacattttacaaaaatgtctccttctttttatcagaaatatcgtacaggtgatttaatggcgcacgcgaccaacgacatcaattctctaacacgtcttgcaggaggaggagttatgtcagcagtggatgcctctatcacagcattagtaacgcttatcaccatgttctttactatttcgtggcaaatgacattaattgcggttatccctttgcccttaatggccttagcaactagtaaattggggcgaaaaacccatgaaaccttcaaagaatctcaggcagccttttcagaattaaataataaagtgcaagaaagtgtctctggcgtcaaagtgactaaatcatttggttatcaagaacaagaaattgcttcttttcaagaggttaatcagatgactttcgtgaagaacatgcggaccatgacttatgatgtcatgtttgatcctttagttcttctttttataggtgcctcctacgtattaacattggctatgggagcttttatgatttcaaaaggtcaagttactgttggtgacttggtaacatttgtgacgtatttagatatgttggtatggcccttgatggcgattggtttcttgttcaatatggtacagcgtggtagtgtttcttataaccgtattaatagtctacttgagcaagaatcggatataactgatcctttaaatcctatcaaacctgttgtcaatggaacattaagatatgatattgatttctttagatacgacaatgaagaaaccttagccgatattcatttcaccttagaaaaaggtcaaaccttaggtttggtaggtcaaacgggatcagggaagacaagtcttattaagttattgctacgtgaacatgatgtgactcaggggaaaattactttaaataaacatgatatacgtgactatcgattgtctgacttacgtcaactaatcggttatgttcctcaagatcagtttttatttgctaccagtattttagaaaatgttcgctttggaaatccaactctatctatcaatgctgtcaaaaaagcaactaaattggctcatgtttacgatgacattgaacagatgccagcaggatttgagactctaattggagaaaaaggagtctcattatctggtggacaaaaacaaaggattgcgatgagtcgtgccatgattttagatccagatattcttattttggatgattctctatcagcagtggacgctaaaacggaacatgccattattgagaatcttaaaacgaatcgtcaagggaaatcgactattatttcagcacatcgtttatcagctgttgtgcacgcagaccttatcttagttatgcaagacggcagagtcatcgagcgaggtcagcatcaagagttgctaaataaaggtggttggtatgctgaaacgtatgcctcacagcaattagaaatggaggaagcatttgatgaagtc

SEQ ID NO: 9738 - protein, 581 aa, Streptococcus agalactiae
MSIIKNLWWFFKEEKKRYLIGILSLSLVAVLNLIPPKIMGSVIDAITTGKLTRPQLLWNLLGLVLSALAMYGLRYIWRMYILGTSYKLGQVVRYRLFEHFTKMSPSFYQKYRTGDLMAHATNDINSLTRLAGGGVMSAVDASITALVTLITMFFTISWQMTLIAVIPLPLMALATSKLGRKTHETFKESQAAFSELNNKVQESVSGVKVTKSFGYQEQEIASFQEVNQMTFVKNMRTMTYDVMFDPLVLLFIGASYVLTLAMGAFMISKGQVTVGDLVTFVTYLDMLVWPLMAIGFLFNMVQRGSVSYNRINSLLEQESDITDPLNPIKPVVNGTLRYDIDFFRYDNEETLADIHFTLEKGQTLGLVGQTGSGKTSLIKLLLREHDVTQGKITLNKHDIRDYRLSDLRQLIGYVPQDQFLFATSILENVRFGNPTLSINAVKKATKLAHVYDDIEQMPAGFETLIGEKGVSLSGGQKQRIAMSRAMILDPDILILDDSLSAVDAKTEHAIIENLKTNRQGKSTIISAHRLSAVVHADLILVMQDGRVIERGQHQELLNKGGWYAETYASQQLEMEEAFDEV

SEQ ID NO: 9739 - DNA, 1737 bp, Streptococcus agalactiae
atgaagtctaatcaatggcaagtctttaagagattaatctcctatttacgcccttataaatggtttacagtattagctctatctctcttattgttgacgactgttgttaaaaatattattcctttaattgcttcacattttattgatcactatctgacaaatgttaatcaaacagcagttcttattttagtgggatattattcaatgtatgtcttgcagaccttaattcaatattttgggaatctcttttttgcgcgtgtttcttatagtattgttagagatattcgtagagatgcttttgctaatatggaaaggctaggcatgtcttattttgataggacaccggcaggatctattgtgtcacgtattactaatgatactgaagcaatatctgatatgttttcgggtattttatcaagttttatctcggcgatatttatttttacagttactctgtacactatgttgatgctagacattaaactaacaggactcgtcgctcttttgttacctgttatctttatattagtgaatgtctatcggaaaaaatcagtcactgtcattgctaaaacgagaagtttacttagtgatatcaatagtaaattatcagaaagtattgaaggaattcgcattgtacaggcttttggtcaagaagagcgcttgaagactgaatttgaggaaattaacaaagagcatgttgtgtatgccaatcgttctatggctcttgatagtctcttcttaagaccggcgatgtctcttttaaaactcctagcatatgctgttcttatgtcttattttggatttacaggagttaaaggaggtcttacggcaggattaatgtatgcttttattcagtacgttaatcgtctctttgaccctttaattgaagtaacgcaaaatttttcaaccttacaaacatcaatggtatcagcagggcgtgtgtttgatctgattgatgaaacaggttttgaaccaagccaaaaaaatacagaagcttttgtgagagaaggaaatatcgaatttaaaaatgtatcattctcatatgatggaaaaaaacaaatccttgataatgtttcttttagtgttaaaaaaggtgaaactattgcttttgtaggagcgacaggttctggaaaatcatctattattaatgtctttatgaggttttacgaatttcaatctggacaagttttattagatgggaaggatattagggattactcacaagaacaattgcgaaagaatattggactcgtcttacaagacccctttttatatcatggcactattaaatctaatatcaaaatgtaccaagacatcaccgatcaagaggtacaggacgcagcagagtttgttgatgctgatcaatttattcagaagttgccagataagtacgattcagctgtttcagaacgtgggtcaagtttttcaactggacaacgccaactattagcgtttgccagaactgtggctagtaaacctaaaattttaatcttagatgaggcgacagcaaatattgattcggaaacagagcagattgtacaagattcgttagcaaaaatgcgtcaaggtcgaacaacaattgccattgctcaccgcttatcaaccattcaagatgctaattgtatctatgttcttgatagaggaaagataattgaaagtgggaatcacgagtctttattagaccaaaaagggacttattatcgtatgtaccaattacaagccggcatgatggaggtc

SEQ ID NO: 9740 - protein, 579 aa, Streptococcus agalactiae; identical to SEQ ID NO: 5326

SEQ ID NO: 9741 - protein, 564 aa, Streptococcus agalactiae
ATGTTACTATTGGTAGATAATTACGATTCTTTTACCTATAATTTAAAGCAATATTTAAGTGTCTATAAAGAGATATTCGTCATAAAAAATGATGATCCTAACCTTTTTTTATTAGCTGAGAGCGCAGAAGCCATCGTCTTATCACCTGGACCAGGACACCCAAAGGATGCTGGGAAAATGTTAGAATTAATCAATCAGTTTATAGGAAAGAAACCTATTCTAGGTATCTGTTTGGGGCATCAAGCGCTTGCTGAGTGCTTGGGTGGGCGATTAAATTTAGCAAATCACGTTATGCATGGTAAACAAAGTTGGGTAACAATAAACGACCATACTAGTTTGTTTAAGGGAATTGATAGTCCAACCCAAGTTATGCGTTATCACTCATTGGTAGTGACTGATTTACCAGAGAATATTGCTGTTATTGCACGATCAAATGAGGATAATGAAATCATGGCATTCCATTGCCCCAGCTTAAAGGTATATGCGATGCAGTTTCATCCTGAGTCAATCGGGAGTATTGATGGAATGAAAATGATTGAAAACTTTTTGACGTTAATTAATGAC

SEQ ID NO: 9742 - protein, 188 aa, Streptococcus agalactiae
MLLLVDNYDSFTYNLKQYLSVYKEIFVIKNDDPNLFLLAESAEAIVLSPGPGHPKDAGKMLELINQFIGKKPILGICLGHQALAECLGGRLNLANHVMHGKQSWVTINDHTSLFKGIDSPTQVMRYHSLVVTDLPENIAVIARSNEDNEIMAFHCPSLKVYAMQFHPESIGSIDGMKMIENFLTLIND

SEQ ID NO: 9743 - protein, 537 aa, Streptococcus agalactiae
ATGAATACAAGAACAACTACCTATATTGCACTCATGGTTGCACTACTCATTGTTTTAGGTTTTATCCCAGGGATCCCATTAGGTTTCATTCCAGTCCCAATTGTCTTACAAAATCTTGGTGTTATGCTGGCAGGTGCTCTGCTTGGTAGTAGGAAAGGTTTCCTAGCTGTGGCTATTTTCTTGCTCTTAGTTGCTATTGGTGCACCATTTTTACCAGGAGGACGGTCAGGTCTCGTAACGCTGTTTGGGCCAACAGCAGGCTATCTGCTGACTTATCCATTTGCAGCTTTTTTTATCGGCCTAGGGCTTGAGAAAGTGAAAACAACAAAACTCTGGGTTCAATTCCTTATTATTTGGATATTTGGCGTACTATTGATTGATATTTGTGGTAGCATCGTTCTTTCCTTTCAAACTTCTCTCCCCTTAACTAAATCACTATTTTCTAACCTTATTTTTATTCCTGGGGATACCTTAAAAGCATCCATTTGCTTGATTATTTATCGTAAATTTGCAAACAGATTAACTCATCTATACAAC

SEQ ID NO: 9744 - protein, 179 aa, Streptococcus agalactiae
MNTRTTTYIALMVALLIVLGFIPGIPLGFIPVPIVLQNLGVMLAGALLGSRKGFLAVAIFLLLVAIGAPFLPGGRSGLVTLFGPTAGYLLTYPFAAFFIGLGLEKVKTTKLWVQFLIIWIFGVLLIDICGSIVLSFQTSLPLTKSLFSNLIFIPGDTLKASICLIIYRKFANRLTHLYN

SEQ ID NO: 9745 - protein, 990 aa, Streptococcus agalactiae
ATGTCATTTCAAACAAATTATATCCATTTGGCTGACGAAATATTATCTGGAAAGACTAGCATTTCTTATGAACAAGCGCTGGAAATTCTAAATAGCGATGAGAACTGGTGGGAAATCTACGCTGCTGCCTTATACCTTAAGAATCAAGTTAGCCGAAATAATATTCGCCTTAACGTTTTATTAAGTGCTAAGCAAGGACTTTGTGCAGAAAATTGTGGTTACTGTTCTCAATCTAAAGAAAGCACTGCTGACATTGATAAATTTGGTCTGCTTCCTCAAAATGTCATTCTAAAACAGGCTATTGTCGCTCATCAAAATGGTGCTAGCGTCTTTTGTATTGCGATGAGTGGAACTAAGCCTAGCAAGAGAGAAATTGAGCAGTTATGTCAAGTCATCCCTGAAATCAAAAAAAGCCTCCCTCTAGAAATATGCCTTACCGCTGGTTTTTTGGATAGAGAACAACTTCATCAGCTAAAACAAGCAGGAATTGACCGTATCAATCATAATCTCAACACCCCCGAAGAAAACTACCCCAACATTGCAACGACGCATAGCTTCAAAGATCGTTGTGATACTTTAGAAAGAATTCACAATGAAGACATTGATGTTTGTTCTGGATTCATTTGTGGTATGGGAGAGAGTGATGAGGGGCTCATCACATTAGCTTTCAGACTAAAAGAGCTGAACCCCTATTCTATCCCTGTCAATTTTTTACTTGCTGTTGAAGGAACACCTCTTGGAAAATATAACTATTTGACTCCCATTAAATGCTTAAAAATTATGGCCATGTTGCGTTTTGTTTTTCCTTTCAAGGAATTAAGATTAAGCGCTGGACGAGAGGTCCATTTTGAGAATTTTGAATCATTAGTCACCTTACTTGTTGACTCAACTTTTTTGGGAAATTACCTAACAGAGGGCGGTCGCAATCAACATACCGATATTGAATTCTTGGAAAAATTACAACTAAATCATACTAAAAAGGAATTAATT

SEQ ID NO: 9746 - protein, 330 aa, Streptococcus agalactiae; identical to SEQ ID NO: 5332

SEQ ID NO: 9747 - protein, 513 aa, Streptococcus agalactiae
ATGAAAAAACTATTTAAAAAAGCGATAGCTATGTGCCGAGATTTGCCGCTTAATTTTGTAATTGTTGAACTTAGTTTGTATCAAAGAGAGGATGGCTCATCTGATAATATTAAATGGATTTCTAAGCGAATCCTTGAGGTAACGGTAACTGATCAGCAATGGATTTACCATTTGAGGATGCTTAATTTACCAAAACTTAAGCCAATGTCACTAGCATCCAGTGACTGTCCTGCAAGGGAAGAGAAGGTTAGTCTTATTTCAATAGAAGAGTGTCAAAAATTCACTAGCTTAGTGCGAGATAAAAATCCTTTTCACCAAGGGGAAGCAGCTATTGTGCCTGCGGCTCTATTATTGGAAAAAATAATGGAAGTTAGAAAAGGAAAAATAAAGGAGATTCATTTGACTTTTTTATCTCCAGTAAGGGTGAATCAAGAATTCTCAGTGCAAGTAGTGGATAACACAGTGATTATTTTTCAGCATCAAATATTATGTGTGAGGGGAACATATGAAGAA

SEQ ID NO: 9748 - protein, 171 aa, Streptococcus agalactiae
MKKLFKKAIAMCRDLPLNFVIVELSLYQREDGSSDNIKWISKRILEVTVTDQQWIYHLRMLNLPKLKPMSLASSDCPAREEKVSLISIEECQKFTSLVRDKNPFHQGEAAIVPAALLLEKIMEVRKGKIKEIHLTFLSPVRVNQEFSVQVVDNTVIIFQHQILCVRGTYEE

SEQ ID NO: 9749 - protein, 1113 aa, Streptococcus agalactiae
ATGAAGAATAGAGATGTTTATATTGGTTTTGGGCTACGAACACCTATCGGTATAAAAGGGAAGCAATTTAAACATTACCGTCCAGAACTTTTAGGAGCACACCTTTTAAATCAAATAAAAAAAATAGAATCAGAATCTAACATTGATAGTATTATTTGTGGGAACACAGTTGGTACTGGGGGCAATATTGGTCGTTTGATGACTCTTTTTTCTGATTATGAATCCTATATTCCAGTACAAACGATTGATATGCAGTGTGCTTCATCAAGTTCTGCCTTGTTTTTTGGTTATCTAAAAATCAGTACCGGTATTAATGAAAAAGTTCTTGTTGGGGGGATTGAAAGTAGTTCTCTTCAACCTATGAGACGTTATGCTAAAGAAGATAATCGTAACGGAGAATATACAGTTGCTCAGTTTTCTCCTGACTCTTATGCTGAAACTGTAATGTTAGAAGGGGCCCAGAGAGTCTGTCAAAAATATGGTTTTAGAAGAGAAATGTTAGATAAATTGGCATTCTTGAGCCATAAACGCGCCTTAACAGCTAAACAAGGTGGCTATTTAGAAGAGGTAATCTTACCAATGGAAGGGATGCGAGATCAAGGCGTTAGAAAACTAAAAGAAACATTTTTTCAAAAATTACCAAGATTGATGGAAAATTCACCTTTGCTCACTATTGGAAATGTTTGTTTAATGCACGATGCTGCTGCATTTCTAACGCTTCAGAGTCAGAAAACAGAATTCCGGATTGTTCACATTGTAGAAGTAGCAGGAGATCCCAAGCTTAGTCCAGAATTGGTTCACACGGCTACGGAAAAACTATTAACAGAAACTCATACTAAAATATCGGATTATGATGCAATTGAATGGAATGAACCATTTGCAGCGATTGATGCTCTATTTAATCATTATTATCCTGAAGAGAGAGAAAAATTCAATATTTTTGGAGGGGCATTAGCTTACGGACACCCTTATGCCTGCTCAGGAATTATTAATATCCTTCATCTTATGCAGGCATTAAAATATAAAAATAAACCTATGGGTCTAACTGCCATTGCAGGGGCAGGAGGAGTCGGAATGGCCATATCAATAGAGTACTTAGGAGTTAAGAATGCT

SEQ ID NO: 9750 - protein, 371 aa, Streptococcus agalactiae
MKNRDVYIGFGLRTPIGIKGKQFKHYRPELLGAHLLNQIKKIESESNIDSIICGNTVGTGGNIGRLMTLFSDYESYIPVQTIDMQCASSSSALFFGYLKISTGINEKVLVGGIESSSLQPMRRYAKEDNRNGEYTVAQFSPDSYAETVMLEGAQRVCQKYGFRREMLDKLAFLSHKRALTAKQGGYLEEVILPMEGMRDQGVRKLKETFFQKLPRLMENSPLLTIGNVCLMHDAAAFLTLQSQKTEFRIVHIVEVAGDPKLSPELVHTATEKLLTETHTKISDYDAIEWNEPFAAIDALFNHYYPEEREKFNIFGGALAYGHPYACSGIINILHLMQALKYKNKPMGLTAIAGAGGVGMAISIEYLGVKNA

SEQ ID NO: 9751 - DNA, 1227 bp, Streptococcus agalactiae
atgcttgaatcattgaaaacgatagttaaaaccaatagcgataaaaagttatttgatggtgatttacaggtcagttatggagaattttataacttagtaagacaagatatggcgtcacaagacaataggaaacatgtgattagcacacactctctgcttaaccaattagtaagatttgtttcaaagttatgtaaaaaagctcttcctattatttgtaaacctaaccttactcataatgaaataagtcgattagaaaaagaagtgcagtatgctcctcaactagctgattttggtgttctttcttctgggactacagctgatgctaaactattgtggaggagcttcacttcgtggtctgatttttttagcattcagaatgcttatttttcggtcacttccaatagcaaactgtttattcaaggtgatttttcatttactggtaacttaaatttagcgctatcccttttattactggggggaacacttgttgtcacacagaaaaattctgtaaaatactggcagactttatgggaaaaaactggtgtaacgcatctatatctgctccctagttatctcaagttagtggaacaatatagcaaggagactgcgttagacaataaaactattattacctcttcgcaatatgtctctgactcattactggaaggtttatatagaaagcatcctaaagtgtcagtgaaaatcttctatggtgctagtgagctcaattatgtgtcatggtacgatggtcgtgatatccgagataagccacagtatgttggagaaatcgttccaaatgtagctgttaggattaaagagggaagaatttttgtaaaaacaccgtatagtatctgtggcctttcaagtgaatattgtgctggtgattatggtgaactgatagatggcaaattatatctatttggccgtggtggtgattggtgcaatcaatcgggcattaagctctatttacctagattaatcgaaaaaataaaaacatgcccttatatcaaggatgcagtagcatttacaaaagagagtcaaagtcatggacaagagtcacattgctgtattgttttaattgaaaatcagatgcaacaagagtgtttgaagtggttatcggaacattttgaaaagaagtatgggtttaagcattatcatattgtatctaaaattcctttgatgccatctggaaaaattgattatcaacaactcaaaagacagttagca

SEQ ID NO: 9752 - protein, 409 aa, Streptococcus agalactiae
MLESLKTIVKTNSDKKLFDGDLQVSYGEFYNLVRQDMASQDNRKHVISTHSLLNQLVRFVSKLCKKALPIICKPNLTHNEISRLEKEVQYAPQLADFGVLSSGTTADAKLLWRSFTSWSDFFSIQNAYFSVTSNSKLFIQGDFSFTGNLNLALSLLLLGGTLVVTQKNSVKYWQTLWEKTGVTHLYLLPSYLKLVEQYSKETALDNKTIITSSQYVSDSLLEGLYRKHPKVSVKIFYGASELNYVSWYDGRDIRDKPQYVGEIVPNVAVRIKEGRIFVKTPYSICGLSSEYCAGDYGELIDGKLYLFGRGGDWCNQSGIKLYLPRLIEKIKTCPYIKDAVAFTKESQSHGQESHCCIVLIENQMQQECLKWLSEHFEKKYGFKHYHIVSKIPLMPSGKIDYQQLKRQLA

SEQ ID NO: 9753 - DNA, 630 bp, Streptococcus agalactiae
atgttatcaaaagcaaaatcacgatatattatccgtgagattattaagttatttccagatgctaaacctagcttagactttactaatgtctttgagcttttggtagctgtaatgctatcagctcaaacaactgatgcggctgttaataaagttacacccgccctttttgaacgctttccaaatcctttagttttggcacaagctgatcccaaagagattgaaccctatatttctaaaattgggctttaccgtaataaagctcgattcttaaatcaatgcgctaaacaattgatagagcattttgatggaaaagtcccccgaactcgtcaagagctagaaagtttggctggcgttggaaggaaaacggctaatgtggtcatgagtgttggatttggtattccggcttttgccgtagatactcatgtcactcggatttgtaaacaccaccagatttgcaaacagtcggcttctccactggaaattgagaaacgagtcatggaggttttaccaccagaagagtggctagctgctcatcaatccatgatttattttggtcgtgcaatttgtcatcctaaaaatccaaaatgcgaccagtacccacaactttatcactttcctgataatttaaag

SEQ ID NO: 9754 - protein, 210 aa, Streptococcus agalactiae
MLSKAKSRYIIREIIKLFPDAKPSLDFTNVFELLVAVMLSAQTTDAAVNKVTPALFERFPNPLVLAQADPKEIEPYISKIGLYRNKARFLNQCAKQLIEHFDGKVPRTRQELESLAGVGRKTANVVMSVGFGIPAFAVDTHVTRICKHHQICKQSASPLEIEKRVMEVLPPEEWLAAHQSMIYFGRAICHPKNPKCDQYPQLYHFPDNLK

SEQ ID NO: 9755 - DNA, 387 bp, Streptococcus agalactiae
atgtctaccatctattttatttctttatgcatgagttttatcttaagttattatgatataaaataccaagagtatcctatttttctatggatattattcaccatttcaacgataattctcacaccgattacaaaagtttctattgttttgtgtttatttgggattttagctgaagtggttgatattaatatcggaagtggagatttcctttatttagccacaattggcttatctttacctcttcatcaaatgctttttattattcaaataggtgcttggttaggaattatttattgtttagttatgagaaaaatgaaaaaaacgatagcttttctaccgtttttaagtatcgcttatataatcgtcaccagttactctcttttattc

SEQ ID NO: 9756 - protein, 129 aa, Streptococcus agalactiae; identical to SEQ ID NO: 5342

SEQ ID NO: 9757 - DNA, 207 bp, Streptococcus agalactiae
atgaaagttttattcgatgtgcagaatcttttgaaaaaatttggtatttatgtttatattggtaaacgtctttatgatatcgaagttatgaagattgaattgcaacgtctctacgataatggtctgataagtagagatgattatttaaaagcagaactgattttaagaagagagcacagactagaattggagaaggaaaataaaaaa

SEQ ID NO: 9758 - protein, 69 aa, Streptococcus agalactiae; identical to SEQ ID NO: 966

SEQ ID NO: 9759 - DNA, 966 bp, Streptococcus agalactiae
atgagtaagaaattattgggaattgacctcggaggaacgaccattaaatttggtatcttgacgcttgagggagaagtacaagaaaaatgggcaattgagaccaatactttagaaaacggaagacatatcgtttctgatatcgttgaatctctcaaacatcgtttgagcctctatggattaacaaaagatgactttctcggtatcggtatgggttctccaggagctgttgatagaactagtaaaacagtaacaggtgcttttaatctaaattgggctgatactcaagaagtaggttcagttattgaaaaagaagttggaattccattttttattgataacgatgctaatgttgcagcacttggtgaacgctgggtaggtgctggtgccaataatcccgacgttgttttcgtaaccctcggaacaggagtaggtggaggtgttatcgcagatggtaacctcatccatggtgttgcaggagcaggtggagaaattgggcatatgattgttgatccagaaaatggatttacgtgcacatgtggtaacaaaggctgccttgagacagttgcatcagcgacaggtgttgttagagtagcacgtcaactcgcagaacaatatgagggttcgtctgccattaaagcagcgattgacaacggtgatactgttacaagtaaagatatttttatagcagcagaagatggggataaatttgctaattctgttgttgaacgtgtatcacgttaccttggactggcagcagctaatatttcaaatattttaaaccctgattctgtggttattggtggcggtgtctcagcagcaggtgaatttttacgtagtcgcgttgagaaatactttgtcacatttgctttcccacaagttaaaaagtcaactaaaattaagattgctgaactaggtaatgatgctggtattattggtgcagcaagcttagccaatcaacaagcaagt

SEQ ID NO: 9760 - protein, 322 aa, Streptococcus agalactiae; identical to SEQ ID NO: 968

SEQ ID NO: 9761 - protein, 378 aa, Streptococcus agalactiae
ATGGATATGTCTGTTATTTTAATTATTGTTATTCTTCTGGCTTTTGTTGCTTGGGCATCTTGGAATTATTGGAGGGTTCGTAGGGCAGCTAAATTTTTAGATAACGAGTCTTTTCAAAAAGAAATGTCACGAGGACAGTTAATTGATATCCGAGAAGCTGGTGCTTTTCATAGAAAGCATATTCTCGGAGCACGTAACATTCCAGCAAGTCAATTTAAAGTTGCCTTATCGGCTTTGCGCAAAGATAAACCTGTCCTCTTATATGACGCAAGCCGTGGTCAATCTATTCCAAGGATTGTTTTGTTACTCAGAAAAGAAGGTTTTAATCAACTTTACGTGTTAAAGGACGGTTTCAATTACTGGACGGGTAGAGTTAAG

SEQ ID NO: 9762 - protein, 126 aa, Streptococcus agalactiae; identical to SEQ ID NO: 970

SEQ ID NO: 9763 - protein, 1839 aa, Streptococcus agalactiae
ATGACAAATTTAAGAACAGATATCCGTAACGTTGCGATCATTGCCCACGTTGACCACGGTAAAACAACTCTCGTTGATGAATTATTAAAACAATCACATACTCTTGATGAGCGTAAAGAGCTTGAAGAACGTGCAATGGATTCAAATGATATCGAAAAAGAACGTGGTATCACCATTCTTGCAAAAAATACAGCCGTAGCATACAACGATGTTCGTATCAATATTATGGACACACCTGGTCACGCGGACTTTGGTGGTGAAGTTGAGCGTATTATGAAAATGGTTGATGGTGTTGTTTTAGTCGTTGATGCCTACGAAGGAACAATGCCACAAACACGTTTTGTTTTGAAGAAAGCTCTTGAACAAAACTTAATTCCAATCGTTGTTGTAAATAAAATTGATAAGCCGTCAGCTCGTCCATCAGAGGTTGTTGATGAAGTTCTTGAACTATTTATTGAGCTCGGTGCTGATGATGATCAACTAGATTTCCCTGTTGTTTATGCTTCAGCTATCAATGGAACATCTTCAATGTCAGATGATCCTTCAGATCAAGAAAAAACAATGGCACCGATTTTTGATACTATCATTGATCACATTCCAGCCCCAGTTGACAACTCGGAAGAACCACTTCAATTCCAAGTTTCTCTTCTTGATTACAATGATTTTGTAGGACGTATTGGTATTGGACGTGTTTTCCGCGGGACTGTCAAAGTTGGAGATCAAGTTACTCTTTCAAAACTTGATGGTACAACTAAAAACTTCCGCGTAACAAAACTTTTTGGTTTCTTTGGACTTGAACGTAAAGAAATCCAAGAGGCTAAAGCGGGTGATTTAATCGCTGTTTCTGGTATGGAAGATATCTTCGTTGGTGAGACAGTAACTCCGACAGATGCTATTGAACCACTACCAGTTTTACGTATTGACGAGCCAACACTTCAAATGACTTTCTTGGTGAATAATTCACCATTTGCAGGTCGCGAAGGTAAATGGATTACGTCACGTAAGGTTGAAGAACGTCTTTTAGCAGAATTACAAACAGACGTTTCTTTACGTGTTGACCCAACAGATTCGCCAGATAAATGGACGGTTTCAGGGCGTGGAGAATTACATTTATCTATCCTTATTGAAACAATGCGTCGTGAGGGATATGAACTTCAAGTATCACGTCCAGAAGTTATCATCAAAGAAATTGATGGTGTTCAATGCGAGCCGTTTGAGCGTGTTCAAATTGATACTCCAGAAGAATATCAGGGTGCTATTATCCAAAGTTTGTCAGAGCGTAAAGGTGATATGCTTGATATGCAGATGGTTGGTAATGGTCAAACGCGTTTGATTTTCTTGATTCCTGCACGTGGTTTGATTGGTTATTCAACAGAGTTTCTTTCAATGACACGTGGATATGGTATCATGAATCATACTTTTGACCAGTATCTACCGGTTGTTCAAGGAGAAATTGGTGGTCGTCATCGTGGTGCCTTGGTTTCTATTGAAAATGGTAAAGCAACTACATATTCAATTATGCGTATTGAAGAACGTGGGACTATCTTTGTAAATCCAGGTACAGAAGTTTATGAAGGAATGATTGTTGGTGAGAATTCTCGTGATAATGACCTCGGAGTCAATATTACAACTGCTAAACAAATGACAAATGTCCGTTCAGCAACTAAAGATCAAACTGCAGTCATCAAGACGCCTCGTATCCTTACTTTAGAAGAGTCACTTGAATTTTTAGCAGATGATGAGTACATGGAAGTAACTCCTGAGTCTATTCGTCTTCGTAAACAAATTTTAAATAAAGCAGCACGTGACAAAGCTAATAAAAAGAAAAAATCAGCTGAA

SEQ ID NO: 9764 - protein, 613 aa, Streptococcus agalactiae
MTNLRTDIRNVAIIAHVDHGKTTLVDELLKQSHTLDERKELEERAMDSNDIEKERGITILAKNTAVAYNDVRINIMDTPGHADFGGEVERIMKMVDGVVLVVDAYEGTMPQTRFVLKKALEQNLIPIVVVNKIDKPSARPSEVVDEVLELFIELGADDDQLDFPVVYASAINGTSSMSDDPSDQEKTMAPIFDTIIDHIPAPVDNSEEPLQFQVSLLDYNDFVGRIGIGRVFRGTVKVGDQVTLSKLDGTTKNFRVTKLFGFFGLERKEIQEAKAGDLIAVSGMEDIFVGETVTPTDAIEPLPVLRIDEPTLQMTFLVNNSPFAGREGKWITSRKVEERLLAELQTDVSLRVDPTDSPDKWTVSGRGELHLSILIETMRREGYELQVSRPEVIIKEIDGVQCEPFERVQIDTPEEYQGAIIQSLSERKGDMLDMQMVGNGQTRLIFLIPARGLIGYSTEFLSMTRGYGIMNHTFDQYLPVVQGEIGGRHRGALVSIENGKATTYSIMRIEERGTIFVNPGTEVYEGMIVGENSRDNDLGVNITTAKQMTNVRSATKDQTAVIKTPRILTLEESLEFLADDEYMEVTPESIRLRKQILNKAARDKANKKKKSAE

SEQ ID NO: 9765 - protein, 243 aa, Streptococcus agalactiae
ATGTTTTACTTAATTGTTGCCCTTTTGATTGCCTTGTATTACTTTTTTATGGCACCAAAAACAGTACGTAATACTTTGAACGCTATTGGTTTAGTAGGTTTGGTAGCCTTATTACTTGTCTTGGCAGTTATGAGTTTTATTAAAATCCTTCAATTGCCAGGTGAATTGTATATTGGGCTTATAATGATTCCTCTAGGATATACAGCATTTAAAGAAACATTGAATTTGTCAGAAAAGAAGAAA

SEQ ID NO: 9766 - protein, 81 aa, Streptococcus agalactiae; identical to SEQ ID NO: 976

SEQ ID NO: 9767 - protein, 1353 aa, Streptococcus agalactiae
ATGAAAACAATAACAACATTTGAAAATAAAAAAGTTTTAGTCCTTGGTTTAGCACGATCTGGAGAAGCTGCTGCACGTTTGTTAGCTAAGTTAGGAGCAATAGTGACAGTTAATGATGGCAAACCATTTGATGAAAATCCAACAGCACAGTCTTTGTTGGAAGAGGGTATTAAAGTGGTTTGTGGTAGTCATCCTTTAGAATTGTTAGATGAGGATTTTTGTTACATGATTAAAAATCCAGGAATACCTTATAACAATCCTATGGTCAAAAAAGCATTAGAAAAACAAATCCCTGTTTTGACTGAAGTGGAATTAGCATACTTAGTTTCAGAATCTCAGCTAATAGGTATTACAGGCTCTAACGGGAAAACGACAACGACAACGATGATTGCAGAAGTCTTAAATGCTGGAGGTCAGAGAGGTTTGTTAGCTGGGAATATCGGCTTTCCTGCTAGTGAAGTTGTTCAGGCTGCGAATGATAAAGATACTCTAGTTATGGAATTATCAAGTTTTCAGCTAATGGGAGTTAAGGAATTTCGTCCTCATATTGCAGTAATTACTAATTTAATGCCAACTCATTTAGATTATCATGGGTCTTTTGAAGATTATGTTGCTGCAAAATGGAATATCCAAAATCAAATGTCTTCATCTGATTTTTTGGTACTTAATTTTAATCAAGGTATTTCTAAAGAGTTAGCTAAAACTACTAAAGCAACAATCGTTCCTTTCTCTACTACGGAAAAAGTTGATGGTGCTTACGTACAAGACAAGCAACTTTTCTATAAAGGGGAGAATATTATGTCAGTAGATGACATTGGTGTCCCAGGAAGCCATAACGTAGAGAATGCTCTAGCAACTATTGCGGTTGCTAAACTGGCTGGTATCAGTAATCAAGTTATTAGAGAAACTTTAAGCAATTTTGGAGGTGTTAAACACCGCTTGCAATCACTCGGTAAGGTTCATGGTATTAGTTTCTATAACGACAGCAAGTCAACTAATATATTGGCAACTCAAAAAGCATTATCTGGCTTTGATAATACTAAAGTTATCCTAATTGCAGGAGGTCTTGATCGCGGTAATGAGTTTGATGAATTGATACCAGATATCACTGGACTTAAACATATGGTTGTTTTAGGGGAATCGGCATCTCGAGTAAAACGTGCTGCACAAAAAGCAGGAGTAACTTATAGCGATGCTTTAGATGTTAGAGATGCGGTACATAAAGCTTATGAGGTGGCACAACAGGGCGATGTTATCTTGCTAAGTCCTGCAAATGCATCATGGGACATGTATAAGAATTTCGAAGTCCGTGGTGATGAATTCATTGATACTTTCGAAAGTCTTAGAGGAGAG

SEQ ID NO: 9768 - protein, 451 aa, Streptococcus agalactiae; identical to SEQ ID NO: 978

SEQ ID NO: 9769 - protein, 1074 aa, Streptococcus agalactiae
ATGGGGAAAAAAATTGTTTTTACAGGTGGTGGTACGGTAGGTCATGTAACACTAAACCTAATATTAATCCCCAAATTTATCAAAGATGGTTGGGAAGTACATTATATTGGTGATAAAAATGGCATAGAACATGAACAAATTAATCAGTCTGGACTTGATATCACATTTCACTCTATAGCTACTGGGAAACTACGTCGCTATTTTTCATGGCAAAATATGTTAGATGTCTTTAAAGTAGGGGTTGGCGTTCTTCAATCGATTGCTATTATTGCTAAACTTAGACCCCAAGCCTTATTTTCAAAAGGGGGATTTGTTTCAGTACCTCCTGTAGTAGCTGCACGCCTATTAAAAGTTCCTGTTTTTGTTCATGAATCAGATTTATCAATGGGGTTAGCAAATAAGATTGCTTATAAATTTGCGACTATTATGTATACGACTTTTGAACAATCTAAAGATTTAATCAAAACTAAGCATATTGGTGCTGTAACAAAAGTCATGGATTGTAAAAAGTCGTTTGAAAATACTGACTTAACTAGTATAAAAGAAGCCTTCGATCCAAACCTAAAGACCTTACTATTTATTGGAGGATCAGCAGGTGCAAAAGTATTCAATGATTTTATTACTCAAACACCTGAGCTGGAAGAAAAATATAATGTTATCAATATTTCAGGCGATTCTTCTCTCAATCGATTGAAGAAGAACCTTTATCGCGTGGATTATGTTACAGACCTTTATCAGCCTTTAATGAATTTAGCAGATGTGGTTGTTACACGAGGTGGCTCTAATACTATTTTTGAATTAGTAGCTATGAAAAAACTTCATCTTATTATCCCTCTTGGACGTGAAGCGAGCCGAGGTGACCAATTAGAGAATGCTGCTTATTTTGAAGAAAAGGGCTACGCATTGCAGTTACCAGAATCTGAATTAAACATAAATACACTTGAGAAACAGATAAATTTATTAATTTCTAACAGTGAGAGTTACGAAAAAAACATGTCACAATCATCTGAAATAAAATCTCAAGATGAATTTTATCAATTATTAATTGATGATATGGCAAAAGTAACAAAAGGA

SEQ ID NO: 9770 - protein, 358 aa, Streptococcus agalactiae; identical to SEQ ID NO: 980

SEQ ID NO: 9771 - DNA, 1134 bp, Streptococcus agalactiae
atgcctaagaagaaatcagataccccagaaaaagaagaagttgtcttaacggaatggcaaaagcgtaaccttgaatttttaaaaaaacgcaaagaagatgaagaagaacaaaaacgtattaacgaaaaattacgcttagataaaagaagtaaattaaatatttcttctcctgaagaacctcaaaatactactaaaattaagaagcttcattttccaaagatttcaagacctaagattgaaaagaaacagaaaaaagaaaaaatagtcaacagcttagccaaaactaatcgcattagaactgcacctatatttgtagtagcattcctagtcattttagtttccgttttcctactaactccttttagtaagcaaaaaacaataacagttagtggaaatcagcatacacctgatgatattttgatagagaaaacgaatattcaaaaaaacgattatttcttttctttaatttttaaacataaagctattgaacaacgtttagctgcagaagatgtatgggtaaaaacagctcagatgacttatcaatttcccaataagtttcatattcaagttcaagaaaataagattattgcatatgcacatacaaagcaaggatatcaacctgtcttggaaactggaaaaaaggctgatcctgtaaatagttcagagctaccaaagcacttcttaacaattaaccttgataaggaagatagtattaagctattaattaaagatttaaaggctttagaccctgatttaataagtgagattcaggtgataagtttagctgattctaaaacgacacctgacctcctgctgttagatatgcacgatggaaatagtattagaataccattatctaaatttaaagaaagacttcctttttacaaacaaattaagaagaaccttaaggaaccttctattgttgatatggaagtgggagtttacacaacaacaaataccattgaatcaacccctgttaaagcagaagatacaaaaaataaatcaactgataaaacacaaacacaaaatggtcaggttgcggaaaatagtcaaggacaaacaaataactcaaatactaatcaacaaggacaacagatagcaacagagcaggcacctaaccctcaaaatgttaat

SEQ ID NO: 9772 - protein, 378 aa, Streptococcus agalactiae; identical to SEQ ID NO: 982

SEQ ID NO: 9773 - DNA, 1371 bp, Streptococcus agalactiae
atggctagaaatggcttttttactggtttggatataggaacaagctcgattaaagttttagttgcagaatttattgcaaatgaaatgaatgtaattggggttagcaacgtccctagttccggtgtaaaagatggtataattattgatattgaggcagcagcaactgcaatcaaagaggcggtaaaacaagctgaggagaaagcaggcatcaccattgacaaaatcaatgttggattaccagcaaatcttctccaaattgaaccaactcaaggaatgattcctgttcctaatgaatcaaaagaaattaaggatgaagatgtcgaaagtgttgttaaatcagcattgactaaaagcattactcctgaaagagaagttatttcattgattccgcttgaattcattgtagatggtttccaagggattagagaccctagagggatgatggggattcgccttgagatgcgtggtcttatctatactggaccaacaactatccttcataatcttcgtaaaactgttgaacgagcaggtataaaagtagagcatgttgtgatcgcccctctagccttagcaaaatcagttctaaacgaaggtgaacgtgagtttggtgcaactgtgattgatatgggaggcggacaaacaacagtcgcttctatgcgtaatcaagaattgcaatatactaatatttattctgaaggtagcgattatgttaccaaagatatttctaaagtgctacgtacaacagtagaaatcgccgaagcattgaaattcaactttggacaagctaatgttgaagaagcaagtacttctgatacagttcaagttaatgttgttggtaacgaggaacctgttgaaattacagaaagctatctttcgcaaattatttcaggacgtattcgtcaaattttagaacatgtcaaacaagacttgggtagaggtcgtttacttgatttacctggtggtattattcttgttggaggtggtgcaattatgccaggagttgtcgaggttgctcaacaaatttttggaactagagttaaattgcacgttccaaaccaagtaggtattcgcaatccaatgtttgctaatgttattagtatcgttgattatgtaggaatgatgtcagaagttgacattatcgcacaacatgctgtaactggcgacgaaatgctaagacataaaccagtcgactttgattataaagaaaaaacaaatacaatgtcgacaatgccttattctgagccgttaacctcttctatggaagattctaatttagaaccaatccgagcaagagaaaacgctcaagagcctactgagcctaaagctaatattggtgagcgcatcagaggaatttttggaagtatgtttgac

SEQ ID NO: 9774 - protein, 457 aa, Streptococcus agalactiae; identical to SEQ ID NO: 984

SEQ ID NO: 9775 - DNA, 1278 bp, Streptococcus agalactiae
atggtattttcatttgatacagcatcagtacaaggtgcagttattaaagttattggtgttggaggcggtggcggtaacgctattaaccgcatgattgacgaaggtgtcgctggcgttgagtttattgcagcaaatactgatattcaagccttaagtagctcaaaagctgaaactgtcattcaacttggtccaaaattaactcgcggacttggtgcaggaggacaacctgaagttggtcgtaaagcagctgaagaaagtgaagaagttttaacagaagcacttactggcgctgatatggtatttatcacagcaggtatggggggcggatctggtacaggtgcggctccagttattgcacgtattgcaaagagtttaggagcacttacagtagcggtcatcacacgtccttttggctttgagggtaataaacgttctaacttcgctatcgaaggtattcaagaattaagagaacaagttgatacactgcttatcatttcaaataataatcttcttgaaattgtagataagaagacaccattgcttgaagctcttagtgaagcagataatgttttacgtcaaggtgttcaaggtattacggatttgattactaacccaggtttaattaaccttgactttgcagatgttaaaacagttatggcaaataaaggtaatgcactgatgggaattggtatcggttctggtgaggaacgtattactgaagctgctcgaaaagcaatttattcaccacttcttgaaacaacgattgatggagcagaagacgttattgtcaatgttaccggcggtatggatatgacacttactgaagcagaggaagcatcagagattgttagccaagcagcaggtaaaggtgtcaatatttggttaggtacttcaattgacatggatatgaaagacgaaatccgcgtaacagttgttgcaacaggtgtacgtaaagataaaactaatcaagtatctggttttacaacatcagctccaactaatcaagcaccttcagaacgtcaaagtacttcaaattcaaactttgatcgtcgtggcaactttgatatgacagagtctcgcgaaatgccaactcaacaaaatcagcctcatgcacaaaatcagcaacaaagttctgcttttggtaattgggaccttcgtcgtgataatatttcacgtccgacagaaggtgaacttgatagcaagttgtctatgtcaacgttttcagaaaatgatgatatggatgatgaacttgaaacacctccattctttaaaaaccgt

SEQ ID NO: 9776 - protein, 426 aa, Streptococcus agalactiae; identical to SEQ ID NO: 986

SEQ ID NO: 9777 - DNA, 672 bp, Streptococcus agalactiae
atgatgaatttacaagaaaataaaacagcgatttttgacaatgttagtaaattagcactaaaagcaggtcgcgctcctgaatcagttcatatcgtagctgtaacaaaatatgttaactgtcaaacaacagaagcgcttattagaacaggtgttaatcatatcggtgaaaatcgtgttgataaatttcttgaaaaatatcaagcattaaaagatgaaaagcttacatggcatctcattggtagtttacaacgtcgaaaagttaaagatgtcattaattatgttgattattttcatgctttagattctgttaagttagcagctgagattcaaaaacgtgctcaaaaaccaattaaatgttttctacaagttaatatatcacgagaagacagtaagcatggttttactattgagcaaatagatgatgcactgaacttaatttctcggtacgataaaattgaacttatcggcatcatgactatggctcctttaaaagcaactaaagaggaaatatcatcaatttttgaagagactgagagtcttaggaaaaggcttcaagctaggaacatagaacgaatgccgtttacagaattaagcatgggcatgagtagagattatgatattgctattcaaaatggatcaacatttgtaaggataggaacttcattctttaaa

SEQ ID NO: 9778 - protein, 224 aa, Streptococcus agalactiae
MMNLQENKTAIFDNVSKLALKAGRAPESVHIVAVTKYVNCQTTEALIRTGVNHIGENRVDKFLEKYQALKDEKLTWHLIGSLQRRKVKDVINYVDYFHALDSVKLAAEIQKRAQKPIKCFLQVNISREDSKHGFTIEQIDDALNLISRYDKIELIGIMTMAPLKATKEEISSIFEETESLRKRLQARNIERMPFTELSMGMSRDYDIAIQNGSTFVRIGTSFFK

SEQ ID NO: 9779 - DNA, 603 bp, Streptococcus agalactiae
atggcattaaaagatagatttgacaaaattatttcttattttgacactgacgatgtaagtgaaaatgaagtacacgaagtacaagagagaacttcagtgcaaagagattccagagcagctacagcacaggaagcttctcagcgtagtcatatgactaactccgcagaggaagagatgattggtagtcgtccgagaacttctacctatgatcctaatcgtcaggagagacaaagggtacagagagacaatgcttatcagcaaactactcctaggattcaaaataaagactcagttcgacaacagagagaacaagtaacaattgctctgaagtatccccgtaagtatgaggatgcacaagaaattgttgatttacttatcgttaatgaatgtgtcttgattgattttcaatatatgcttgatgcgcaagcacgacgttgcttggattatattgatggtgcaagtagagtattatatggttcattacaaaaggttgggagttcaatgtttctattaacaccagccaatgttatggtcgatattgaggagatgaatattccaaagactggtcaagagacgagttttgattttgatatgaagagacga

SEQ ID NO: 9780 - protein, 201 aa, Streptococcus agalactiae
MALKDRFDKIISYFDTDDVSENEVHEVQERTSVQRDSRAATAQEASQRSHMTNSAEEEMIGSRPRTSTYDPNRQERQRVQRDNAYQQTTPRIQNKDSVRQQREQVTIALKYPRKYEDAQEIVDLLIVNECVLIDFQYMLDAQARRCLDYIDGASRVLYGSLQKVGSSMFLLTPANVMVDIEEMNIPKTGQETSFDFDMKRR

SEQ ID NO: 9781 - protein, 786 aa, Streptococcus agalactiae
ATGACGTTAGATGATATTTATCAGCATTTTCGACCAGAAGAGTATGCGTTTATCCATAAAATAGACCATTTAGCTCAATATGTCGAAAACACCTATTCGTTTATTACCACTGAATTTCTAAATCCTAGGGAATTTAAAATACTCGAAAGTGTTCTAGAGAGGCGAGGTAGTCATTATTACACTTCTGGTCAGTATTTTCAAACAGAATATGTTAAAGTAATAATAGCACCGGAATACTATCAGTTAGATATGGTTGATTTTAACCTTAGCCTAATTGAAATAAAGTATAATGCTAAATTTAATCACCTTACCCATGCTAAAATTATGGGAACTTTACTGAATTACTTAGGTGTAAAGCGATCAATTTTAGGGGATATCCTAGTTGAAGAAGGCTATGCCCAGGTTTTGGTCGATAGTCAAATGACAAATCACCTTATTCATTCAGTTACAAAAATTGGAACTGCTAGTGTACAATTAGCTGAAGTTCCCTTGTCCAAACTTCTAACTCCCAAACAAGATATTCAAAAACTAACTGTCATTGCTTCTAGTTTACGTCTTGATAAAATTTTAGCAACGATTTTAAAGATTTCACGAAAACAGTCGACAAAATTGATTGAGGCAGATAAAGTCAAGGTCAATTATGCAATCGTCAATCGAGTTTCTGAACAATTAGTAGAGGGGGATTTGATTAGTGTTAGAGGATATGGTCGATTTACGTTGAGCCATAACCTAGGGTTAACCAAAAATCAAAAATATAAGTTAGAAGTAGACAAAATGATACATAAC

SEQ ID NO: 9782 - protein, 262 aa, Streptococcus agalactiae
MTLDDIYQHFRPEEYAFIHKIDHLAQYVENTYSFITTEFLNPREFKILESVLERRGSHYYTSGQYFQTEYVKVIIAPEYYQLDMVDFNLSLIEIKYNAKFNHLTHAKIMGTLLNYLGVKRSILGDILVEEGYAQVLVDSQMTNHLIHSVTKIGTASVQLAEVPLSKLLTPKQDIQKLTVIASSLRLDKILATILKISRKQSTKLIEADKVKVNYAIVNRVSEQLVEGDLISVRGYGRFTLSHNLGLTKNQKYKLEVDKMIHN

SEQ ID NO: 9783 - protein, 768 aa, Streptococcus agalactiae
ATGCCACTTACAGCACTTGAAATTAAAGATAAAACATTTTCATCAAAATTTCGCGGTTATAGCGAAGAAGAAGTTAATGAATTTTTAGAGATTGTTGTTGACGATTACGAGGACTTGATTAGACGTAATCGTGAGCAAGAGCAATACATTAAAGATTTAGAAGAGAAAATCGCTTACTTCAACGAAATGAAGGAATCGTTAAGTCAATCAGTTATTTTAGCTCAAGAAACTGCTGAACGTGTGAAAATTTCAGCACAGGATGAAGCATCTAACCTAATGGGGAAAGCTACATTTGATGCTCAACATTTAATTGATGAGGCTAAATTAAAAGCAAATCAAATCCTTCGTGATGCGACAGATGATGCTAAGCGTGTTGCTATAGAAACAGAAGATTTGAAACGTCAATCACGTGTTTTCCACCAACGCTTACTTTCTGAATTAGAAGGTCAGTTAAAATTAGCTAACTCATCTGCTTGGGAAGAATTGTTGAAACCAACAGCTATTTATCTTCAAAATTCTGATGCTTCTTTCAAAGAAGTTGTTGAAAAAGTTCTTGATGAAGATGATGCTTTACCAGTGGTGGATGACACTGAGTCATTTGATGCTACTCGTCAATTCTCACCAGATGAAATGGAAGAATTACAGCGTCGTGTTGAAGAAAGTAACAAACAACTTGAAGAGTCAGGTTTATTAGATACTAATAATTTCCAAATGGAAGAACCGATCAATTTAGGTGAAACTCAAACTTTTAAATTAAATATTGAAGAT

SEQ ID NO: 9784 - protein, 256 aa, Streptococcus agalactiae; identical to SEQ ID NO: 998

SEQ ID NO: 9785 - protein, 2790 aa, Streptococcus agalactiae
ATGAAATTAAAAGAAACCTTGAATTTAGGACAAACAGCTTTTCCAATGCGTGCAGGACTTCCAAATAAGGAACCTCAATGGCAAGAAGCATGGGATCAAGCTGACATTTATAAAAAACGTCAAGCATTGAATGAAGGAAAACCAGCCTTTCACCTTCATGACGGACCTCCCTATGCTAATGGAAATATTCATGTAGGACATGCACTAAATAAAATTTCGAAAGACATTATTGTACGTTCAAAATCAATGTCAGGTTTTCGAGCTCCTTATGTGCCTGGTTGGGATACTCATGGACTCCCAATTGAGCAAGTATTAGCTAAAAAAGGGGTTAAACGTAAAGAAATGGACTTGGCTGAATACCTTGAAATGTGTCGTGATTATGCTCTCAGCCAAGTTGACAAACAACGTGATGATTTTAAACGTCTGGGCGTTTCTGCCGATTGGGAAAATCCTTATATTACACTAACACCAGATTATGAAGCAGATCAAGTACGTGTTTTCGGTGCTATGGCAGATAAAGGATATATCTATCGTGGTGCTAAACCAGTGTATTGGTCATGGTCATCAGAGTCTGCCCTTGCTGAGGCTGAAATCGAATATCATGATATTGATTCGACATCACTCTACTATGCCAATAAAGTTAAAGATGGTAAGGGAATTCTTGATACAGATACCTATATCGTTGTTTGGACGACAACACCATTTACTGTAACAGCTTCACGCGGTTTAACAGTAGGACCAGATATGGAGTATGTTGTAGTTGCACCAGTAGGTAGTGAGCGTAAATACCTTCTTGCAGAGGTTCTTGTAGATAGTCTCGCTGCTAAGTTTGGCTGGGAAAACTTTGAAATTGTGACTCATCACACTGGTAAAGAACTTAATCACATTGTTACAGAACATCCATGGGATACAGAAGTAGAAGAGTTGGTTATCCTTGGAGACCATGTTACAACAGATTCTGGTACAGGTATTGTCCACACGGCTCCTGGTTTTGGTGAAGACGACTATAACGTTGGTATTGCTAATGGACTTGATGTTGTAGTTACCGTAGATAGTCGTGGTTTGATGATGGAAAATGCTGGTCCTGATTTTGAAGGTCAATTCTATGACAAAGTGACACCACTTGTAAAAGAAAAATTGGGAGATCTTCTTTTAGCCAGCGAAGTTATCAACCACTCATATCCATTTGACTGGCGTACGAAAAAGCCAATCATTTGGCGTGCGGTTCCACAATGGTTTGCCTCTGTTTCGAAATTCCGTCAAGAAATCCTCGATGAAATTGAAAAGACAAATTTCCAACCTGAGTGGGGTAAAAAACGTCTTTATAACATGATCCGTGACCGTGGCGACTGGGTAATCTCACGTCAACGTGCTTGGGGTGTTCCACTTCCAATTTTTTATGCAGAAGATGGTACAGCTATCATGACAAAAGAAGTGACTGATCACGTTGCAGATTTATTTGCTGAATACGGCTCAATCGTTTGGTGGCAACGTGATGCTAAGGACCTTCTACCAGCAGGTTATACTCATCCAGGTTCACCTAATGGTCTCTTTGAGAAAGAAACAGACATCATGGATGTTTGGTTTGATTCTGGTTCATCATGGAATGGGGTAATGAATGCTCGTGAAAACCTTTCCTATCCAGCAGATCTTTATCTTGAAGGTTCTGATCAATACCGTGGTTGGTTCAACTCATCACTAATTACATCAGTTGCTGTTAATGGTCACGCTCCATACAAAGCAGTCTTATCTCAAGGTTTTGTACTTGATGGTAAAGGTGAGAAAATGTCTAAATCTCTAGGAAATACAATTCTTCCTAGTGATGTTGAAAAACAATTTGGTGCGGAAATCTTGCGTCTGTGGGTAACTTCTGTTGACTCAAGTAATGATGTTCGTATTTCAATGGATATCTTAAAACAAACATCAGAAACTTATCGTAAGATCAGGAATACATTGCGTTTCTTGATTGCAAATACTTCCGATTTTAATCCTAAACAAGATGCAGTAGCCTATGAAAATTTAGGTGCCGTTGATCGTTATATGACTATTAAATTTAATCAAGTTGTGGATACAATCAACAAAGCTTATGCTGCTTATGATTTTATGGCAATTTATAAAGCTGTCGTTAACTTCGTAACAGTTGATCTATCAGCATTTTACCTTGATTTTGCAAAAGATGTGGTTTACATTGAAGCGGCTAACAGTCCAGAACGACGTCGTATGCAAACTGTTTTCTATGATATTTTAGTTAAACTTACAAAACTTTTGACTCCGATTCTACCACATACTGCTGAAGAAATTTGGTCATACCTCGAACATGAGGAGGAGGAGTTTGTTCAATTAGCAGAAATGCCTGTTGCACAGACATTCTCTGGTCAAGAAGAAATTCTTGAAGAGTGGTCAGCATTCATGACGTTACGAACACAAGCTCAAAAAGCTCTCGAAGAAGCACGTAACGCTAAAGTTATTGGTAAATCTCTAGAAGCACATTTAACAATTTATGCTAGTCAAGAAGTGAAAACGTTATTAACAGCGTTAAATAGCGATATTGCACTCTTGATGATTGTCTCACAATTAACAATTGCTGATGAAGCAGACAAACCAGCTGACTCAGTATCATTTGAAGGTGTTGCATTTACTGTTGAACACGCTGAAGGTGAAGTCTGCGAACGCTCACGCCGTATTGATCCAACCACAAAGATGCGTTCGTATGGTGTAGCTGTTTGTGATGCTAGTGCAGCAATTATTGAGCAATATTATCCTGAAGCAGTAGCTCAAGGTTTTGAAGCT

SEQ ID NO: 9786 - protein, 930 aa, Streptococcus agalactiae
MKLKETLNLGQTAFPMRAGLPNKEPQWQEAWDQADIYKKRQALNEGKPAFHLHDGPPYANGNIHVGHALNKISKDIIVRSKSMSGFRAPYVPGWDTHGLPIEQVLAKKGVKRKEMDLAEYLEMCRDYALSQVDKQRDDFKRLGVSADWENPYITLTPDYEADQVRVFGAMADKGYIYRGAKPVYWSWSSESALAEAEIEYHDIDSTSLYYANKVKDGKGILDTDTYIVVWTTTPFTVTASRGLTVGPDMEYVVVAPVGSERKYLLAEVLVDSLAAKFGWENFEIVTHHTGKELNHIVTEHPWDTEVEELVILGDHVTTDSGTGIVHTAPGFGEDDYNVGIANGLDVVVTVDSRGLMMENAGPDFEGQFYDKVTPLVKEKLGDLLLASEVINHSYPFDWRTKKPIIWRAVPQWFASVSKFRQEILDEIEKTNFQPEWGKKRLYNMIRDRGDWVISRQRAWGVPLPIFYAEDGTAIMTKEVTDHVADLFAEYGSIVWWQRDAKDLLPAGYTHPGSPNGLFEKETDIMDVWFDSGSSWNGVMNARENLSYPADLYLEGSDQYRGWFNSSLITSVAVNGHAPYKAVLSQGFVLDGKGEKMSKSLGNTILPSDVEKQFGAEILRLWVTSVDSSNDVRISMDILKQTSETYRKIRNTLRFLIANTSDFNPKQDAVAYENLGAVDRYMTIKFNQVVDTINKAYAAYDFMAIYKAVVNFVTVDLSAFYLDFAKDVVYIEAANSPERRRMQTVFYDILVKLTKLLTPILPHTAEEIWSYLEHEEEEFVQLAEMPVAQTFSGQEEILEEWSAFMTLRTQAQKALEEARNAKVIGKSLEAHLTIYASQEVKTLLTALNSDIALLMIVSQLTIADEADKPADSVSFEGVAFTVEHAEGEVCERSRRIDPTTKMRSYGVAVCDASAAIIEQYYPEAVAQGFEA

SEQ ID NO: 9787 - protein, 300 aa, Streptococcus agalactiae
ATGAGACTAATTAATACAACCAGTAGTCATCCTGAACTAGTTCGAAATCAACTCCAAAATACAGATGCAAAATTAGTGGAAGTCTATTCAGCTGGCAACACCGATGTCGTTTTTACAAAAGCACCTAAACATTATGAATTATTAATTTCAAACAAATATCGTGCTATCAAAGATGAAGAATTAGAAGCTATTCGTGAGTTCTTCTTAAAGCGTAAAATAGATCAATCTATTATTATTCAAGAGCAGATGAAATCACTCCATACTGCCAAGTTAATTGAAATTTCATATCCAACAACAGCA

SEQ ID NO: 9788 - protein, 100 aa, Streptococcus agalactiae; identical to SEQ ID NO: 1004

SEQ ID NO: 9789 - protein, 453 aa, Streptococcus agalactiae
ATGACTAATCCTACTTTCGGTGAAAAAATAGATAATGTAAACTATAGGTCACGATTTGGTGTCTATGCTATTATTCCAAATCCAACTCATGATAAAATTATTTTAGTACAGGCACCTAATGGTGCTTGGTTTCTTCCAGGTGGGGAAATTGAAGAAAATGAAAATCACCTAGAAGCTTTAACTCGTGAGTTAATTGAAGAATTAGGTTATTCCGCAACAATTGGCCATTACTATGGTCAAGCTGATGAATATTTTTACTCTAGACACCGTGATACTTACTACTATAATCCCGCCTATATTTATGAAGTTACTGCCTATCATAAGGATCAAGCGCCACTAGAAGATTTCAACCATCTAGCCTGGTTTCCTATCCAAGAAGCTAAAGAAAAGCTAAAACGAGGAAGCCATAGATGGGGTGTCCAAGCTTGGGAAAAAAATCACCATTCTAGGAAA

SEQ ID NO: 9790 - protein, 151 aa, Streptococcus agalactiae; identical to SEQ ID NO: 1006

SEQ ID NO: 9791 - DNA, 2259 bp, Streptococcus agalactiae
atgctctgtcaaaactgcaaactaaacgaatcaactattcatttgtatacaaatgttaatggaaaacaaaagcaagttgatctttgtcaaaattgctaccaaattattaaaactgaccctaataatccacttttttcaggtttaaatcatgtttcacatgcgcctggtggcatcaatcctttctttgatgatttctttggagatttaaataatttcagagcctttaatggccaagatttaccaaacactcctcctacacaatcaggaggaaaccgaggtggaggaaacggtaatggacgaaataataatcgcaaccaaactgcaactccttctcaagccaaagggattctagaagaatttggtatcaatgtcactgaaatagcccgccatggtgatattgaccctgttattggacgtgactcagaaattattcgtgttatcgaaatccttaatcgtcgtacaaaaaataatcctgtacttattggcgaacccggcgttgggaaaactgccgttgttgaaggacttgctcagaaaattgttgatggtaatgtgcctcataaacttcaaggcaaacaagttattcgtttggatgttgtgagtctagtacaaggaacgggcattcgtggtcaatttgaagaacgcatgcaaaagttgatggaagaaattcgtcaacgtcaagatgttattctattcatagatgaaattcacgaaatagttggagctggtacagctggcgaaggtagtatggatgcaggtaatattttaaaacctgcccttgcacgtggagaattacaactagtaggtgctactactctcaatgaatatcgtattatcgaaaaggacgctgccttagaacgccgtatgcaacctgtaaaagtcgatgagccttctgttgaagaaaccattactattttgaaaggtatccaaaaaaaatacgaagattatcatcatgtaaaatataataatgatgccatagaagcagctgcagtactatctaatcgttatatccaggaccgctttttacctgataaagcaatagacttattagatgaagctggttctaaaatgaacctaacactaaattttgttgatccaaaagaaattgatcaacgtctcattgaagcagaaaatttaaaagcgcaagcgactcgtgaagaagattacgaacgtgcagcttacttccgtgaccagattgcaaaatataaagaaatgcaacaacaaaaggtcgacgatcaagatacacctattattaccgaaaaaacaattgagcacatcattgaagaaaaaacgaatatccctgttggtgatttaaaagaaaaagaacaatctcaattaattaatctcgcagatgacttgaaacaacatgtgatcggccaggatgacgctgtcgttaagattgcaaaagctattcgtcgtaatcgagttggtcttggtagcccaaaccgtcctattggttcctttttatttgtaggaccaaccggcgttggtaaaactgaactttctaaacaactagcaattgagctctttggttcagctgatagtatgattcgttttgatatgtcagagtacatggaaaagcatgctgttgctaaattagtcggagcgcctccaggatacgtgggatacgaggaagctggacaattaactgaaaaggttcgtcgaaatccttactcgctcatccttctagatgaaattgaaaaagctcatcctgatgtcatgcatatgttcttgcaggtccttgatgacggtcgattaacagatggacaaggaagaactgttagttttaaagataccattatcatcatgacctcaaatgctggttctggtaaaactgaagcaagcgttggctttggtgcctcacgagaaggtagaacgaattccgtactaggtcaactaggtaacttcttcagccctgaatttatgaaccgctttgacggtattattgaattcaaggctttagataaagagaatctcctcaatatcgttgatattatgttatctgacgttaatgcacgtctcgccatcaatggtattcatctagatgtcactgataaagtgaaagaaaaattggttgatttaggttacgatcccaaaatgggagcacgtccattacgtcgtaccattcaagaacatattgaagatgctatcacagattactatcttgagaatccaagcgaaaaagaacttcgtgctattatgactagcaatggaaatatcataataaaatcttctaaaaaaactgaagaaagtacaaaaggt

SEQ ID NO: 9792 - protein, 753 aa, Streptococcus agalactiae; identical to SEQ ID NO: 1008

SEQ ID NO: 9793 - DNA, 228 bp, Streptococcus agalactiae
atggaatcacatttagtgagaatcatcaatcgcctcgaattaatggcgactgatggtggtaatttaaaacgtaattttgaacgtgaaggtgttgttgtagcagaagtatcttttagtaatgaccctgaaaacggtcctgttttcacattacgtgatgtagaagcgcgtgaatcatattcatttgacagcattgaccttatcgcaatggaaatttacgatttattatac

SEQ ID NO: 9794 - protein, 76 aa, Streptococcus agalactiae; identical to SEQ ID NO: 1010

SEQ ID NO: 9795 - DNA, 162 bp, Streptococcus agalactiae
atggaattatggaacggagcacaatcagttgtaacggctacttactcaccagttgcaccgttattatttgcagcattttactatttaatgttgacaacgattctctcagctttgttaaaacaaatggagaaatatcttgggaaaggggtaaaaatagatggt

SEQ ID NO: 9796 - protein, 54 aa, Streptococcus agalactiae
MELWNGAQSVVTATYSPVAPLLFAAFYYLMLTTILSALLKQMEKYLGKGVKIDG

SEQ ID NO: 9797 - DNA, 732 bp, Streptococcus agalactiae
atggttgagccaattatttcaatacaaggacttcataaaagttttgggaaaaatgaggttttaaaaggcattgacttggatattcatcaaggagaagtagtggttattattggcccttctggctctggtaagtcaacatttttaagaacaatgaatctcttggaagtaccaacaaagggaacagtgacttttgaagggattgatataacagacaaaaagaatgatatttttaaaatgcgcgaaaaaatgggcatggtttttcaacagttcaatctatttcccaatatgactgtactagaaaatattactttatcacctattaagacaaaggggctttctaagcttgatgctcagacaaaagcatatgagctacttgaaaaagttggactcaaagagaaggctaatacttatccagctagcttatctggaggacaacaacaacgaattgctattgcaagargtcttgcaatgaatcctgatgtccttctttttgatgaacctacttcagctcttgatcctgaaatggtargtgaagtcttgactgktatgcaagatttagctaaatctggtatgacgatggttattgtcactcatgaaatgggttttgcacgtgaagtagcggatcgtgtcatttttatggatgcaggaattattgttgagcaaggggcccctaaggaagtatttgagcagacaaaagaaatccgcacaagagatttcttaagtaaagtatta

SEQ ID NO: 9798 - protein, 244 aa, Streptococcus agalactiae
  VARIANT 154, 177, 182: Xaa = Any Amino Acid
MVEPIISIQGLHKSFGKNEVLKGIDLDIHQGEVVVIIGPSGSGKSTFLRTMNLLEVPTKGTVTFEGIDITDKKNDIFKMREKMGMVFQQFNLFPNMTVLENITLSPIKTKGLSKLDAQTKAYELLEKVGLKEKANTYPASLSGGQQQRIAIARXLAMNPDVLLFDEPTSALDPEMVXEVLTXMQDLAKSGMTMVIVTHEMGFAREVADRVIFMDAGIIVEQGAPKEVFEQTKEIRTRDFLSKVL

SEQ ID NO: 9799 - DNA, 90 bp, Streptococcus agalactiae
atgtctcatatgaattataaagagatttatcaagagtggttagaaaacgactcactcggtaaagatattaagtcagatttagaagctatt

SEQ ID NO: 9800 - protein, 30 aa, Streptococcus agalactiae
MSHMNYKEIYQEWLENDSLGKDIKSDLEAI

SEQ ID NO: 9801 - protein, 1514 aa, Streptococcus agalactiae
ATGAATACTTATATGGTGGGAAAGCAGCACAAGCATTAGCTAATACGATTATTGATCATGGCCCTGAAGCTATTGCACGTGGAATTGCAGTTAGTTATGATGTCCGTTATCAATCTAAGGAATTTGCAGAATTAACTTGTTCCATTATGGCAGCAAATGGTATTAAGTCTTATATTTATAAAGGGATTCGCCCAACACCAATGTGCTCATATGCTATTCGTGCTCTAGGATGTGTTTCGGGTGTGATGATTACTGCTAGTCATAATCCTCAAGCTTATAATGGTTATAAGGCATATTGGAAAGAAGGATCTCAGATTTTAGATGATATTGCTGATCAAATTGCCAATCATATGGATGCTATAACCGATTATCAGCAAATTAAGCAAATACCCTTTGAAGAGGCTCTGGCAAGTGGTTCGGCAAGTTATATCGATGAGAGTATTGAAGAAGCATATAAAAAAGAAGTGCTTGGTTTAACTATTAATGATACTAATATTGATAAGTCAGTCCGGGTGGTTTATACTCCTTTAAATGGCGTAGGAAATTTACCTGTGCGCGAAGTTTTAAGACGCCGTGGTTTTGAAAATGTTTATGTGGTACCTGAGCAGGAAATGCCCGATCCTGATTTTACAACGGTTGGCTATCCAAACCCTGAAGTTCCTAAAGCATTTGCCTATTCAGAATCTCTAGGAAAGTCAGTTGATGCAGATATCTTACTTGCCACAGATCCAGATTGTGACCGAGTAGCATTGGAAGTCAAAGATAGTAAGGGAGAATATATTTTCTTAAATGGTAATAAGATAGGGGCACTTCTTTCCTATTATATTTTTTCACAACGATGTGCCTTAGGGAATTTGCCACATCATCCTGTATTGGTAAAATCCATTGTAACTGGTGATCTATCAAAAGTTATTGCAGATAAATATAATATTGAAACTGTTGAAACTTTAACAGGATTTAAAAATATTTGTGGAAAAGCTAATGAATATGATATCTCAAAGGATAAAACTTATCTCTTTGGCTATGAAGAAAGTATTGGTTTTTGCTATGGCACTTTTGTACGTGATAAAGATGCTGTGAGTGCTTCAATGATGGTAGTAGAAATGACTGCCTATTATAAAGAACGAGGGCAAACACTTTTAGACGTTTTGCAAACCATTTACGATAAATTTGGCTATTACAACGAGCGCCAATTTTCTCTTGAGTTAGAGGGTGCTGAGGGGCAAGAACGTATTAGTCGTATTATGGAGGATTTTAGACAGGACCCAATATTACAAGTAGGTGAGATGACATTGGAGAATTCTATTGATTTCAAGGATGGTTATAAGGATTTTCCAAAGCAAAATTGTTTAAAATATTATTTTAATGAGGGTTCATGGTATGCTTTAAGGCCGTCAGGGACGGAACCTAAGATAAAATGTTACCTTTATACGATTGGTTGTACAGAAGCAGATAGTTTATCGAAACTTAATGCAATTGAGTCGGCTTGTCGTGCTAAAATGAATAGTACTAAA

SEQ ID NO: 9802 - protein, 505 aa, Streptococcus agalactiae
MNTYMVGKAAQALANTIIDHGPEAIARGIAVSYDVRYQSKEFAELTCSIMAANGIKSYIYKGIRPTPMCSYAIRALGCVSGVMITASHNPQAYNGYKAYWKEGSQILDDIADQIANHMDAITDYQQIKQIPFEEALASGSASYIDESIEEAYKKEVLGLTINDTNIDKSVRVVYTPLNGVGNLPVREVLRRRGFENVYVVPEQEMPDPDFTTVGYPNPEVPKAFAYSESLGKSVDADILLATDPDCDRVALEVKDSKGEYIFLNGNKIGALLSYYIFSQRCALGNLPHHPVLVKSIVTGDLSKVIADKYNIETVETLTGFKNICGKANEYDISKDKTYLFGYEESIGFCYGTFVRDKDAVSASMMVVEMTAYYKERGQTLLDVLQTIYDKFGYYNERQFSLELEGAEGQERISRIMEDFRQDPILQVGEMTLENSIDFKDGYKDFPKQNCLKYYFNEGSWYALRPSGTEPKIKCYLYTIGCTEADSLSKLNAIESACRAKMNSTK

SEQ ID NO: 9803 - protein, 852 aa, Streptococcus agalactiae
ATGACTGAATTAATAGATGGTAAAGCCTTATCACAAAAAATGCAGGCTGAGTTAGGGCGAAAAGTTGAAAGGTTAAAGGAACAGCATGGTATCATACCTGGTTTAGCTGTAATCCTTGTTGGGGATAATCCAGCTAGCCAAGTGTACGTTCGAAATAAAGAACGCTCTGCATTAGAAGCTGGTTTTAAAAGTGAGACTCTACGATTATCTGAATCCATTTCTCAAGAAGAACTGATTGATATTATCCATCAATACAATGAAGATAAAAGTATCCATGGTATTTTAGTTCAACTTCCGTTACCACAACATATTAACGATAAAAAAATTATTTTAGCAATAGATCCTAAGAAAGATGTTGATGGTTTCCACCCAATGAATACGGGTCATCTTTGGTCAGGACGACCGATGATGGTACCTTGTACGCCAGCTGGTATTATGGAGATGTTTAGAGAGTACCATGTGGATTTAGAGGGAAAACATGCTGTTATCATCGGAAGGTCCAATATTGTTGGTAAGCCAATGGCACAACTTCTCCTTGATAAAAACGCAACAGTTACTTTGACACATTCAAGAACTCGAAACCTTTCTGAGGTAACAAAGGAGGCTGATATCCTTATTGTTGCGATTGGTCAGGGGCACTTTGTTACAAAAGACTTCGTTAAAGAAGGTGCTGTGGTGATTGATGTTGGTATGAATCGCGATGAAAATGGTAAATTGATTGGAGACGTTGTATTTGAACAAGTGGCAGAAGTTGCTAGTATGATAACACCTGTTCCTGGGGGCGTAGGACCTATGACGATTACAATGCTTTTGGAACAAACTTATCAAGCAGCTCTTAGAAGTGTGAGTCTA

SEQ ID NO: 9804 - protein, 284 aa, Streptococcus agalactiae; identical to SEQ ID NO: 1016

SEQ ID NO: 9805 - protein, 711 aa, Streptococcus agalactiae
ATGGCAGCTTTGGCCTGTGTCAAAACTGGTGCAGGATTAGTTACTGTAGCAACCCAAAGTTGCAATATCCCCTCTTTGCATAGTCAACTACCAGAGGTAATGGCGTTTGATAGTGATGATTACAAATGGTTGGAAAAATCAATTGTTCAAAGTGATGTTATTGTAATTGGTCCTGGATTAGGAGTATCAGAATCATCTCGAAAAATTTTGAACCAGACCATGGAGAAGATTCAATCACATCAAAGTGTCATCCTTGACGGATCAGCCTTGACTCTGTTATCAGAAGGTGCGTTTCCGCAAACAAAGGCTAAAAATTTAGTGTTGACACCTCATCAAAAAGAATGGGAGCGATTGTCAGGTATCGCTGTATCGCAACAGACAAAAGAAAATACCCAAACCGCTCTTAAATCTTTTCCCAAAGGGACGATTTTAGTCGCTAAGAGTTCGCATACGCGTATTTTTCAAGATTTAGACGAAAAAGAAATTATAGTAGGAGGTCCTTACCAGGCGACTGGAGGGATGGGGGATACTTTGTGTGGTATGATTGCAGGTATGTTAGCGCAATTTAAAGAAGCCTCTCCTCTAGATAAGGTATCAGTGGGAGTTTATCTACATTCGGCAATTGCTCAAGGATTATCTAAAGAAGCCTATGTTGTTCTACCGACAACGATTAGTGATGAGATTCCAAAAGAAATGGCTAGACTATCTAAA

SEQ ID NO: 9806 - protein, 237 aa, Streptococcus agalactiae; identical to SEQ ID NO: 1018

SEQ ID NO: 9807 - protein, 1338 aa, Streptococcus agalactiae
ATGTCAGACTATTTATCCGTGTCGACACTGACTAAGTATTTAAAATTAAAATTTGACAAAGACCCTTATTTAGAGAGGGTTTATTTAACTGGGCAAGTGTCTAATTTTCGTCGTCGCCCAAACCATCAATATTTCTCTTTAAAAGATGATAAATCAGTCATTCAGGCCACAATGTGGTCAGGTCACTTCAAAAAATTGGGTTTTGAATTAGAGGAAGGGATGAAGGTTAATGTAGTTGGCCGTGTTCAACTTTATGAACCAAGCGGCTCCTACTCTATTATTGTTGAAAAAGCAGAACCGGATGGTATAGGAGCTCTTGCTATCCAATTTGAACAACTAAAGAAGAAACTCTCTCAAGCAGGTTATTTTGATGATCGTCATAAGCAATTAATTCCTCAATTTGTTAGAAAAATAGGAGTTGTGACTAGTCCAAGTGGAGCCGTTATTCGGGATATTATTACAATAGTATCTCGTCGATTTCCAGGAGTGGAAATATTACTTTTCCCCACAAAAGTTCAAGGAGAGGGCGCAGCTCAGGAAATAGCACAAACTATTGCTTTAGCTAACGAGAAAAAGGATTTGGATCTATTAATTGTTGGCCGTGGGGGAGGTTCTATTGAGGACTTATGGGCATTTAATGAAGAATGTGTTGTAGAAGCTATTTTTGAATCTCGTCTTCCCGTTATTTCTAGTGTCGGACATGAAACTGATACAACTTTAGCAGATTTTGTAGCCGATCGCAGAGCAGCAACTCCAACTGCAGCAGCTGAGCTTGCTACACCGGTTACTAAAATTGATATCTTGTCTTGGATTACTGAACGTGAAAATAGAATGTATCAGTCTAGCCTTCGTCTTATCAGGACAAAAGAGGAGAGGTTGCAAAAATCAAAGCAATCAGTTATTTTTAGGCAACCAGAGCGTCTATATGATGGTTTCCTTCAAAAATTAGATAACCTAAATCAGCAGTTAACATATTCTATGCGTGATAAACTACAAACAGTAAGACAAAAGCAAGGTTTGCTTCATCAAAAACTGCAAGGCATAGATTTAAAACAGCGTATTCATATTTACCAAGAGCGTGTTGTGCAAAGTAGACGACTATTATCAAGTACAATGACTAGTCAGTATGACAGCAAGCTAGCACGTTTTGAAAAGGCTCAAGATGCGCTTATATCATTGGATAGTTCTAGAATTGTAGCGCGTGGTTACGCTATTATCGAAAAAAACCATACTTTAGTATCTACTACTAATGGAATAAATGAAGGAGATCATTTGCAAGTTAAGATGCAAGATGGTCTTTTAGAAGTTGAGGTGAAGGATGTCAGACAAGAAAACATT

SEQ ID NO: 9808 - protein, 446 aa, Streptococcus agalactiae
MSDYLSVSTLTKYLKLKFDKDPYLERVYLTGQVSNFRRRPNHQYFSLKDDKSVIQATMWSGHFKKLGFELEEGMKVNVVGRVQLYEPSGSYSIIVEKAEPDGIGALAIQFEQLKKKLSQAGYFDDRHKQLIPQFVRKIGVVTSPSGAVIRDIITIVSRRFPGVEILLFPTKVQGEGAAQEIAQTIALANEKKDLDLLIVGRGGGSIEDLWAFNEECVVEAIFESRLPVISSVGHETDTTLADFVADRRAATPTAAAELATPVTKIDILSWITERENRMYQSSLRLIRTKEERLQKSKQSVIFRQPERLYDGFLQKLDNLNQQLTYSMRDKLQTVRQKQGLLHQKLQGIDLKQRIHIYQERVVQSRRLLSSTMTSQYDSKLARFEKAQDALISLDSSRIVARGYAIIEKNHTLVSTTNGINEGDHLQVKMQDGLLEVEVKDVRQENI

SEQ ID NO: 9809 - protein, 213 aa, Streptococcus agalactiae
ATGTCAGACAAGAAAACATTTGAAGAAAATTTACAGGAATTAGAGACAATTGTCTCACGTTTAGAAACAGGTGATGTTGCCTTAGAAGATGCCATTGCTGAATTTCAAAAAGGAATGCTTATTTCAAAAGAGTTACAAAGAACTTTAAAAGAAGCTGAAGAGACGCTTGTAAAAGTGATGCAAGCTGACGGAACGGAAGTAGAAATGGATACT

SEQ ID NO: 9810 - protein, 71 aa, Streptococcus agalactiae; identical to SEQ ID NO: 1022

SEQ ID NO: 9811 - protein, 870 aa, Streptococcus agalactiae
ATGGTTACTATTGAAAAAATTGATGAAGCTATTCATCGTTATTACAAACAGACACATAGTGTCGTTTCTCCTGATTTGATTAAGGCTATCCTCTACTCAGTTGATGGAGGTGGGAAACGTATTCGTCCACGCATCCTTTTAGAAATTTTAGAGGGATTTGGAGTTGAACTAATAGATGGTCATTATGATGTGGCTGCTGCTTTGGAGATGATTCACACCGGCTCTTTAATCCATGATGATTTACCGGCGATGGATAATGATGATTTTCGTCGTGGCCGCTTAACAAACCATAAAAAGTTTGATGAAGCTACAGCGGTTTTAGCTGGAGATTCCCTTTTTTTAGACCCATTTGATTTAGTTGTAAAAGCTGGTTTTAAAGCTGATGTTACTGTTAGGTTAATAGAGTTATTGTCTATGTCTGCGGGTAGTTTTGGCATGGTTGGTGGACAAATGTTAGATATGAAGGGAGAAAACAAAGTTTTATCTATTGACGATTTAAGCTTGATTCATATTAATAAAACGGGACGCCTGTTAGCTTATCCCTTTGTTGCAGCAGGTATTTTAGCTGAGAAGTCGGAAGAAGTAAAAGGAAAACTGCATCAAGCTGGCCTTTTAATCGGTCATGCTTTTCAAGTACGTGATGATATTTTAGATGTGACTGCTAGTTTTGAAGAATTGGGGAAGACACCAAATAAAGACATTGTAGCAGAAAAGACAACTTATCCAAATTTATTGGGTTTGGATAAGTCACAGGAAATACTTGATGATACTTTGAAAAAAGCTCAGGCAATTTTTCAAAATCTAGAGAAAAAAGCTAACTTTAATGCTAGAAAAATAATAGATATAATAGAGGGATTACGGTTGAATGGC

SEQ ID NO: 9812 - protein, 290 aa, Streptococcus agalactiae; identical to SEQ ID NO: 1024

SEQ ID NO: 9813 - protein, 825 aa, Streptococcus agalactiae
ATGGCTAAAGAGAGGGTAGATGTTCTTGCCTATAAACAGGGACTTTTTGATACACGAGAGCAAGCGAAACGTGGTGTTATGGCAGGAATGGTGATTAACGTTATCAATGGAGAACGTTATGATAAACCAGGTGAAAAGGTTGCAGACGATACTGAATTAAAACTAAAAGGTGAAAAACTAAAATATGTTAGTAGAGGTGGATTGAAATTAGAAAAAGCTTTACAAGTTTTTGAAATTTCAGTTGCAGATAAGCTAACTATAGATATTGGCGCCTCTACGGGTGGTTTTACTGATGTTATGCTACAATCAGGAGCGCGTTTAGTTTACGCAGTAGATGTAGGAACAAATCAATTAGTTTGGAAGTTACGTCAGGATCATCGTGTTCGTTCTATGGAACAATATAATTTTAGGTATGCCCAAAAAGAAGATTTCAAGGAGGGACTGCCTGAATTTGCATCGATAGATGTCTCATTTATCTCTCTTAATTTGATTTTACCAGCTCTAAAAGAAATTTTAGTGGATGGTGGACAAGTAGTGGCATTAATTAAACCACAATTTGAAGCAGGTCGTGAGCAAATTGGTAAAAATGGTATTGTCAAAGACAAGTTGGTTCATGAAAAGGTTTTGACAACAGTGACCAATTTCACGAAAGATTATGGATATACGGTTAAACATCTTGATTTTTCGCCCATTCAAGGTGGACATGGAAATATTGAGTTTTTAATGCATTTGCAAAAGTGTCAAGATCCACAAAATCTTGTGCTTGACCAAATACAAGATGTTATAGAAAAAGCACATAAGGAATTTAAGAAAAATGAAGAAGAG

SEQ ID NO: 9814 - protein, 275 aa, Streptococcus agalactiae; identical to SEQ ID NO: 5400

SEQ ID NO: 9815 - protein, 471 aa, Streptococcus agalactiae
ATGAAGAAGAGTGAACGTTTAAATTTAATTAAGCAAATTGTTCTTAACCATGCTGTTGAAACACAACATGAGTTGTTACGCAGATTGGAAGCTTATGGGGTAACTCTAACTCAAGCAACTATTTCACGTGATATGAATGAAATTGGCATTATAAAAGTGCCATCAGCAAAAGGTCGCTATATTTACGGTTTGTCAAATGAAAACGACCCTATCTTTACAACTGCTGTGGCAAAGCCTATTAAAACAAGTATTTTATCAATATCAGATAAGCTACTAGGTTTAGAGCAATTTATCAATATTAATGTCATACCAGGTAACAGTCAATTAATTAAAACCTTCATAATGTCACATTGTCAAGAACATATTTTTAGTTTGACAGCTGACGATAATAGTCTCCTTTTGATTGCAAAATCAGAAGCAGATGCTGATCACATTCGTCAATCAATGATTGCAATGTTGGAGAAAAAAGAT

SEQ ID NO: 9816 - protein, 157 aa, Streptococcus agalactiae; identical to SEQ ID NO: 1028

SEQ ID NO: 9817 - protein, 1656 aa, Streptococcus agalactiae; identical to SEQ ID NO: 5403

SEQ ID NO: 9818 - protein, 552 aa, Streptococcus agalactiae; identical to SEQ ID NO: 5404

SEQ ID NO: 9819 - protein, 615 aa, Streptococcus agalactiae
ATGAGTAAAATCAAAATTGTAACGGATTCTTCCATTACCATTGAACCAGAACTTATTAAAGAGCTTGACATTACAGTTGTTCCCTTGTCAGTTATGATAGATGGTACCTTGTATTCAGACAATGACTTAAAAGCACAAGGGGAATTCTTGAACCTAATGCGTGGAAGTAAGGAATTGCCAAAAACAAGTCAACCACCTGTAGGTGTTTTTGCAGAAATTTATGAAAAATTAATGAATGAAGGTGTGGAACATATCATTGCAATTCATTTAACGCATACACTATCAGGAACTATTGAAGCATCACGCCAGGGAGCTAATATTGCTGGTGCAGATGTTACAGTTATTGATTCTACTTTTACAGACCAGTGTCAAAAATTCCAGGTTGTAGAAGCTGCGAAATTAGCTAAAGAGGGAGCTGATTTAGATACCATCTTGGCTCGTGTGGAAGAAGTACGCCAGAAGTCAGAATTATTTATTGGCGTATCGACCCTTGAAAATTTAGTAAAAGGTGGTCGTATTGGACGTGTAACGGGTCTTCTAAGTTCATTGCTTAATATAAAAGTAATTATGGAGCTAACAAACCATGAATTAGTACCGATTTTAAAGGTCGCGGTC

SEQ ID NO: 9820 - protein, 205 aa, Streptococcus agalactiae
MSKIKIVTDSSITIEPELIKELDITVVPLSVMIDGTLYSDNDLKAQGEFLNLMRGSKELPKTSQPPVGVFAEIYEKLMNEGVEHIIAIHLTHTLSGTIEASRQGANIAGADVTVIDSTFTDQCQKFQVVEAAKLAKEGADLDTILARVEEVRQKSELFIGVSTLENLVKGGRIGRVTGLLSSLLNIKVIMELTNHELVPILKVAV

SEQ ID NO: 9821 - protein, 196 aa, Streptococcus agalactiae
ATGTTAGATTTTGTAAAGTGCCCAAACACGAAAAATTGCTGAAATTGGCATCTCCTACTGTGGTAAAGCTGATATGGCTAATAACTTTAGAGAAAAACTAGCTGTTCTAGGTGCTCCTATATCCGTTTTAGAAACTGGCTCAATCATCCAAACTCATACTGGTGAGGATGCATTTGCTGTTATGGTTCGTTATGAA

SEQ ID NO: 9822 - protein, 67 aa, Streptococcus agalactiae
  VARIANT 4: Xaa = Any Amino Acid
MVRXFVESAQTRKIAEIGISYCGKADMANNFREKLAVLGAPISVLETGSIIQTHTGEDAFAVMVRYE

SEQ ID NO: 9823 - protein, 855 aa, Streptococcus agalactiae
TTGCTGTTATGGTTCGTTATGAATAAGAAAAAAATACTTACCGGACTTTCTTTTTTTCTGGTAAGTCTTCTTTTATCTTTTGGGATTTTTTCCTTGATCATTCCAAAATCAAATCCTAAATTAACAAAAAAAGACTTCCTAACAAAGAAAGTTATCCCACTTAACTATGTTGCTCTTGGAGATTCTCTGACCGAAGGTGTGGGCGATACAACCTCTCAAGGTGGTTTTGTTCCACTGCTATCAGAATCACTCCATAATCGATACTCTTACCAAGTGACTTCTGTTAATTATGGTGTGTCTGGGAATACTAGTCAACAAATTTTAAAACGTATGACGACAGATCCTCAAATCGAAAAAGATTTAGAGAAAGCTGATTTATTGACGCTAACTGTTGGTGGTAATGATGTCTTGGCTGTTATTCGTAAAGAGCTCAGTCATTTATCACTAAATTCCTTTGAGAAACCAGCAGAAGCATATAAGGAACGTTTGAAAGAAATCCTTGCAAAAGCAAGACAAGATAATCCTAAATTGCCTATTTATGTTTTAGGCATTTATAATCCTTTTTACCTAAACTTTCCACAATTAACTAAAATGCAAACCGTTATTGATAATTGGAATAAAGCTACAAAAGAAGTAGTTGATGCTTCAGAAAATGTTTATTTTGTCCCAATTAATGACCGCCTTTATAAGGGAATAAATGGTAAAGAGGGTATTACAGAGTCATCAAATAGTCAGGCAAGTATCACTAATGATGCTCTCTTTACTGGAGACCATTTTCATCCCAATAATATTGGCTATCAAATCATGTCTAACGCCGTTATGGAGAAAATAAATGAAACAAGAAAAAACTGGCCG

SEQ ID NO: 9824 - protein, 285 aa, Streptococcus agalactiae; identical to SEQ ID NO: 1034

SEQ ID NO: 9825 - protein, 336 aa, Streptococcus agalactiae
ATGAAACAAGAAAAAACTGGCCGTAATTTAAATTTCTGGAAATGGGCATTTCTCTTATTGTTGGCAATTAACCTTTCCTTCACAGCAGTGATTGCAAGTCGCTTAATTCAAGTACGTGAGCCTAATACAGGAAAAATTTCGACTGGGGTACAAGATAAAGTAAAAGTAGGTACTTTTACGACCAATAAGTCGCAACTGAATAAGACAATTGCACTTTATTTAAAACAATATCAAACTAAGAAGATGAATTATAAGATTTATGCTGCTTCATCTTCTATACTATTTGAAGGCTCTTATCAATTATTAGGTTATGAAGTGCCTTTATACATCNNNNNT

SEQ ID NO: 9826 - protein, 112 aa, Streptococcus agalactiae
  VARIANT 111, 112: Xaa = Any Amino Acid
MKQEKTGRNLNFWKWAFLLLLAINLSFTAVIASRLIQVREPNTGKISTGVQDKVKVGTFTTNKSQLNKTIALYLKQYQTKKMNYKIYAASSSILFEGSYQLLGYEVPLYIXX

SEQ ID NO: 9827 - protein, 195 aa, Streptococcus agalactiae
ATGTCAGAAAAAGCTATACTATTAATTATCCTTATTGCTTTTGTTATTATCGCTATTATAAAGATAGCTCTGTTAAAGTTATATATGAATACGATAAAACCTAAAGTAGATAATGAAGGAAACATCATAACAAAGCCTGTAAAGGATGATTTAACACCCGAGGAACGTGAAGAACGTGAATTTGATAAAGATTGG

SEQ ID NO: 9828 - protein, 65 aa, Streptococcus agalactiae
MSEKAILLIILIAFVIIAIIKIALLKLYMNTIKPKVDNEGNIITKPVKDDLTPEEREEREFDKDW

SEQ ID NO: 9829 - protein, 564 aa, Streptococcus agalactiae
ATGCCTAATAGAGTTAATTTATCGTGCCCAAATGTTCCTGGAAACCCTCAAATTGCTTATGATTTTGAAATGACTGACCTCATCCTTTCAGAAATCTTTAGCTATTATCAAAAGCCATTGGGCATCAAATTACCACCTTACTTTGATATCGTTCACTTTGATCAAGCAGCTACAATTTTTAACAAATATCCTTTAGCTTTTATTAACTGTGTTAATTCTATCGGAAATGGACTTGTTATTGATGATGAAACTGTCGTTATAAAGCCTAAAAATGGCTTTGGAGGTATCGGTGGGGATTTTATCAAGCCTACCGCCTTAGCTAACGTCCATGCTTTCTACAAACGTTTAAATCCTTCAATTAAAATTATCGGAACAGGTGGTGTTAAAAACGGCCGTGATGCCTTTGAACACATTCTATGTGGAGCTAGTATGGTCCAAATCGGAACCGCTTTACAAAAAGAAGGACCAGAAATTTTTCAGCGTGTAAGCAGAGAATTAAAAGAAATAATGGCTGATAAAGGCTATCAATCATTGGAGGATTTTCGAGGACAACTTAATTACCTT

SEQ ID NO: 9830 - protein, 188 aa, Streptococcus agalactiae
MPNRVNLSCPNVPGNPQIAYDFEMTDLILSEIFSYYQKPLGIKLPPYFDIVHFDQAATIFNKYPLAFINCVNSIGNGLVIDDETVVIKPKNGFGGIGGDFIKPTALANVHAFYKRLNPSIKIIGTGGVKNGRDAFEHILCGASMVQIGTALQKEGPEIFQRVSRELKEIMADKGYQSLEDFRGQLNYL

SEQ ID NO: 9831 - protein, 1232 aa, Streptococcus agalactiae
ATGGCGCTTAAAGAATTAACAGCTAAAGAGTTCGAAAGTTATTCAGGAAATTACGATTTACAATCGTTTATGCAAACCCCTGAGATGGCAAAGCTTCTAAAAAAACGTGGGTATGACATTACCTACATGGGCTACCAAATCGATGGGAAAATGGAAATCATCAGTATTGTTTATACCATCCCAATGACTGGTGGACTTCATATGGAAGTCAATTCTGGTCCAGCCCATTCCAATTCTAAATATCTGAAACATTTTTATAAAGAACTACAGAACTATGCCAAATCTCAGGGCGCTTTAGAATTATTAATTAAACCTTATGATACCTACCAAGAGTTTACTGGTGAAGGTAAGCCTAAAGGTGCACCGAACACCTATCTTATTGATGACCTGACTAGTATAGGTTATCACCACGATGGGCTTCATATTGGTTATCCTGGCGGTGAACCTGATTGGCATTATGTTAAAAATCTAGAAGGTATCACTCCTCAAAATCTTCTTAAATCTTTCTCTAAAAAAGGACGCCCCTTGGTTAAGAAAGCCATGTCTTTTGGTATAAAAATACGTGTCCTCAAGCGGGAAGAACTACATATCTTTAAGGATATTACTTCTTCTACTTCTGATCGCCGGGACTATATGGATAAATCTCTAGATTATTATCAAGATTTTTATGATAGTTTCGGAGATAAGGCGGAATTTGTCATTGCAACTCTAAACTTTAGGGAATATGATCATAACCTACAATTAAATGCAAAGAAATTGGAAGAACAGATTACAGTCCTTGATAATCACCATCAAAATAATACAGATTCTGCCAAATACCATCGTCAACGTACTGAGCTTGTCATCAACTAGCTAGTTTAGATAAACGTCGCAAAGAAGTCGAACCTTTTATTCAAAAATTTGGAAATCAAGATGTTGTTTTAGCTGGTAGCCTCTTTATTTATAGCCCGAAAGAAACTGTCTATCTTTTCTCTGGCTCATACACAGAATTTAATAAATTTTATGCGCCTGCAGTTCTTCAAGAATATGTTATGCAAGAGGCTTTAAAGCGTCAATCAACTTTCTATAATTTTTTAGGTATTCAAGGAAATTTTGATGGTTCAGATGGCGTACTTCGCTTTAAACAGAATTTTAATGGTTACATTGTTCGTAAAATGGGTACTTTCCGCTACTATCCAAATCCATTAAAATATAAGAGTATTCAATTACTAAAGAAAATCTTACGCCGAACA

SEQ ID NO: 9832 - protein, 411 aa, Streptococcus agalactiae
MALKELTAKEFESYSGNYDLQSFMQTPEMAKLLKKRGYDITYMGYQIDGKMEIISIVYTIPMTGGLHMEVNSGPAHSNSKYLKHFYKELQNYAKSQGALELLIKPYDTYQEFTGEGKPKGAPNTYLIDDLTSIGYHHDGLHIGYPGGEPDWHYVKNLEGITPQNLLKSFSKKGRPLVKKAMSFGIKIRVLKREELHIFKDITSSTSDRRDYMDKSLDYYQDFYDSFGDKAEFVIATLNFREYDHNLQLNAKKLEEQITVLDNHHQNNTDSAKYHRQRTELVNQLASLDKRRKEVEPFIQKFGNQDVVLAGSLFIYSPKETVYLFSGSYTEFNKFYAPAVLQEYVMQEALKRQSTFYNFLGIQGNFDGSDGVLRFKQNFNGYIVRKMGTFRYYPNPLKYKSIQLLKKILRRT

SEQ ID NO: 9833 - protein, 1209 aa, Streptococcus agalactiae; identical to SEQ ID NO: 5419

SEQ ID NO: 9834 - protein, 403 aa, Streptococcus agalactiae; identical to SEQ ID NO: 1046

SEQ ID NO: 9835 - protein, 1233 aa, Streptococcus agalactiae
ATGGGTAATAAACTGATGTATCATGTTACCGTTGGAATATCCGAAAAAGAATATGATGCCTTTGCTATTGCATCGTCTCAAACCAATCTCCTCCACTCTTCAAAGTGGGCACAAGTAAAATCAAATTGGCAAAATGAACGTTTAGGCTTTTATAAAGATGACCAATTAGTTGCTGTAGCTAGCATCTTAATTAAATCATTACCACTTGGTTTTACAATGCTTTATATTCCACGTGGACCTATTATGGACTACAGCAATAAAGAATTAGTTAACTTTGTGTTAAAAACACTAAAAAACTTTGGACGAAAGAAACGTGCTGTTTTTGCAAAATTCGATCCAGCACTTCTTCTACGTCAATATCACCTTAAAGAAGAGAATGTCGCCGAAGAGATAGATGAAAGTAGACAGGCAATTGATAATCTTAAGTCAGCAGGTGCCCAATGGATAGGTCCAACGAAAGCCATTTCCGAAACCATCCAACCTCGTTTTCAAGCGAATATCTATACCAAAGCAAATATAGAAGAAAACTTTCCAAAACACACTAAACGTCTGATAAAAGATGCAAAGCATCGCGGTGTTCAAATTTATCGTGCCAACATTGATGATTTACCTAAATTCGCCACGGTTGTAGCATTAACCGAGAATCGTAAAGGTGTAGCTTTACGTAATGAAAACTATTTCCATCAACTAATGACAATTTATGGAGAAGATGCCTATCTCTATTTAGCTAAAGTCAATCTTCCTAAAAGATTAGCGCAATTTAAAGAACAACTTCTTCAAATCCAAAAAGATTTATCAGAAACTCCATCCCATCAAAAAAGTCGCCTGACAAGGCTAAATCAACAAGAAGCTTCTGTTAAACAATATATCCTTGAATTTCAGGAGTTTAGCAAGAAATATCCAGATGAGCCTGTCATTGCAGGAATTTTGTCCATTCGTTTTGGCAATGTCCTGGAGATGTTGTATGCTGGTATGGATGATAGCTTCCGTAAATTTTATCCACAGTATCTCTTGAATGCTAGGGTGTTCGAAGATGCTTTCAAAAACGATATTGTATCTGCTAATCTAGGCGGTGTCGAGGGAAGTCTTAACGATGGTTTAACAAAATTTAAAAGTAACTTCAATCCAATGTTTGAAGAATATATTGGCGAGTTTAATCTAGCAATCAATCCATTATTATATAAATTGGCCAACCTAGCCTATACTATTCGAAAAAAACAAAGACACTCTCAC

SEQ ID NO: 9836 - protein, 411 aa, Streptococcus agalactiae
MGNKLMYHVTVGISEKEYDAFAIASSQTNLLHSSKWAQVKSNWQNERLGFYKDDQLVAVASILIKSLPLGFTMLYIPRGPIMDYSNKELVNFVLKTLKNFGRKKRAVFAKFDPALLLRQYHLKEENVAEEIDESRQAIDNLKSAGAQWIGPTKAISETIQPRFQANIYTKANIEENFPKHTKRLIKDAKHRGVQIYRANIDDLPKFATVVALTENRKGVALRNENYFHQLMTIYGEDAYLYLAKVNLPKRLAQFKEQLLQIQKDLSETPSHQKSRLTRLNQQEASVKQYILEFQEFSKKYPDEPVIAGILSIRFGNVLEMLYAGMDDSFRKFYPQYLLNARVFEDAFKNDIVSANLGGVEGSLNDGLTKFKSNFNPMFEEYIGEFNLAINPLLYKLANLAYTIRKKQRHSH

SEQ ID NO: 9837 - protein, 810 aa, Streptococcus agalactiae
ATGACTTCAATTAAACTTGTTGCCGTAGATATTGACGGCACCCTATTAAATAGTAAGCGTGAAATTACACCTGAAGTGGCTAAAGCTGTTCAAGAAGCAAAATCAAAAGGCGTTAAAATTGTTATTGCTACAGGACGTCCAATCATCGGAGTCCAAGATCTTTTAGAAGAATTGAAACTCAATGAAGAGGGAGATTATGTTATCACCTTTAACGGCGGTCTAGTTCAAGACACAGCCACAGGAGATGACATCATCAAAGAAACCTTAACCTATGAAGACTATCTGGATTTCGAACTGTTAGCGCGTAAATTAGGCGTCCACATGCACGCCATTACAAAAGAAGGAATTTACACAGCAAATCGTGATATTGGTAAATATACAATACACGAAGTAACTTTAGTTAATATGCCGCTCTTCTATCGTACTCCTGAAGAAATGGGAGACAAAGAAATCATTAAACTAATGATGATTGATCAACCTGACATCTTAGATGCAGCAATTGCTAAAATTCCAAAAAAAGTTCTCGATAACTACACTATTGTAAAATCAACTCCTTTTTATTTAGAAATTTTACCCAAAAACGTTAATAAAGGCACTGCACTTCTCCACCTTGCAGAGAAAATGGGATTAACTGTAGATCAAACAATGGCTATTGGTGATGAAGAAAATGACCGTGCTATGCTTGAAGTTGTTGGAAATCCTGTTGTTATGCAAAACGGCAATCCTGAACTAAAAAAAATAGCAAAATATATCACCAAATCAAACGAGGAAAGTGGCGTAGCCTACGCACTACGTGAATGGGTAATAAAC

SEQ ID NO: 9838 - protein, 270 aa, Streptococcus agalactiae; identical to SEQ ID NO: 1050

SEQ ID NO: 9839 - protein, 1314 aa, Streptococcus agalactiae; identical to SEQ ID NO: 5425

SEQ ID NO: 9840 - protein, 438 aa, Streptococcus agalactiae; identical to SEQ ID NO: 1052

SEQ ID NO: 9841 - protein, 384 aa, Streptococcus agalactiae
ATGAAACTAGAAATTAACAATAACATTCAAATTGACAACGAAACCGAAATGATTCATGAGATTCACGATTGTCAATTTATTGAAAAAGGAAGTTACGTTTATTTGAATTATATTAATGCTGAGGGCGAGAGGGTAGTTATTAAGGCAAATCATGAGGAATTGCTTATGACGAGGTTTTCAAATCCTAAGTCTGTAATGCGTTTTCATCGTGAAACGCCTGCTTTGGTTAATATCCCCACTCCACTTGGTGTTCAACATTTGATTACAGAGACAAGTCACTATCAGTTTGATTTGTCACAGCAAAGGTTGCATATCAATTATGTCCTTAAGCAAACGGAGACAGGAGACTGTTTTGCAAATTATGAATTAAGGATTCAATGGTAT

SEQ ID NO: 9842 - protein, 128 aa, Streptococcus agalactiae; identical to SEQ ID NO: 1054

SEQ ID NO: 9843 - protein, 2682 aa, Streptococcus agalactiae
TTGTTAAAAGAACAGAAAAAATCCTTGTTTTACACACAAGGTCAAGAAGAGGTTCTAACGTCTTTAGAATCTTCTCGTGAAGGATTATCAACGACAGAAGCGAAAAATCGCTTAGAGATGTATGGTCGCAATGAGCTTGAAGAAGGGAAAAAACGTAGTCTAATAGCTAAGTTTTTTGACCAATTCAAAGATTTAATGATTATTATCTTACTGGTTGCTGCAGCTCTCTCTGTTATTACGGAAGGTATGCATGGCTTAACGGATGCATTGATTATCTTGGCGGTTGTTATCTTAAATGCAGCTTTTGGTGTTTATCAAGAGGGGCAAGCCGAAGCAGCTATTGAAGCCCTCAAAGATATGTCAAGCCCAATTGCGCGTGTTCGTCGTGATGGTCATACTATTGAGGTGGATTCTAAAGAACTAGTTCCTGGTGACCTCGTTATGTTAGAAGCAGGAGATGTTGTTCCCGCAGATTTACGACTTTTAGAAGCCGCGTCTCTAAAAATTGAAGAAGCAGCTCTAACTGGTGAGTCAGTACCTGTTGAGAAAGACATATCTCAAGTAGTAGCAGAGGATGCAGGTATTGGTGACCGTGTGAATATGGCGTATCAAAATTCAAATGTCACGTATGGTCGAGGATATGGTGTTGTTACTAACACAGGGATGTATACTGAAGTTGGTAAAATTGCGGACATGTTGGCAAATGCTGATGAATCTGAAACACCATTGAAACAAAGTTTAGTTCAACTTTCTAAATTATTGACTTACTTAATCGTGATTATTGCGGTTATTACTTTCTTAGTGGGGATATTTGTCCGTAAAGAAGGTTGGATTGAAGGATTGATGACTTCAGTTGCTTTAGCAGTTGCAGCTATTCCAGAAGGGCTTCCTGCAATTGTTACGATTGTCTTATCAATGGGAACAAAAACTCTTGCTAAACGCAATTCTATCGTTCGTAAACTCCCTGCAGTTGAAACTTTAGGTTCTACAGAAATCATTGCATCAGATAAGACTGGAACTCTGACAATGAATCAAATGACTGTCGAAAAAGTGTATACTAATGGTGTTCTCCAATCATCTTCGGAAGAAATTTCAGTTGATAATAACACTTTACGTATTATGAATTTCTCCAACGATACTAAGATTGATCCTTCAGGAAAATTAATTGGTGACCCAACAGAGACTGCACTGGTACAATTTGGTTTAGATAAGAATTTTGATGTCCGTGAAGTTTTGAAAAATGAACCACGTGTAGCTGAGTTACCATTTGATTCAGATCGTAAGTTAATGTCTACGATTCATAAAGAATCAGATGGTCGCTACTTTATCGCAGTCAAGGGTGCTCCTGATCAATTATTAAAACGAGTTACTAAAATTGAAGATAATGGCTTGGTTCGTGATATCACGGCTGAAGATAAAGAGGCTATCCTAAATACCAATAAAGAACTCGCAAAACAAGCTCTTCGTGTCTTGATGATGGCTTATAAATATGAAACACAAATTCCAACTTTAGAGACTGATATTGTTGAGTCAGATTTAGTATTCTCAGGTTTAGTGGGAATGATTGACCCTGAGCGTCCAGAAGCGGCAGAAGCTGTTCGAGTTGCTAAAGAAGCAGGAATTCGTCCGATTATGATTACCGGGGACCATCAAGATACTGCAGAAGCTATTGCAAAGCGTCTAGGTATTATTGATGCAAATGACACAGAAGATCATGTCTTTACGGGTGCTGAACTTAATGAATTAAGTGATGAAGAGTTTCAAAAAGTATTTAAACAATATTCTGTCTATGCACGTGTTTCTCCTGAACATAAAGTGCGTATCGTGAAAGCTTGGCAAAACGATGGCAAAGTCGTTGCCATGACTGGTGATGGTGTTAATGATGCTCCATCGCTAAAAACAGCAGATATTGGTATTGGTATGGGAATAACTGGTACGGAAGTTTCCAAAGGTGCTTCTGATATGGTCCTTGCTGATGATAATTTTGCAACTATTATTGTGGCTGTTGAGGAAGGACGTAAAGTCTTCTCAAATATCCAAAAATCTATTCAGTATCTTCTTTCAGCCAACATGGCAGAGGTATTTACAATTTTCTTTGCAACTTTATTAGGATGGGATGTACTTGCACCGGTTCACCTTCTTTGGATTAACTTGGTAACAGATACTCTTCCAGCCATCGCTCTTGGAGTTGAGCCAGCTGAACCAGGAGTTATGACACATAAACCTCGTGGTCGCCAGTCAAACTTCTTTGATGGTGGTGTTATGGGAGCTATTATCTATCAAGGTATTTTACAAACTATCTTAGTACTTGGTGTCTATGGTTGGGCATTGATGTATCCAGAACATGCTGGTTATCGCATGATTCACGCAGATGCCCTTACGATGGCCTTTGCAACGCTTGGTTTAATCCAATTGGTACATGCATTTAACGTTAAGTCAGTTTACCAATCAATCTTTACAGTTGGAGCTTTTAAAAATAGAACCTTTAACTGGTCTATTCCAGTAGCTTTCATTCTTTTGATGGTGACTATTGTTGTTCCTGGATTTAATAAACTTTTCCATGTAACTCATTTAAGTTCAACACAATGGTTAACTGTAGTTATCGGAAGTTTATTGATGGTAGTGTTAACGGAAATTGTTAAATTTATCCAACGTAAATTAGGACAAGACGAAAAAGCTATT

SEQ ID NO: 9844 - protein, 894 aa, Streptococcus agalactiae; identical to SEQ ID NO: 1056

SEQ ID NO: 9845 - protein, 858 aa, Streptococcus agalactiae
ATGACCAAACTTGCTATCATGAGTGATTTACATATTGACCTCAATCATTTTTCTACCTTTGAGACGAAAACGTTAATTAATTTGCTTAAGAAAGAAAAAATTGATCACCTCCATATCGCTGGAGATATATCTAATCATTTTACTAAAGATACACTTCCCTTTATCAATAACTTAAAAAAGCATATTAAACTTAGCTATAATTTAGGAAACCATGATATGCTTGATTTAACAGAAACAGAAATCCAACGTCTTGACTTTCAAACCTATCGATTTGACAAAAAAATGCTACTAGCTTTTCATGGCTGGTATGATTACAGCTTTTCAAATAATAGAGACATCAAGGATGTTGAAAAATTAAAAAAGACTTTTTGGTTTGATAGACGTTTAAAACGTCCAAATAATGATGTAACTATCCAAGCATCAATTTTAAAACGCTTAGACGAAATATTAGCAAAAGTCGATTCTTCAAATATCATTATTGCTATGCACTTTGTTCCCCATAAACAATTCACGATGACTCATCCTAGATTCTCTCCTTTTAATGCTTTTTTGGGGAGTCAGGCTTATCATGATTTATTCCAAAAATATCATATCAAAGATGTTGTTTTTGGTCATGCACACCGCTCATTTGGCGACGTTAAAATTGGAGAGACTACTTATCATTCTAGACCACTTGGATATATTAGAGAATGGAATTTAACTATTGACTTTGTCAATCAGAATCCCAATCATAACCCTAATTTAACCTGGAATCTTAGCAAAAGGTATAATGCCGTTAAGCATTTGGATAGTTTTGAAAACTATCCAAAAAAATATTTTGAAGACGAATTACGCAACTCTATGACAATATTTGATTGC

SEQ ID NO: 9846 - protein, 286 aa, Streptococcus agalactiae
MTKLAIMSDLHIDLNHFSTFETKTLINLLKKEKIDHLHIAGDISNHFTKDTLPFINNLKKHIKLSYNLGNHDMLDLTETEIQRLDFQTYRFDKKMLLAFHGWYDYSFSNNRDIKDVEKLKKTFWFDRRLKRPNNDVTIQASILKRLDEILAKVDSSNIIIAMHFVPHKQFTMTHPRFSPFNAFLGSQAYHDLFQKYHIKDVVFGHAHRSFGDVKIGETTYHSRPLGYIREWNLTIDFVNQNPNHNPNLTWNLSKRYNAVKHLDSFENYPKKYFEDELRNSMTIFDC

SEQ ID NO: 9847 - protein, 1926 aa, Streptococcus agalactiae
ATGTCTAATTTTTATAAGCTCTTGAAAGAAAAATTTCCTCGAAAAGAAGATATCGTAACAGAAATGATCAATTTAGAAGCTATTTGTCAATTACCCAAAGGGACGGAGTATTTTATTAGTGATTTACACGGGGAATACGATGCTGTTGATTATCTCTTACGGACAGGTGCAGGGTCTATTAGAGCTAAATTATTAGACTGTTTTGATTGGCAGAAAATAGTTGCTGTTGATTTAGATGATTTTTGTATACTGCTTTATTACCCAAAGGAAAAATTAGCCTTCGATAAAATGAACTTGTCAGCAAGTGCTTATAAAACGAAGTTATGGGAAATGATTCCGTTACAAATACAAGTTTTAAAATATTTTTCTAGTAAATATACAAAATCTAAAGTACGTAAGCAATTGTCAGGTAAGTTTGCTTACATTATCGAAGAACTTTTAGCTGAGATTGACCGTAACCCAGAGAAGAAAAGCTATTTTGATACTATTATTGAAAAATTATTTGAATTAGACCAAGTAGAAGATTTAATTATAGTATTGTCCCAAACAATTCAAGTTTTGATTATTGACCATTTACATGTTGTAGGGGATATTTACGATCGTGGTAGGTATCCTGATCGTATCTTGAATAGGTTAATGGCTTTTCCAAATTTGGATATCCAATGGGGGAACCATGATGTCACTTGGATGGGAGCAGCATCTGGTTCTTACCTTTGTATGGTAAATGTTATCCGTATTGCTGCACGTTATAATAATATTACTTTAATTGAAGACCGATATGGTATCAATTTGCGTCGCTTGGTTGATTACTCACGCCGTTACTATGAACCTCTACCTTCTTTCGTTCCTATATTAGATGGAGAGGAAATGACTCATCCAGATGAACTAGACTTGTTAAATATGATACAACAAGCAACAGCAATTTTACAGTTTAAATTGGAAGCCCAATTGATTGACAGGCGTCCAGAATTTCAAATGCATAATCGGCAACTTATTAACCAGGTAAATTATAAAGATTTAAGTATATCTATTAAGGAAGTTGTGCATCAACTTAAAGATTTTAATAGTAGATGCATTGATTCGAAAAATCCCAGTCGATTAACAAGTGAGGAAGAAGAGCTTTTACAACAATTGATGATAGCCTTCCAGACTTCTGAAAGTTTAAAGAAACATATTGATTTCCTATTTGAAAAAGGAAGTATGTATTTAACATATAATGATAATCTTTATTCCATGGTTGCATACCAATGCATAGTATGGTGATTTAAAAGCTTTAAAATTGCAGGAAAAACTTATGGTGGTAGGGATTTACTGGATTTATTTGAAAGTCAAATACGTCTAGCATATGCTAGACCAGAGAAACATGATGATTTGGCGACAGATATCATTTGGTATCTTTGGTGTGGTGAAAATTCTTCTCTTTTTGGTAAGAATGCCATGACTACTTTTGAGCGCTATTATGTTTCCGACAAAGTAACTCATCAAGAAAGAAAAAATCCCTACTTTAAACTGAGAGATAAAGATGATATTTGCACTGCTCTTTTACAAGAGTTTGATTTGCCTAAGTTTGGGCATATTGTCAATGGTCATACGCCAGTCAAAGAAAAAAATGGTGAGCAACCGATAAAAGCAAATGGTAAGATGTTAGTAATTGATGGTGGCTTTGCCAAAGGTTATCAGAAAAATACAGGTTTAGCTGGCTACACTTTGATTTATAATAGCTATGGGATACAATTAATTTCACACCTTCCTTTTACATCCATTGAGGAAGTTTTAAGTGGAACCAACTATATCATTGATACGAAGCGATTAGTAGAAGAAGCCAAGGATAGGATTCTTGTAAAAGATACAACTATTGGACAAAAGTTAACCAAAGAGATTAAAGACTTAGATCACCTTTATCGTCATTTTCAGGAATATGATGAC

SEQ ID NO: 9848 - protein, 643 aa, Streptococcus agalactiae; identical to SEQ ID NO: 1060

SEQ ID NO: 9849 - protein, 1121 aa, Streptococcus agalactiae
ATGGACATAAAGGCAGAAATTCAAAAATTAGCAAAAGAAATTGGTATCTCTAAAATTGGTTTTACGACGGCAGATAACTTTGATTATTTGGAAAAGTCATTGCGTGCTTCTGTGGAAGAGGGGCGCAATTCAGGATTTGAACATAAAGTCATAGAGGATCGTATCTACCCTGAAAGGCTTTTAGAATCGGCTAAAACGATTATTTCAATTGGCGTTGCTTATCCTCACAAACTTCCTCAGCAACCTCAAAAAACATCTTATAAACGAGGAAAAATTACACCTAATTCGTGGGGGCTTGATTATCATTATGTGGTCGGCGAAAAGTTAGACAGACTATCAAAAGGCATTGAAGAGCTCTGTCGAGATTTTCCTTTGCAACAAAAAGCAATGGTCGATACTGGAGCTTTAGTTGATACTGCAGTTGCCCAAAGAGCAGGTATTGGTTTTATAGGAAAAAATGGTCTAGTTATTTCTAAAGAATATGGCTCTTATATGTTTTTGGGAGAATTAATTACCAATTTAGAGATCGAGCCAGACAAGCCTGTCGATTATGATTGTGGTGACTGTCGTCGTTGTCTAGATGCCTGTCCAACTTCTTGTTTAATTGGTGATGGCTCAATGAATGCCAAGCGTTGTCTATCATTTCAAACCCAAGATAAGGGAATGATGGACATAGAGTTTCGAAAAAAGATTAAAACAGTTATCTATGGTTGTGATATTTGCCAATTTGCTGTCCTTATAACAAAGGTATAAATAATCCATTGGCGACAGAGATTGATCCTGAGTTGGCTCAACCAGAATTAATACCATTTTTGAGTTTATCAAATGGACAATTTAAAGAAAAATTTGGTATGATTGCTGGAAGTTGGCGAGGTAAAAATATTTTACAGCGTAATGCCATTATTGCGCTAGCAAATGCTCATGATAAAACCGCAGTGGTCAAATTAATAGAGATTATTGATAAAAATAATAACCCTATTCATACTGCAACAGCTATATGGGCATTGGGAGAAATTGTCAAAAAACCAAACGATGAGATACTGGAGTTTATGAGTAATTTAACCTTAAAAGATGAAGATAGCCGAAAAGAGTTGGAATTAATCCGTCATAAATGGCAATTT

SEQ ID NO: 9850 - protein, 374 aa, Streptococcus agalactiae
MDIKAEIQKLAKEIGISKIGFTTADNFDYLEKSLRASVEEGRNSGFEHKVIEDRIYPERLLESAKTIISIGVAYPHKLPQQPQKTSYKRGKITPNSWGLDYHYVVGEKLDRLSKGIEELCRDFPLQQKAMVDTGALVDTAVAQRAGIGFIGKNGLVISKEYGSYMFLGELITNLEIEPDKPVDYDCGDCRRCLDACPTSCLIGDGSMNAKRCLSFQTQDKGMMDIEFRKKIKTVIYGCDICQICCPYNKGINNPLATEIDPELAQPELIPFLSLSNGQFKEKFGMIAGSWRGKNILQRNAIIALANAHDKTAVVKLIEIIDKNNNPIHTATAIWALGEIVKKPNDEILEFMSNLTLKDEDSRKELELIRHKWQF

SEQ ID NO: 9851 - protein, 978 aa, Streptococcus agalactiae
ATGACTGAGCCAGACTTTTGGAATGACAATATTGCAGCGCAAAAGACATCTCAAGAACTGAATGAGTTAAAAGGTAAGTATGATACTTTCCATAATATGCAAGAATTATCTGACGAAACAGAACTCTTACTTGAGATGCTTGACGAAGATGATTCTTTGAAAGAAGAATTAGAAGAAAATCTAATGCAGCTAGATAAGATAATGGGTGCTTATGAAATGACGCTTCTCTTATCTGAGCCTTATGACCACAATAATGCTATCTTAGAAATCCATCCTGGTTCAGGAGGAACTGAAGCGCAAGATTGGGGAGATTTACTCTTACGAATGTATACCCGTTTTGGCAATGCTAATGGTTTCAAAGTAGAAGTATTAGATTATCAAGCAGGGGATGAAGCTGGTATTAAATCGGTTACCCTCTCTTTTGAAGGCCCCAATGCTTATGGTTTGTTGAAATCAGAAATGGGAGTTCATCGCCTCGTTCGTATATCACCTTTTGATTCGGCTAAACGTCGTCATACCTCATTTGCTTCAGTTGAAGTGATGCCAGAGTTAGATGATACGATTGAAGTAGAAGTACGTGATGATGACATTAAAATGGATACTTTCCGTTCCGGAGGAGCTGGTGGTCAGAACGTCAATAAAGTATCAACAGGTGTTCGTTTGACGCATATTCCAACTGGAATTGTGGTATCGTCTACCGTTGACCGTACTCAATATGGGAACCGCGATCGCGCTATGAAGATGTTGCAGGCTAAGCTATATCAGTTAGAACAAGAAAAGAAAGCACAAGAAGTAGATGCTCTTAAGGGTGATAAAAAAGAAATCACTTGGGGAAGTCAGATTCGTTCTTATGTTTTCACCCCTTATACGATGGTGAAGGATCATCGTACTAACTTTGAGCTTGCTCAGGTAGATAAGGTTATGGATGGAGAAATCAATGGCTTTATTGATGCCTACCTTAAGTGGCGCATTGAAGAC

SEQ ID NO: 9852 - protein, 326 aa, Streptococcus agalactiae; identical to SEQ ID NO: 1064

SEQ ID NO: 9853 - protein, 690 aa, Streptococcus agalactiae; identical to SEQ ID NO: 5441

SEQ ID NO: 9854 - protein, 230 aa, Streptococcus agalactiae; identical to SEQ ID NO: 1066

SEQ ID NO: 9855 - protein, 927 aa, Streptococcus agalactiae; identical to SEQ ID NO: 5443

SEQ ID NO: 9856 - protein, 309 aa, Streptococcus agalactiae; identical to SEQ ID NO: 1068

SEQ ID NO: 9857 - protein, 708 aa, Streptococcus agalactiae; identical to SEQ ID NO: 5445

SEQ ID NO: 9858 - protein, 236 aa, Streptococcus agalactiae; identical to SEQ ID NO: 5446

SEQ ID NO: 9859 - protein, 696 aa, Streptococcus agalactiae; identical to SEQ ID NO: 5447

SEQ ID NO: 9860 - protein, 232 aa, Streptococcus agalactiae; identical to SEQ ID NO: 1072

SEQ ID NO: 9861 - protein, 762 aa, Streptococcus agalactiae; identical to SEQ ID NO: 5449

SEQ ID NO: 9862 - protein, 254 aa, Streptococcus agalactiae; identical to SEQ ID NO: 1074

SEQ ID NO: 9863 - protein, 2505 aa, Streptococcus agalactiae
ATGTTTTGTTTTATAGATATAGCGTGCTATAATAGACTTACTATGACCCAGAAAAAACTTAGAAAATATGCAGTAGTTGACTTGGAGGCTACTGGAGCAGGTCCCAATGCTTCTATTATTCAGGTTGGGATTGTTATTATCCAAGGAAATAAAATTATTGATAGTTATGAAACAGATGTTAATCCTCATGAATCTTTGGATGAGCATATTGTTCATTTGACAGGTATTACGGATAAGCAGTTGGCTAAAGCTCCGGATTTTGGTCAAGTGGCGCATCACATTTATCAATTGATTGAAGATTGTATTTTTGTTGCCCACAATGTAAAGTTCGATGCAAATTTATTGGCTGAGCAACTATTTTTAGAAGGCTGCGAGTTACGTACACCAAGGATAGATACAGTAGAATTATCACAAGTATTTTATCCCTGTTTAGAAAAATATTCTTTAGGGGCATTAGCAGAAAGCTTAAATATTGAATTAACAGATGCGCACACTGCTATTGCAGATGCAAGAGCTACAGCACAGTTATTCATTAAGTTAAAAGCTAAAATTAGTAGTTTACCTAAAGAAGTGTTGGAGACCATTTTAACATTTGCTGATAATCTTTTGTTCGAATCCTATTTATTGATTGAAGAAGCTTATCAAGAAGCTGATTTCGTTAATCCTAAAGAATATTATTTCTGGCAAGGATTGGTCTTAAAAAAAGAAAAAGCTGTTGGAAAGCCTAAGAAATTATCTAGTGATTTTCAAGTTAACATGGCTTTGTTAGGTATGGATGCTCGCCCTAAGCAAGTTGTTTTTGCTGACTTGGTTAAAGCGCATTTTAATGATCAAACAACAACGTTTTTAGAAGCTCAACCAGGACTTGGTAAAACATATGGTTATCTCTTGCCTTTATTGGATCAGTCTCAAAAACAACAAATAATAGTATCTGTTCCAACAAAGATTTTGCAAGATCAAATAATGGCTAAAGAAATAAAGCACATTCAAGAACTTTTTCATATTCCCTGTCACAGTATCAAAGGACCGAGAAATTACTTGAAGTTAGATGCGTTTTATAAGAGCCTCCAAGTGCAGGATCGAAATCGATTGATAAATCGTTTTAAAATGCAACTGCTAGTGTGGTTGACGGAAACGACTACAGGTGATTTGGATGAAATTAAACAAAAACAACGATTAGAATCTTACTTTGACCAGCTAAAACACGATGGAGAAGTGACTCAATCATCACTTTTTTATGATCTGGATTTTTGGAAACGCAGTTATGATAAAGTTGCACAAAGTCAACTTGTTATTATCAATCATGCTTATTTTCTTGAGCGTGTTCAGGATGACAAAGATTTTGCAAAGGGGAAGGTTTTAGTTTTTGATGAAGCTCAGAAACTTGTTTTGGGACTGGAAAATTTTTCTCGTGGGCAACTTGATATTAGTCACCAATTGCAGGTTATTCAAAAAATAATTGATAGTTCTATTCCATTATTACAAAAGCGCCTTCTGGAAAGTATCTCTTATGAGCTAAGTCATGCAGTAGAACTTTTTTATCGTCATAATTCTTTTGAATTTTCAGAGACCTGGTTGAAACGTCTAAAAAATAGTATAAACGCTTTAGAAGTAGTAGGATTAGATGAGTTACAAACTTTTTTCACAGCTACTTATACTAACTATTGGTTTGAAACTGACAAAGTCAATGAGAAGCGTTTAACCATTTTACGTGGGGCGAGAGAAGATTTTCTTAAATTTTCAAAGTTCCTCCCCCCCACAAAAAAGACCTATATGATATCAGCGACTTTACAAATCAGTCCCAAAGTCTACTTGTCAGATCTTTTAGGAGGATTTTCAAGTATAAGTACAGAAAAGATAGCGCATGAGAAAAATGCCAATCAGAAAGTATGGATTGATACCTCTATGCCCAATATACTTGATTTATCACCGGAACAGTATGCTTACGAAATAGCCAAGCGTTTACAAGATATAATGACGTTAAAGCAGCCTACCTTAGTCTTATTAACTTCTAAACAGACAATGTTTATGGTATCTGATTATTTGGATAAGTGGGAGATAAAACATCTTACTCAAGATAAAAATGGCTTAGCTTATAACGTTAAAAAACGTTTTGATCGTGGAGAAAGCAATCTTCTTTTAGGTACAGGATCTTTTTGGGAAGGTGTTGACTTTGTACATCGTGATCGTCTTATTGAAGTTATCACGCGATTGCCTTTTGATAATCCCAAAGACTATTTTATCCAGAAACTATCGCAGAGTTTAACAAAAGAGGGGAAAAACTTCTTTTATGACTATTCTTTACCAATGACTGTCTTAAAATTAAAACAGGCCTTGGGACGTACTACAAGGAGAGAAGAACAAAAGTCAGCGGTAATTATTTTGGATAGCAGATTGGTTATTAAATCTTATGGACAAACCATCATGCATTCTCTTGGTAGAGATTTTGAAATTTCTAAGGAAAAAATTAACAAGGTCTTGACTGAAATGGCTAAATTTTTGATA

SEQ ID NO: 9864 - protein, 835 aa, Streptococcus agalactiae
MFCFIDIACYNRLTMTQKKLRKYAVVDLEATGAGPNASIIQVGIVIIQGNKIIDSYETDVNPHESLDEHIVHLTGITDKQLAKAPDFGQVAHHIYQLIEDCIFVAHNVKFDANLLAEQLFLEGCELRTPRIDTVELSQVFYPCLEKYSLGALAESLNIELTDAHTAIADARATAQLFIKLKAKISSLPKEVLETILTFADNLLFESYLLIEEAYQEADFVNPKEYYFWQGLVLKKEKAVGKPKKLSSDFQVNMALLGMDARPKQVVFADLVKAHFNDQTTTFLEAQPGLGKTYGYLLPLLDQSQKQQIIVSVPTKILQDQIMAKEIKHIQELFHIPCHSIKGPRNYLKLDAFYKSLQVQDRNRLINRFKMQLLVWLTETTTGDLDEIKQKQRLESYFDQLKHDGEVTQSSLFYDLDFWKRSYDKVAQSQLVIINHAYFLERVQDDKDFAKGKVLVFDEAQKLVLGLENFSRGQLDISHQLQVIQKIIDSSIPLLQKRLLESISYELSHAVELFYRHNSFEFSETWLKRLKNSINALEVVGLDELQTFFTATYTNYWFETDKVNEKRLTILRGAREDFLKFSKFLPPTKKTYMISATLQISPKVYLSDLLGGFSSISTEKIAHEKNANQKVWIDTSMPNILDLSPEQYAYEIAKRLQDIMTLKQPTLVLLTSKQTMFMVSDYLDKWEIKHLTQDKNGLAYNVKKRFDRGESNLLLGTGSFWEGVDFVHRDRLIEVITRLPFDNPKDYFIQKLSQSLTKEGKNFFYDYSLPMTVLKLKQALGRTTRREEQKSAVIILDSRLVIKSYGQTIMHSLGRDFEISKEKINKVLTEMAKFLI

SEQ ID NO: 9865 - protein, 1191 aa, Streptococcus agalactiae; identical to SEQ ID NO: 5453

SEQ ID NO: 9866 - protein, 397 aa, Streptococcus agalactiae; identical to SEQ ID NO: 1080

SEQ ID NO: 9867 - protein, 1344 aa, Streptococcus agalactiae
ATGTCAAAAAAACTTATTTCAATTGTTGATGTTAAAGATTATGTTGGTCAAGAAGTTACTATTGGTGCTTGGGTTGCTAACAAATCAGGTAAAGGTAAGATTGCGTTTGTACAGTTGCGCGATGGTTCTGCCTTTTTCCAAGGTGTCGCTTTTAAACCAAACTTCATTGAAAAATATGGTGAAGAATCAGGTCTTGAAAAATTTGACGTTATTAAACGTCTCAACCAAGAAACATCTGTTTATGTAACAGGGATTGTTAAAGAGGATGAACGTTCAAAATTTGGCTATGAGCTTGATATTACTGACCTTGAAGTCATTGGAGAGTCACATGAATATCCTATAACTCCTAAAGAGCATGGGACAGACTTCTTGATGGACAACCGTCATCTTTGGTTGCGTTCTCGTAAACAAATGGCTGTTATGCAAATTCGTAACGCTATTATTTATTCAACTTATGAATTCTTTGACCAAAATGGTTTTATCAAATTTGATAGCCCAATTTTATCAGAAAATGCAGCAGAAGATTCAACAGAGTTATTTGAAACAGACTATTTTGGGAAACCAGCATTTCTTAGCCAATCTGGTCAATTATACCTTGAAGCTGGAGCAATGGCTCTAGGCCGAGTTTTCGACTTTGGTCCAGTCTTTCGTGCTGAAAAATCTAAAACACGTCGCCATTTAACAGAATTTTGGATGATGGATGCTGAGTATTCTTTCTTGTCACATGAGGAATCACTTGACCTCCAAGAAGCTTATGTTAAAGCATTGATCCAAGGCGTTCTAAATCGTGCGCCTCAAGCACTTGATATTTTAGAACGTGATGTTGAGGCTCTCAAACGTTATATCGCAGAGCCATTCAAGCGTGTTTCTTATGATGATGCTATTACACTTCTTCAAGAGCATGAAGCAGATGAAGATACAGATTATGAACATTTAGAGCATGGTGATGACTTTGGTTCACCACATGAAACTTGGATTTCTAATTACTTTGGAGTGCCGACATTTGTAGTGAATTACCCAGCAAGCTTTAAAGCATTTTATATGAAACCAGTTCCTGGAAATCCAGAACGCGTTCTTTGTGCTGATCTTCTAGCTCCAGAAGGTTATGGAGAGATCATTGGCGGCTCAATGCGTGAAGACGACTACGATGCTCTTGTGGCTAAAATGGATGAACTAGGTATGGATAAATCAGAATACGACTTTTACCTTGACCTTCGTAAATACGGCTCTGTTCCTCATGGCGGTTTTGGTATAGGTATTGAACGTATGGTAACTTTTGTTGCTGGTACCAAACATATTCGCGAAGCTATTCCATTCCCACGTATGTTACATCGTATCAAACCA

SEQ ID NO: 9868 - protein, 448 aa, Streptococcus agalactiae
MSKKLISIVDVKDYVGQEVTIGAWVANKSGKGKIAFVQLRDGSAFFQGVAFKPNFIEKYGEESGLEKFDVIKRLNQETSVYVTGIVKEDERSKFGYELDITDLEVIGESHEYPITPKEHGTDFLMDNRHLWLRSRKQMAVMQIRNAIIYSTYEFFDQNGFIKFDSPILSENAAEDSTELFETDYFGKPAFLSQSGQLYLEAGAMALGRVFDFGPVFRAEKSKTRRHLTEFWMMDAEYSFLSHEESLDLQEAYVKALIQGVLNRAPQALDILERDVEALKRYIAEPFKRVSYDDAITLLQEHEADEDTDYEHLEHGDDFGSPHETWISNYFGVPTFVVNYPASFKAFYMKPVPGNPERVLCADLLAPEGYGEIIGGSMREDDYDALVAKMDELGMDKSEYDFYLDLRKYGSVPHGGFGIGIERMVTFVAGTKHIREAIPFPRMLHRIKP

SEQ ID NO: 9869 - protein, 555 aa, Streptococcus agalactiae; identical to SEQ ID NO: 5457

SEQ ID NO: 9870 - protein, 185 aa, Streptococcus agalactiae; identical to SEQ ID NO: 1084

SEQ ID NO: 9871 - protein, 981 aa, Streptococcus agalactiae; identical to SEQ ID NO: 5459

SEQ ID NO: 9872 - protein, 327 aa, Streptococcus agalactiae; identical to SEQ ID NO: 5460

SEQ ID NO: 9873 - protein, 411 aa, Streptococcus agalactiae; identical to SEQ ID NO: 5461

SEQ ID NO: 9874 - protein, 137 aa, Streptococcus agalactiae; identical to SEQ ID NO: 5462

SEQ ID NO: 9875 - protein, 888 aa, Streptococcus agalactiae
ATGTCAGACGAACAAATCAAACTTGTGATTGTAACAGGTATGAGTGGGGCAGGAAAGACAGTGGCTATTCAGTCATTTGAAGATTTAGGATATTTTACAATAGATAATATGCCGCCTACTCTAGTGCCTAAGTTTTTAGAATTAGCAGCACAATCAGGAGATACAAGCAAGATTGCTATGGTAGTTGACATGCGTAGTCGTCTTTTCTTTAGAGAAATTAACTCTATTTTGGATAGCCTTGAAATTAATGATAATATTAACTTTAAGATTCTATTTTTAGATGCTACTGACACCGAGCTAGTGTCACGATATAAAGAGACACGTCGTAGCCACCCTCTTGCTGCCGACGGCAGAGTGTTAGATGGTATTTCTCTAGAGAGAGAACTATTAGCACCGCTTAAAAGTATGAGTCAGAACGTTGTGGACACTAGTGAATTAACACCAAGACAACTACGTAAGGTCATTTCTAAAGAATTCTCAAATCAAGATAGTCAAAGTTCTTTTCGTATCGAAGTTATGAGTTTTGGTTTTAAATATGGTATACCTTTGGATGCGGATTTAGTATTCGATGTGCGTTTTTTACCAAATCCATACTATAAACCAGAATTAAGAGATAAGACAGGTTTAGATACTGAGGTTTATGACTATGTCATGAGTTTTGATGAATCAGATGATTTTTATGACCATCTTCTTGCCTTAATAAAGCCAATCTTACCAGGCTATCAAAATGAAGGGAAATCTGTTTTGACTGTGGCAATCGGATGTACAGGTGGGCAACATCGTAGCACCGCTTTTGCTCATAGATTATCAGAAGATTTAAAAGCAGATTGGACAGTTAATGAAAGCCATCGTGATAAAAATAAGCGTAAGGAGACGGTAAATCGTTCA

SEQ ID NO: 9876 - protein, 296 aa, Streptococcus agalactiae; identical to SEQ ID NO: 1096

SEQ ID NO: 9877 - protein, 972 aa, Streptococcus agalactiae
ATGAGAAAACCTAAAATAACCGTTATCGGCGGAGGAACGGGAATTCCAGTTATTTTGAAAAGTCTTCGCTTAGAAGATGTTGAGATTACAGCGGTTGTCACGGTTGCAGATGATGGTGGTTCGTCAGGTGAGTTGCGCTCAGTTATGCAACTAACACCACCAGGAGATCTAAGAAATGTTTTGGTTGCCTTGAGTGATATGCCGAAGTTTTACGAACAAATTTTCCAATATCGTTTTGCAGAAGGTGATGGGGATTTTGCAGGTCATCCTTTAGGAAATCTTATTATTGCTGGTGTTGCTGAAATGCAAGGTTCAACTTATAACGCTATGCAGAGTTTAACACAGTTCTTTCATACAACAGGAAAGATATATCCATCTAGTGAACATCCGCTCACTCTGCATGCTGTTTTTAAAGATGGCCATGAAGTGGTTGGAGAGAGTCAAATAGCCGATTATAAAGGCATGATTGACCATGTGTATGTCACTAATACTTATAATGAAGAGACTCCTACGGCCAGCCGCAAAGTTGTTGATGCAATTTTAGAAAGTGATATGATTGTGTTGGGGCCAGGGTCACTTTTCACCTCTATTTTACCTAACCTAGTTATTCCAGAAATTAAACAAGCTCTTTTAGAAACTCGGGCAGAGGTAGCTTATGTATGCAATATTATGACACAACGTGGTGAAACTGAGCATTTTACAGACGCAGACCACGTTGAAGTATTGAAACGTCATTTAGGACAAGATGCTATCGATACAGTTTTGGTTAATATTGAAAAAGTGCCAGAGTCTTATATGGAAAACAATCATTTTGATGAGTATTTGGTACAGGTTGAACATGATTTTTCAGGGCTTAGAAAACATGCCAGACGTGTCATCTCGTCTAACTTTTTAAAATTAGAAAAAGGTGGAGCCTTCCATCATGGTGACTTCGTTGTTGAGGAACTAATGAATTTAGTAGGAACACATTTA

SEQ ID NO: 9878 - protein, 324 aa, Streptococcus agalactiae; identical to SEQ ID NO: 1098

SEQ ID NO: 9879 - protein, 909 aa, Streptococcus agalactiae
ATGAGTTTTACAGTAAAAGTCAAAGAAGAGCTGCTAGGTCATAAGAGTGAAAATAAGATGGAACTGTCAGCTATTATCAAAATGTCAGGTAGTTTAGGATTAGCTAACCACGGCCTTAACCTTTCTATTACTACAGAAAATGCTAAAATTGCTCGTCATATTTATAGCATGCTAGAAGAACATTATCATTTGCAGCCAGAAATCAAATACCATCAAAAAACGAACTTACGAAAGAATCGTGTGTATACTGTTTTTATTGAAGAAAAAGTTGATGTTATTCTTGCTGATTTGAAGTTGGCTGATGCTTTTTTTGGTATTGAAACTGGTATTGAACACTCTATATTGGACAATGATGAAAATGGAAGAGCTTATCTCAGGGGAGCATTCTTATCAACGGGTACTGTTAGAGAACCTGATTCTGGGAAATATCAACTAGAAATTTTTTCTGTTTATCTAGACCATGCACAAGACTTAGCTAATCTTATGAAAAAATTTATGTTAGATGCAAAGGTTATTGAACATAAACATGGAGCAGTAACTTATTTGCAAAAAGCAGAAGATATTATGGATTTCTTGATAGTCATTGATGCCATGGAAGCTAGAGATGCTTTTGAAGAGATTAAAATGATACGTGAGACACGTAATGATATTAATCGTGCTAACAACGTTGAAACAGCTAATATTGCTAGAACAATCACAGCTAGTATGAAGACTATCAATAATATTATCAAGATTATGGATACTATTGGTTTTGATGCACTGCCTAGTGATTTAAGACAAGTAGCTCAGGTGCGTGTGGCTCATCCAGATTACTCTATTCAACAAATAGCAGACAGTTTAGAAACGCCTCTGAGTAAGAGTGGCGTTAACCATCGCTTACGGAAAATAAATAAAATTGCAGATGAATTA

SEQ ID NO: 9880 - protein, 303 aa, Streptococcus agalactiae; identical to SEQ ID NO: 1100

SEQ ID NO: 9881 - protein, 1394 aa, Streptococcus agalactiae
ATGGCTTGTACAACAATATTGGTTGGTAAAAAGGCTTCTTATGATGGTTCGACTATGATCGCTAGAACGGAAGACTCTGTTAATGGCGATTTCACACCCAAAAAATTAAAGGTAATGACATCTAAAGATCAACCGCGTCATTACAAATCAGTTTTATCAAATTTTGAAGTAGATTTACCAGATAACCCACTTCCTTATACTTCAGTACGGACGCATTGGGAAAAGATGGTATATGGGGTGAAGCCGGTATTAACAGTAAAAATGTAGCGATGAGTGCTACAGAAACTATTACAACGAATTCCCGCGTTTTGGGTGCAGATCCTTTGGTTTCAGATGGTATAGGGGAAGAGGATATACTCACTTTAGTGCTTCCCTATATTCAGTCAGCGCGAGAAGGTGTGGAGCGTTTAGGTGCTATTTTGGAAAAATATGGAACCTATGAATCAAATGGTATTGCTTTTTCAGATACCGAAGAAATATGGTGGTTAGAAACAATTGGTGGGCATCATTGGATTGCTCGTCGCGTACCTGATGATGTTTATGTTACTAATCCTAACCAACTAGGAATTGATCATTTTGAATTTAATAACTGTGATGACTACATGTGCTCTAGTGATTTGAAAGAGTTTATCGAACAATACCATTTAGATTTGACCTATTCTAATGAGCATTTCAATCCTCGATATGCTTTTGGTAGCCAACGTGATAAAGATCGTCATTACAACACACCAAGAAGTTGGGCAATGCAGCGTTTTTTAAATCCTGAAATTGAACAGGATCCACGTAGCTTGTTTATTCCCTGGTGTCAAAAGCCTTACCGAAAAATTACTGTTGAGGATATTAAATATGTGTTGAGTGATCATTATCAAGACAGTGTGTATGACCCATATGGACCAGAAGGGGATGCGGTAAGTAGGAGAGCTTTTCGTTCAATTGGTATCAACCGAACTAGTCAAACGTCTATTCTACAATTACGACCAAATAAATCACTTGAAACGACAGGTGTTCAATGGTTATCTTATGGCTCTATGCCATTTGCAACCATGGTGCCGTTGTTTACACAAGTTGAGACTGTACCAAACTATTTTTCGAATACAACCAAGGATGCTTCAACAGATAATTTTTATTGGACCAATCGTTTAATTGCAGCTCTAGCAGATCCACACTTTTATCAACATGAAGCTGATATTGAAAGCTATATCGAGAGAACGATGGCTCAAGGACATGCACATATTAACGGTGTTGATAGAGAAGTTGCTGAGAATAAAGAGATTGATTTTCAACAGAAAAATCAAGAAATGAGTGACTATATCCAAAAAGAAAGCCAAGAATTGTTAAATCGTATTCTATTTGATGCAAGTAATTTAATGACAAATCGCTTTTCAATGGGAGAT

SEQ ID NO: 9882 - protein, 465 aa, Streptococcus agalactiae
MACTTILVGKKASYDGSTMIARTEDSVNGDFTPKKLKVMTSKDQPRHYKSVLSNFEVDLPDNPLPYTSVPDALGKDGIWGEAGINSKNVAMSATETITTNSRVLGADPLVSDGIGEEDILTLVLPYIQSAREGVERLGAILEKYGTYESNGIAFSDTEEIWWLETIGGHHWIARRVPDDVYVTNPNQLGIDHFEFNNCDDYMCSSDLKEFIEQYHLDLTYSNEHFNPRYAFGSQRDKDRHYNTPRSWAMQRFLNPEIEQDPRSLFIPWCQKPYRKITVEDIKYVLSDHYQDSVYDPYGPEGDAVSRRAFRSIGINRTSQTSILQLRPNKSLETTGVQWLSYGSMPFATMVPLFTQVETVPNYFSNTTKDASTDNFYWTNRLIAALADPHFYQHEADIESYIERTMAQGHAHINGVDREVAENKEIDFQQKNQEMSDYIQKESQELLNRILFDASNLMTNRFSMGD

SEQ ID NO: 9883 - protein, 1518 aa, Streptococcus agalactiae
ATGAGAAAGAAATTTCTTTTATTGATGAGCTTTGTAGCTATGTTTGCAGCTTGGCAACTTGTTCAAGTTAAACAAGTTTGGGCTGATAGTAAACTTAAAGTGGTAACAACTTTTTACCCAGTTTATGAGTTTACAAAAAATGTCGTTGGTGATAAAGCTGATGTATCTATGTTAATTAAAGCAGGTACAGAACCGCATGATTTTGAACCATCAACTAAAAACATCGCTGCCATCCAAGATTCAAATGCTTTTGTTTACATGGATGATAACATGGAAACTTGGGCTCCAAAAGTAGCTAAGTCAGTTAAATCCAAAAAAGTAACAACTATTAAAGGTACTGGCGATATGTTACTTACTAAAGGCGTCGAAGAAGAAGGTGAAGAACATGAAGGACATGGTCATGAAGGGCATCATCATGAACTTGACCCACACGTATGGTTGTCTCCAGAACGTGCGATTTCTGTTGTAGAAAACATCCGTAATAAATTTGTCAAAGCTTATCCAAAAGATGCAGCTTCATTTAACAAAAATGCAGATGCTTACATTGCAAAATTAAAAGAGCTTGACAAAGAATACAAAAATGGTTTGTCAAATGCTAAACAAAAGAGTTTTGTGACTCAACACGCAGCGTTTGGTTACATGGCGCTTGATTACGGTTTAAATCAAGTTCCAATTGCTGGTCTTACTCCAGATGCAGAACCTTCATCAAAACGTTTAGGCGAATTAGCTAAATACATCAAGAAATATAACATCAACTACATTTATTTTGAAGAAAATGCTTCAAATAAAGTTGCTAAAACTTTAGCAGATGAAGTTGGCGTGAAAACAGCTGTGCTTAGTCCACTTGAAGGACTTTCTAAAAAAGAAATGGCAGCTGGCGAAGATTACTTCTCAGTTATGAGACGTAATTTGAAAGTTCTTAAAAAGACAACAGATGTTGCAGGTAAAGAAGTAGCTCCTGAAGAAGATAAAACTAAAACAGTTGAAACAGGTTACTTTAAAACTAAAGATGTTAAAGACCGTAAATTGACAGATTACTCTGGTAATTGGCAATCAGTATATCCTCTTCTTCAAGATGGGACACTTGATCCAGTTTGGGATTACAAAGCTAAATCTAAAAAAGATATGACTGCTGCAGAGTACAAAAAATATTATACAGCAGGTTACAAGACTGACGTAGAATCAATCAAGATTGATGGTAAAAAACATCAAATGACCTTTGTACGTAATGGTAAATCACAAACATTTACATACAAATATGCAGGTTACAAAATCTTAACTTATAAAAAAGGTAATCGTGGAGTACGTTATCTCTTTGAAGCTAAAGAAAAAGATGCTGGTCAATTCAAATATATCCAATTTAGTGACCATGGTATTAAACCGAATAAAGCTGAACACTTCCATATCTTCTGGGGTTCAGAAAGCCAAGAAAAATTATTTGAGGAAATGGAAAACTGGCCAACATACTTCCCAGCTAAAATGTCTGGACGTGAAGTTGCCCAAGACCTTATGTCTCAT

SEQ ID NO: 9884 - protein, 506 aa, Streptococcus agalactiae
MRKKFLLLMSFVAMFAAWQLVQVKQVWADSKLKVVTTFYPVYEFTKNVVGDKADVSMLIKAGTEPHDFEPSTKNIAAIQDSNAFVYMDDNMETWAPKVAKSVKSKKVTTIKGTGDMLLTKGVEEEGEEHEGHGHEGHHHELDPHVWLSPERAISVVENIRNKFVKAYPKDAASFNKNADAYIAKLKELDKEYKNGLSNAKQKSFVTQHAAFGYMALDYGLNQVPIAGLTPDAEPSSKRLGELAKYIKKYNINYIYFEENASNKVAKTLADEVGVKTAVLSPLEGLSKKEMAAGEDYFSVMRRNLKVLKKTTDVAGKEVAPEEDKTKTVETGYFKTKDVKDRKLTDYSGNWQSVYPLLQDGTLDPVWDYKAKSKKDMTAAEYKKYYTAGYKTDVESIKIDGKKHQMTFVRNGKSQTFTYKYAGYKILTYKKGNRGVRYLFEAKEKDAGQFKYIQFSDHGIKPNKAEHFHIFWGSESQEKLFEEMENWPTYFPAKMSGREVAQDLMSH

SEQ ID NO: 9885 - protein, 282 aa, Streptococcus agalactiae
ATGGCAGAAAGGAAATTTTTAAAGATGAAAAAAGACATCCATCCAGATTATCGTCCAGTTGTTTTCTTAGATACAACTACAGGTTACAAATTCCTTAGTGGTTCAACTAAATCAACTAAAGAAACAGTAGAATTCGAAGGTGAAACTTACCCACTTATTCGTGTGGAAATCTCATCAGATTCACATCCATTCTATACAGGACGTCAAAAATTCACTCAAGCAGATGGACGTGTGGACCGTTTCAACAAAAAATATGGTCTCAAAGACGCAAACGCTGCTCAA

SEQ ID NO: 9886 - protein, 94 aa, Streptococcus agalactiae; identical to SEQ ID NO: 1108

SEQ ID NO: 9887 - protein, 933 aa, Streptococcus agalactiae
ATGATTATTTTTCAACAAATTCTTGATAAAATCAAAGAGTACGACACCATCATTATCCATCGACATATGAGACCAGACCCTGATGCTCTTGGTAGCCAAATCGGCTTAAGGGATATCATCAGGCATAATTTTCCAAAGAAAAAAGTACTTGCTACTGGTTTTGACGAACCCACTCTCGCTTGGATTGCTAAAATGGATCAAGTGACCGACCAAGACTATCAAGGCGCTCTTGTTGTTGTTACAGATACAGCAAATACCCCACGCATTGATGATGAACGTTATAAAAAAGGTGACTTTTTAATTAAAATTGACCATCATCCAAACGATGAAGTCTATGGAGATCTCTCTTATGTAGATACTAACGCCTCTAGTGCAAGTGAAATTGTGACAGACTTTGCTCTTTCTTGTGATTTGTTGTTATCAACAAGTGCAGCAAGAGTTCTATATAATGGTATTGTAGGAGATACAGGACGCTTTTTATATCCTGCTACCACAAGTAAAACACTGAAGATTGCTAGCAAACTTCGTGAATTTGACTTTGATTTTTCTGCAATGGCACGTCAAATGGATTCCTTTCCTTTCAAAATTGCAAAATTACAAGGCTTTATTTTTGAGCAACTTAAAATTGACAAGAACGGCGCTGCATGCGTTACTTTAACACAAGAAGACCTAAAACGCTTCGATGTAACAGATGCAGAGACTGCTGCAATCGTTGGTGTACCTGGAAAAATTGATATTGTAGAAAGTTGGGCAATTTTCGTTGAACAAAGCGATGGGCATTATCGTGTGCGCCTACGTAGTAAGTCACACATCATTAATGAAATAGCTAAACGTCATAATGGTGGCGGACATCCTTTAGCCAGCGGAGCTAATTCTTATAGTTTGGAAGAGAATCAAGCTATTTACCAAGAAATCCAGGAAATACTTTCTTTA

SEQ ID NO: 9888 - protein, 311 aa, Streptococcus agalactiae
MIIFQQILDKIKEYDTIIIHRHMRPDPDALGSQIGLRDIIRHNFPKKKVLATGFDEPTLAWIAKMDQVTDQDYQGALVVVTDTANTPRIDDERYKKGDFLIKIDHHPNDEVYGDLSYVDTNASSASEIVTDFALSCDLLLSTSAARVLYNGIVGDTGRFLYPATTSKTLKIASKLREFDFDFSAMARQMDSFPFKIAKLQGFIFEQLKIDKNGAACVTLTQEDLKRFDVTDAETAAIVGVPGKIDIVESWAIFVEQSDGHYRVRLRSKSHIINEIAKRHNGGGHPLASGANSYSLEENQAIYQEIQEILSL

SEQ ID NO: 9889 - protein, 1020 aa, Streptococcus agalactiae
ATGACACAAGCAGTATTAAAAGAATTGGCTAAGGCGGAGTTGCATTGTCATCTAGATGGCTCACTTTCTTTACCAGCTATTAGAAAATTGGCTAATATGGCTGATATAATACTGCCGAGTAGTGATAAAGAATTAAGAAAATATGTTATAGCTCCAGCTCAAACAGAAAGCTTGGTAGATTACCTTAAAACGTTTGAGTTTATCAGACCGCTTCTTCAAACGAAGGAAGCATTACGTTTTGCTGCTTATGATGTTGCTAGACAGGCAGCTTTAGAAAATGTTATTTATATTGAGATTCGTTTTGCGCCAGAACTCTCTATGGATAAAGGTTTAACTGCAAGTGATACAGTCCTTGCAGTCTTAGAAGGTTTAGCAGACGCTCAGAAAGAATTTAATATCGTTGCACGCGCCCTTGTTTGCGGTATGCGCCAATCGTCTCATAAAACGACCAAGGACATTATTAAACACATTGTTGATTTGGCTCCCAAAGGCCTGGTAGGTTTTGATTTTGCAGGTGATGAATTTTCCTATCCAACAGATAGTTTAGTAGATCTTATTCAGGAAGTAAAACGCTCAGGTTACCCGATGACTTTACATGCAGGTGAGTGTGGTTGTGCTAAGCATATTGCGGATAGTTTAAATTTAGGGATTAAGCGTATGGGACATGTGACAGCTTTAACAGGACAGAGGGATTTAATAAAGCGATTTGTCGAAGAAGATGCTGTAGCAGAGATGTGTTTAACTAGCAATTTACAAACAAAAGCAGCCTCAAGTATTCAAAGTTTTCCTTATCAAGAACTTTATGATGCTGGAGGTAAGATTACAATTAATACAGATAATCGTACTGTTTCCGATACAAATTTGACGAAAGAATATAGTCTTTTCGTAACTTATTTTGGAACGAAAATAGAAGACTTTCTTGTTTTCAATCAAAACGCTGTGAAGGCCTCCTTTACAAGTGATTCAGAGAAAGATACTTTACTACATAAGCTACAAGAAAACTATGACAGCTATCTAAAA

SEQ ID NO: 9890 - protein, 340 aa, Streptococcus agalactiae; identical to SEQ ID NO: 1114

SEQ ID NO: 9891 - protein, 440 aa, Streptococcus agalactiae
ATGGCTTTAGCAAAGATTGTTTATGCTAGCATGACCGGAAATACTGAAGAAATTGCTGACATTGTTGCTGATAAATTACGTGACTTGGGTCTAGATGTTGAAGTAGAAGAGTGTACGATGGTTGATGCTGCAGATTTTGAAGATGCTGACATTGCAATTGTTGCCACTTATACATATGGTGATGGAGATTTACCAGATGAATCGTGGACTTTTATGAAGATTTAGCAGAGGTTGATTTATCTGGTAAAGTTTACGGCGTAGTGGGTTCAGGTGATACTTTCTATGATTACTTCTGCAAATCTGTTGATGAGTTCGAGGCTCAATTCGCATTAACAGGAGCACAAAAAGGTGCTGATTGTGTTAAAGTTGATTTAGCGGCAGAAGACGAAGACATTGAAAACTTAGAAGCTTTTGCTGAAGAAATTGCTTCTAAACTTAAC

SEQ ID NO: 9892 - protein, 147 aa, Streptococcus agalactiae; identical to SEQ ID NO: 1116

SEQ ID NO: 9893 - protein, 924 aa, Streptococcus agalactiae
TTGGAAGCTCGTAAAGCATGGGACAAACTTGTTGGTCGTGAAGGTGAAGTTGTTACTGTTAAAGGTACACGTGCTGTTAAAGGCGGACTTTCAGTTGAATTTGAAGGACTTCGTGGTTTCATCCCAGCTTCAATGATTGATACTCGTTTTGTACGTAACACTGAAAAATTTGTTGGACAAGAATTTGATGCTAAAATCAAAGAAGTTGATGCAGCAGAAAATCGCTTCATCCTTTCACGGCGTGAAGTTGTTGAAGAATCTGCAGCTGCAGCACGTAAAGAAGTTTTCTCAAACATTGAAGTAGGTTCAGTTGTAACTGGTAAAGTTGCTCGTTTAACAAGCTTTGGTGCTTTCATTGACCTTGGTGGTGTTGATGGACTTGTACACGTAACTGAATTATCACATGAGCGCAATGTTTCACCTAAATCAGTTGTAACTGTTGGTGAAGAAGTTGAAGTTAAAGTACTTTCAATTGATGAAGAAGCTGGTCGTGTATCACTTTCACTTAAAGCAACTACACCTGGCCCATGGGATGGCGTTGAACAAAAACTTGCTGCTGGTGATGTTATTGAAGGTAAAGTAAAACGCTTGACTGACTTTGGTGCTTTTGTTGAAGTGTTACCTGGCATTGATGGACTCGTACACATTTCACAAATTTCACACAAACGTGTTGAAAATCCTAAAGACGTATTATCTGCAGGACAAGAAGTTACTGTTAAAGTTCTTGAAGTTAATTCAGATGCAGAACGTGTATCACTTTCAATGAAAGCTCTTGAAGAGCGTCCAGCGCAAGCAGAAGGTGAAAAAGAAGAAAAACGTCAATCACGTCCACGTCGTCCACGTCGTCAAGAAAAACGCGACTACGAGCTTCCAGAAACACAAACTGGATTCTCTATGGCTGACTTATTCGGTGATATTGAATTA

SEQ ID NO: 9894 - protein, 308 aa, Streptococcus agalactiae; identical to SEQ ID NO: 6786

SEQ ID NO: 9895 - protein, 789 aa, Streptococcus agalactiae
TTGTCTAAGATAAAAGGGTATTTCGATAAAGCCAAATTATCATCAATTAAACCAAGTCATTACCAAAAATTTATTAGTGATTATTTAAACCAGTATAACTGGCAAACTATTAAAATGATAAATACTCACATCAGACAATCAATAAAAATAGCTATCCATGAAGGTTATATTACTAAAGATTTCACTGCTTTCGTCATCCTTCCGAAACCAGATGATAGTAATGTAGATAGTAAACTTTTAGAGCTATCAGAATATCAAAAATTAATTTCAGAGACTAGTAAAGAAGTGAAATATAAGTCACATTTTTGTATTTATTTAATAGCAACAACTGGATTAAGATTTTCAGAGGCTATGGGATTGACTTGGAGCGATATAGATAGAGATGAGTTGCTACTACATGTCAACAAGACTTACAAAGTGTTTGGAAGTGATAAAGGATTTCAACCAACTAAAAATAAACACTCAATTAGATATGTACCAATAAATAACACAACTATCAAATTGCTAGATCAATATAGGTTGTTATTCAAAACAGAAACAAGGATATTTGAAGGAATATCAAATACAGCTGTCAACAAGACACTAAAAAAATTAGTTGGCAGAAATATACACATTCATTCCCTAAGACATACTTATGTGTCTCATTTAATATCAGAAGGAATCGACTTGTTTGCTATTTCCAAGATAGTTGGACACAAAGATTTAAATATCACACTAAGCACGTATGCTCATTTGCTGGAAGATACAAAAAACAAGAACAATGAAATTATTAGGGAATTATTTGGGGCA

SEQ ID NO: 9896 - protein, 263 aa, Streptococcus agalactiae
MSKIKGYFDKAKLSSIKPSHYQKFISDYLNQYNWQTIKMINTHIRQSIKIAIHEGYITKDFTAFVILPKPDDSNVDSKLLELSEYQKLISETSKEVKYKSHFCIYLIATTGLRFSEAMGLTWSDIDRDELLLHVNKTYKVFGSDKGFQPTKNKHSIRYVPINNTTIKLLDQYRLLFKTETRIFEGISNTAVNKTLKKLVGRNIHIHSLRHTYVSHLISEGIDLFAISKIVGHKDLNITLSTYAHLLEDTKNKNNEIIRELFGA

SEQ ID NO: 9897 - protein, 624 aa, Streptococcus agalactiae
ATGGAACAATCTGAAAAGAAAGTTTTGGCTATTATTGCAATTGTAATTGGCGCAATTGCGTTAATTAGCTCATGGATGCCATTCATTAATAACGGCTCGTTTGTTATCGCTATAATTGCGTTAATCATTGGAGTTTTTGCGTTATTTTTTAATAGAAAACGCAAAAAAACACTAACTTATGTTAGTATCATTATTTCAATTTTAGCAATGATAATTGTTCTAGTTACACAATCAATGTATGGTAAAGTGATTGATACCGCAAGCAAATCATTCGATAAAACATCTAAATCATACGAAACCTCTTATAGCAAGTCTTCTTCTATCGAAGCTTCTTCTTCTAGAGCAAAAGTTAAAAATGCGGACACTAAATTCAAATGGTCAGAATCTTATTTTAATTCGTTAGTCAAAGGTCAGACAACTTACGACGAAGTTGTTGCAAAAGTTGGGAAACCTAATAGCGTATCTGACAGCACGGACTACGATATCGAAACAGATGCTGAGGTACCTTCAAAAGATTGTGGTTGGGACTTGAATGATGGTTCGTACTATGCAAACGTATCTATTCATTTTATTCAAAAAAATGGCGTACTAGTTATTGATTCTAAATCAAGCAACGGATTAAAA

SEQ ID NO: 9898 - protein, 208 aa, Streptococcus agalactiae
MEQSEKKVLAIIAIVIGAIALISSWMPFINNGSFVIAIIALIIGVFALFFNRKRKKTLTYVSIIISILAMIIVLVTQSMYGKVIDTASKSFDKTSKSYETSYSKSSSIEASSSRAKVKNADTKFKWSESYFNSLVKGQTTYDEVVAKVGKPNSVSDSTDYDIETDAEVPSKDCGWDLNDGSYYANVSIHFIQKNGVLVIDSKSSNGLK

SEQ ID NO: 9899 - protein, 155 aa, Streptococcus agalactiae
GTGGAATGGACAAACTTAGATCAAAAGTATATAAAGAAGAAGACGGTTTAAGATTGGTATCTATAAATAAGAAGTACAAAGATAAATTTGCTAGTTGGAGTGAAAATCCAAGAATTATTGGAAAGATTGTTGGACACTTTACACCAGAAGAATAT

SEQ ID NO: 9900 - protein, 52 aa, Streptococcus agalactiae
MEWTNLDQKVYKEEDGLRLVSINKKYKDKFASWSENPRIIGKIVGHFTPEEY

SEQ ID NO: 9901 - protein, 165 aa, Streptococcus agalactiae
ATGAAAAACTCTCTGTATGATGAGCAATTAGACTATGATTTTGCTTCTTGGTTCTTCGGTGATTCAATGGAACCGGCTTATCTTAATGGCGAAGTTGCACTAATAAAGCAAACAGGTTTTGATTACGATGGAGCTATATACGCTATCGAGTGGAATGGACAAACT

SEQ ID NO: 9902 - protein, 55 aa, Streptococcus agalactiae
MKNSLYDEQLDYDFASWFFGDSMEPAYLNGEVALIKQTGFDYDGAIYAIEWNGQT

SEQ ID NO: 9903 - protein, 273 aa, Streptococcus agalactiae
TTGCTCAATGAAACAAGTACAAAGCAAGTCGAACTCTCAAAGGCTACAGGAATACCACCAAGCACTCTTACAGGTTATGTTAAAGGAACACCTTTACCTATTCCAGGTAACGTACAAAAAATAGCAGATTATTTTGAATTAATGAAGTCTGATATAGACCCAAGATTTGCTCCTCGTAAGAAAAATCATGAACTCAAAATTCCTACTTCTCCGCTCGTTAACAAAATTACTAAGGCGGTTGTAGAATTAAATGTTCACGCAAACAACAAGTAC

SEQ ID NO: 9904 - protein, 91 aa, Streptococcus agalactiae
MLNETSTKQVELSKATGIPPSTLTGYVKGTPLPIPGNVQKIADYFELMKSDIDPRFAPRKKNHELKIPTSPLVNKITKAVVELNVHANNKY

SEQ ID NO: 9905 - protein, 123 aa, Streptococcus agalactiae
GTGCTTAACAATGTATTGAAGAAAGTCCAAAACCATCAATTTGACGATGTGATACGAGCAACTTTCAAAGACATTATGACAGAATCTCGTGTTTATCAAAAGGAGAATATTGTAGACGGTGAT

SEQ ID NO: 9906 - protein, 41 aa, Streptococcus agalactiae
MLNNVLKKVQNHQFDDVIRATFKDIMTESRVYQKENIVDGD

SEQ ID NO: 9907 - protein, 1194 aa, Streptococcus agalactiae
GTGATTAAACGATTTGATAATTATGCTCAGTACGTACTTGTTTTAGGTTTTAGCTTACTAATTGGTGGTGTGGTTGGGGCTATTACAGCAGTCTTTGGACGTGTTCTATTATTCCTGACAGCCTTTAGAAGTGATTATATAGCTTACCTACTCCCTTTTCTTAGCATTGTTGGTTTATTTATAGTTTTTGTCTATCAAAAATTTGGGGGTAAGAGTGTTAAAGGGATGGGATTGGTATTTGAAGTAGGTCATGGTAATGAGGAGACTATTCCGAAACGTCTTGTTCCTCTCGTGATATTAACAACTTGGTTAACCCACTTATTTGGTGGTAGTGCAGGTCGTGAGGGGGTTGCTGTACAGATTGGGGCTACCGTTTCACACTACTTTCAAAAATATTGCCGTTTACAAAACGCTTCTCAACTTTTCCTAGTAATGGGAATGGCAGCAGGTTTTGCTGGTTTATTTCAGACTCCTTTAGCTGCTACTTTTTTTGCGATTGAAGTTTTGGTAGTAGGTCGTTTAATGGTTTCGTATGTATTACCAAGTTTAATTGCTGCCCTGACAGCAAATTTCGTCTCACATTCTTTAGGTTTAGAAAAATTTTCTCATAGTATAGCAACATCAATGGCGTTAACACCAGATATTATTCTAAAATTATTGGTTTTAGGACTATGTTTTGGTCTGTGTGGTAATTTATTTGCTTATTTATTGGCTAAAGCTAAATTAATTGCTTCTAGTAGGTTGCTAAACCCATATAAACGGATTTTCACACTTGGATTGTTAGCTACTTTTTTATTGTTTATCTTCCATTTTGGACGATATTCAGGACTGGGAACAAATCTAATTGAGGCTAGCTTCACTAATAAGAACCTTTATGATTATGATTGGTTGTTAAAATTGTGTTTGACAGTTATTACTTTGGCTGCAGGTTATCAGGGAGGAGAAGTAACTCCCTTATTTGCAATCGGAGCAAGTTTAGGAGTGATTATTGCGCCCATTTTAGGTTTGCCAGTTATTTTAGTTGCTGCTTTAGGCTATACTAGCGTTTTTGGGAGTGCAACGAATACTCTGTTAGGTCCTATCTTAATAGGAGGCGAAGTCTTTGGCTTTGCCAACACTCCTTATTTTGTTATTGTATGTCTTGTTGCTTACTCCATATCACATGCTCATACGATTTATGGTGCTCAATCTAGA

SEQ ID NO: 9908 - protein, 398 aa, Streptococcus agalactiae; identical to SEQ ID NO: 1120

SEQ ID NO: 9909 - protein, 345 aa, Streptococcus agalactiae
ATGAATCCATTAATTCAAAGTTTGACAGAAGGTCAACTTCGTTCTGATATCCCTGAGTTCCGTGCTGGTGATACTGTACGTGTTCACGCTAAAGTTGTCGAAGGTACTCGCGAACGTATTCAGATCTTTGAAGGTGTTGTTATCTCACGTAAAGGTCAAGGAATCTCAGAAATGTACACAGTACGTAAAATTTCTGGTGGTATCGGTGTAGAGCGTACATTCCCAATTCACACTCCTCGTGTTGATAAAATCGAAGTTGTTCGTTATGGTAAAGTACGTCGTGCTAAACTTTACTACTTACGCGCATTGCAAGGTAAAGCTGCACGTATTAAAGAAATCCGTCGT

SEQ ID NO: 9910 - protein, 115 aa, Streptococcus agalactiae; identical to SEQ ID NO: 1122

SEQ ID NO: 9911 - DNA, 507 bp, Streptococcus agalactiae
atgcgcttcgctgaatgtttaggtttaacagttaatgatattgattacactaacaaatatttatcaattaataaaacttgggattatcatttcaaccaaagatacctgccaacaaaaaacaaaagtagtatcagaaatataccaattgacaatgatacattattttttttgcatgaatttacaaaaaataaaaacgacagattattcgacaaactttcaaataatgcagtcaataaaactatccgaaaaataactggtcgcgaggtacgagtgcactctctcaggcatacatttgcaagctatctaatttccatctctcaagttttagatcacgagaatttaaatatcactttagaagtttacgcacatcaattacaagaacaaaaagataggaacgataaacttaatcagagaaatttggggcgaatttggggcaaaatagctctaaaccgctatttacatgcaatgaatatgtcccctgccggaatcgaaccagcaattactcct

SEQ ID NO: 9912 - protein, 169 aa, Streptococcus agalactiae
MRFAECLGLTVNDIDYTNKYLSINKTWDYHFNQRYLPTKNKSSIRNIPIDNDTLFFLHEFTKNKNDRLFDKLSNNAVNKTIRKITGREVRVHSLRHTFASYLISISQVLDHENLNITLEVYAHQLQEQKDRNDKLNQRNLGRIWGKIALNRYLHAMNMSPAGIEPAITP

SEQ ID NO: 9913 - DNA, 402 bp, Streptococcus agalactiae
ttgatatactccacattagctaaagaacagggtgttcaaggctaccttgatggaaaaggctctcttagagatatttgtaaatggtatgatatctcaagtcgctccgttctccaaaagtggataaaacggtatactagtggtgaagacttgaaagccactagtagaggatatagccgtatgaaacaaggaaggcaagccacatttgaagaacgtgtagagattgttaactacaccattgcccatgggaaagactatcaagcagctattgagaagtttggtgtttcctaccaacaaatttattcttgggtgcgtaagcttgagaagaatggctcacaaggtttggttgatagacgtgtgaaagggttggagagtaggcctgatttaaccgagattgagcaactt

SEQ ID NO: 9914 - protein, 134 aa, Streptococcus agalactiae; identical to SEQ ID NO: 5624

SEQ ID NO: 9915 - DNA, 198 bp, Streptococcus agalactiae
gtgcctattcaggccttatgccaactcttgaaggggtctcgttcaggctattacaagtggctcaatcgtcaaaaaacagattttgagacaaaaaatacaaagctaatggctaaaatcaaggaacttcatagactctacaatggtatcttaggttatcgccgtatgacaacatttattaatcgtcaacttgggacaact

SEQ ID NO: 9916 - protein, 66 aa, Streptococcus agalactiae; identical to SEQ ID NO: 1128

SEQ ID NO: 9917 - DNA, 258 bp, Streptococcus agalactiae
ttgatgaacattctggggattagttcagtcattcgtcgtgttagccatgcttgtacaaaagctggtgacagattttacgaagaaaatattcttaatcgtgaatttacagccacagctcataaccagaaatggtgcacagatgtcacctatcttcaatacggtctgggagctaaagcttatctcagtgcgattaaagacctgtataacggttctattatcgcttatgagattagtcacaacaatgaaatccacttgtta

SEQ ID NO: 9918 - protein, 86 aa, Streptococcus agalactiae; identical to SEQ ID NO: 1130

SEQ ID NO: 9919 - DNA, 207 bp, Streptococcus agalactiae
atgtcccggattggcaaatgtattgataatgcaccaactgaaagtttctttgggtttttcaagactgagtcttaccaccttaagaaatacaactcttatgatgagttggtcaatgatgtggcacgttatatcgaattctacaacacacaacgttatcaatcaaaattaaacaacctgactcctctagaattcaggaatcaggttgca

SEQ ID NO: 9920 - protein, 69 aa, Streptococcus agalactiae; identical to SEQ ID NO: 5630

SEQ ID NO: 9921 - protein, 159 aa, Streptococcus agalactiae
TTGGGCGGCATTGGAGCGCATAAATTTTACGCAGGAAAAATAGGCCAGGTTTTTTTATATATTATTTTTAGAATTACCTTTATTCCTGGAATTATCGACCTTATCGAAGCTTTGATGGCTCTCGGAAAACAAACTGATGAATATGGAAATATCATCGTT

SEQ ID NO: 9922 - protein, 53 aa, Streptococcus agalactiae
MGGIGAHKFYAGKIGQVFLYIIFRITFIPGIIDLIEALMALGKQTDEYGNIIV

SEQ ID NO: 9923 - protein, 1275 aa, Streptococcus agalactiae
GTGATAAAAAATGCTATAGCATATATTACCAGAAAAAAAAATAGAACACTTATTATATTTGCTATTTTAACAATTGTTCTTTCTTGCTTGTATTCATGTTTAACAATAATGAAATCAAGTAATGAAATAGAAAAGGCTTTATATGAAAGTTCTAATTCTTCAATATCAATTACAAAAAAAGATGGTAAATATTTTAATATTAATCAATTTAAGAATATTGAAAAAATAAAAGAGGTTGAAGAAAAAATATTTCAATATGATGGATTAGCAAAATTGAAAGATCTTAAAGTAGTTAGTGGTAAGCAAAGTATAAATAGAGAAGATTTATCTGACGAATTTAAAAATGTTGTTTCACTAGAAGCTACAAGTAATACTAAAAGAAATCTTTTATTTAGTAGTGGAGTATTTAGTTTTAAAGAAGGAAAAAATATAGAAGAAAATGATAAGAATTCAATTCTTGTTCATGAAGAATTTGCTAAACAAAACAAACTAAAATTGGGTGATGAAATTGATCTTGAATTACTAGATACGGAAAAAAGTGGAAAAATAAAAAGTCATAAATTTAAAATTATAGGAATCTTTTCTGGTAAAAAACAGGAAACATATACAGGATTATCATCTGATTTTAGCGAAAATATGGTTTTTGTAGATTATTCAACTAGCCAAGAAATATTAAATAAATCAGAGAATAATAGAATTGCAAATAAAATTTTAATGTATTCTGGTAGTTTAGAATCTACAGAGCTTGCCTTAAAGAAATTGAAAGACTTTAAAATTGATAAGTCAAAGTATTCTATTAAGAAAGATAATAAAGCATTCGAAGAGTCTTTAGAGTCAGTGAGTGGAATAAAACATATAATTAAAATAATGACTTATTCGATTATGTTAGGTGGAATAGTTGTTCTTTCATTAATCTTGATTCTATGGTTAAGAGAAAGAATTTATGAAATAGGTATATTTTTATCTATTGGAACAACTAAGATACAAATTATAAGGCAATTTATATTTGAGTTAATATTCATATCAATACCAAGTATAATATCCTCCTTATTTTTAGGGAATCTACTATTAAAAGTAATTGTAGAAGGATTTATTAACTCAGAGAACTCAATGATTTTCGGTGGAAGTTTAATAAATAAAAGCAGTTTTATGTTAAACATAACAACACTTGCAGAAAGTTATTTAATATTAATAAGTATTATTGTTTTATCAGTTGTAATGGCCTCTTCATTAATATTATTTAAGAAACCAAAAGAAATATTATCAAAAATAAGT

SEQ ID NO: 9924 - protein, 425 aa, Streptococcus agalactiae
MIKNAIAYITRKKNRTLIIFAILTIVLSCLYSCLTIMKSSNEIEKALYESSNSSISITKKDGKYFNINQFKNIEKIKEVEEKIFQYDGLAKLKDLKVVSGKQSINREDLSDEFKNVVSLEATSNTKRNLLFSSGVFSFKEGKNIEENDKNSILVHEEFAKQNKLKLGDEIDLELLDTEKSGKIKSHKFKIIGIFSGKKQETYTGLSSDFSENMVFVDYSTSQEILNKSENNRIANKILMYSGSLESTELALKKLKDFKIDKSKYSIKKDNKAFEESLESVSGIKHIIKIMTYSIMLGGIVVLSLILILWLRERIYEIGIFLSIGTTKIQIIRQFIFELIFISIPSIISSLFLGNLLLKVIVEGFINSENSMIFGGSLINKSSFMLNITTLAESYLILISIIVLSVVMASSLILFKKPKEILSKIS

SEQ ID NO: 9925 - protein, 654 aa, Streptococcus agalactiae; identical to SEQ ID NO: 5635

SEQ ID NO: 9926 - protein, 218 aa, Streptococcus agalactiae; identical to SEQ ID NO: 5636

SEQ ID NO: 9927 - protein, 1373 aa, Streptococcus agalactiae
ATGATAAAAAATGCATTTGCTTATGTAACTAGAAAAAGCTTAAAATCATTAATTATTATATTAGTTATTCTATCAATGGCAACTTTAAGCATCATTAGTTTATCTATTAAAGATGCCACAGATAGAGCTTCTAAGGAAACATTTGCTAATATAACAAACAGTTTTTCTATGGAAATAAATAGACAAGTAAATCCAGGAACACCTAGGGGTGGAGGAAATGTAAAAGGTGAAGATATTAAAAAGATATCTCAAACAAACAGTATAGACTCCTATGTAAAAAGAATAAACAGCGTCGCAGACCTAGTTGATCATGATATAATTGAAACTCAAGATACACTTGCAAATCAATCACCTGAAAGAGCAAAGAATTTTAAGAGAACAGTTATGTTAACAGGGGTTAATGACTCAGCAAAAGAAACAAAATTTGTATCAGAAGCATATAAGTTAGTAGAAGGAAAGCATTTAGAAAATAAAGATAAAAATAAAATTTTAATGCATAAAGATTTGGCAAAAAAAAACAATCTCAAAGTTGGAGATAAAATAAAAATAAAATCTAATTTGTTTGATGCTGACAATGAAAAAGTTGCAAATGAAACTGTAGAAGTAGAAATTAAAGGTTTATTTGATGGTCATAATAGCGGTGGGGTAAGTGCAGCACAAGAACTATACGAAAATACACTAATCACTGACGTTCATTCAGCTGCTAAAGTTTATGGTAATACAGAAGATACAGCCGTATACCAAGATGCAACATTCTTTGTAAAAGGTGATAAGAATCTTGATAGTGTAATAAAAGATCTTGGGAAACTAGATATAAATTGGAGAGAATATAATTTGATTAAAAGTTCATCAAATTATCCTGCGCTGCAACAATCTATATCCGGTATCTATTCTATTTCAAACAAATTATTTGTTGGCTCATTAATATTTGCAGGAGTTGTAGTTTCATTATTACTTTTCTTATGGATGAATGCCAGAAAGAAAGAAATAGCAGTATTACTATCATTAGGTATATCTAAATTAGAAATTTTTGGTCAATTTATAATCGAGATGGTATTTATATCCATTCCCGCACTTCTTGGATCTTATTTCTTAGCTCAATATACAGCTGATAAGCTAGGGAATAATATATTGAATAAAGTTACTGGCGATATAGCTAAACAAATAGCTAGACAATCTGCATCTAGTCAATTAGGCGGGGGGGCAGAAGCTGAAGGATTCAACAAGACTCTTTCAGGTTTAGATATAAATGTATTACCTAAATTCATAATTTATGTAGTTATATTTATGAGTTTTGTACTTCTTGTATCATGATTCTTTCTTCAATTTATACATTAAGAAAGAATCCAAAAGAGTTATTAATTGATAATAAT

SEQ ID NO: 9928 - protein, 458 aa, Streptococcus agalactiae; identical to SEQ ID NO: 5638

SEQ ID NO: 9929 - protein, 651 aa, Streptococcus agalactiae
ATGAAAATATTAACTGTTGAAGATGATAAGTTGATAAGAGAGGGAATAAGTGAATACCTTTCAGAATTTGGATATACTGTTATTCAGGCTAAAGATGGAAGGGAAGCCTTGTCAAAATTTAATAGTGATATAAACTTGGTTATCTTAGACATTCAGATACCTTTTATAAATGGTTTAGAAGTGTTGAAAGAAATTAGAAAGAAAAGCAATTTACCAATTCTAATTTTGACTGCATTTAGTGATGAAGAATATAAAATTGATGCATTTACTAATTTAGTAGATGGATATGTAGAAAAACCATTTTCATTGCCTGTTTTAAAGGCTAGAATAGATTCTTTAATTAAGAAGAATTTTGGACATTTAGAGAAGTTTGAATATAAGAATCTTTCGGTAAATTTTAATAGTTATACAGCTAAAATAAATGATGAAAAAATAGATGTAAATGCAAAAGAACTCGAAATACTAAAATGTTTATTGGATAATGATGGACAAGTTTTAACAAGAATGCAAATTATTGATTATGTCTGGAAGGATAGCGAAGAGATCCCTTATGATCGAGTAGTAGATGTATATATAAAAGAACTTAGAAAAAAATTACAATTAGACTGTATAACTACTATAAGAAATGTAGGATATAAATTGGAGAGAAAA

SEQ ID NO: 9930 - protein, 217 aa, Streptococcus agalactiae; identical to SEQ ID NO: 1146

SEQ ID NO: 9931 - DNA, 1299 bp, Streptococcus agalactiae
atgaagaaattaaaaatattcccaaaaatgttcatacaaatattttctattcttggaatactaattatattagttcattcattattcttttttatctttcctaaaacatatttggagacgaggaaagtaaaaatccacattatggcagatgaaatttctaaaaatatgaatggaaaagagttaaaatatttagaccaaactttggagctttattctaaaagtagtgacataaaggtatttataaaaaaaaataataacaaaaatgaattacaaataaatgataatataaatgttaatgtaaaaagtgatagtaattctttaataattgaagaaagggaaattaaacttcatgatggcaaaaaaatacatcttcaatttgtttcaacagctgatatgcaaaaagacgcgaaagacttgagccttaagtttttaccatattctttatcgatatcatttcttttttccattgttatttctttaatttatgctaaatctataaaaaacaatatacaagaaataactatggttactgataaaatgataaaacttgacaaagaaacaagattgaaaattagttctaatgatgaaattggacaactaaaacagcaaatcaatgacttatattgtgctttattgaatacaattaatgatttggaatttaaaaataaggaaattttaaagttagaaaaattgaaatatgatttttttaagggggcgtcccacgaacttaaaactcctctttccagcctaaagatattacttgagaatatgaaatataatatcggaaaatataaagatagagacttttatatcagtgagtgtattaatattgtagataacttaacaaagaatgtctcgcaaatattatctttttattctataaaagacttgaataatgatgaagaatatttaaatgttggtgatacattagatgaagtattagaaaaatactctatcttagtaaatcaaaaaaaaataaatattaataaggaattattagactataatatttatataggaaaaacggcactaaatattgtattttctaatttgattagcaatgcagtaaaatatactaatcgaaatggaataattaatatcaaaatagctaatgattggttacttatagaaaactcatatgataaaaataaaattttagatgctagttttgatctaaaattggataatagtaatggattaggattaaatatagtaaagaatatacttaataagtataatataaagtatgaaatattacatggtgaaaattattttatatttaaaataaaaataatctct

SEQ ID NO: 9932 - protein, 433 aa, Streptococcus agalactiae
MKKLKIFPKMFIQIFSILGILIILVHSLFFFIFPKTYLETRKVKIHIMADEISKNMNGKELKYLDQTLELYSKSSDIKVFIKKNNNKNELQINDNINVNVKSDSNSLIIEEREIKLHDGKKIHLQFVSTADMQKDAKDLSLKFLPYSLSISFLFSIVISLIYAKSIKNNIQEITMVTDKMIKLDKETRLKISSNDEIGQLKQQINDLYCALLNTINDLEFKNKEILKLEKLKYDFFKGASHELKTPLSSLKILLENMKYNIGKYKDRDFYISECINIVDNLTKNVSQILSFYSIKDLNNDEEYLNVGDTLDEVLEKYSILVNQKKININKELLDYNIYIGKTALNIVFSNLISNAVKYTNRNGIINIKIANDWLLIENSYDKNKILDASFDLKLDNSNGLGLNIVKNILNKYNIKYEILHGENYFIFKIKIIS

SEQ ID NO: 9933 - DNA, 609 bp, Streptococcus agalactiae
atgaagaatatggcgctccctaaaatggctaccgttaagacaaaaacagctcttaaaaagactcaaaaaacgtatcctcaaaacttactcaaccagaaatttaatcctgataaacctaatcaagtatggtctactgacttcacctatatttctattggatataagaaatatgtctatctctgcgcaataattgatctctattctagaaaatatattgcttggaaattgagtcatcgtatggatgcaaagttagcatgtgacactctagaattagctcttaataaaagaaagattgaaggaacacttctctttcattccgaccaagggtcacaatttaaggccagggaatttagaaaaataattgatgacaacaatatcatgcattctttttctaaacctagatatccttatgataatgccgtaactgaagcatttttcaagtatttaaagcatagacaaatcaaccaaaaaaattatcaaaatatcaaacaggttcaattagactgctttgaatacattgagaatttttataacaattacatcccacatacggctaatctaggactaacccctaatcagaaagaagaaaattattttaacgcaataaaa

SEQ ID NO: 9934 - protein, 203 aa, Streptococcus agalactiae
MKNMALPKMATVKTKTALKKTQKTYPQNLLNQKFNPDKPNQVWSTDFTYISIGYKKYVYLCAIIDLYSRKYIAWKLSHRMDAKLACDTLELALNKRKIEGTLLFHSDQGSQFKAREFRKIIDDNNIMHSFSKPRYPYDNAVTEAFFKYLKHRQINQKNYQNIKQVQLDCFEYIENFYNNYIPHTANLGLTPNQKEENYFNAIK

SEQ ID NO: 9935 - DNA, 177 bp, Streptococcus agalactiae
atgtcacaagaaaaactaaaatcaaaattagatcaagcaaaaggtggtgctaaagaaggctttggcaaaataaccggtgataaagagttagaagcaaaaggatttatcgaaaaaacaattgctaaaggcaaagaactagcagatgatgctaaagatgctgtcaaagaaaaactgaag

SEQ ID NO: 9936 - protein, 59 aa, Streptococcus agalactiae
MSQEKLKSKLDQAKGGAKEGFGKITGDKELEAKGFIEKTIAKGKELADDAKDAVKEKLK

SEQ ID NO: 9937 - DNA, 186 bp, Streptococcus agalactiae
ttgtctatcagaacagatatagatgagtttaaagaagcgattgataaaggctatatttcagggaacacagtagcgatagtgcgtaaaaacggaaagatatttgattatgtgttactacacgaagaagtgagagaagaagaggttgttacagttgagagagtgcttgatgtactgaggaagttatca

SEQ ID NO: 9938 - protein, 62 aa, Streptococcus agalactiae; identical to SEQ ID NO: 5654

SEQ ID NO: 9939 - DNA, 1203 bp, Streptococcus agalactiae
atgtcacaaaaatcaaactattttaaagggcaaattgattatgctgttgtgataccagtattttttttattaatgattggtttagcctcaatttatgttgcaacgatgaatgattatccttctaatatctatatcgcgatgtttcagcaggtgtcttggattattatggggtgtattattgcatttgtcgttatgcttttcagtactgaatttttatggaaagccacgccctatctgtatgctttaggactaaccctaatggttcttcccttaattttttatagtccacagctttttgcggcaacaggtgctaaaaattgggtgaccattggctcggtaactttgtttcaaccgtcagagtttatgaagatttcctatattttaatgttatctcgaataactgttagttttcatcagaaaaatcgcaaaacttttcaagatgattggaagttgctaggattgtttggtttggttacattgccagtgatgattcttctaatgttacaaaaagatttaggaacagcattagttttccttgccattttgtcaggtttaatccttttatcgggcatatcttggtggataatcttgccaattttatctactatcgttctttttatagctagctttttgatgatttttatctcaccaaacggcaaggaatggttttataatttggggatggatacatatcaaatcaaccgtttatctgcttggattgatccatttagttttgcagactcaattgcttatcaacaaacacagggtatggtatcaattggaagtggcggggtaacaggtaaaggttttaatattttagagctctcggttcctgttcgtgaaagtgacatgatttttactgtcattgctgagaattttggcttcattggttcggcgattgttttagggttatatctcattatcatttaccgtatgttaaggatcaccattgaatctaataatcaattttatacttttatatcaactggttttatcatgatgattgttttccatgtttttgaaaatattggtgcagcagttggtatattacctctaacaggaatcccacttccgtttatttcgcaaggtggaagttcattactaagtaatcttattggaattggattggtcttatccatgtcttatcaaaatacagttcgtcaggccaaggctaatggatcacatttgaagtatcgtagtata

SEQ ID NO: 9940 - protein, 401 aa, Streptococcus agalactiae; identical to SEQ ID NO: 1152

SEQ ID NO: 9941 - protein, 558 aa, Streptococcus agalactiae; identical to SEQ ID NO: 5657

SEQ ID NO: 9942 - protein, 186 aa, Streptococcus agalactiae; identical to SEQ ID NO: 1154

SEQ ID NO: 9943 - protein, 1859 aa, Streptococcus agalactiae
ATGCGTCCAGGCATGTATATCGGTTCGACTTCGAAAGAAGGGCTTCATCACCTTGTATGGGAAATTGTTGATAACTCAATTGATGAAGCCTTAGCTGGATTTGCAGGACATATTAAAGTTTACATTGAACCAGATAACTCTATTACAGTTGTTGATGATGGTCGCGGTATTCCGGTAGATATCCAAGAAAAAACTGGAAGACCAGCTGTAGAGACAGTTTTTACAGTTCTCCATGCCGGTGGTAAATTTGGTGGTGGCGGATACAAGGTTTCTGGTGGCTTACATGGTGTAGGGTCATCTGTTGTTAATGCATTGTCAACACAATTAGATGTCAAGGTTTATAAAAATGGCAAGGTTCATTATCAAGAATACCAACGCGGTGTTGTTGTTAATGATCTTGAAATTATCGGTGATACTGACTTATCAGGAACAACAGTTCACTTTACGCCTGACCCAGAAATTTTCACTGAAACCACTGTATTTGATTTTGATAAATTAGCCAAACGTATTCAGGAATTAGCTTTTTTAAATCGTGGACTAAGAATCTCCATTTCAGACAAGCGAGAAGGTCAAGAAGTTGAAAAAGAATATCACTATGAAGGTGGTATAGGTTCATACGTTGAGTTTATCAATGAGAACAAAGAAGTGATTTTTGAAAATCCTATTTATACTGACGGTGAATTAGATGGTATTTCAGTTGAAGTAGCAATGCAGTATACTACTGGATATCAAGAGACTGTTATGAGTTTTGCAAATAACATCCACACTCATGAAGGAGGAACGCACGAACAAGGATTTCGTACTGCCTTGACACGTGTGATTAATGATTACGCTAAAAAGAATAAGATTCTCAAAGAAAATGAAGATAATTTAACTGGAGAAGATGTTCGTGAAGGTTTAACAGCAGTTATATCTGTTAAACATCCAAATCCACAATTTGAAGGACAAACTAAAACAAAACTTGGAAATTCTGAAGTTGTTAAAATTACAAATCGTCTCTTTAGCGAAGCTTTCAATCGATTCCTATTAGAAAATCCACAAGTAGCTAAGAAGATTGTTGAAAAAGGAATTTTGGCATCTAAAGCCCGTATTGCAGCAAAACGGGCGCGTGAAGTAACACGTAAAAAGTCAGGCTTAGAGATTTCAACTTACCTGGGAAACTGGCTGATTGCTCATCTAATAATGCTGAGATGAATGAACTTTTTATAGTGGAGGGAGATTCTGCGGAGGGGTCTGCAAAATCAGGACGTAATCGTGAGTTTCAAGCAATTTTACCGATTAGGGGTAAGATTCTAAACGTTGAAAAAGCTACAATGGATAAAATTTTAGCAAACGAAGAAATCCGAAGTCTCTTCACAGCTATGGGAACTGGATTTGGTGCAGATTTTGATGTATCAAAAGTCAGATATCAAAAATTAGTCATTATGACTGATGCCGATGTTGATGGAGCTCACATCAGAACTTTACTTTTAACTCTGATTTATCGTTTTATGCGACCTGTTTTGGAAGCAGGATATGTTTATATCGCTCAACCACCAATCTATGGTGTCAAAGTAGGAAGTGAGATTAAAGCTTATATTCAGCCAGGGGTCAATCAAGAAGAGGAATTACGTCAAGCTCTAGATACCTATAGTTCAGGACGTTCAAAACCTACTGTACAACGTTACAAAGGTCTAGGTGAGATGGATGACCATCAACTTTGGGAAACAACAATGGATCCTGAAAACCGCTTGATGGCACGTGTCTCAGTTGATGATGCAGCAGAAGCAGATAAGATTTTCGATATGCTAATGGGAGATCGAGTAGAACCACGACGTGAATTCATTGAAGCTAATGCTGTTTATAGTAACTTAGATATC

SEQ ID NO: 9944 - protein, 620 aa, Streptococcus agalactiae
MRPGMYIGSTSKEGLHHLVWEIVDNSIDEALAGFAGHIKVYIEPDNSITVVDDGRGIPVDIQEKTGRPAVETVFTVLHAGGKFGGGGYKVSGGLHGVGSSVVNALSTQLDVKVYKNGKVHYQEYQRGVVVNDLEIIGDTDLSGTTVHFTPDPEIFTETTVFDFDKLAKRIQELAFLNRGLRISISDKREGQEVEKEYHYEGGIGSYVEFINENKEVIFENPIYTDGELDGISVEVAMQYTTGYQETVMSFANNIHTHEGGTHEQGFRTALTRVINDYAKKNKILKENEDNLTGEDVREGLTAVISVKHPNPQFEGQTKTKLGNSEVVKITNRLFSEAFNRFLLENPQVAKKIVEKGILASKARIAAKRAREVTRKKSGLEISNLPGKLADCSSNNAEMNELFIVEGDSAEGSAKSGRNREFQAILPIRGKILNVEKATMDKILANEEIRSLFTAMGTGFGADFDVSKVRYQKLVIMTDADVDGAHIRTLLLTLIYRFMRPVLEAGYVYIAQPPIYGVKVGSEIKAYIQPGVNQEEELRQALDTYSSGRSKPTVQRYKGLGEMDDHQLWETTMDPENRLMARVSVDDAAEADKIFDMLMGDRVEPRREFIEANAVYSNLDI

SEQ ID NO: 9945 - protein, 1722 aa, Streptococcus agalactiae
ATGTCGAGCGGAATCATATTGCTGCTTGTGGCTATAGTCCTGCTTGTGATTATTGCCTACATAGTCGGCGTCGTAATAAGAAAACGTAATGATACATTAATTGCAAACTTAGAAACTAGAAAACAAGAGTTAGTTGACCTTCCTGTGCAAGAGGAGATTGAGCAAGTCAAATTGCTTCATTTGATTGGCCAAAGTCAATCAACTTTTAGAGAATGGAACCAAAAATGGACTGATTTATCAACTAATTCATTTAAAGATATTGATTTTCATTTAGTTGAAGCTGAAAATCTTAATGATTCATTTAATTTTGTGCGTGCTAAGCACGAGATTGATAATGTTGATAGTCAGCTAACTATTATAGAAGAAGATATTGTTTCGATTCGTGAAGCTTTAGAAGTTTTAAAAGAGCAAGAAGAGAAAAATAGTGCCCGTGTAACACATGCTTTGGACCTATACGAAACACTTCAAAAATCAATTTCTGAAAAAGAAGATAATTACGGGACAACCATGCCAGAAATTGAAAAGCAGTTGAAAAATATCGAGGCTGAATTTTCACATTTTGTGACCTTAAACTCAACTGGTGACCCGATTGAAGCTTCTGAAGTTTTGAATAAAGCAGAGGAGCATACGATTGCTTTAGGGCAAATTACAGAACAAATTCCAGCTATTGTTGCTAAATTAGAAGACGATTTTCCAGATCAGTTAGATGATTTGGAGACAGGATATCGTCGTCTTTTAGAGGAAAACTACCATTTCCCTGAAAAGGATATTGAACAACGTTTTCAAGAAGTTCGTGAGGCTATTCGTTCGAATTCAGATGGTTTAGTTAGTTTGGATCTAGATCGTGCTCGCGATGAAAATGAACATATTCAAGAAAAAATTGATAAACTTTATGATATTTTTGAACGTGAGATTGCTGCTTATAAAGTAGCTCATAAGGATAGTAAAATTATTCCTCAATTCCTTGCTCATGCAAAATCTAACAATGAACAACTGGGGCATGAAATCAAACGATTATCTGCTAAATATATCTTAAATGAAAATGAAAGCTTAAGTTTACGTTCCTTCACAAATGATTTGGAAGAAATTGAAACAAAGGTTTTACCTTCTGTAGAAAATTTTGGTCAAGAAGCTTCACCTTATACTCATCTACAAATTTTATTTGAGCGTACGTTGAAAACATTGACTACTGTTGAAGAAAATCAAATGGAAGTTTTTGAAGCCGTTAAAACTATTGAAAGCGTTGAGACACGAGCACGCCAAAATATGGATAAGTATGTTAACAAGCTCCATATGATTAAACGTTTCATGGAAAAACGCAATCTTCCAGGAATCCCGCAAGACTTCTTAAGCACTTTCTTTACAACAAGTTCTCAAATTGAGGCACTTATTAATGAACTCAGTCGCGGTCGTATTGATATTGAGGCTGTTTCACGTTTAAATGATGTGACTACAAATGCTATCGCTAATTTAGAGCAAGCTACATATCTAGTTGTTCAAGATGCGACTCTCACAGAGCAGTTACTACAGTATTCAAACCGTTATCGTAGTTTTGAACAAAATGTGCAAAAGAGCTTTGAACAAGCTTTGTACTTATTTGAAGTTGAACATAACTATAAAGCATCTTTCGATGAAATTTCATACGCACTTGAGACTGTGGAACCAGGTGTAACTGACCGTTTTGTGACGTCTTATGAAAAGACACAAGAACGTATTCGTTTC

SEQ ID NO: 9946 - protein, 574 aa, Streptococcus agalactiae
MSSGIILLLVAIVLLVIIAYIVGVVIRKRNDTLIANLETRKQELVDLPVQEEIEQVKLLHLIGQSQSTFREWNQKWTDLSTNSFKDIDFHLVEAENLNDSFNFVRAKHEIDNVDSQLTIIEEDIVSIREALEVLKEQEEKNSARVTHALDLYETLQKSISEKEDNYGTTMPEIEKQLKNIEAEFSHFVTLNSTGDPIEASEVLNKAEEHTIALGQITEQIPAIVAKLEDDFPDQLDDLETGYRRLLEENYHFPEKDIEQRFQEVREAIRSNSDGLVSLDLDRARDENEHIQEKIDKLYDIFEREIAAYKVAHKDSKIIPQFLAHAKSNNEQLGHEIKRLSAKYILNENESLSLRSFTNDLEEIETKVLPSVENFGQEASPYTHLQILFERTLKTLTTVEENQMEVFEAVKTIESVETRARQNMDKYVNKLHMIKRFMEKRNLPGIPQDFLSTFFTTSSQIEALINELSRGRIDIEAVSRLNDVTTNAIANLEQATYLVVQDATLTEQLLQYSNRYRSFEQNVQKSFEQALYLFEVEHNYKASFDEISYALETVEPGVTDRFVTSYEKTQERIRF

SEQ ID NO: 9947 - protein, 639 aa, Streptococcus agalactiae; identical to SEQ ID NO: 5665

SEQ ID NO: 9948 - protein, 213 aa, Streptococcus agalactiae; identical to SEQ ID NO: 1162

SEQ ID NO: 9949 - protein, 482 aa, Streptococcus agalactiae
ATGGAAATTTGGGATGCTTATGACCAATATGGGTTCATTACAGGTCTTACACTTAATAGGGATCAAAATATCCCACAAGGCTTATTCCACTTAGTTGTTGATGTTATCCTTTTTCATGAGGATGGTGACGTATTGATGATGAAACGGCACCCTAAAAAGAAAGCTTTTCCTGCTTATTTCGAAGCCACCGCTGGCGGATCTGCCCTTAAAGGAGAAATGCTAAGCAAGCTATTCTAAGGGAACTCAAAGAAGAAACTGGTATCGTTCCTCAATGTCTAACCTTTCTTAATAGAGAGTGGTTCTCTGAGCGTTCTTACTTTGTAGACCATTTTATCGCAAAATATAATGGTGCAAAAGATATAATTACATTGCAAGAAGGAGAGACCGTTGACTATATCTGGTTAAAACCAGAATATATTGATTTATTTTTATCTAAAAACAAATTAATACCCTCTCAAATAAAACTCTTAAAATCCTTAATC

SEQ ID NO: 9950 - protein, 161 aa, Streptococcus agalactiae; identical to SEQ ID NO: 1164

SEQ ID NO: 9951 - DNA, 453 bp, Streptococcus agalactiae
atgactgaacttgacaataaaatcctacaaaaagcaagtggtgaaaatcgtcttgatcctgatcaacaacgttactaccttggtacttataaagaaagagttgtgctccacttaagtttaaaagaggcacaagaagaaaagtttcaacttgctataacatctgctcttaataatctgatacttgaatatcctaatcttagtttaaaattatcaccaaatctccctactgatgttcaaatgttctacatgaagttagctaaccgtctatcactagctgctacgattgttaatgaagcaaatgccaattctccatttggtattattatacatagtgataagactgaaaacgttgaatggaacgattttgagacacaattccctgatttattcaattcaccaaaaaaagaggagtctcctaaaaaaagtctatggcaacatttctttagtcaaaaa

SEQ ID NO: 9952 - protein, 151 aa, Streptococcus agalactiae
MTELDNKILQKASGENRLDPDQQRYYLGTYKERVVLHLSLKEAQEEKFQLAITSALNNLILEYPNLSLKLSPNLPTDVQMFYMKLANRLSLAATIVNEANANSPFGIIIHSDKTENVEWNDFETQFPDLFNSPKKEESPKKSLWQHFFSQK

SEQ ID NO: 9953 - DNA, 1305 bp, Streptococcus agalactiae
atgtcaattattactgatgtttacgcacgcgaagtccttgactcacgcggtaacccaacacttgaagtagaagtttatacagaatcaggtgctttcggacgtggtatggttccttcaggagcttctactggtgaacacgaagcagttgaacttcgtgacggcgacaagtctcgttacggtggtcttggaacacaaaaagctgttgacaacgtaaacaacgttattgcagaagcaatcattggttatgatgtacgcgaccaacaagctatcgaccgtgctatgatcgctcttgacggaactcctaataaaggtaaattaggtgcaaatgctattcttggtgtttctattgccgtagcacgtgctgcagctgattaccttgaagtaccactttacagctaccttggtggattcaacactaaagttcttccaactccaatgatgaacatcatcaacggtggttctcactcagacgctccaatcgcattccaagaattcatgattatgccagttggtgcaccaactttcaaagaagcacttcgttggggtgctgaagtattccatgctcttaagaaaatccttaaagaacgtggtcttgaaacagctgttggtgatgaaggtggatttgcacctaaatttgaaggtactgaagatggtgtagaaactattcttaaagctattgaagcagctggttacgaagctggcgaaaatggaatcatgattggttttgactgtgcttcatcagagttctacgatgcagaacgtaaagtatacgactacggtaaattcgaaggtgaaggtggagcagttcgtactgctgcagaacaaatcgattaccttgaagaattggttaacaaatacccaatcatcactattgaagatggtatggatgaaaacgactgggatggttggaaagctcttacagaacgccttggtggacgtgtacaattagttggtgacgatttcttcgttacaaatactgattacttagcacgtggtatcaaagaagaagctgctaactcaatccttatcaaagttaaccaaatcggtactttgacagaaactttcgaagccattgaaatggctaaagaagcaggttacactgcggttgtatcacaccgttcaggtgaaactgaagattcaacaatcgctgatatcgcagttgcaactaacgctggtcaaattaaaacaggttcattatcacgtactgaccgtattgctaaatacaaccaattacttcgtatcgaagaccaacttggtgaagttgctcaatacaaaggtatcaaatcattctacaacttaaaaaaa

SEQ ID NO: 9954 - protein, 435 aa, Streptococcus agalactiae
MSIITDVYAREVLDSRGNPTLEVEVYTESGAFGRGMVPSGASTGEHEAVELRDGDKSRYGGLGTQKAVDNVNNVIAEAIIGYDVRDQQAIDRAMIALDGTPNKGKLGANAILGVSIAVARAAADYLEVPLYSYLGGFNTKVLPTPMMNIINGGSHSDAPIAFQEFMIMPVGAPTFKEALRWGAEVFHALKKILKERGLETAVGDEGGFAPKFEGTEDGVETILKAIEAAGYEAGENGIMIGFDCASSEFYDAERKVYDYGKFEGEGGAVRTAAEQIDYLEELVNKYPIITIEDGMDENDWDGWKALTERLGGRVQLVGDDFFVTNTDYLARGIKEEAANSILIKVNQIGTLTETFEAIEMAKEAGYTAVVSHRSGETEDSTIADIAVATNAGQIKTGSLSRTDRIAKYNQLLRIEDQLGEVAQYKGIKSFYNLKK

SEQ ID NO: 9955 - DNA, 1062 bp, Streptococcus agalactiae
atgaaaagaaaacagtttataaaattaggaattgcaaccttactaacggttatttcgctttacacaccaataaacctagctacaaatcataccacagaaaatattgttactgctcaagagtataaaacaaaagagaatggtactttaccttttaaacacaaacgacaattggttttaggagagttggatgacaaaggtcgtgccacattcgcacatattcagctaaaagttaaagatgaacccaagaaaaagagagtaaaacgtttaaaaacaacccctgttggatggcacaattttaaattctattataatgatggtactcaaaaagcttggctaatgagccgaggccgtcttatttgccaccaatttagtggactaaacaatgaaagaaagaatttagttctaatgacgaattggctaaatactggaaactacaatagcacgaattcatctaaccctgagagcatgctattctatgaaaaacaactaaagacttggctttcgactcataaaaactactacttagattataaagtaacaccaatttatcaaaataatgaactaattccaagaaaaattgaattaaaatatgttggtattgataagactgggaaattattacctatttttatcggaaacaaatccactcaagatcaattcggcatcagcactgttaccttagagaatacctcaccaaatgctaccattgactacctcagcggaaaggctcaaaatactgtcttatcagctaaagaacaaagaaaacttatcgctaagcacgaagaagaaaaacgacttgcagaaaagaaagctgaagaggaaaaagctgctgctgaaactcagaaaaaactggaagaagaacaagcaaggcttgctgctgaagctcaaaggaagcaagaagaggagcaagcaaggctcgcagctgaaactcagaaaaaacaagaaactctagtacaagaacaaactagtcaaggctacaaacgtgactatagagggaggtggcatcgtccaaatggacaatacgcttcaaaagcagaaatcgctgctgctggattgcaatgg

SEQ ID NO: 9956 - protein, 354 aa, Streptococcus agalactiae
MKRKQFIKLGIATLLTVISLYTPINLATNHTTENIVTAQEYKTKENGTLPFKHKRQLVLGELDDKGRATFAHIQLKVKDEPKKKRVKRLKTTPVGWHNFKFYYNDGTQKAWLMSRGRLICHQFSGLNNERKNLVLMTNWLNTGNYNSTNSSNPESMLFYEKQLKTWLSTHKNYYLDYKVTPIYQNNELIPRKIELKYVGIDKTGKLLPIFIGNKSTQDQFGISTVTLENTSPNATIDYLSGKAQNTVLSAKEQRKLIAKHEEEKRLAEKKAEEEKAAAETQKKLEEEQARLAAEAQRKQEEEQARLAAETQKKQETLVQEQTSQGYKRDYRGRWHRPNGQYASKAEIAAAGLQW

SEQ ID NO: 9957 - DNA, 1281 bp, Streptococcus agalactiae
atgaaattactgactaatgcaaatactctcaagggaaccatccgtgttcctggcgataaatcaataagtcacagggctattatttttgggagtatatctcagggagttacccgaattgttgatgtcttaagaggcgaggatgttttatcaactatagaggcttttaaacaaatgggggttctaattgaagacgatggcgagataatcactatctatggcaaaggatttgcaggtttaacacaaccgaataatctcttagacatgggaaactctggtacttcaatgcgtctgatagcaggtgtgttagctggtcaagagtttgaagtgacgatggttggagacaatagtttgtcaaagagacctatggatcgtatagcattgcctttaagcaaaatgggagctagaatttcgggagtaactaaccgtgatttaccaccattaaaacttcaaggtacaaaaaaattaaaacctattttttaccatttacccgtagcttctgcacaagtaaaatcagctttaatttttgcggctttacaaactaagggagaatctctcattgtagaaaaagagcaaacaaggaatcatactgaggacatgattcggcaatttggtggacatttggatattaaagataaagaaattcgactcaatggcggtcagagcttagtaggacaagatataagagttcctggtgatatttcgagtgctgccttttggatagtagcgggtcttattattcctaacagtcatattattttagaaaacgtaggtataaacgagacacgaactggaatccttgatgtcgtcagtaaaatgggtggaaaaattaagttatcttcggttgataatcaagtaaaatcagcaacccttgcagttgattactctcatctacaagctactcatatttctggggctatgattccacgtctgattgatgaattacctattattgctcttttagcaacacaagctcaaggcaccacagtcatagcagatgctcaggaattaaaggtgaaagagacagatcggattcaggtcgttgtcgaatcgctaaaacagatgggtgctgatattactgctacagcagatggtatgattatacgtggtaatacccctcttcacgctgcttcacttgattgtcatggagatcatagaataggaatgatgatagctattgctgctctcttggtcaaagaaggcgaagtagatttatctggtgaagaagctattaatacaagctatcctaactttttagaacatttggagggattagttaatgcc

SEQ ID NO: 9958 - protein, 427 aa, Streptococcus agalactiae
MKLLTNANTLKGTIRVPGDKSISHRAIIFGSISQGVTRIVDVLRGEDVLSTIEAFKQMGVLIEDDGEIITIYGKGFAGLTQPNNLLDMGNSGTSMRLIAGVLAGQEFEVTMVGDNSLSKRPMDRIALPLSKMGARISGVTNRDLPPLKLQGTKKLKPIFYHLPVASAQVKSALIFAALQTKGESLIVEKEQTRNHTEDMIRQFGGHLDIKDKEIRLNGGQSLVGQDIRVPGDISSAAFWIVAGLIIPNSHIILENVGINETRTGILDVVSKMGGKIKLSSVDNQVKSATLAVDYSHLQATHISGAMIPRLIDELPIIALLATQAQGTTVIADAQELKVKETDRIQVVVESLKQMGADITATADGMIIRGNTPLHAASLDCHGDHRIGMMIAIAALLVKEGEVDLSGEEAINTSYPNFLEHLEGLVNA

SEQ ID NO: 9959 - DNA, 510 bp, Streptococcus agalactiae
atgcctaaggtattattgggattcatgggagttggcaagactagtgttgccaactgcttagaaaatgaagtaattgatatggatagtctgattgaaaaacatattggtatgtcaatttcccgattttttacagaagaaggagaagcctcctttcgtgctttagaatctcaatttttaaacgaacttttaaagaaaaaaaatgaaggacttgtgatagctagtggaggaggtattgtactccttgaagaaaatcgtcgtcttttaactttaaatcgtcataataatattcttttaacaggaagttttgaagtcttatatcatcgtataaaaaaagatgagaagaatagaagaccattatttttaaaccattcaaaagaagaattttatgatatttatcaaaaacgcatgttactctatagtggtttgtctgatatgattattgataccgattatcttacaccacaaaaaatagctactgtaattggagagtcactggttaatttatctaac

SEQ ID NO: 9960 - protein, 170 aa, Streptococcus agalactiae; identical to SEQ ID NO: 5678

SEQ ID NO: 9961 - protein, 1371 aa, Streptococcus agalactiae
ATGTCAAGAAATAATTACGGTCAGCTAAATCATCATGAAGAGCTACGATATAACTATCTTTTAAAAAACATCCATTATCTTAATGAACGTGAAAAGATGGAATTTCAGTACCTTCATTATAAAAAAACAGCAGTACGACCACAGAGAAGGACAGAAAGTCCACCAACTAATTCTTATTATGAGGAACCTTATTCTGATTCTTATTATCAAGATGACGATTTTTACTCAGAGCCTCAGCTAACCTCACAAGGTTTACCAATTTATCAAGAAGAGAGAGCTCCGAAGAAGAAAAAACAAAGGGCCAGAAAAGAAAAACAGAGGGTGAAGGTTATGGCGCCTTTCCCTCCAAAGGCTATAACCCCCCCTAGAAAGAAAAAAAAATTTAAGGGTTTCCTAAAGTTCATAGGTATTATATTACTAATTGTTTTATCAGGTATGGTTTTCATGTTTGTTAAAGGAATGCGTGATGTGAATAATGGGAAGTCACATTATAGCCCTGCAATTATTGAAGATTTTAAGGGAAAAGATGCTGTTGATGGGACTAATATCTTAATTTTAGGTAGTGATAAACGTGTCAGCGAGAGATCTACTGATGCGAGAACAGATACCATAATGGTTGCTAATGTTGGTAACAAGGATAATAAGGTTAAGATGGTGAGTTTTATGCGAGATCTCTTAGTCAATATTCCTAATTATAGTACGGAAGGTTACTATGATATGAAATTAAATGCGTCTTTTAATTTGGGAGAACAAGATAATCATAAAGGAGCAGAGTATGTTCGACAAACGTTGAAAAATCATTTTGATATTGATATAAAATATTATGTTATGGTTGACTTTGAGACATTTGCAGATGCTATTGATACACTGTTTCCTAATGGTGTCAAGATTAATGCTAAATTTGGACTTGTCGGTGGACAATCTGCTGATTCAGTTAAAGTTCCTGATGATTTAAGGATGAAAAATGGCGTTGTACCTAGCCAAAAAATTAAGGTTGGGATTCAGTACATGGATGGAAGGACCCTTCTAAATTATGCTCGTTTCAGAAAAGACGATGATGGGGACTTTGGTCGAACACAACGTCAACAACAAGTTATGAGAGCTATTGTCTCTCAAATAAAAGACCCACGTCGTCTCTTTACAGGTTCTGCTGCTATCGGTAAAGCCTATGCTTTAACTTCAAGTAATTTATCTTATAGCTTTGTCCTAACAGATGGCATTCCAATTTTATCAGATGCTAAAAATGGTATTAAGCAAATGACAATTCCAAGAGAAGGAGATTGGGTAGATGATTATGACCAGTATGGTGGTCAAGGGTTAACAATTGATTTTGCTAAGTACAAAAAGATCCTAAAGAAAATGGGACTGCGT

SEQ ID NO: 9962 - protein, 457 aa, Streptococcus agalactiae; identical to SEQ ID NO: 1176

SEQ ID NO: 9963 - protein, 1353 aa, Streptococcus agalactiae
ATGTTACATAAAAATGATATTATTGAAACTGAAATTAGCGACATTAGCCATGAGGGAATGGGTATTGCCAAAGTAGATGGCTTTGTTTTCTTTGTTGAAAATGCTCTTCCAGGTGAGATTATTAAGATGCGCATCTTGAAATTACGTAAGCGTATAGGATATGGAAAAGTTGAGGAATATTTAACGACTTCTCCTCACCGAAATGAAGGATTAGACTATACCTATTTACGTACAGGGATTGCTGATTTGGGACATCTTACTTATGAACAACAGCTGTTATTTAAACAAAAACAAGTAGCTGATAACCTTTATAAAATTGCTCATATATCTGATGTTTTAGTAGAACCTACTCTTGGTATGACAATCCCTTTGGCATATCGAAATAAAGCTCAGGTACCAGTTCGTCGTGTTGATGGACAGCTAGAGACAGGTTTTTTCAGAAAAAATTCACATACTCTGGTATCCATTGAAGATTATTTAATTCAGGAAAAAGAGATTGATGCTCTGATTAATTTTACACGAGATTTATTAAGAAAATTTGATGTTAAACCATATGACGAAGAGCAGCAATCTGGTTTAATTAGAAATCTCGTTGTTCGTCGAGGACATTATACAGGGCAATTAATGTTGGTTTTGGTGACAACACGTCCTAAAATATTCCGCATTGACCAAATGATTGAAAAGTTGGTATCTGCCTTTCCTTCTGTTGTTTCAATTATGCAAAATATTAATGATCGTAATAGCAACGTTATTTTTGGGAAAGAATTTCGTACTCTATATGGTTCTGATACTATTGAGGACCAAATGTTAGGAAATACTTACGCTATATCAGCCCAATCTTTTTACCAAGTTAATACTGAAATGGCTGAAAAACTGTACCAAAAAGCAATCGATTTTTCAGATTTAAACTCAGAGGATATCGTTATTGATGCCTATTCAGGTATAGGAACAATTGGCTTATCTGTTGCTAAACAAGTAAAACATGTTTATGGTGTTGAAGTTGTTGAAAAAGCAGTAAGTGATGCCAAAGAAAATGCTACTCGAAATGGGATAACTAACAGTACCTATGTTGCTGATTCGGCTGAAAATGCAATGGCAAAGTGGCTTAAAGAAGGTATAAAACCAACTGTTATAATGGTTGATCCACCACGAAAAGGATTAACGGAGAGTTTTGTATATTCTGCTGCCCAAACAAAAGCAGATAAAATCACTTATATTTCTTGTAATTCAGCGACAATGGCGCGTGATATCAAACTATTTGAAGAATTAGGGTATCATTTAGTAAAAATTCAACCAGTAGACTTATTCCCAATGACACATCATGTCGAGTGTGTTGCTCTGCTTGTTAAAGCC

SEQ ID NO: 9964 - protein, 451 aa, Streptococcus agalactiae
MLHKNDIIETEISDISHEGMGIAKVDGFVFFVENALPGEIIKMRILKLRKRIGYGKVEEYLTTSPHRNEGLDYTYLRTGIADLGHLTYEQQLLFKQKQVADNLYKIAHISDVLVEPTLGMTIPLAYRNKAQVPVRRVDGQLETGFFRKNSHTLVSIEDYLIQEKEIDALINFTRDLLRKFDVKPYDEEQQSGLIRNLVVRRGHYTGQLMLVLVTTRPKIFRIDQMIEKLVSAFPSVVSIMQNINDRNSNVIFGKEFRTLYGSDTIEDQMLGNTYAISAQSFYQVNTEMAEKLYQKAIDFSDLNSEDIVIDAYSGIGTIGLSVAKQVKHVYGVEVVEKAVSDAKENATRNGITNSTYVADSAENAMAKWLKEGIKPTVIMVDPPRKGLTESFVYSAAQTKADKITYISCNSATMARDIKLFEELGYHLVKIQPVDLFPMTHHVECVALLVKA

SEQ ID NO: 9965 - protein, 516 aa, Streptococcus agalactiae
TTGCGAACATACTACAATAAAGAAGAACTAAAAGCTGAAATAGAGAAAACATTTGAGAAATATATTTCAGAATTTGATAATATTCCAGAAAATTTAAAAGACAAGAGAGTTGATGAAGTTGATAGAACTCCAGCAGAAAACCTTTCATATCAGGTTGGATGGACAAGTTTGGTTCTTAAATGGGAAGAAGATGAAAGAAAGGGGCTTCAAGTAAAAACACCATCGGATGAATTTAAATGGAATCAGCTTGGTGAATTATATCAGTGGTTCACAGATACCTACGCTCATTTATCTCTGCAAGAGTTGAAAGCAAAATTAAATGAAAATATTAATTCTATATATGCAATGATTGATTCGTTGAGTGAAGAAGAATTATTTAAACCACATATGAGAAAATGGGCTGATGAAGCGACTAAAACCGCCACTTGGGAAGTATATAAGTTTATTCATGTAAATACAGTTGCACCTTTTGGAACTTTTAGAACTAAAATCAGAAAATGGAAAAAAATAGTGTTA

SEQ ID NO: 9966 - protein, 172 aa, Streptococcus agalactiae
MRTYYNKEELKAEIEKTFEKYISEFDNIPENLKDKRVDEVDRTPAENLSYQVGWTSLVLKWEEDERKGLQVKTPSDEFKWNQLGELYQWFTDTYAHLSLQELKAKLNENINSIYAMIDSLSEEELFKPHMRKWADEATKTATWEVYKFIHVNTVAPFGTFRTKIRKWKKIVL

SEQ ID NO: 9967 - protein, 1215 aa, Streptococcus agalactiae; identical to SEQ ID NO: 6195

SEQ ID NO: 9968 - protein, 405 aa, Streptococcus agalactiae; identical to SEQ ID NO: 6196

SEQ ID NO: 9969 - protein, 201 aa, Streptococcus agalactiae; identical to SEQ ID NO: 6197

SEQ ID NO: 9970 - protein, 67 aa, Streptococcus agalactiae; identical to SEQ ID NO: 6198

SEQ ID NO: 9971 - DNA, 420 bp, Streptococcus agalactiae
atgaaaccatcttcttttcagaccacaatagaaaatcagtttgactatatctgtaaacgtgctatggaagacgagcgaaagaattatatgctttatctttcaaggattgcaaagcgtgaggtgtccttttcggatgttggcgattatcttgttagccagtttgcgacaacagataactattcaactgactttcagatttttacactcaatgggttatcagtaggcgttgaaaatgatttgttgagtgaagcattacgtgagttgccagacaagaaacgtgaaattctactgctgttttactttatggacatgagcgattcagaaattgcagacctgttgaaattgaaccgttctactgtctatcggcatagaaccagtggactagccttaattaaaaagtttatggaggaatttgaagaa

SEQ ID NO: 9972 - protein, 140 aa, Streptococcus agalactiae; identical to SEQ ID NO: 6200

SEQ ID NO: 9973 - DNA, 351 bp, Streptococcus agalactiae
atgcgtaaaaaagaagataaatatgattttagagcctttggtttagccattaaagaagctcgattgaaacgaggtttaactcgtgaacaagtgggagcattgattgaaattgacccacggtacttaactaatattgaaaataaagggcaacaccccagcatacaagttctttatgaccttgtatcgttacttcatgtttccgttgatgaatttttcttacctgctaataacttggtaaaaagcacccgacgattacagatagagaaatacatggatagctttacagacaaagaactatccttaatggaatctttagccagcggtatcaacgaagcaagaaacatcgaagac

SEQ ID NO: 9974 - protein, 117 aa, Streptococcus agalactiae; identical to SEQ ID NO: 6202

SEQ ID NO: 9975 - DNA, 1917 bp, Streptococcus agalactiae
atgaaaattattaatattggagttttagctcatgttgatgcaggaaaaactaccttaacagaaagcttattatataacagtggagcgattacagaattaggaagcgtggacaaaggtacaacgaggacggataatacgcttttagaacgtcagagaggaattacaattcagacaggaataacctcttttcagtgggaaaatacgaaggtgaacatcatagacacgccaggacatatggatttcttagcagaagtatatcgttcattatcagttttagatggggcaattctactgatttctgcaaaagatggcgtacaagcacaaactcgtatattatttcatgcacttaggaaaatggggattcccacaatcttttttatcaataagattgaccaaaatggaattgatttatcaacggtttatcaggatattaaagagaaactttctgccgaaattgtaatcaaacagaaggtagaactgtatcctaatatgtgtgtgacgaactttaccgaatctgaacaatgggatacggtaatagagggaaacgatgaccttttagagaaatatatgtccggtaaatcattagaagcattggaactcgaacaagaggaaagcataagatttcagaattgttctctgttccctctttatcatggaagtgcaaaaagtaatatagggattgataaccttatagaagttattactaataaattttattcatcaacacatcgaggtccgtctgaactttgcggaaatgttttcaaaattgaatatacaaaaaaaagacaacgtcttgcatatatacgcctttatagtggagtactacatttacgagattcggttagagtatcagaaaaagaaaaaataaaagttacagaaatgtatacttcaataaatggtgaattatgtaagattgatagagcttattctggagaaattgttattttgcaaaatgagtttttgaagttaaatagtgttcttggagatacaaaactattgccacagagaaaaaagattgaaaatccgcaccctctactacaaacaactgttgaaccgagtaaacctgaacagagagaaatgttgcttgatgcccttttggaaatctcagatagtgatccgcttctacgatattacgtggattctacgacacatgaaattatactttctttcttagggaaagtacaaatggaagtgattagtgcactgttgcaagaaaagtatcatgtggagatagaactaaaagagcctacagtcatttatatggagagaccgttaaaaaatgcagaatataccattcacatcgaagtgccgccaaatcctttctgggcttccattggtttatctgtatcaccgcttccgttgggaagtggaatgcagtatgagagctcggtttctcttggatacttaaatcaatcgtttcaaaatgcagttatggaggggatacgctatggctgtgaacaaggattgtatggttggaatgtgacggactgtaaaatctgttttaagtatggcttatactatagccctgttagtaccccagcagattttcggatgcttgctcctattgtattggaacaagtcttaaaaaaagctggaacagaattgttagagccatatcttagttttaaaatttatgcgccacaggaatatctttcacgagcatacaacgatgctcctaaatattgtgcgaacatcgtagacactcaattgaaaaataatgaggtcattcttagtggagaaatccctgctcggtgtattcaagaatatcgtagtgatttaactttctttacaaatggacgtagtgtttgtttaacagagttaaaagggtaccatgttactaccggtgaacctgtttgccagccccgtcgtccaaatagtcggatagataaagtacgatatatgttcaataaaataact

SEQ ID NO: 9976 - protein, 639 aa, Streptococcus agalactiae
MKIINIGVLAHVDAGKTTLTESLLYNSGAITELGSVDKGTTRTDNTLLERQRGITIQTGITSFQWENTKVNIIDTPGHMDFLAEVYRSLSVLDGAILLISAKDGVQAQTRILFHALRKMGIPTIFFINKIDQNGIDLSTVYQDIKEKLSAEIVIKQKVELYPNMCVTNFTESEQWDTVIEGNDDLLEKYMSGKSLEALELEQEESIRFQNCSLFPLYHGSAKSNIGIDNLIEVITNKFYSSTHRGPSELCGNVFKIEYTKKRQRLAYIRLYSGVLHLRDSVRVSEKEKIKVTEMYTSINGELCKIDRAYSGEIVILQNEFLKLNSVLGDTKLLPQRKKIENPHPLLQTTVEPSKPEQREMLLDALLEISDSDPLLRYYVDSTTHEIILSFLGKVQMEVISALLQEKYHVEIELKEPTVIYMERPLKNAEYTIHIEVPPNPFWASIGLSVSPLPLGSGMQYESSVSLGYLNQSFQNAVMEGIRYGCEQGLYGWNVTDCKICFKYGLYYSPVSTPADFRMLAPIVLEQVLKKAGTELLEPYLSFKIYAPQEYLSRAYNDAPKYCANIVDTQLKNNEVILSGEIPARCIQEYRSDLTFFTNGRSVCLTELKGYHVTTGEPVCQPRRPNSRIDKVRYMFNKIT

SEQ ID NO: 9977 - DNA, 912 bp, Streptococcus agalactiae
atgatgaaatttagaaaaaatcagaataaagaaaaacagataccaaaggaaaagaaacctcgtgtctataaggtcaatcctcataaaaaggttgtgattgccttgtgggtacttttagggcttagtttcagctttgcgatattcaagcactttacagctatagatactcatactattcacgaaacaactatcatagaaaaggaatacgttgatactcatcatgtagaaaattttgtagagaactttgcgaaagtctactattcatgggagcaatccgataagtccattgataatcgaatggaaagtctaaaaggctatctgacagatgaacttcaagctctcaatgttgatacagtacgcaaagatattcctgtatcgtcttctgtaagaggatttcagatatggacggtagagccaactggcgacaatgagtttaatgtaacctacagtgtagaccagctcattacagagggagaaaatacaaagaccgtccactctgcttatatagtgagtgtctatgtagatggttctggaaatatggtactggttaagaatccgaccattaccaacatacctaagaaatcaagttataaaccaaaagccattgaaagtgaggggacggttgattccattacaaccaatgaaatcaatgagtttttaacgacgttcttcaagctctatcctacagcgacagccagtgaactttcctactatgtgaatgacgggatattaaaaccaatcggaaaagagtacatctttcaagaactggtaaatcctattcacaatcgtaaggataatcaagtcacggtatcgctgacagtggagtatatcgaccagcagaccaaagcaacgcaggtatctcaatttgatttggtacttgaaaagaacgggagtaattggaagattatagaa

SEQ ID NO: 9978 - protein, 304 aa, Streptococcus agalactiae
MMKFRKNQNKEKQIPKEKKPRVYKVNPHKKVVIALWVLLGLSFSFAIFKHFTAIDTHTIHETTIIEKEYVDTHHVENFVENFAKVYYSWEQSDKSIDNRMESLKGYLTDELQALNVDTVRKDIPVSSSVRGFQIWTVEPTGDNEFNVTYSVDQLITEGENTKTVHSAYIVSVYVDGSGNMVLVKNPTITNIPKKSSYKPKAIESEGTVDSITTNEINEFLTTFFKLYPTATASELSYYVNDGILKPIGKEYIFQELVNPIHNRKDNQVTVSLTVEYIDQQTKATQVSQFDLVLEKNGSNWKIIE

SEQ ID NO: 9979 - DNA, 999 bp, Streptococcus agalactiae
atgaagttgaaaactttagtgattggtggttctggattattcttgatggtcttctcactgcttctgtttgttgccattttattttcagatgaacaggacagcggaatttccaatattcattatggaggtgtgaatgtttccgcagaagtgctggctcataagcctatggtagaaaaatatgccaaagaatatggcgttgaagaatatgtcaacatacttcttgcgattatacaggtggaatcgggcggtactgcggaagatgttatgcagtcctcggaatccctcggtcttccacctaattcattgagtacagaagaatccattaagcaaggtgtgaagtatttcagtgaattattagccagtagcgaaaggctcagtgtagatttagaatcggttatccagtcctacaattatggtggtggtttcttagggtatgtggctaatcgtggaaataaatatacctttgaactggctcaaagtttctcaaaagagtattcaggtggcgaaaaagtgtcttaccccaatcccatagccatacctatcaatgggggctggcgatacaactatggcaatatgttttatgtgcaactggtaacgcagtatcttgtcacaacagagtttgatgatgatacggtacaagccatcatggacgaagcactgaaatatgagggctggcgatacgtttacggtggagcttccccgactacttcttttgattgtagcggactgacacaatggacgtatggaaaagctggaattaacttaccacgaaccgcacaacagcaatatgatgtgacccagcatatcccactatcggaagcacaagctggcgatttggttttctttcattctacctataacgctggctcttatattactcatgttgggatataccttggcaataaccgtatgtttcatgcaggcgacccaatcggttatgccgacttaacaagcccctactggcaacagcatttagtgggagcaggacgaatcaaacaa

SEQ ID NO: 9980 - protein, 333 aa, Streptococcus agalactiae; identical to SEQ ID NO: 6208

SEQ ID NO: 9981 - protein, 525 aa, Streptococcus agalactiae; identical to SEQ ID NO: 6209

SEQ ID NO: 9982 - protein, 175 aa, Streptococcus agalactiae; identical to SEQ ID NO: 6210

SEQ ID NO: 9983 - protein, 2175 aa, Streptococcus agalactiae
GTGAAACCATCAATAGTAAACAGAATAAAATCAAACTGGACGCTGAAACGTCTAGGTAAAGTGGCAATGACAGTGGCTTTCACACTTGTGATTGCCATTTTTCTTTTAGCCATGCTGGGAACGGTGGTTCAAGCTGCGGGCTTGGTAGATGATACGGTCAATGTGGCAAATGAATACAGCCGATACCCACTTGAAAACTATCAACTGGATTTTTATGTGGATAATAGCTGGGGCTGGCTTCCGTGGAACTGGTCGGACGGGATTGGAAAACAGGTCATGTATGGACTATATGCCATTACCAATTTTATTTGGACAATCAGTTTGTATGTTTCCAATGCGACAGGTTACTTAGTACAGGAAGCCTATTCCTTAGACTTCATTTCCGCTACAGCAGATTCCATTGGTAAGAATATGCAGACCTTAGCTGGTGTGAGTGCAAACGGATTTTCAACAGAGGGTTTCTATGTTGGATTCCTCTTACTCTTGATTTTGGTTCTTGGGGTTTATGTTGCCTATACGGGACTGATAAAGAGAGAAACCACAAAGGCAATTCATGCCATTATGAATTTTGTGCTGGTGTTTATCCTATCGGCTTCCTTTATTGCCTACGCTCCCGACTACATTAAAAAAATCAATGACTTTTCATCAGACATCAGTAATGCCAGTTTATCACTTGGCACGAAGATTGTCATGCCCCATTCCGATAGTCAAGGCAAGGACAGCGTGGACTTAATCAGAGATAGCCTGTTTTCCATACAGGTTCAGCAACCGTGGCTACTGCTTCAATACAACAGTTCAGACATTGAAAGTATCGGTATTGACCGTGTGGAAAGCCTGCTCTCCACCAGCCCAGATTCCAACAATGGCGAAGACAGAGAAAAAATTGTTGCGGAAGAAATTGAAGACAGAAGCAATACCAATCTAACCATTACAAAGACCATTAACCGTTTAGGTACAGTCTTCTTCCTATTTGTCTTCAATATTGGGATTTCCATATTTGTATTCCTATTAACAGGAATCATGATTTTCTCGCAGGTACTTTTTATCATCTATGCTATGTTTCTGCCTGTGAGCTTTATTTTAAGCATGATTCCATCATTTGATGGTATGTCAAAACGAGCCATAACAAAGCTCTTTAATACCATTTTGACACGAGCTGGAATCACATTGATTATTACGACAGCATTTAGTATTTCAACCATGCTCTATACCTTATCGGCTGGTTATCCGTTCTTTTTGATTGCTTTTCTACAGATTGTGACCTTTGCAGGAATCTACTTCAAGCTGGGCGATTTAATGAGTATGTTTTCTCTACAGAGTAACGATTCTCAAAGTGTGGGAAGTCGTGTGATGAGAAAACCTCGTATGCTTATGCACGCTCACATGCACCGTCTACAGCGGAAACTTGGACGTTCCATGACTACTCTAGGGGCTGGGTCTGCCATTGTTACAGGTAAAAAAGGACAGTCGGGTTCGGGGAGTTCTGCAAGGACACAAGCAGATCACTCCCGACCAGACGGAAAGGAAAAATCAACACTTGGAAAACGTATCGGTCAAACCATCGGTACAGTAGCTGATACCAAAGACAGAATGGTAGACACTGCTAGTGGTTTGAAAGAACAGGTTAAAGATTTGCCGACCAATGCAAGATATGCAGTATATCAAGGAAAATCCAAAGTAAAAGAGAATGTCCGTGATTTAACCAGTAGTATTTCTCAAACCAAAGCGGACAGAGCCAGTGGACGCAAGGAACAGCAGGAACAAAGGCGAAAAACCATTGCGAAGCGTCGCTCTGAAATGGAACAGGTCAAACAGAAAAAACAGCCTGCTTCTTCTGTTCATGAAAGACCGACTACAAGACAAGAACAATATCATGATGAACAGACCTCAAAACAGTCTAATATTCAGACTTCATATAAGGAATCTCAACAAGCCAAACAAGAGCGTCCAGCAGTTAAGTCCGATTTTTCAAGTCCAAAAGTGGAACGCCAAGGCAATACCGTTCAAGAAAAAACCGTTCAAAAGCCAGCAACTTCAACCACTACAGCAGATAGAACTTCACAACGTCCAATCACAAAAGAACGTCCGTCTACTGTTCAAAGAGTACCACTACAAAATACAAGAAGTAGACCACCAATCAAAACCGCCACCATTAAGAAAGTCGGTAAGAAACCA

SEQ ID NO: 9984 - protein, 725 aa, Streptococcus agalactiae
MKPSIVNRIKSNWTLKRLGKVAMTVAFTLVIAIFLLAMLGTVVQAAGLVDDTVNVANEYSRYPLENYQLDFYVDNSWGWLPWNWSDGIGKQVMYGLYAITNFIWTISLYVSNATGYLVQEAYSLDFISATADSIGKNMQTLAGVSANGFSTEGFYVGFLLLLILVLGVYVAYTGLIKRETTKAIHAIMNFVLVFILSASFIAYAPDYIKKINDFSSDISNASLSLGTKIVMPHSDSQGKDSVDLIRDSLFSIQVQQPWLLLQYNSSDIESIGIDRVESLLSTSPDSNNGEDREKIVAEEIEDRSNTNLTITKTINRLGTVFFLFVFNIGISIFVFLLTGIMIFSQVLFIIYAMFLPVSFILSMIPSFDGMSKRAITKLFNTILTRAGITLIITTAFSISTMLYTLSAGYPFFLIAFLQIVTFAGIYFKLGDLMSMFSLQSNDSQSVGSRVMRKPRMLMHAHMHRLQRKLGRSMTTLGAGSAIVTGKKGQSGSGSSARTQADHSRPDGKEKSTLGKRIGQTIGTVADTKDRMVDTASGLKEQVKDLPTNARYAVYQGKSKVKENVRDLTSSISQTKADRASGRKEQQEQRRKTIAKRRSEMEQVKQKKQPASSVHERPTTRQEQYHDEQTSKQSNIQTSYKESQQAKQERPAVKSDFSSPKVERQGNTVQEKTVQKPATSTTTADRTSQRPITKERPSTVQRVPLQNTRSRPPIKTATIKKVGKKP

SEQ ID NO: 9985 - protein, 2445 aa, Streptococcus agalactiae; identical to SEQ ID NO: 6211

SEQ ID NO: 9986 - protein, 815 aa, Streptococcus agalactiae; identical to SEQ ID NO: 6212

SEQ ID NO: 9987 - protein, 504 aa, Streptococcus agalactiae; identical to SEQ ID NO: 6213

SEQ ID NO: 9988 - protein, 168 aa, Streptococcus agalactiae; identical to SEQ ID NO: 6214

SEQ ID NO: 9989 - protein, 495 aa, Streptococcus agalactiae; identical to SEQ ID NO: 6215

SEQ ID NO: 9990 - protein, 165 aa, Streptococcus agalactiae; identical to SEQ ID NO: 6216

SEQ ID NO: 9991 - DNA, 219 bp, Streptococcus agalactiae
atgaattttggacaaaacctttataactggtttctatcaaacgctcaatcactggtgcttttagcaatcgttgtgattggcttgtatcttggcttcaagcgtgagtttagcaaactgattggctttttaattattgcgattattgcggttggcttagtcttcaacgctgctggagtaaaagacattttactagagctattcaatcgcattattggtgct

SEQ ID NO: 9992 - protein, 73 aa, Streptococcus agalactiae; identical to SEQ ID NO: 6222

SEQ ID NO: 9993 - DNA, 1203 bp, Streptococcus agalactiae
ttggagggatttttactgaatgaacaaacttggttacagcatttaaaagaaaaacgcttggcttatggactatctcaaaaccgtttagctgttgcgactggtattacaaggcagtatctaagcgatattgaaacaggaaaagtcaagccatcagaggatttacagcagtccctttgggaagctctggaacgcttcaatcccgacgctccccttgaaatgctgtttgattatgtaagaattcgctttccgacaacagacgtacagcaggtggtcgaaaacatcttacaactgaaactgtcctattttcttcatgaggactatggtttctattcttattcagagcattatgctttaggcgacatattcgtcctttgctcccatgaactggacaaaggagttctggtggaattgaaaggtcgtgggtgcagacaatttgaaagctatcttctggcacaacaaagaagctggtatgagttctttatggacgttttggtggctggcggtgtgatgaaacgccttgaccttgccattaacgataagacagggattttaaatatccctgtactcactgaaaagtgccaacaggaagaatgtatctccgtcttccgcagttttaaaagctatcgcagtggcgaactggtacgcaaagaggaaaaggaatgtatgggaaacaccctctatatcggttcattacaaagtgaagtttatttctgtatctatgaaaaggactacgagcagtacaagaaaaatgatattcccattgaagacgcagaagtaaaaaaccgttttgagattcgattgaaaaatgagcgtgcctattatgcagtccgtgatttactcgtctatgacaatccagagcataccgcctttaaaattatcaatcggtatatccgttttgtagataaagacgattccaaacctcgttctgattggaaactgaatgaagaatgggcttggtttattgggaacaatcgtgaacgattaaaactaaccacaaaaccagagccttactccttccaaaggacgctgaactggctatctcatcaagttgccccgaccttaaaggttgcgattaaacttgatgaaatcaaccagacgcaggttgtaaaagacattctcgaccatgcgaaactgacagaccgacacaagcagattttgaagcaacagtcagtaaaagaacaggacgtgataacaacaaaaaaa

SEQ ID NO: 9994 - protein, 401 aa, Streptococcus agalactiae
MEGFLLNEQTWLQHLKEKRLAYGLSQNRLAVATGITRQYLSDIETGKVKPSEDLQQSLWEALERFNPDAPLEMLFDYVRIRFPTTDVQQVVENILQLKLSYFLHEDYGFYSYSEHYALGDIFVLCSHELDKGVLVELKGRGCRQFESYLLAQQRSWYEFFMDVLVAGGVMKRLDLAINDKTGILNIPVLTEKCQQEECISVFRSFKSYRSGELVRKEEKECMGNTLYIGSLQSEVYFCIYEKDYEQYKKNDIPIEDAEVKNRFEIRLKNERAYYAVRDLLVYDNPEHTAFKIINRYIRFVDKDDSKPRSDWKLNEEWAWFIGNNRERLKLTTKPEPYSFQRTLNWLSHQVAPTLKVAIKLDEINQTQVVKDILDHAKLTDRHKQILKQQSVKEQDVITTKK

SEQ ID NO: 9995 - DNA, 1383 bp, Streptococcus agalactiae
atgaaacagcgtggtaaaaggattcgcccatctggtaaagatttagtctttcattttacgatagcgtcactcctgcctgttttcctgctggttgtcggactgtttcatgtgaagacaatccagcagatcaactggcaggattttaacctatcacaagcagataagattgacattccctatttaattatcagtttcagtgtcgcaattcttatctgcttgctggtagcgtttgtattcaaacgggttcgctatgatacggttaaacaactttaccaccgtcaaaaactggcaaagatgatacttgaaaacaagtggtatgaatctgaacaggtcaaaacagagggtttctttaaagatagtgctggtcgtacaaaggaaaagataacctacttccctaaaatgtattatcgacttaaaaatggcttgatacagatacgggtggaaatcacgctgggaaaatatcaagaccaactcttacacttggaaaagaaattagagagtggcttgtactgtgagctgacggataaagagttaaaggattcctatgtggaatatactttgctctatgacaccatagccagtcgtatttctattgatgaagtagaagctaaagatggtaaacttcgcttaatgaaaaacgtatggtgggaatatgataagctccctcatatgttgattgctggtggtacaggtggcggtaaaacttactttatactgacactgattgaagccttgcttcatacagattcaaaactgtatattcttgacccgaaaaatgctgatcttgcggacttaggttctgtgatggcaaatgtctactatagaaaagaagacttgctttcttgcattgaaacattctatgaagaaatgatgaaacgtagtgaggaaatgaagcagatgaagaactataagactggcaaaaattatgcttacttaggtctcccggcacacttcttaatctttgatgaatacgtcgctttcatggaaatgctgggaacaaaagaaaacaccgcagttatgaataagctgaaacagattgtcatgttaggtcgtcaagctggcttctttctaatactggcttgtcaacgtccagacgcaaaatatttaggcgacggaatccgtgatcagtttaatttcagagtggctttaggtcgtatgtctgaaatgggctatggcatgatgtttggcagtgacgtacaaaaggatttcttcttaaagcgaatcaaaggtcgtggctatgttgatgtaggaacaagtgtcatatcagagttttatactccccttgtaccaaaaggatatgatttcttggaggaaattaaaaagttatccaacagcagacagtccacgcaggcgacgtgcgaagcggaagtcgcaggtgtggac

SEQ ID NO: 9996 - protein, 461 aa, Streptococcus agalactiae; identical to SEQ ID NO: 8178

SEQ ID NO: 9997 - DNA, 384 bp, Streptococcus agalactiae
atgatgagattagcaaatggcattgtattagataaagacacgacttttggagaattgaaattctctgctctacgtcgtgaagtgagaatccaaaatgaagacgggtcggtttcagatgaaatcaaggaacgtacctatgacttaaaatccaaaggacaaggacgcatgattcaagtaagtattcctgccagcgtgcctttgaaagagtttgattataacgcacgggtggaacttatcaatcccattgcggacaccgttgctactgccacctatcaaggagcagatgttgactggtatatcaaggcagacgatattgtgctgacaaaggattctagttcattcaaagctcaaccacaagcaaagaaagaaccgacacaagacaaa

SEQ ID NO: 9998 - protein, 128 aa, Streptococcus agalactiae; identical to SEQ ID NO: 8180

SEQ ID NO: 9999 - DNA, 312 bp, Streptococcus agalactiae
atggaacttaaatttgtgattcccaacatggaaaaaacattcggcaatttagaatttgctggcgaggataaagtcgttcagcgaagaatcaacggacggctaactgtcttatcaagaagctataatctctattctgatgttcaaagagcagatgatattgtggtggtgcttcctgctgaagctggcgaaaaacatttcggctttgaggaacgtgtgaagttagtcaatccacgtattaccgcagagggctacaaaatcggcactcgtggttttacaaattaccttttacatgctgacgacatgataaaagaa

SEQ ID NO: 10000 - protein, 104 aa, Streptococcus agalactiae; identical to SEQ ID NO: 8182

SEQ ID NO: 10001 - protein, 96 aa, Streptococcus agalactiae
GTGGAGTTAGCCCAATCCATTATTGATACTTACCAGCCTGAAAGTGTAGAAGATATGCAAAATGCTTTAAAGCATATAGTGTTTATTTGTAAACAG

SEQ ID NO: 10002 - protein, 32 aa, Streptococcus agalactiae
MELAQSIIDTYQPESVEDMQNALKHIVFICKQ

SEQ ID NO: 10003 - protein, 594 aa, Streptococcus agalactiae
GTGAACTATTATTTGAATTTGTATTGTATAATCACATTCGATAAGATTTATAAAGGTGATAATACGTTGGAGAGTTCAGATAACACTAATTTAAAATTTTTAAAGGCTTTCTCTGAATTATTAGAAACGAAAAGCTTTGAACAAATTACAGTTAGCGATTTAGCAAAAAAAGCTCAACTTAGTAGAAGAGCTTTCTATAATCATTTCAATTCAAAAGAAGACTTCCTTAGGGAGTCTATTTTAATAATCTTTGATGATATCACAAAAATTTTAAATAATGATTTATTATATGAAGAAGTAATCCTAAAGGAAATGCTTAGCTACATGTATACAAACAAAGAAATTATTAAGTCCTTTGTTTGTTTTTTTCCAAATATTGACAACATAATTAAAGACTATATCAAAGGAATGATTATACATTCCGATATACCAGACTTAGAGAAACAACTCGAAACAGCATATCAAATTCCATATTCTTTCGCTCTTGATATTTATATCTCAACAATTGAAAGTATCATTTTAAATTGGATAGATAATAATTTTACTGAAAGTCCTGAAAAAATAGCAAAATATATCACATCTGTCGTGAGAATT

SEQ ID NO: 10004 - protein, 198 aa, Streptococcus agalactiae
MNYYLNLYCIITFDKIYKGDNTLESSDNTNLKFLKAFSELLETKSFEQITVSDLAKKAQLSRRAFYNHFNSKEDFLRESILIIFDDITKILNNDLLYEEVILKEMLSYMYTNKEIIKSFVCFFPNIDNIIKDYIKGMIIHSDIPDLEKQLETAYQIPYSFALDIYISTIESIILNWIDNNFTESPEKIAKYITSVVRI

SEQ ID NO: 10005 - protein, 4748 aa, Streptococcus agalactiae
ATGCTTAGGAAGTATAAGCAAAGAAATTATGATGTCGCACATACGAAACAGCGCTTTTCGATTAAGAAATTTAAATTTGGTGCAGCATCGGTACTGGTTGGATTGACATTTCTAGGAATGGCTGGGACAACTGTTCTAGCTGATGAGACAACATCTACAGGTATTGAGCTTAAACAATCTGCATCAGCAGGGATAGTAGATGAAGTAAAACCAGCAAAATCAGAATTAGCGACAGATGCAATAGCGTCAGTAGACAAAACAACCGAATCAGAAGTCGAAGCATTGGCAGATTACACAGAAAATGTCAATACTGATGTTGGAGGTACGGTTCCTGAGTCTAGTGCCAACATAGATCCTAATAGTTCATCAAAAGATACAGATAAAGTTGCTGTTTTAGAAGAGACAGCCAGTGAAAAAAATGTAATTGTATCTCCTGCAATTACAACACGTTCTGTAGATAGTGCAGTTGAAAAAGCTAATGTTGACAAAAATAGTGTCAGCGAAGTGTCTGAAGAGCTTCAGAAGAGAGTACAAAAAGATGCGATATATAGCCCCGGAGATTCCTCAGCTAAACAAACTTATTCAGGTAAAGCTTGGATAGATAATGGTGGTAGCATTGATGGGCAAGCTTCAGATGATATTCCACTAGCTGGTGTTAAAGTTTACTTGCAGTGGGTAAACGGAAAAGGCTATGTTTCAAAAGTTTACTATACTACTACATTGGCGGATGGAACCTTTGCGTTTGACTTATCTAAATCGGAAGTTGATCCTAACGGTGAAGAACATCATTTTCAATTAGCAGGAGATGCTAATTTCGCAGTAAGAACCTGGATTGAAAATCCTGATTCTAGTAAGTATGATATTATTCAAGCAGGGGATAAGATTTATGGTTTCCATACTCGTACTAACCGTAAAAATGAATCTTGGGATTTTACTGCGGGAGTCAATAGGATTGTCAATTCTCAAGTTATTTTACAAGAAAAGAAATTAACTAAAGACTGGTTGAAGAAACCAGAAGCTGAGTCGCAAATTCCTAGTACCGCAGATGGTACATGGCATGACAGGGGAATCTATGGTAGAGTAAATGGTTTAGCTTGGTTTGATAATGGAGATTCTGCTGGGACGCTTGCTAATCAATGGATAAAAGATGGTAATGATGTTCCAGCAAATGGTGTGAAAGTAGCTGCTTCTTATTTAAATGATGAAGTAACTCGCTTACTTGATCAGTGGAAAAAAGACCATCCAGGATATACTATTGAAGACTTTAAGGCTGAACAAGAAAGAGTCTTTACAGAATACCAGGCCCAACATGGGGTTGGTTCTCATATTGCGGAGACAGTCATAACGACAGTTGATAAAAATGGAAATTACTCTATTCCTTTTAAGGGATTGTATGGTGTTAGTGCTTATAAAGCAAACAGTGGTTTAAAAGTTTCTCATACAATTACAGACGAAGAATTCGGCAAGGTTGTTAGAGATGAAGATGTAGATAATAGTAGTCTTCTTAAGTGGAATGGTACCATTGGTCAAAAACATAGACACATTAATGAGAACTACCTATATGTATCTCCTATTTTATCTAATTATAATATTTGGAGTCCGGCTTTTCCTAAAGCTATGTTTGGTAATCCGAATAATCTATTTACAAATGTAGTTGCGGGGTCTGGAACTAATATTACCAGCTTGAACTTTGCTATTTTAGCACCTCAACCAATGCTTGATATTGTTGATTATGATACTACGAATAAGGTAGCAGTCTCTGGTAATGTTACCAATTCAACAGTAGGCGGATTGTTGCCAACACGTGAATACCAAGTGCAATGGTTCAGAGATGGTGTTGCAATAGGTGAACCTCAAACTATTCAGTCAAGCGTTGAAGGAACAGCGACACCTGAGAAGTTTACAGTACCAAATGATATCACTAAGACAACAAACTTTACATTAGGTCTATTTGAACAAGGTCAAAATACAAAGAGCTTAGGTAACGCTTTAGCATTAGATTCCTTTATTGCTGTATTTATCGAGTATAAACCAGTAGATGGTGTTGTAGCTAAGGATTCTGAGCCAGCTAAACCAATCTTTAAAGACAAAGATGGCAATGATACAACGCCACCGGAAGGAACAAAATTCACAACTGTTGCAGGTCAAGTTCCAGATTCGGTTAAAACCTCTTATCCTGAGGGAGCAATGTCTGTTGACCCAAATATGGTAACGATTGACCCTACAACTGGAGTAGTTGTTGTAAAAGGGGAAGCTCTTACTAAGAAAGGCACATATGTAGTACCAGTAGAAGTAACTTATCCGGGTGGTTCCAAAGCTTATACTTTTGCTACTGTAAACGTTAAAGATGATGCAACAACAACATACACAGCGACAGGTGGAAAATTAGAAAAACCATTTGGTCAAGCACCATCAACTGATGAAATCACATCAAAAGTAACAACTGATTATCCTAAAGAAGTTAAAGACCAACCTACAATGAAGGTTAAAGAGGGTGCAGTGATTCCGGATGGTATGACCAAAGGGGAATTTAAAGTACCGGTTGTTGTCACTTATCCAGATGGAACAACAGACGAAGTTGATGTTACAGTAACCATCAAAGAATCTGAAGCGGAAAAGAATGCCCCTTCATACAAAGATACAATGGTCGTTCCAGGGAAACCAGCAGAATCAACTCCAAGCTACGGCGAAGGTAAAACAGCACCAAATGGTACAGAGTATAAGATTGATGAAAACTTTAAAGTACCAGACGGATATAAAGTTGACATTGATAAAGCTACTGGAACAGTGACTGTAACAGCTCCAGAAAAATCAGACGGTACAACAGCAGAAGAAATTGAGGTACCAGTAATTGTCACTTATCCAGATAAATCAGAAGATAAAGTAATAGCTAAATTCCAATTGGATACTGATGAAAATGGTACACCAGACGTTACTGATCCAGATGATGATGGCGATGGTATTCCAGATGTGGATGATAAAAACCCTAAAACAGCCACTAAGACAGCCGTAGCGGTTGACAATGTAATTGTTACAGAAGGTCAACCAATCGCTCCGATTCCTGTTACGGTAACAAGCGATGATAGGAATGCTAAGGTTGAAGTTTCTGGTCTTCCAGACGGTTTAACTTATGACTCAGCAACATGTCAAATCACTGGTACACCAGATAAGTTAGCAGACTGGAAAGATACTGAAGAAACACGTGACTTCCCAGTAACTGTTAAAGTGACTGATGGAACAGGTACGGTTGAAAAAACATTTACAATCACTGTTCAGCGTGATACGGATGGTGATGGTATGCCAGATGTGACAGATACGGACGATGATGGCGACGGTATTCCAGACGATACTGAAAAGATTGACGGAACAAACTCTAAAGATCCAAATTCAGCAGCTTCTGTTATCACACCACTTGATGATCAAACAGGTACTGTCGGAGAAGCCATTACACCAGTTACTGTGAAAGTTGACAAAGTGCCAACAGATGGTTCAGTTACTGTTACTGGTCTTCCAGATGGCGTTACTTACGATCCAGCAACAGGCCAAATCACTGGGATACCAACAAAAGAAGGTGAATCAACGGTTACTGTGGCTGTTCTTGGTAAAGATGGTAAACCAGTTATGGGTGTTGACGGCAAACCAGTTACAGAAGAGTTCAAGTTTACAGTTAAGAAATTAACAGACGCTGATAAGAACGAACCTAAGGCTAAAGACCAAACAGTTAACATTGGGGAAACACCTAAGGCAGAAGATTCAATTGAAAACTTGAAAGATTTACCAGATGGAACTAAAGTAGAGTTTGAAACACCAATTGATACCACAACAGCAGGTGACAAGCCAGGTAAAGTTGTCGTGACGTACCCAGATGGTTCAACAGATACTGTTGATGTGACTGTTAAAGTCGTAGATCCAAGTACAGACGCTGATAAGAACGAACCTAAGGCTAAAGACCAAACAGTTAACATTGGGGAAACACCTAAGGCAGAAGATTCAATTGAAAACTTGAAAGATTTACCAGATGGAACTAAATTAGAGTTTGAAACACCAATTGATACCACAACAGCAGGTGACAAGCCAGGTAAAGTTGTCGTGACGTACCCAGATGGTTCAACAGATACTGTTGATGTGACTGTTAAAGTCGTAGATCCAAGTACAGACGCTGATAAGAACGAACCTAAGGTTAAAGACCAAACAGTTAACATTGGGGAAACACCTAAGGCAGAAGATTCAATTGAAAACTTGAAAGATTTACCAGATGGAACTAAAGTAGAGTTTGAAACACCAATTGATACCACAACAGCAGGTGACAAGCCAGGTAAAGTTGTCGTGACGTACCCAGATGGTTCAACAGATACTGTTGATGTGACTGTTAAAGTCGTAGATCCAAGTACAGACGCTGATAAGAACGAACCTAAGGCTAAAGACCAAACAGTTAACATTGGGGAAACACCTAAGGCAGAAGATTCAATTGAAAACTTGAAAGATTTACCAGATGGAACTAAAGTAGAGTTTGAAACACCAATTGATACCACAACAGCAGGTGACAAGCCAGGTAAAGTTGTCGTGACGTACCCAGATGGTTCAACAGATACTGTTGATGTGACTGTTAAATCGTAGATCCAAGTACAGACGCTGATAAGAACGAACCTAAGGTTAAAGACCAAACAGTTAACATTGGGGAAACACCTAAGGCAGAAGATTCAATTGAAAACTTGAAAGATTTACCAGATGGGACTAAAGTAGAGGTT

SEQ ID NO: 10006 - protein, 1583 aa, Streptococcus agalactiae
  VARIANT 1538: Xaa = Any Amino Acid
MLRKYKQRNYDVAHTKQRFSIKKFKFGAASVLVGLTFLGMAGTTVLADETTSTGIELKQSASAGIVDEVKPAKSELATDAIASVDKTTESEVEALADYTENVNTDVGGTVPESSANIDPNSSSKDTDKVAVLEETASEKNVIVSPAITTRSVDSAVEKANVDKNSVSEVSEELQKRVQKDAIYSPGDSSAKQTYSGKAWIDNGGSIDGQASDDIPLAGVKVYLQWVNGKGYVSKVYYTTTLADGTFAFDLSKSEVDPNGEEHHFQLAGDANFAVRTWIENPDSSKYDIIQAGDKIYGFHTRTNRKNESWDFTAGVNRIVNSQVILQEKKLTKDWLKKPEAESQIPSTADGTWHDRGIYGRVNGLAWFDNGDSAGTLANQWIKDGNDVPANGVKVAASYLNDEVTRLLDQWKKDHPGYTIEDFKAEQERVFTEYQAQHGVGSHIAETVITTVDKNGNYSIPFKGLYGVSAYKANSGLKVSHTITDEEFGKVVRDEDVDNSSLLKWNGTIGQKHRHINENYLYVSPILSNYNIWSPAFPKAMFGNPNNLFTNVVAGSGTNITSLNFAILAPQPMLDIVDYDTTNKVAVSGNVTNSTVGGLLPTREYQVQWFRDGVAIGEPQTIQSSVEGTATPEKFTVPNDITKTTNFTLGLFEQGQNTKSLGNALALDSFIAVFIEYKPVDGVVAKDSEPAKPIFKDKDGNDTTPPEGTKFTTVAGQVPDSVKTSYPEGAMSVDPNMVTIDPTTGVVVVKGEALTKKGTYVVPVEVTYPGGSKAYTFATVNVKDDATTTYTATGGKLEKPFGQAPSTDEITSKVTTDYPKEVKDQPTMKVKEGAVIPDGMTKGEFKVPVVVTYPDGTTDEVDVTVTIKESEAEKNAPSYKDTMVVPGKPAESTPSYGEGKTAPNGTEYKIDENFKVPDGYKVDIDKATGTVTVTAPEKSDGTTAEEIEVPVIVTYPDKSEDKVIAKFQLDTDENGTPDVTDPDDDGDGIPDVDDKNPKTATKTAVAVDNVIVTEGQPIAPIPVTVTSDDRNAKVEVSGLPDGLTYDSATCQITGTPDKLADWKDTEETRDFPVTVKVTDGTGTVEKTFTITVQRDTDGDGMPDVTDTDDDGDGIPDDTEKIDGTNSKDPNSAASVITPLDDQTGTVGEAITPVTVKVDKVPTDGSVTVTGLPDGVTYDPATGQITGIPTKEGESTVTVAVLGKDGKPVMGVDGKPVTEEFKFTVKKLTDADKNEPKAKDQTVNIGETPKAEDSIENLKDLPDGTKVEFETPIDTTTAGDKPGKVVVTYPDGSTDTVDVTVKVVDPSTDADKNEPKAKDQTVNIGETPKAEDSIENLKDLPDGTKLEFETPIDTTTAGDKPGKVVVTYPDGSTDTVDVTVKVVDPSTDADKNEPKVKDQTVNIGETPKAEDSIENLKDLPDGTKVEFETPIDTTTAGDKPGKVVVTYPDGSTDTVDVTVKVVDPSTDADKNEPKAKDQTVNIGETPKAEDSIENLKDLPDGTKVEFETPIDTTTAGDKPGKVVVTYPDGSTDTVDVTVKXVDPSTDADKNEPKVKDQTVNIGETPKAEDSIENLKDLPDGTKVEV

SEQ ID NO: 10007 - protein, 135 aa, Streptococcus agalactiae
ATGGGTGCTGATATTACTGCTACAGCAGATGGTATGATTATACGTGGTAATACCCCTCTTCACGCTGCTTCACTTGATTGTCATGGAGATCATAGAATACGAATGATGATAGCTATTGCTGCTCTCTTGGGCAAA

SEQ ID NO: 10008 - protein, 45 aa, Streptococcus agalactiae
MGADITATADGMIIRGNTPLHAASLDCHGDHRIRMMIAIAALLGK

SEQ ID NO: 10009 - protein, 494 aa, Streptococcus agalactiae
TTGGAATTGAGGTGTCGTCGTGACCACGTCCTTTATGATGTTGGAAAAGGCAGGGTTACATCAAGACAACGGAAGGGAATGTTGTTCACTATGGATTCATTGAAGCCTTTATCGAACAACTCTCTGAAACCTACCACATCAAAGAGATTGCTTATGACCGTTGGAATGCGACGCAGATGGTTCAGAACCTTGAAGGCATAGGCTTAACCATGGTGCCCTTTGGACAAGGCTATAAGGATATGAGTCCACCGTCCAAGGAACTCTACAAGCTCATGATGGAAGGGAAAATCCAACACGGTGGTCATCCTGTTCTAAAATGGATGGGACAAAACGTGGTCATGCGACAAGATCCTGCTGGCAACATCAAGCCAGACAAAGAAAAATCCGTTGAGAAGATTGACGGTATTGTGGCTCTTATCATGGGACTTGACCGTTGCATTCGCCACCAGGATGATGAAACGAGTGTCTATGATGAGCGAGGACTTTTGAGTTTT

SEQ ID NO: 10010 - protein, 165 aa, Streptococcus agalactiae
MELRCRRDHVLYDVWKRQGYIKTTEGNVVHYGFIEAFIEQLSETYHIKEIAYDRWNATQMVQNLEGIGLTMVPFGQGYKDMSPPSKELYKLMMEGKIQHGGHPVLKWMGQNVVMRQDPAGNIKPDKEKSVEKIDGIVALIMGLDRCIRHQDDETSVYDERGLLSF

SEQ ID NO: 10011 - protein, 255 aa, Streptococcus agalactiae
ATGCAAATTAATATTGAAAACTTAGTCTCTATTTCTGAAGCGAATCAAAACTTCTCTAAAGTAGCCCGCATGGTCGATGCTAACGGTACTGCAGTCATTTTGAAAAATAACACACCAAAGTACGTTTTAGTAGATTACCAAAGTCTGATTAAAGAGGAGCAAGATACACCAGTAGTTGTTGAACAAACAACATTGGATGAGGTTGCGACTTCAGTATTATCACGTCATCTTGATGCATTTAAGGAATTGGCCAAA

SEQ ID NO: 10012 - protein, 85 aa, Streptococcus agalactiae
MQINIENLVSISEANQNFSKVARMVDANGTAVILKNNTPKYVLVDYQSLIKEEQDTPVVVEQTTLDEVATSVLSRHLDAFKELAK

SEQ ID NO: 10013 - protein, 369 aa, Streptococcus agalactiae
ATGAGAATACTAACTGTTGAGCAAGTTATTGAACTGCACAGTAGGTTAATTCAAGCTACTGGCGGTTTAGATGGCGTCAGAGATGCTGGTCTAGTAGAATCATCTTTATCTTCAGCTTTTAGTTCTTATTTTGGTATTGAAAAATATCCAAGTATAGAAGAAAAAGCTGCTAGACTTTGTTATTCATTGGTTAATAATCATGCCTTCCTTGATGGTAACAAGCGTATTGGAGTTTATGTCATGATTATTTTCCTCGAATTAAATGGTATCGTTTTAAATCAGACTGATGAAGAAATTGTTAAGCTAGGTCTTGGGGTTGCTGCGTCAGAATTAGATTATAACGCAATCTTGGAGTATATCAGGAACCAT

SEQ ID NO: 10014 - protein, 123 aa, Streptococcus agalactiae
MRILTVEQVIELHSRLIQATGGLDGVRDAGLVESSLSSAFSSYFGIEKYPSIEEKAARLCYSLVNNHAFLDGNKRIGVYVMIIFLELNGIVLNQTDEEIVKLGLGVAASELDYNAILEYIRNH

SEQ ID NO: 10015 - protein, 324 aa, Streptococcus agalactiae
ATGACTCACAGTATTTTGTCTCTAGAGGTTGAAAATGAGTTACTATCAAGCGTTCGTGAAGTTTGTACTGAATCTGATTTGAAACTAGAGGAACTTGTTAAAGACTATTTAGGATTTTTGGCAGGTTTAAATGCTTCAGCAATTGAGCAGGTTAGTGCATTACCTAATGAAAATGAAAAAGCCGAATGGCTTGCCAAATACTATTTCGATGCTCGAATTAATCAATTACAATTTGAAGCACTGAAAAAGGAAGTATTACTTGGACATGACAAAATCAAAGAAAGTAAAGTAACACGTCTTGAAGATGTCAGACATGAATTTGAT

SEQ ID NO: 10016 - protein, 108 aa, Streptococcus agalactiae
MTHSILSLEVENELLSSVREVCTESDLKLEELVKDYLGFLAGLNASAIEQVSALPNENEKAEWLAKYYFDARINQLQFEALKKEVLLGHDKIKESKVTRLEDVRHEFD

SEQ ID NO: 10017 - protein, 1074 aa, Streptococcus agalactiae
ATGGGTATTTTAGATTGGATTGGATCGAAGCGCTCAAGAGATAAGCCACATAATAGTTATGAGGGACAGGATTTTTCCTATCTCTTTGGACGGACGACCAGTGGTGAAACCGTAGATGAGTTTAAGGCTATGCAGACGACGGCCGTTTATGCTTGTGTGCGTATCCTTGCTGAAGCAGTAGCGTCACTTCCTATTCACGTCTATGAACGGACAGAAACTGGGAAGGAGAAAAAGCTGGACCACCCACTGTACTTTCTTCTTCATGATGAGCCAAATCCAGAAATGTCATCCTTTATTTTTCGAGAAACCATGATGAGTCATTTGTTAATATGGGGAAATGCATATGTGCAGATTATCAGAGATAAGGGTGGACGAGTGATTAGTCTCTATCCACTCTTGCCTGATAAGATGTCTGTCCATCGTGATGATAGTGGGAGACTTTACTACAAATACCAGCGCCAGACAGAAGAAAACCCTAATTTCAATGATAAGGGAACTGTCTTATTGAAGCAGGAAGATATTCTTCATGTGCCTGGTCTTGGGTTTGATGGCTTGATTGGTTACTCACCAATTGCGATGGCTAAAAATGCGATTGGGATGACCCTAGCTACCGAAAACTATGGGGCATCTTTCTTTAAAAATGGCGCTAACCCAGGTGGTGTTTTGGAGCACCCAGGTATCCTTAAAGACCCTAAACGAGTGAGGGATTCTTGGAATGCCGTTTACAATGGGGTCACAAATGCCCATAAAGTGGCTGTACTCGAAGAAGGCATGAAGTATACTCAAGTGGGAATCCCCCCTGAAGAAGCCCAATTTTTACAAACACGGAAGTTTCAGATTAACGAAATTGCACGACTTTACCGTATCCCACCACACATGGTTGGTGATTTGGAGAAGTCGTCTTTTTCAAATATCGAACAACAGTCACTTGAATTTGTCAAATATACCTTAGACCCTTGGGTAGTTCGTTTAGAACAAGCTTTCAAGAGGTCTCTTTTTTTACCCGAAGAAAAAAACAATACTTTGTTAAATTCAATGTGGATGGTCTACTTCGTGGGGATTACCAAAGTCGAA

SEQ ID NO: 10018 - protein, 358 aa, Streptococcus agalactiae
MGILDWIGSKRSRDKPHNSYEGQDFSYLFGRTTSGETVDEFKAMQTTAVYACVRILAEAVASLPIHVYERTETGKEKKLDHPLYFLLHDEPNPEMSSFIFRETMMSHLLIWGNAYVQIIRDKGGRVISLYPLLPDKMSVHRDDSGRLYYKYQRQTEENPNFNDKGTVLLKQEDILHVPGLGFDGLIGYSPIAMAKNAIGMTLATENYGASFFKNGANPGGVLEHPGILKDPKRVRDSWNAVYNGVTNAHKVAVLEEGMKYTQVGIPPEEAQFLQTRKFQINEIARLYRIPPHMVGDLEKSSFSNIEQQSLEFVKYTLDPWVVRLEQAFKRSLFLPEEKNNTLLNSMWMVYFVGITKVE

SEQ ID NO: 10019 - protein, 213 aa, Streptococcus agalactiae
ATGAATGGCTATGCCATCGCAAGACAAAACGGTTGGCTGTCAACTAATGACATCCGTGAATTGGAAGATTTGAACTTGTTGTCAGATGAAGAAGGTGGAAACCTCTACTTGATTAACGGCAATATGACCAAACTAGAAGATGCTGGTGGCTTTATGAAACAACCTACGGAAACTGAGCCAACTGAAAACGCAACAGAGGAGGAAGTAGATGCG

SEQ ID NO: 10020 - protein, 71 aa, Streptococcus agalactiae
MNGYAIARQNGWLSTNDIRELEDLNLLSDEEGGNLYLINGNMTKLEDAGGFMKQPTETEPTENATEEEVDA

SEQ ID NO: 10021 - protein, 696 aa, Streptococcus agalactiae
ATGCGTAAATTTTGGAATTTTACAGACGAAGGTGGCGTCCGTACCCTTAGGATTGAAGGACAGATTGCGGACGAGACTTGGTTTGGGGATGAAGTCACCCCACAGCAATTTAAGAACGACTTGATTTCTGGAACAGGCGATATCACCCTATGGATCAATAGTCCAGGGGGTGATGTTTTTGCGGCCGCTCAAATCTATAACATGCTTATGGATTATCAGGGAGATGTCCATGTCATCATTGATGGTCTAGCTGCGAGTGCTGCCAGTGTCATTGCCATGGCAGGGACAACAGTTTCCATGAGTCCAGTTGCCATGATGATGATTCATAATCCTTGGACGTTCGCGCAAGGTGAAGCGAAAGATATGGCCAAGGTCATTGAGATGCTTGGCGAAATTAAGGAGTCCATTATCAATGCCTATGAGCTTAGAACTGGACTTTCCAGAACCAAGATTTCTCATCTTATGGATTCGGAATCTTGGTTCAATGCCAAGAAAGCTGTGGAGCTTGGTTTTGCGGATAAGGTGCTCTTTGAGAAAGAGGAGACACCTGAGCAGGATGATCAAAATAGCTACACCTTTAGTAGAGTGACTGCTGCTCATGATTTGGTGGTGAAACTGCAAGCGAGCCTTCAACCACCCAAACCACAGAAATCAATCCCCATCAATCAGTTGGAAAAACGATTGAACCTATTGAAA

SEQ ID NO: 10022 - protein, 232 aa, Streptococcus agalactiae
MRKFWNFTDEGGVRTLRIEGQIADETWFGDEVTPQQFKNDLISGTGDITLWINSPGGDVFAAAQIYNMLMDYQGDVHVIIDGLAASAASVIAMAGTTVSMSPVAMMMIHNPWTFAQGEAKDMAKVIEMLGEIKESIINAYELRTGLSRTKISHLMDSESWFNAKKAVELGFADKVLFEKEETPEQDDQNSYTFSRVTAAHDLVVKLQASLQPPKPQKSIPINQLEKRLNLLK

SEQ ID NO: 10023 - protein, 1206 aa, Streptococcus agalactiae
ATGTCTAAACTACTTGAATTGAAAGAAAAACGTAACGCTGCTTGGGCTCAAGCGAAAGCCTTTCTGGATACTGTTCGCTCTGAAGACGGCTTGGTATCAGATGAAGATTCCAAACGCTATGAAGAGATGGAAGCAAAAATCGAGCTCTACAATAAAGAAATTGCTCGCTTGGAGCGCCAAGAAAAGATTGACCTTGAACTAGCGCAACCGAACTCACATGCTCTAACGACGCAGCCAACAGTCATTGTCGATAACCAAAAAGAAGATGAAAAGAAAGGTGTGGCATCAGGCATCTACACCCAAACTTTCTGGACCAGTATCCGTAAGCGACACTTCTATGACGTGAAGGATGTTCTTCGTGTCGGTGAAGATACAGAAGGCGGACATCTTGTCCCTGATGAGTACGAAAAGAAATTGGTTCAAGGTCTTCAGGAAGAAAACTTTTTCCGTAGTCTCGCGACTGTTATTAAAACCTCTAGTGGTGAGCGTAAAATTCCAGTTGTAACTGGTCACGGTTCAGCCTCTTGGATGGACGAGAATGGACTCTATCCAGAGACGGATGAGACTTTTGGTCAAGTGACGCTTGATTCGCATAAGATTGGGACAGCAATCCGTATCTCTGAAGAATTGCTCAATGACTCTGTCTTTGACCTTGAGTCTTATATGACTTCTGAGTTCGCACGTCGTATTGGTACAGAAGAAGAAAAATCTTTCTTGGTAGGTGATGGTTCTAAAAAACCAACTGGTATCTTTACGCAAGCAGACGTAGAAGGACCAACGACCACAACCAAAGACATCACCTTTGATGACATGATTGAGCTTTATCACTCACTTCCAGCTCCTTACCGTAAGAATGCGGTCTGGATTTTACATGACACTACGGTAAAAGCTATCCGCAAGCTTAAGGACAATAATGGCAATTACATCTGGCAACCGTCTACACAGGCAGGTCAACCTGATTTGATTCTAAACCGTCCTTACTACACGTCAACCTTTGCGCCACTTCCAGAAGCAGGAAACAAAGCTATTGCTTTTGGTGATTTCTCTTACTACTGGATTGCGGACCGTCAAGGGCGTACCTTCAAACGTCTCAATGAGCTTTACGCTAACAATGGTCAGATTGGTTTTCTTGCCAGCCAGCGTGTGGATGGGAAACTCGTTCTACCAGAAGCGGTGAAGACTTTGACCATCAAAGGTAAAACGGCA

SEQ ID NO: 10024 - protein, 402 aa, Streptococcus agalactiae
MSKLLELKEKRNAAWAQAKAFLDTVRSEDGLVSDEDSKRYEEMEAKIELYNKEIARLERQEKIDLELAQPNSHALTTQPTVIVDNQKEDEKKGVASGIYTQTFWTSIRKRHFYDVKDVLRVGEDTEGGHLVPDEYEKKLVQGLQEENFFRSLATVIKTSSGERKIPVVTGHGSASWMDENGLYPETDETFGQVTLDSHKIGTAIRISEELLNDSVFDLESYMTSEFARRIGTEEEKSFLVGDGSKKPTGIFTQADVEGPTTTTKDITFDDMIELYHSLPAPYRKNAVWILHDTTVKAIRKLKDNNGNYIWQPSTQAGQPDLILNRPYYTSTFAPLPEAGNKAIAFGDFSYYWIADRQGRTFKRLNELYANNGQIGFLASQRVDGKLVLPEAVKTLTIKGKTA

SEQ ID NO: 10025 - protein, 255 aa, Streptococcus agalactiae
ATGATGACGTTAGAAGAAGTCAAGCTTTATCTGAAGGTGGAAAATGACGAGGAGGATTTTCTTATCCAGCAGTTAATGGCAACTAGCCAACAGCTCTGTGGAGATATTCTTCGTGAGGACTCCACTTCAGAAGTTCTAAAGACGGCAATCCTCTATGGGGTTGCCTATCTTTATGAACACCGTGAAGAAGCCAATCACAAAGAGTTAAAGGAAACTCTCTACCATTTGCTTTTAGCTGACAGGAAGGATGTGTTC

SEQ ID NO: 10026 - protein, 85 aa, Streptococcus agalactiae
MMTLEEVKLYLKVENDEEDFLIQQLMATSQQLCGDILREDSTSEVLKTAILYGVAYLYEHREEANHKELKETLYHLLLADRKDVF

SEQ ID NO: 10027 - protein, 366 aa, Streptococcus agalactiae
ATGACTAAGATTGGACTTGATGATTTAACTTCTGTCATCGAAAAGGAGCTAACGACTTATGCCAAAGAGACCATAGAGACCATGCGTGAGGTGGTTGAGGAAGTGACAGACGATGCCGTTGATACCTTAACCGTTACTTCCCCAAAACGTCGTGGGAAGTATGCCAAGGGCTGGAAAAGCAAGGCAACCACTGACACCAATACCGCTCTGACGAAAACCATTCACAACCGAACACCAGGACTGACGCACCTCCTTGAATATGGGCATGCTAAACAAAATGGTGGTCGGGTTGAAGGGCGAAAGCACATCGCTCCTGTCGAGAAAAAGGCGATTCAGTCGTTTGAAGACAAATTGCGACAGAAACTG

SEQ ID NO: 10028 - protein, 122 aa, Streptococcus agalactiae
MTKIGLDDLTSVIEKELTTYAKETIETMREVVEEVTDDAVDTLTVTSPKRRGKYAKGWKSKATTDTNTALTKTIHNRTPGLTHLLEYGHAKQNGGRVEGRKHIAPVEKKAIQSFEDKLRQKL

SEQ ID NO: 10029 - protein, 324 aa, Streptococcus agalactiae
ATGAGATTTGAAGAGCTTTTTCCTGTTCTAAAAAAGACCAAACTCCCAGTAGCCTATCACCATTTTGAGGAAGGGCACAGTCCAAGTCCGCCTTTTATGGTTTATCTGGTTACGGATTCAGACAATCTTGGGGCAGACAACTGGGCTTATCACAAAGCTATCAACGTACAGATTGAGCTTTACACGACTAAGAAAGATTTAGCAACAGAAAAAACGGTGGAATCAGTCCTTGATGCCCACCGTCTTTATTTTGACAAGGTAGAGACTTACATCACTAGTGAGAAACTCTACCAAACCATTTATTCCATCACACTATTAGGAGGA

SEQ ID NO: 10030 - protein, 108 aa, Streptococcus agalactiae
MRFEELFPVLKKTKLPVAYHHFEEGHSPSPPFMVYLVTDSDNLGADNWAYHKAINVQIELYTTKKDLATEKTVESVLDAHRLYFDKVETYITSEKLYQTIYSITLLGG

SEQ ID NO: 10031 - protein, 567 aa, Streptococcus agalactiae
ATGGCAGAAAAAAACAAGGTCACCTTTGGCCTACAAGATGTCCACTGGGCAGAAGTCACCAGTGAGGGAGCTGACGGGGCTTTGACTTATGGCACTGTCGAGCGACTTCGTGGTGCTGCAGAACTAACCCTTGAACCCACTGGAGACAAGGGGTCTTACAAGGCAGACAACATCAACTTTTACACGACTGAATCTAATGACGGCTATGAGGGAACACTGAAAGTTGCCCTCTTATCACAGGAGTTTCTGACTCGTGTTCTAGGTGAGAAATTGGATGCGACCACCAATACCATTTCAGAGATTGCCAGTAGCAAGAAAAAGAACTTCGCTCTCATGTTCCGATTTGAAGGGGACAAAAAAGAGACGCTTCATGTGCTTTATTACTGTTATGCGTCTCGCCCAACTGTTGGCTCAAAAACCAAGTCTGGGTCTGATATCAATGAGGTAGAGTTGACCTTTACGGCAAGCCCACGACCACTTGATAAGGTGGTGAGACGCAGAACAACGGAAGAAACCAGTGATGAGATTCGTGAGAACTGGTTTAAGTCGGTCTTTGAACCAGCTGCT

SEQ ID NO: 10032 - protein, 189 aa, Streptococcus agalactiae
MAEKNKVTFGLQDVHWAEVTSEGADGALTYGTVERLRGAAELTLEPTGDKGSYKADNINFYTTESNDGYEGTLKVALLSQEFLTRVLGEKLDATTNTISEIASSKKKNFALMFRFEGDKKETLHVLYYCYASRPTVGSKTKSGSDINEVELTFTASPRPLDKVVRRRTTEETSDEIRENWFKSVFEPAA

SEQ ID NO: 10033 - protein, 417 aa, Streptococcus agalactiae
ATGCGACAAAATATCACGATTAGTGGAAAAACATATCCCCTGGCCACTAACGCCTATACACCGATTGCTTATAAAGAGCAATTCGGAAAAGATTATTTCCAAGACCTCTTTAACATGTTGAGTGCGGAATCCATCATGGCTCAGCTTGAGCAATTGGAAGAAGGGGAAGAGTTAAAGGCTAGTCAGATTGACTTGTCTATTTTATCTGACTTCGACATGACCTTTTTCCACCGTCTCTTTTGGGTCTTTGCCAAGTCAGCCAATCCTCGAATCAAGCCCTTCGAGGATTTCTTTATGTCGATGGAGGAATTCCCTCTTCAGGAAGTTGGCCCCGTCTTAATGTCCATGCTTAACCAAGGGATGACAACCAGAAAAAAGCAGAAACTTCCGAAACAGCGAGCGAGGAAGTCTTCACGG

SEQ ID NO: 10034 - protein, 139 aa, Streptococcus agalactiae
MRQNITISGKTYPLATNAYTPIAYKEQFGKDYFQDLFNMLSAESIMAQLEQLEEGEELKASQIDLSILSDFDMTFFHRLFWVFAKSANPRIKPFEDFFMSMEEFPLQEVGPVLMSMLNQGMTTRKKQKLPKQRARKSSR

SEQ ID NO: 10035 - protein, 93 aa, Streptococcus agalactiae
ATGGCACTTGACTATCAGACGGATTATGTGGAGCTAAGAAGTCGAGATGAGACTGGAGTTCGCAGAGCAACCCAAGCAGACCTTGACAATTTT

SEQ ID NO: 10036 - protein, 31 aa, Streptococcus agalactiae
MALDYQTDYVELRSRDETGVRRATQADLDNF

SEQ ID NO: 10037 - protein, 3117 aa, Streptococcus agalactiae
ATGGCAGGAAACATTAAGGGGATTACCATTGAGATTGGTGGCGATACCCAGCCCTTACAAACTGCCTTAAAGGGTTTGAATAAACAGGCTTCTGAAGCCACCAAAGAACTGCGTCAGATTGACAAGGCACTCAAGTTTGACACTGGCAATGTCACTCTTTTGACCCAGAAGCAGGAAGTCTTAGCCAAACAAGTTGAGACGACTAAAGAGAAACTCGCCACGCTTCGTCAAGCTCAAGCCCAAGTCGAGGCTCAGTTCAAGGCCGGTAACATCGGTGCAGACCAATACCGTGCCTTCCAACGTGAGGTGGAGAGTACTCAAACAGTCTTAAAGGGCTATGAATCAAAGCTAGAAAGTGTTAACAGAGCTCTCTCAGAAAACGGAGCGCAGGTTGAAACCAATCAGTCCAAACTTAATCGTCTCCAAAATGAGCAGGCACAGTTGGTGTCAGAAAGTGAAAAACTCCAAAGTTCCTTTAAGCTACAAGAATCAGCATTAGCAACTACCGCAAGTGAGGCCGATAAGTTAGCACTTGCTCAACAAAAGGTTGCTTCTCATTCAGAAATCCTTGAGAAACAGATACATAATCTGGAACAACAGCTCTCTTTGACGAAGAGTGAATATGGGGAGAATTCAGTTGAAGCTAACAAGCTTGAGAAAACACTTAATGAGACCAAGACAGCTTACAACAATCTCCAAAATGAGATGGAGGAGTTGGCATCTAGCTCTGCGAGTTCCAAAGCTTCTTTGGAAGAAACAAATAGTCTCTTAAAGGCTGATCTTCTCATGGAGTTTGGTGACCAACTGGGAGAGTTGTCGCAGAAGTTGATTGACTTCGGTCAACAATCGCTTGACGCATTTCTTGAAGTTGATGAGGGCATGGATATCATTGTCACGAAAACTGGGGCAACTGGTTCTGCCCTTGAAGAGATGACAGACATCGCCAAAACCCTAGCCACTGAACTGCCAACAGATTTTAATACGGCAGGAAGTGCCGTAGGGGAGTTAAATACGCAATTTGGGTTAACAGGAGATGCCCTTAAATCAGCCTCTACCCAGTTAATTCAATTCTCAGAGATCAATGGGAGTGATGTGACGAGTTCAGCCATTTCAGCCAAACAAGCGATTGAGGCCTATGGACTTGAAGCGACTGATTTATCAAGTGTCTTAGACACGGTTACTTATACCAGTCAGTCAACTGGTGTCGGTGTCCAAGAGTTGATGGACAAGGCAGTAGCTGGAGCACCACAAATTAAAGCCCTTGGCCTTTCTTTTGATGAGGGCGTCACCTTGATGGGGCAGTTTGAAAAAGCAGGGATTGATTCTTCTGCAGCACTTTCGTCACTCTCAAAGGCAGCTGTTAAGTATGCGGGTGATGGGTTAACGCTTCAAGAAGGACTTGCTGGAACCATTGAACAAATTAAAACCTCAACGAGTGAAACAGAGGCTCTTTCTCTAGCCTCAGAAATCTTTGGTAGTAAAGCAGCTCCACGTATGGTTGATGCCATCAAGCGTGGGGCTTTATCTTTTGAAGATTTAGCAGGAACAGCTGATAAAGCAGCTGGGATTGTCACTCAGACCTATGAGGGGACGCTTGATCCTATTGATCAGTTTACAACTGCTCAAAACACGGCGAAGTTAGCGATGGCTGAAATGGGAGACGCTATTGCTGCAACCCTAGCTCCTATCTTGGAAATATTAGCGAGTTTACTTCAAGCTGTTGCCACATGGTTCTCTGGTCTTTCAGAGCCAGTCAAGCAGTTTATTGTCATTGTCGGAAGTTTGGTTGCAGCCCTTGGCTTAGTCCTCCCGATTTTCATTGCCCTGCAAGCAGCTGCTATGGCAATGGGAACTACCATCATGGGGATGATAACTGCAGCAGCTCCAATTGTAGGGATTATTCTTGGTGTTATTGCCGTTGTTGCCTTACTGGTTGTTGGGATTCAACAACTCTGGCAACATCACGAAGGGTTTAGAACAGCTGTGACAGAAATCTGGAACGCCATCTATGCCTTTTTATCTGTCATTATCCAACAGATATCAAGCTTTGTCATGTCGATATGGGGAACCTTGACTACTTGGTGGACAGAGAACCAACAGCTAATTCTTAATGCCGCAAACACTGTGTGGACAGCTATTTCAACAGTCATTCAAACCATCATGACCATTCTTGGACCTTACCTTCAAGCCAGTTGGGAGAATATCAAACTGATTATCACGACAGCTTGGGACATCATTAAAGTGGTCGTTGAAACAGCTATCAATGTTGTCTTAGGTATTATCAAGGCAGTTATGCAGATTATCACGGGTGATTGGTCAGGTGCCTGGGAAACCATCAAGCAGGTCGTCTCTACAGTTTGGGAAGCCATCAAGTCACTGATTTCGATTGTTCTAAGTGCCATTGCTCAGTTCATTTCCAATTCCTGGAATGGCATTAAAGGCACCATGACAAACTTACTAAATAGTATCAAATCTGTCGTTAGTAATGTCTGGAATAGCATTAAGTCCACGATTAGTTCCATTCTATCTAGTATTGGCTCAACGGTATCTTCCGTTTGGAACGGAATGAAGGCTACTATCTCAGGTGTCCTAAGTGGTATTTCAAACACAGTGTCCTCTGTCTGGAATGGGGTCAAATCGACCATTACAAATGCCATCAATGGGGCAAAAAATGCGGTCTCTTCAGCCATCAATGCCATTAAGAATCTCTTTAACTTCAAGATTAAGTGGCCACATATTCCTCTTCCGCACTTTAGTGTGTCAGGTTCTGCCAATCCCCTTGATTGGTTAAAAGGTGGCTTACCTAAGATTTCCATTCAGTGGTACGCCAAGGGTGGGATTCTGACTAAACCAACGGCATTTGGTATGACAGGGAACAGCTTGATGGTTGGAGGAGAAGCAGGACGTGAAGCAGTTCTACCTCTTAATAACCAAACTCTTGGCAGTATCGGACGCAGCATCGCAGCCACCATGCCTAGCAAGGGAACAACCATAACGGTCAATATCACAGATGTTGTGATTCGTGAAGAAGCGGATATGAAAAAACTAGCCGATTATGTAGCTGGTCGATTAGCTGATGAAATGGCACGACAAGCCTTACTGAGAGGAGGAACAGTG

SEQ ID NO: 10038 - protein, 1039 aa, Streptococcus agalactiae
MAGNIKGITIEIGGDTQPLQTALKGLNKQASEATKELRQIDKALKFDTGNVTLLTQKQEVLAKQVETTKEKLATLRQAQAQVEAQFKAGNIGADQYRAFQREVESTQTVLKGYESKLESVNRALSENGAQVETNQSKLNRLQNEQAQLVSESEKLQSSFKLQESALATTASEADKLALAQQKVASHSEILEKQIHNLEQQLSLTKSEYGENSVEANKLEKTLNETKTAYNNLQNEMEELASSSASSKASLEETNSLLKADLLMEFGDQLGELSQKLIDFGQQSLDAFLEVDEGMDIIVTKTGATGSALEEMTDIAKTLATELPTDFNTAGSAVGELNTQFGLTGDALKSASTQLIQFSEINGSDVTSSAISAKQAIEAYGLEATDLSSVLDTVTYTSQSTGVGVQELMDKAVAGAPQIKALGLSFDEGVTLMGQFEKAGIDSSAALSSLSKAAVKYAGDGLTLQEGLAGTIEQIKTSTSETEALSLASEIFGSKAAPRMVDAIKRGALSFEDLAGTADKAAGIVTQTYEGTLDPIDQFTTAQNTAKLAMAEMGDAIAATLAPILEILASLLQAVATWFSGLSEPVKQFIVIVGSLVAALGLVLPIFIALQAAAMAMGTTIMGMITAAAPIVGIILGVIAVVALLVVGIQQLWQHHEGFRTAVTEIWNAIYAFLSVIIQQISSFVMSIWGTLTTWWTENQQLILNAANTVWTAISTVIQTIMTILGPYLQASWENIKLIITTAWDIIKVVVETAINVVLGIIKAVMQIITGDWSGAWETIKQVVSTVWEAIKSLISIVLSAIAQFISNSWNGIKGTMTNLLNSIKSVVSNVWNSIKSTISSILSSIGSTVSSVWNGMKATISGVLSGISNTVSSVWNGVKSTITNAINGAKNAVSSAINAIKNLFNFKIKWPHIPLPHFSVSGSANPLDWLKGGLPKISIQWYAKGGILTKPTAFGMTGNSLMVGGEAGREAVLPLNNQTLGSIGRSIAATMPSKGTTITVNITDVVIREEADMKKLADYVAGRLADEMARQALLRGGTV

SEQ ID NO: 10039 - protein, 723 aa, Streptococcus agalactiae
GTGATTAAACATAATGAATTAGTACTGAATGGAAAAGGCACCTCGTCTTTTCCTTTTAAAGTTCTTGTGGAAGATAGACCGAGTATTCAAGTGCCACGGTCTAAAACGCAACTCCTAGACCATCGTGGGTTGAGTGGGGCGATTGTTCAAACCAATAAGCATCGTGAAGTGATTGAGAAATCTTACCGCTTGTATCTGATTGGTGCGAGTGAGAAAGAGGTCAATGAGTTCTCGGCTTATCTCATGCAGGAAGGATTTTGGCTAGAAAGCGAACGCCTTAAGCTCACTAGGCTCTGGTGTTACCGAACGGATAGCTTTGACATCAAACAGGATGACCATGATGTGTATGTGATTGATGTGACCTTTATCTGTCACCCCACTCGCTTTTTTAAGAGTGGGGATAGGCAAGTTTTGAGTGCCAATGGTGTGTTAAAAACACAAGGCTCTGCCCTTGCCTTTCCTAGCATTACCATAACTGGTCAATCCGTATCAGAGACTTCGTTTACAGTAGGTGACCAGGTGATACGGATTGAGAAATTTACAGAGCCTCTTGTTATGGTGAATCACCCAGACCGTCCTAGTTTTAAGACCCTATCAGGGAAAGCTGTCAAGTGGTCTGGGGACTTCATCACGATTGATGCTAGTCATCCAACACAATCTGTCGGAGTGATTTTAGGCAGTGGGATCTTATCGCTTACTTTTGAAACGAATTGGGGGTGGGTG

SEQ ID NO: 10040 - protein, 241 aa, Streptococcus agalactiae
MIKHNELVLNGKGTSSFPFKVLVEDRPSIQVPRSKTQLLDHRGLSGAIVQTNKHREVIEKSYRLYLIGASEKEVNEFSAYLMQEGFWLESERLKLTRLWCYRTDSFDIKQDDHDVYVIDVTFICHPTRFFKSGDRQVLSANGVLKTQGSALAFPSITITGQSVSETSFTVGDQVIRIEKFTEPLVMVNHPDRPSFKTLSGKAVKWSGDFITIDASHPTQSVGVILGSGILSLTFETNWGWV

SEQ ID NO: 10041 - protein, 2913 aa, Streptococcus agalactiae
ATGCTTTACTTACTTGATGGTCAAACAAGGACAGCGAAGTGGAACGGCCAGCCCCTCTTTGAAGCAGTAAGTGCGACGGTAGAAGAAAAGTTGAATGGCACCTTTCAGCTTCGCTTAACTTATCCCATTACAGATTCAGGTGTTCATGAAACCCTTAGAACAGATGAATTGATTTTGTGTCCAACTCCAGATTTAGGAAAACAGCTCTTTCGTGTTAAGCAGGCAAAAATTCAAGACGATACGGTAGAGCTTGAGTGCTCTCACATTTCTGATGATGTGATGAAACGTCAAATTAAGCCCTTTTCTGCGACTAATACCACCTGCCAATCAGCCCTTATGAGGATGGTTGAGGTTTGTCCATCTGATTTAGGACTTTTTAGCTTTGACAGTGATGTGACGGAGCGTCATACCTATGTGTCTGACGAAGACTTGACACTTTATCAAGCTCTAATGGATGGTAAACATTCCATCCTTGGAACCTGGGAAGGTGAGCTCGTTCGTGATAACTTTCAGCTGATAGTTAAGAAACACCGTGGCAACGATAAGGGAGTTATTCTCACAAGCCATCACAATCTGAAAGCTTTTGAGGATAAGGGTGATTCTGAGAAGGTCATTACGCGCATCTATGCGACCTCAACCTTTCAGATAGAAGGTAGTGATGAGGCTACCGTTCTTTCTGTCGTTGTGGAAAGTCCCCTCATTAACCAATACCCTTATATCTATGAAGCACGGTATGAGAATAACACGCTTCAGACAGAGGAAGAATTACGCCAATGGGTGATGGCTAAGTTCACACATGAGCACATCGATCACATCTCTAGACAGATAACCGTTGAAGCTTATCAGCTTGATGGTCAAGAAGTCCATCTTGGAGATACAGTCACTCTTAAAAGTCAAAAGCACAAGGTAGATGTTAAGAAAAAGGCAGTTGGTTATACCTTTGACGCTCTAGAAGAAGTGTATCTTTCGGTGACCTTTGATGATGAGGTTAGCTTTACAACCTCTGGATCATCTGGGCCCCATTCGCTAACCAGTGCGGCTAAGACCATTCTTGATGTCCATCAGTCGGTTACAGAACACCGTGCGTCTAAGGAGCGAGCTAATTTTAACAAGGTCTTTGATAGGCACTTTGAGCGTCTTCAAACAGAAGTTGAAGATGGTATCGCTAAGGCCGAAGCAGAAGGCGAGCGTTCTGGGAAGAAAGCTGCCCTTGATTATCTGGCAACGGATGCCCTTGAAGCACGAGTCGCAGCCCTTCAAAAAGCTACGATTGATGAGTTGACCGTCTCTAGTTCAGCATGGATGACAAGGCTTGTCTCCCAACAGATTCTATCAGAGTATGTGAAGAGTTTAGAGGTCGAGGCAGACAGGGTCGTTATTCCAGGTCAACATACCCCAGTCTTTAGTTTGGATAGGGATGGGAATCTTTCCATTGATACGCCACTCTTAAAGGTGAGAGGGGAAAGTATAGTGACACAAGCTGATCTTAAAACCATCTCTTTAACTCCTGGACCAAAGGGTGATGCTGGAGCAGATGGGGTCGGTATTCAATCAAGGGAGCAGTATTACTTAGTTTCTGCACAAAAGACTGGTCTTACGACAACAAGCACTGGTTGGAGTAAAACGATTCCTTCTCTAACTTCAACCCTTAAGTATTTGTGGAATTATGAAAAAACCACGTTCACCAATGGCTCAACGACAGTCACAACGCCTGTTGTCATCGGTGCTTATGGGGACAAGGGTGTGGATGGAAAGGCTGGTAAGGATGGAAAGACCCTATACACTTGGCGCATGTACGCAGATAGTGACAAGGGAGATGGGATTTCTGCCGTCTCAACGGGCAAACGTTACCTCGGACTAGCAGTTAATAGGGAGAGCGCAACGCCTTCAACCAATCCTAGTGACTATACCTGGTCGTCCTTTTTTGAAGGAACAGAACTCGGTGGGCGCAATTACATTGACGATTATGCCATGAAAGCGATGACTTTTTCATCTGTTACCTCTGAGTGGAAGAAGGAGGTAATTGAAGATACGAGTTCAGTTAGTGGCGTGACTGTGAAGATGACCTGTACCAAAGCAGGTACTGGCGGCTTTCATCGGAACTTCCATGATTTACGAAGTCGAGTTGGTGCTAACATGACGTTTAGTATTGATCTCAAGGCAAGCAAGACGGTTAGTCTTACCATCGGAAATGAACTGAGCGGTACTAAGGTTGTTCAAGTTAGTTCTAGCTGGCAGCGGTATTCGGTGTCTTGGAAAGTTACTAGTGCCCAGAATCATTCCTATGTCTTTTACCTGAAGTCAGGAACATGGGTGGTGGGAGATGTGGTTTATCTTCGAAATGTTCAACTAGAAGATGGCAACGTTGCTTCAGCTCCAGGACCATCTTTGAATGATCTTATCGCCCAGATTGATGCCAAGGCAGATAATGGCTTCATGAAGCAGCAATTAGACCTTCTAACTGAAAAAACAGAATCTCTCCGAGTGGATCTTGAAGCAAGAGCGTTGGCAAAAGAAGTGGCCGATTGGCTCAAGTCTTATAAAGAATTTGAGAAAAATAATGAAGCCGTCCTTGCGCAATTTAATCAAGACTTTATTGATAATACAGCTCGTATCGCAGCGATTGAAGCCGATCTTAAAGCCAACAGTCTCTTGCTTAACTTTGTGAATACTTATCTGAGAGCTGGTGATAATGGGGTCATTATTGGTAAGAAGGATAACTCTGAGGTTATCGAATTAACCCCACAAGGGATGATGATTAAGTCAGCTGGTAATGCCGTCATGACGGTGACAGCTGGTGTCATTAAGATTCATCATGGGGTATTTGTGGAGACCTTACAGGTTGGTTATTATCGACTAGAAGCCGCAAGGCATAATGCTAAGCATTTGGTTTGTCGTTTTATTGATGCCAAG

SEQ ID NO: 10042 - protein, 971 aa, Streptococcus agalactiae
MLYLLDGQTRTAKWNGQPLFEAVSATVEEKLNGTFQLRLTYPITDSGVHETLRTDELILCPTPDLGKQLFRVKQAKIQDDTVELECSHISDDVMKRQIKPFSATNTTCQSALMRMVEVCPSDLGLFSFDSDVTERHTYVSDEDLTLYQALMDGKHSILGTWEGELVRDNFQLIVKKHRGNDKGVILTSHHNLKAFEDKGDSEKVITRIYATSTFQIEGSDEATVLSVVVESPLINQYPYIYEARYENNTLQTEEELRQWVMAKFTHEHIDHISRQITVEAYQLDGQEVHLGDTVTLKSQKHKVDVKKKAVGYTFDALEEVYLSVTFDDEVSFTTSGSSGPHSLTSAAKTILDVHQSVTEHRASKERANFNKVFDRHFERLQTEVEDGIAKAEAEGERSGKKAALDYLATDALEARVAALQKATIDELTVSSSAWMTRLVSQQILSEYVKSLEVEADRVVIPGQHTPVFSLDRDGNLSIDTPLLKVRGESIVTQADLKTISLTPGPKGDAGADGVGIQSREQYYLVSAQKTGLTTTSTGWSKTIPSLTSTLKYLWNYEKTTFTNGSTTVTTPVVIGAYGDKGVDGKAGKDGKTLYTWRMYADSDKGDGISAVSTGKRYLGLAVNRESATPSTNPSDYTWSSFFEGTELGGRNYIDDYAMKAMTFSSVTSEWKKEVIEDTSSVSGVTVKMTCTKAGTGGFHRNFHDLRSRVGANMTFSIDLKASKTVSLTIGNELSGTKVVQVSSSWQRYSVSWKVTSAQNHSYVFYLKSGTWVVGDVVYLRNVQLEDGNVASAPGPSLNDLIAQIDAKADNGFMKQQLDLLTEKTESLRVDLEARALAKEVADWLKSYKEFEKNNEAVLAQFNQDFIDNTARIAAIEADLKANSLLLNFVNTYLRAGDNGVIIGKKDNSEVIELTPQGMMIKSAGNAVMTVTAGVIKIHHGVFVETLQVGYYRLEAARHNAKHLVCRFIDAK

SEQ ID NO: 10043 - protein, 1854 aa, Streptococcus agalactiae
ATGGCAGATTATGGTTCAAATAATGATAGGGGCTATACCCTACTTTTGCGAGTGGAAGAAACAGGCACTTCGACCGCTAATAACACATCTACTGTTCGAGTCCAACTCTGGCTAAAGAATGGTTATACGACCTTTGGGATGTATGACTGTAGGGCAAGTGTGACTATCAATGGGCAGACACTTTCTTGGTCAGGGCGACCAGATATGTACACGGCTCATAGTTCCCTTCACTTGATTGATAAGACCATTACTGTGCCGCATGATTCTAATGGGTCAAAAACCATCAGTTTTTCTGCGACCTTCTCAGGATCTGGTGGTTGGTCACCTGGCACCTTAAATACAGGGTCACAAACGCTACGCTTAAGTGATATCCCACGGTCATCGAGTGCTACAGTTTCTGGGAATATGATGGGACAAGCCGTAACCATAACGATTAAACGTGCCAGTAGTGATTTTACCCATAACATGACCTGGCATTTTGGCAGTCTAAGCGGCACGATTGGAACAGGCATTGCGACCTCTGTAACGTGGATGCCTTCGATTTCTCAACTAGCAACTCAAATACCAAATAGCACCTCAGGTAATGGGCATTTAACGCTGGCCACTATCTATGGTGGTAAGACAATAGGTTCTATGACAATTCCCATTACCCTCAACCTACCGACGTCAGTTGTTCCAACCTTGGGCAGTATTTCTATTTCAGAATCCCATGCCACTGCAAAAACGATTTTAACTGGCACCAGTTTTGCCCAGTTGGTGTCCAATCCTAAAGTGACCTTCAATCAAGGAGCGGGTATTTACGGATCGACGATTCCTTCGACGGGTTTTCGCGCAGAGGTCTTTAAGTTTGAGAACAATCAGTGGGTTCAACTTCAAAATGTCACTAGTAGTAATAACGGACTATTGGGTGGAATAAACTGGATTGGTCGAGCTAAGGTCTCTGCCTATGTGACCGATTCGAGAGGGCGACAAAGTGCTCGAAAAGAAGTGGAGATAACCCTATTAGAGTATTTCAAGCCTATCTTTTCATTCTCAGCGGTTCGAGCTGGTTCTAGTATGAATCAGGTGACGGTCATACGAAAGCTTAAGATTGCCCCTTTAACCATCAATAGTGTCCAAAAGAACAAGGCGGCCTTGACATGGGAAGTAGTCGATTTAGCAAGCGGTCAGAAGGTCACAAACGCTGGTGGTGCCGCCAACTGGACGTCAACTACGGAACACACAAAGACCGATTTCCAAGCTATTTTAGGTGGCACCTATGATACCACCAAATCCTACACCATTATTGGAAGGCTAGAAGATCTCTTTTACTCCACGACCTTTGAATTTACCATTGGTCCAGAAAAAGTTGTCTACGGCTTAAGTTCATCTGGTATGGGGATAGGGAAAGCCTGGACAAGAGGCGTGCTCGATGTGGATGGGAGCTTACCTGCTTATTTTGACGGGGACATTTATATGAAGAATAAGAAACTTCTTGATATTTTCTATCCAGTGGGTGTTATTTACGAGTCAACTTCAAGCTCTAATCCCTCAACATTTATGGGAGGCACTTGGGAGCGGTTTGGCAACGGTCGGATCTTGGTTGGTGTGTCTGAGAATGAAAGTGAGTTTAATAGCGTCAATCAGTCAGGTGGTAGTAAGACACATACCTTGACCATTGATGAAATGCCATCTCACTCACACGCTCAGTATGTGACGGCTAACAATGGTTCAGGAGCTGTTCGTCGTGACTACTCTTCAGATGGCAGCTCTACGATTTATCCGCAAGGAAATAACACAGGAAATACTGGTGGCGGTAAGCCACACAATAACTTACAACCTTACGTCACGGTTTACCGTTGGCGTAGGGCAGCA

SEQ ID NO: 10044 - protein, 618 aa, Streptococcus agalactiae
MADYGSNNDRGYTLLLRVEETGTSTANNTSTVRVQLWLKNGYTTFGMYDCRASVTINGQTLSWSGRPDMYTAHSSLHLIDKTITVPHDSNGSKTISFSATFSGSGGWSPGTLNTGSQTLRLSDIPRSSSATVSGNMMGQAVTITIKRASSDFTHNMTWHFGSLSGTIGTGIATSVTWMPSISQLATQIPNSTSGNGHLTLATIYGGKTIGSMTIPITLNLPTSVVPTLGSISISESHATAKTILTGTSFAQLVSNPKVTFNQGAGIYGSTIPSTGFRAEVFKFENNQWVQLQNVTSSNNGLLGGINWIGRAKVSAYVTDSRGRQSARKEVEITLLEYFKPIFSFSAVRAGSSMNQVTVIRKLKIAPLTINSVQKNKAALTWEVVDLASGQKVTNAGGAANWTSTTEHTKTDFQAILGGTYDTTKSYTIIGRLEDLFYSTTFEFTIGPEKVVYGLSSSGMGIGKAWTRGVLDVDGSLPAYFDGDIYMKNKKLLDIFYPVGVIYESTSSSNPSTFMGGTWERFGNGRILVGVSENESEFNSVNQSGGSKTHTLTIDEMPSHSHAQYVTANNGSGAVRRDYSSDGSSTIYPQGNNTGNTGGGKPHNNLQPYVTVYRWRRAA

SEQ ID NO: 10045 - protein, 396 aa, Streptococcus agalactiae
ATGAAAGAATTACTGGCAACAAATAAAGTCCTCTTCTCAGCGATTGGAGGACTTATCGGATCAATCTTTGGAGAAGTCGATGGCTTTCTCTTTGCATTGATGGTTTTTATTTCCATCGATTACATCACAGGTCTCATGGCAGCAGCCGTTGAGAAGAAATTAGCTAGCAATATTGGGTTTAAGGGCATCTTCAAAAAAATTGTCCTTTTATTTTTGGTAGCAGTAGGACAAATCATTGATGAGCATGTCTTGAAACAAGGGGGCATGGTTCGTACTGCCATCATCTTTTACTATCTCTCAAATGAAGGCTTGTCCATCATTGAGAATGCGGCTAGGATTGGACTACCAGTTCCTGAGAAGTTGAAAGATGTGCTGAAACAATTGAAACAAGGAGAT

SEQ ID NO: 10046 - protein, 132 aa, Streptococcus agalactiae
MKELLATNKVLFSAIGGLIGSIFGEVDGFLFALMVFISIDYITGLMAAAVEKKLASNIGFKGIFKKIVLLFLVAVGQIIDEHVLKQGGMVRTAIIFYYLSNEGLSIIENAARIGLPVPEKLKDVLKQLKQGD

SEQ ID NO: 10047 - protein, 1397 aa, Streptococcus agalactiae
ATGACTTTTTTATCAAAGATTAAAGACGGTTGTTTAGCATCTTGGGAGCATGGTATTCTTCCTTCCGTGTCAGCAGCACAAGCTATCTTAGAGAGTGGTTGGGGAGAGTCTTTGTTAGCACAATACCCTAATCATAATCTCTTTGGAATCAAAGCTAGTTCTGATTGGAAGGGAAAACGTGTTGACCTTCCAACTCAAGAATACATTGATGGGAAATTCGTCACGGTTGAGGCTACCTTTAGAAAGTATGACTCATGGGAGGAATCCATTAAAGATCATGCGTTGTTCTTTTCAGAAACAGCATGGCGACGTAGCCATTACCAAAACGTGCTCGGTGAAGAAGACTATAAAAAAACCTGTCTCGCTTTACAAGCGTCAGGTTATGCGACAGATCCTAACTATGGGTCAAAATTGATTACACTTATTGAAGCACATCATCTCAACACTTGGGATGACCGTATTTTAAACAAAAAAGGAGAAACGACTATGAGTAAACATTTAGTTATCTGCGGACATGGACAAGGACAAACAGGTTATGATCCTGGAGCAACGAATCCTAGTTTAGGTATTACTGAAGCAGGAAAGGTTCGTGAGTTTGCGAATCTGATGAAGAAGTATTCTGGGAATCGGATTGATTACATCACTGACCATAATGTCTATAACTACCGCAGTATTGGTAGTTTGGGAAATGGCTATGAGTCGATTACGGAACTTCATTTCAACGCTTTTAATGGACAAGCGAGAGGAAGTGAAATTCTGATTTATTCAGGCTACACAGCTGATAGTTTAGACCAAAAACTGCTAGCTATTCTAGCCAAGCGTTTTACGAATCGTGGTTTTAAACAAGTGAACTGGCTCTACAATGCCAATGTCTCAGCAAGTCGAGGATACAATTATCGATTGGTGGAGATTGCCTTCATCGATAATAATAGTGATGTGGGCATCTATGAAGCCAATAAAGACAGTATGGCTCGTGAATTTGTACAAGCCATCACTGGGCAAGCTCAAGTAATTTCACCCAGTCCCAATACTCCTCAATCAAGGGTTACTTCCTATCATGTTGGTGACCCTGTTACTGTTCAACAACATGCGACGCATTACCAGACAGGTCAAGCGATTTCGTCATGGGTTAAAGGCAAAACTTTCAAGGTTATTCGTGTGAAGGATGTTAATCAATCCAATAGTAAGAAAGCCTACCTGCTTGAGGGAATTAACTCATGGGTCTTGGAACAAGATGTCAAAGGCACAACGAACGGACATAGTGAACAGACTTATACGGTTCAAAAGGGTGATACCCTTTATGGTATTGCACGGAAGTTTAAGACCAGTGTCAGTGAATTGGTGCGACTTAACAGCATCATCAATCCAAGTCTGATCTCAGTTGGACAGAAGTTGAA

SEQ ID NO: 10048 - protein, 466 aa, Streptococcus agalactiae
MTFLSKIKDGCLASWEHGILPSVSAAQAILESGWGESLLAQYPNHNLFGIKASSDWKGKRVDLPTQEYIDGKFVTVEATFRKYDSWEESIKDHALFFSETAWRRSHYQNVLGEEDYKKTCLALQASGYATDPNYGSKLITLIEAHHLNTWDDRILNKKGETTMSKHLVICGHGQGQTGYDPGATNPSLGITEAGKVREFANLMKKYSGNRIDYITDHNVYNYRSIGSLGNGYESITELHFNAFNGQARGSEILIYSGYTADSLDQKLLAILAKRFTNRGFKQVNWLYNANVSASRGYNYRLVEIAFIDNNSDVGIYEANKDSMAREFVQAITGQAQVISPSPNTPQSRVTSYHVGDPVTVQQHATHYQTGQAISSWVKGKTFKVIRVKDVNQSNSKKAYLLEGINSWVLEQDVKGTTNGHSEQTYTVQKGDTLYGIARKFKTSVSELVRLNSIINPSLISVGQKLN

SEQ ID NO: 10049 - protein, 105 aa, Streptococcus agalactiae
TTGACCGCTTTTGAAGTCGTGCAAATCATCATTGGTTTTGGTAGTTTTACCGTTGCTTTGATTGGCTTGTGCTATAAAATCTTCAAAGATGACGACAAAAAGAAA

SEQ ID NO: 10050 - protein, 35 aa, Streptococcus agalactiae
MTAFEVVQIIIGFGSFTVALIGLCYKIFKDDDKKK

SEQ ID NO: 10051 - protein, 1236 aa, Streptococcus agalactiae
ATGGCAGTAAGGTTAATTAAGACAAAAAGTAATCGTAAAAAACAACGTGTCTGTGCTTATACTAGGGTGTCAACAACAAATAGTAGTCAGCTTGATTCCCTTGAAAACCAGAAGGCTTATTTTGAAACATTCTATGTCAATCGGGAGGACGTCGATTTTCTCGGAGTCTATTACGATAAGGGGATTTCTGGGTCTAAGGAGAAACGACCGAGTTTTCAAGCTATGCTTGAAGCTTGTAGGCAAGGTCAGATTGATTTGATACATACCAAGTCCATTTCACGGTTTGCGAGGAATACCATGACGGTATGAAGTCAGTCGTGAGTTGAAAGCCCTAGGTGTTGGTATCTATTTGAAGAGCAGAACATCAATACCTTATCCAATGAAGGAGAGGGCATGCTTTCAGTTCTTGCCAGTTTGGCAGAGGAAGAGTTGCAAAGCATGAGTGACAACCAGCGGTGGGCCTTTCAGAGAAAGTTTCAACGTGGGGAGATGGTCATCAACACCAAGCGATTCATGGGTTATGATGTGGACGATAAAGGAGAGTTGGTCATCAATGAAGCAGAAGCACAGATTGTGAGACGGATTTTCCAACTTTATCTTGATGGTATGGGGATGCATCGAATAGCTAAACTTTTAAATCAAGAGAATGTGCCTACGGTGACAGATGCTAAATGGCATGATACAACTGTTCGAAATATCCTAAAGAATGAAAAGTACAAAGGAACTGTCCTTCTTCAAAAATATTTTCATGTTGGTATCAATTGGCCTAAGAGATTAAACCAAGGTCAGGTAGAGCAATATTTGATTGAAGATAACCATGAGCCAATTGTTTCAAAAGAAGTCTGGCAGGCTGTCCAAGATAAGCTTGCAAGCAAAACTTGGAAACAGGGAGTCAATAAGCACTATCGATTTACGAGTATGCTTAAATGCGAGTATTGTGGGTCAACCCTCAAACGCCAGGTTACCTACAAGAAACAAATAGTTTGGTGTTGTTCCAAGTATATTAAAGAAGGTAAGGCTTCCTGCCGAGGCATGCGCGTGCCTGAGAAAGCTATTGAAGAGTGGAAACTTAGGACACCTGTAACAGTGATAGAAAGGAACGAATATGGGCAAAAACATTACAGTTATTCCAGCCAAGAAAGTGCAGCTGACGGTCACCCATCAGCAAGCAACCAAAATAAGAGTGGCAGCCTATTGTCGGGTGTCCACCGACCAAGACGAACAGCTATCAAGCTA

SEQ ID NO: 10052 - protein, 413 aa, Streptococcus agalactiae
  VARIANT 103: Xaa = Any Amino Acid
MAVRLIKTKSNRKKQRVCAYTRVSTTNSSQLDSLENQKAYFETFYVNREDVDFLGVYYDKGISGSKEKRPSFQAMLEACRQGQIDLIHTKSISRFARNTMTVXEVSRELKALGVGIYFEEQNINTLSNEGEGMLSVLASLAEEELQSMSDNQRWAFQRKFQRGEMVINTKRFMGYDVDDKGELVINEAEAQIVRRIFQLYLDGMGMHRIAKLLNQENVPTVTDAKWHDTTVRNILKNEKYKGTVLLQKYFHVGINWPKRLNQGQVEQYLIEDNHEPIVSKEVWQAVQDKLASKTWKQGVNKHYRFTSMLKCEYCGSTLKRQVTYKKQIVWCCSKYIKEGKASCRGMRVPEKAIEEWKLRTPVTVIERNEYGQKHYSYSSQESAADGHPSASNQNKSGSLLSGVHRPRRTAIKL

SEQ ID NO: 10053 - protein, 1341 aa, Streptococcus agalactiae
GTGCAGCTGACGGTCACCCATCAGCAAGCAACCAAAATAAGAGTGGCAGCCTATTGTCGGGTGTCCACCGACCAAGACGAACAGCTATCAAGCTATGAGAACCAAGTATCTTACTATCGTGATTACATCTTAAAACATGAAGATTATGAGCTTGTGGACATCTATGCGGACGAAGGCATTTCTGCAACCAATACCAAAAAACGAGAAGCCTTTAACCGACTGATACAGGATTGTAGAGCAGGTAAGGTGGATAGGATTTTAGTTAAGTCCATTAGTCGTTTTGCCAGAAACACCTTGGATTGTATCAAGTATGTCCGTGAGCTGAAAGAATTGGGGATTGGTGTCACTTTTGAAAAGGAGAATATTGATAGCCTTGACTCTAAAGGTGAGGTATTACTCACGATTCTTTCTTCTCTTGCCCAAGATGAATCACGCTCCATTTCAGAGAATGCGACATGGGGCATTCGTAAGAAGTTTGAACGTGGAGAGGTTCGTGTCAATACCACCAAGTTCATGGGGTATGATAAAGATGAGAATGGTAAGCTAGTCATTAATCCAGAGCAAGCAGAGGTAGTTAAACATATCTATCAACAGTTCCTAAAAGGCTACAGTCCAGAAAGCATTGCCAAGGAACTTAACACTAACGGTATCAAGGGATGGTCAGGAAAAGCCAACTGGTATCCTAGCAGTATTCTCAAAATGCTTCAGAATGAGAAGTACAAAGGTGATGCCTTACTTCAGAAAACCTACACGGTGGATTTCCTTACAAAAAAGCGAACAGAGAATGATGGGCAGGTCATCAATACTATGTGACCAATAATCATGAAGCCATTATTGATACAGAAATGTGGGACACTGTTCAAGAAGAATTGGCAGGCGAAAAGACTTCAGAGAAAAGCACAAGCTGAAAACCTATATCATGCAAAGTGACGACAATCCTTTTACCACTAAGGTCTTCTGTGCCGAGTGTGGTTCTGCCTTTGGACGAAAGAACTGGACGACCAGTCGAGGTAAACGCAAGGTTTGGCAGTGTAACAACCGCTACAAGGTCAAGGGACAGATTGGTTGCCAGAACAACCATATTGATGAAGAAATGCTTGAGAAAGCCTTCATGAAGGCAGTGGAATTGCTTCAGGAACATAGAGCAGATGTGGTGGTTAAGTGCAAAAGTTAGAAAAGGGAACTAATCTGCTGCATAAGCACTATGCCAAACAAATGTATCAGTTACTAGATTTAGAGAAATTTGATGGAACTATCATGAACAAAGTTTTAGATCACATCAGTATTTCAGAAGTCGGACAAATTATCGTGATTTTCCTAGAAGGAACTGAAGTAGAATTA

SEQ ID NO: 10054 - protein, 448 aa, Streptococcus agalactiae
  VARIANT 293: Xaa = Any Amino Acid
MQLTVTHQQATKIRVAAYCRVSTDQDEQLSSYENQVSYYRDYILKHEDYELVDIYADEGISATNTKKREAFNRLIQDCRAGKVDRILVKSISRFARNTLDCIKYVRELKELGIGVTFEKENIDSLDSKGEVLLTILSSLAQDESRSISENATWGIRKKFERGEVRVNTTKFMGYDKDENGKLVINPEQAEVVKHIYQQFLKGYSPESIAKELNTNGIKGWSGKANWYPSSILKMLQNEKYKGDALLQKTYTVDFLTKKRTENDGQVNQYYVTNNHEAIIDTEMWDTVQEELAXRKDFREKHKLKTYIMQSDDNPFTTKVFCAECGSAFGRKNWTTSRGKRKVWQCNNRYKVKGQIGCQNNHIDEEMLEKAFMKAVELLQEHRADVVVKWQKLEKGTNLLHKHYAKQMYQLLDLEKFDGTIMNKVLDHISISEVGQIIVIFLEGTEVEL

SEQ ID NO: 10055 - protein, 771 aa, Streptococcus agalactiae
ATGGGTGAAAATTTGAATTCTAATATAGATCCTCGAATTATATTTAAACAATTACCTCCAGCTACAATAATCAAAGGTTTTGTAGCTGGTGAGACCAAATGTAATTATGAAATTTATCTATTGGAATTGCTTAATAAATCAGTATATTTTCGGGAAAAAGGTAAATCTAAATTTCACGCACCTGAAGACGAGAGCCACGGGGAATGTGATGCTGTAGCAGATGATTACAAGATAGACTTCAAGCTTCTTTCTTCAAGTAGTAGACTGCAGGCAAGCAGTTTATTTTCACCTAGTATCACTAATCTTGGAAATGGGATTACTGCAATTGGAGAAAGTAGAAATCCGAACGGGGAAATAAAAGCAACTCAGATTCATGCTGCGTTTCGATTTAGAACTGTATCTGATTTAATACGACTCAAGGTAAAGCGTCAACATGTTAGGAAACAATGCCTTGAAAAAGATATTATAAAAGTCCTAAATATGCTTGAGAAGCAGAAAAATCTCCTTTTATTTTTCCCTTACATTTTTTATACGGAAGAAGAAATTAGCACTAATGAACTAGATGATATCATTTTAAATGCAATAAGCTATGATTTTTCTTCTCTTTTCGCCTACAGGCACATAAAGGTACAATCGTTTGAAACTTATTTACTTACTATTGTACGTGATGAGTTTAATATTTTTAAGATATCCAACAAAAGGCTAAAACTCATTGAAAAACTCAGTTGTTCGGAATTACCTACTTTTGTTAAATTAAAAAGTTATTCTATC

SEQ ID NO: 10056 - protein, 257 aa, Streptococcus agalactiae
MGENLNSNIDPRIIFKQLPPATIIKGFVAGETKCNYEIYLLELLNKSVYFREKGKSKFHAPEDESHGECDAVADDYKIDFKLLSSSSRLQASSLFSPSITNLGNGITAIGESRNPNGEIKATQIHAAFRFRTVSDLIRLKVKRQHVRKQCLEKDIIKVLNMLEKQKNLLLFFPYIFYTEEEISTNELDDIILNAISYDFSSLFAYRHIKVQSFETYLLTIVRDEFNIFKISNKRLKLIEKLSCSELPTFVKLKSYSI

SEQ ID NO: 10057 - protein, 1503 aa, Streptococcus agalactiae
TTGGTTAATCCAGAGTTTTATGAAAAAATAGCTAAAATATTCTGTGGAGATGATTTAGAACTATTCAAGTACAAATCCGGCCCAGACCTAGTTCACTTTTTTAATAATAATTTCAAAATATCTGATAGCTATGGACAGGGCTTTCCAACAAGGTGGAGATATGTAAATCAAAAATTATTAGATTTTTCTTCAGTAGGAAAGATTGATGAGTATTTCAATATAATTCTTTCTAAACAGTATCTTTTAACAGAAAGACAAATCAGTGAAATTGATGCACTTGTGCATCAACAAAGAATATTAGATGAACTGAATAAAGTATGCTCGGTTTACTCGCTAAAACTATCTCAAAAAGATGGTGCATTTCATTTAGTAGAAATTGATTTAGATCTGATTGAAATTGGTAGTGGTGGTTTTGCAAATATTTATTTCCAAAAATCAACAGGACTAGTATTGAAAAAACTTAATGAGGAATCTGCAAGAAGCGCTTCAATCCGAAGCCGCTTTAAGCGTGAATATGAAATAACTAAATCTTGTTCAGATATTGGAAGTATCATTAAAGTGTATGATTTTGATATTGGTAATTGCTCATATACTATGGAGAAAGCAGATAATATATTGGATGACTTTGTTAAAGAAAGTTTTTTGACAGAGGATTCTCAAATTAATATTATTCGACAAATTTTGTATTCGATGTCACTAGTTCATCAAAGAGGCGTGCTACATAGAGATTTGAGTCCGACCAATATATTCTTCATAAATGGTATAATTAAATTAGCTGATTTTGGATTGGGGAAAAATCTGAATACGTTAACTTCTCATCAAACTATGGATACGGCGTCTTTTGGGCAACTTTTTTATTGTGCTCCAGAGCAACTTACCCTGTTGAAAGATGCTGATAAACGCAGTGATGTTTACTCACTAGGACGTATAATAAATTTTGTAATGACAAAAAATCCTAACGATTTTTCCCACTCATTACGTTCAATTAGTGAGAAAGCAACTAATTTAAATCCAGAATATCGATATGAAGATGCTACTAACATGTTAGAAAAACTCAATAGATTAGTTAGTATCAGAGGTGATGAAAAATATGAAGTAATGATATGGGATAAGATTTCAAATCAAAAAATTGATTCGGATGTGGAAAATTATATCTATGAATTATCTGGTATAGACTTATGTCAAAAGTGTATGCAGAAAGGTAATATTTTTTTAGATGCGCTATTTGAATTTGTAAAAATAGATGATAGTCATGCAATCTACATAGTCCAACAGATAGGCTCTCATTATAAAACTCAGTTAAAGAAATTCGAAGATGCGGATATTTTTGCAAACTTTGCCTACAGAATTTTGAAAGGGAATTTTACTTATACTATAAATGAAGTTGCAGCTACAATATTGAGATATGTTGCTTTTGAAGTTAATCGATTTAATGCGCAACACAAAATCGATGATTTAAAGGCACGTGGATTAGAACCTTTAATTGAAGACATCTTAGAAAGA

SEQ ID NO: 10058 - protein, 501 aa, Streptococcus agalactiae
MVNPEFYEKIAKIFCGDDLELFKYKSGPDLVHFFNNNFKISDSYGQGFPTRWRYVNQKLLDFSSVGKIDEYFNIILSKQYLLTERQISEIDALVHQQRILDELNKVCSVYSLKLSQKDGAFHLVEIDLDLIEIGSGGFANIYFQKSTGLVLKKLNEESARSASIRSRFKREYEITKSCSDIGSIIKVYDFDIGNCSYTMEKADNILDDFVKESFLTEDSQINIIRQILYSMSLVHQRGVLHRDLSPTNIFFINGIIKLADFGLGKNLNTLTSHQTMDTASFGQLFYCAPEQLTLLKDADKRSDVYSLGRIINFVMTKNPNDFSHSLRSISEKATNLNPEYRYEDATNMLEKLNRLVSIRGDEKYEVMIWDKISNQKIDSDVENYIYELSGIDLCQKCMQKGNIFLDALFEFVKIDDSHAIYIVQQIGSHYKTQLKKFEDADIFANFAYRILKGNFTYTINEVAATILRYVAFEVNRFNAQHKIDDLKARGLEPLIEDILER

SEQ ID NO: 10059 - protein, 210 aa, Streptococcus agalactiae
ATGCAGCTGTTAGATGAGTTAGTTCTTCCAAAAGACATTACCATAGCAGATGTCAGTCAAAGTATCCAAGAATTTGAAATAGAAAGAGATGCCCTTCAAGAATTTTTTGACGATATGCTGAAGACTTATACAACCTACCAAGAAATGAAAGATTATATTAAATCTCGTGAAGCGAACACTCCTAAGCAAGAGACAGAAGAAAAATCACTT

SEQ ID NO: 10060 - protein, 70 aa, Streptococcus agalactiae; identical to SEQ ID NO: 1180

SEQ ID NO: 10061 - protein, 735 aa, Streptococcus agalactiae
ATGAAGAAAGTGTTAGTGAGTAGTCTTTTGGTTTTAGGGATTACGATAACGTTACAAACAGTAGTTGAGGCTAAGGGGCCAAAAGTAGCTTATACACAAGAGGGAATGACTGCTCTTTCGGACACAAATAAAGATAAAGTCACTACTATTTCTATTGACGAGATTCAAAAAAGCTTAGAAGGTAAGAAGCCGATTACTGTTAGTTTTGATATTGATGATACACTGCTTTTCAGTAGTCAATATTTTCAATATGGTAAAGAATATGTAACTCCTGGATCGTTTGATTTTCTTCATAAACAAAAATTCTGGGATCTTGTTGCAAAACGAGGAGATCAAGATTCCATTCCCAAAGAATATGCTAAAAAATTAATTGCTATGCATCAAAAACGAGGAGATAAAATTGTTTTTATAACAGGTAGGACAAGAGGGTCAATGTATAAGGAGGGCGAGGTTGATAAAACAGCTAAAGCCTTAGCTAAAGATTTTAAATTAGACAAACCAATTGCTGTAAATTATACAGGCGATAAACCTAAAAAGCCATACAAATATGATAAATCATATTATATTAAGAAATATGGTTCAGACATTCATTATGGAGATAGTGATGACGATATTCATGCAGCTAGGGAGGCCGGTGCTAGACCAATTAGAATTTTAAGAGCACCTAATTCTACAAATCTACCTTTACCAGAAGCTGGAGGCTACGGTGAAGAGGTTCTCGAAAATTCAGCTTAC

SEQ ID NO: 10062 - protein, 245 aa, Streptococcus agalactiae; identical to SEQ ID NO: 1182

SEQ ID NO: 10063 - protein, 514 aa, Streptococcus agalactiae
TTGAGAGTTTATGAAAATAAAGAAGAGTTGAAAAAAGAAATAAGTAAAACATTTGAGAAATACATTATGGAATTATAATATTCCAGAGAATCTAAAAGATAAAAGAATTGATGAAGTTGATAGAACTCCAGCAGAAAACCTTTCTTATCAGGTTGGCTGGACCAACTTGGTTCTTAAATGGGAAGAAGATGAAAGAAAGGGACTTCAAGTAAAAACACCATCGGATAAATTTAAATGGAATCAACTTGGTGAATTATATCAGTGGTTCACAGATACCTACGCTCATTTATCTCTGCAAGAGTTGAAAGCAAAATTAAATGAAAATATTAATTCTATCTATGCAATGATTGATTTGTTGAGTGAGGAAGAATTATTTGAAGCGCATATGAGAAAGTGGGCTGATGAAGCGACTAAAACAGCGACTTGGGAAGTGTATAAGTTTATTCATGTAAATACGGTTGCACCTTTTGGAACTTTCAGAACTAAAATCAGAAAATGGAAGAAGATAGTATTA

SEQ ID NO: 10064 - protein, 172 aa, Streptococcus agalactiae
MRVYENKEELKKEISKTFEKYIMEFNNIPENLKDKRIDEVDRTPAENLSYQVGWTNLVLKWEEDERKGLQVKTPSDKFKWNQLGELYQWFTDTYAHLSLQELKAKLNENINSIYAMIDLLSEEELFEAHMRKWADEATKTATWEVYKFIHVNTVAPFGTFRTKIRKWKKIVL

SEQ ID NO: 10065 - protein, 234 aa, Streptococcus agalactiae
TTGTTTTTTCCGAATATTGACAACATAATTAAAAACTATATCAAAGAGATGATTACACATTCCGATATACCAGACTTACAAAAACAACTGGAAACAGCATATCAAGTTCCATATTCTTTCGCTCTTGGTATTTATATCTCAACAATTGAAAGTATTATTTTAAATTGGATAGATCATGACTTTACTGAAGAGCCTGAAGAAATAGCAAGATATATTACATCTATCGTGAGAATT

SEQ ID NO: 10066 - protein, 78 aa, Streptococcus agalactiae
MFFPNIDNIIKNYIKEMITHSDIPDLQKQLETAYQVPYSFALGIYISTIESIILNWIDHDFTEEPEEIARYITSIVRI

SEQ ID NO: 10067 - protein, 330 aa, Streptococcus agalactiae
ATGCTTAGGAAGTATAAGCAAAGAAATTATAATGTCGCACATACGAAACAGCGTTTTTCGATTAAGAAATTCAAATTTGGTGTAGCATCGGTATTAATTGGATTGACATTTCTAGGAATGAGTAGTCATTCTGTTTTGGCGGATGAGTCAAGCATTATGAGTACTGAGGTACCACAAACAGCTGGTGTAAAACCGGAAGTTACTGTTACACAGCCTACTTCAGATGTAACAAGTCTTGCGACAGATACGTCAACTTCAGCAGTGTTATCAACAGATGCATCTCATTCTAATCCTACAGAATCAGCGGAGCATGCTGTAGGATTAGAATGC

SEQ ID NO: 10068 - protein, 110 aa, Streptococcus agalactiae
MLRKYKQRNYNVAHTKQRFSIKKFKFGVASVLIGLTFLGMSSHSVLADESSIMSTEVPQTAGVKPEVTVTQPTSDVTSLATDTSTSAVLSTDASHSNPTESAEHAVGLEC

SEQ ID NO: 10069 - protein, 819 aa, Streptococcus agalactiae
TTGTGTCGTGTTTTACGTGGCAATCGCTCCACTTACTATAAATTTCTAAAACATAAGCCCTCAAAAAGAGAATTGGATAATCAAATTTATAAAAAACAAATACTTGAGATTTATACCAAAGCAAACAAAAGACTTGGTGTGAAGTCTATCAAAGTCATTCTTCAAAGAGACTACGACACAAAAATCTCTGAAGGAAGAATTTACCATCTGATGAAGAATATGGCGCTCCCTAAAATGGCTACCGTTAAGCCAAAAACAGCTCTTAAAAAGACTCAAAAAACGTATCCTCAAAACTTACTCAACCAGAAATTTTATCCTGACAAACCTAATCAAGTATGGTCTACTGACTTCACCTATATTTCTATTGGATATAAGAAATATGTCTATCTCTGCGCAATACTTGATCTCTATTCTAGAAAATGTATTGCTTGGAAATTGAGTCACCGTATGGATGCAAAGTTAGCATGTAACACTCTAGAATTAGCTCTTAATAAAAGAAAGATTGAAGGAACACTTCTCTTTCATTCCGACCAAGGGTCACAATTTAAGGCCAGGGAATTTAGAAAAATAATTGATGACAACAATATCATGCATTCTTTTTCTAAACCTGGATATCCTTATGATAATGCCGTAACTGAAGCATTTTTCAAGTATTTAAAGCATAGACAAATCAACCGAAAACATTATCAAAATATCAAACAGGTTCAATTAGACTGCTTTGAATACATTGAGAATTTTTATAACAATTACATCCCACATACGGCTAATCTAGGACTAACCCCTAATCAGAAAGAAGAAAATTATTTTAACGCAATAAAA

SEQ ID NO: 10070 - protein, 273 aa, Streptococcus agalactiae
MCRVLRGNRSTYYKFLKHKPSKRELDNQIYKKQILEIYTKANKRLGVKSIKVILQRDYDTKISEGRIYHLMKNMALPKMATVKPKTALKKTQKTYPQNLLNQKFYPDKPNQVWSTDFTYISIGYKKYVYLCAILDLYSRKCIAWKLSHRMDAKLACNTLELALNKRKIEGTLLFHSDQGSQFKAREFRKIIDDNNIMHSFSKPGYPYDNAVTEAFFKYLKHRQINRKHYQNIKQVQLDCFEYIENFYNNYIPHTANLGLTPNQKEENYFNAIK

SEQ ID NO: 10071 - protein, 348 aa, Streptococcus agalactiae
GTGTTACAATCTGTTTTAAAAGACACAAAAACGAAAGGACAACCTATGTCAACATTTAAACGCTATGATGAAGAATTCAAACAATCTCTTGTTAACCTTTATCAAACTGGAAAAACTCAGTCTGAACTCTGTAAAGACTATAGGGTATCCACTTCTGCGCTTGCAAAATGGATCAAACAGTACTCTCAATTCAAACTCGAAGATAATTCTGTACTTACTGCCAAGCAAATACAAGAGTTACAAAAACGTAATGCGCAGCTTGAAGAGGAGAACCTTATCCTAAAAAAAGCAAGTGCCATATTCATGCAAAACTTAAATAAGACTCCTCGCTGTCTATCGGTTACGCTT

SEQ ID NO: 10072 - protein, 116 aa, Streptococcus agalactiae
MLQSVLKDTKTKGQPMSTFKRYDEEFKQSLVNLYQTGKTQSELCKDYRVSTSALAKWIKQYSQFKLEDNSVLTAKQIQELQKRNAQLEEENLILKKASAIFMQNLNKTPRCLSVTL

SEQ ID NO: 10073 - protein, 147 aa, Streptococcus agalactiae
GTGCAGGAAGTTTTGATTATCGCAAGAGAGAATCATCAAGTGACTCATGAACACGTGTCAATCTTATTGACCTGCGTTCATGAATTGATTGTGGAAGTCAATCAAACACAGCCACTCAGTCGTGAGTTTCGTGAAAAGTATATGGGT

SEQ ID NO: 10074 - protein, 49 aa, Streptococcus agalactiae
MQEVLIIARENHQVTHEHVSILLTCVHELIVEVNQTQPLSREFREKYMG

SEQ ID NO: 10075 - protein, 144 aa, Streptococcus agalactiae
ATGGGGAATGGTCATTTTGTGACCATCATCGACTATGGCACAGGTAATCCCTATACCTCAACAACGCCTCTTATTACTGGGAAAATTGGTGAGGATTTTGCTTATTACTTAACCGAATCAGAGCACCCCCCCTGCTGTTGGGCT

SEQ ID NO: 10076 - protein, 48 aa, Streptococcus agalactiae
MGNGHFVTIIDYGTGNPYTSTTPLITGKIGEDFAYYLTESEHPPCCWA

SEQ ID NO: 10077 - protein, 345 aa, Streptococcus agalactiae
ATGGATAAAATTATTAAATCAATTTCTGCCTCTGGTGCCTTCAGGTCTTATGTCCTCGATAGCACCGAGACTGTTAAATTGGCTCAGGAAAAACATCATACCTTGTCGTCTTCAACAGTTGCTCTTGGTCGCACCCTGATTGCTAATCAAATATTAGCGGCTAATCAAAAAGGCGATAGCAAGATTACGGTTAAAGTCATCGGTGATTCTTCCTTTGGTCATATTATCTCTGTTGCAGATACCAAAGGGCATGTTAAGGGGTACATCCAAAATACTGGTGTTGACATCAAAAAACGGCCACAGGTGAAGTTTTGGTTGGCCCTTTTATGGGGAATGGTCATTTTG

SEQ ID NO: 10078 - protein, 115 aa, Streptococcus agalactiae
MDKIIKSISASGAFRSYVLDSTETVKLAQEKHHTLSSSTVALGRTLIANQILAANQKGDSKITVKVIGDSSFGHIISVADTKGHVKGYIQNTGVDIKKRPQVKFWLALLWGMVIL

SEQ ID NO: 10079 - protein, 1206 aa, Streptococcus agalactiae
ATGGTTACATTCGATTTTAAACATGTTCAAACATTGCATACCATATCTCAACTACCTATTTCAGTCATGTCACGAGACAAGGAACTCGTTCAGTTATATGGTAACGAAGACTATCTGTTGCCTTACTATCAGTTTTTAAAACATTTAGCTATCCCTTATAACCAAGATATCACTGTTTATGAGGGTCTTTTTGAAGAATCATTCTTAATTTTTCCTGTCTGTCAATATCTTATTGCTATTGGACCATTTTATCCCTATAGCCCTGATATCAATAGGCAAGAACAGTTATCCAGTCGCTTTCTAGAACAATTTTCTCATCGTAGTAAAAAAGAAATCTTATCCTATATAAAGCTTGTCCCTTGTTTTCCTACTACCAGTATACGTAGTCTTCTTGTGTCTATCGATGCCTTTTTCCAAACACAGTTTGAGGCTAGTTGCCAACAAGCCATCAATCATTTATTAGAAGAGTCAGAACAGATTGTTGCGGATCCTGATATTGTTCTTCACCTAAAACATACTAAGAAAAACTCTTTTCAGTTACCCACTGTTTTAAACCATCTCAATCACATTATTGATCTCGTTAAGCTGGGTAACACTCAACTGTTAAAGCAAGAAATTAATCGCCTCCCATCATCCAGTGTTACCTCATCTTCAATCCCTGCCCTAAGAGCTGAAAAGAACTTAACTGTTGTTTACTTAACAAAATTACTAGAATTAAGTTTCGAGAAAAATACTGATGTGGCTAAAAGTTATGCGCTGGTAAAGCACTATATGGCTTTAAACGAAGAGGCTCCTGATCTTATTGATGTTTCAAGAATTCGCTGTGCAGCTCTTATTGATTTTTCAGAATCCTTAACCAATAAGAGCATCTCTGACAAGCAGCAAATGTACAATAGTATTCTCCATTATGTGGACAACCACCTCTACTCCAAACTCAAAGTATCTGATATTGCCAACTACCTATATATCTCAAATTCCCACTTACGCTCGGTTTTTAAAAAATACTCTGACATTTCCTTGCAAAGTTATATTCTAAAGGCAAAAATTAAGGAGGGACAATTACTACTGCAAAGAGGGGTACCGATTGGGGAAGTAGCGAAATTATTACATTTTTACGACACCACACATTTTCTTAAAACCTTTAAAAAATACGTGGGAATATCTTCAAACGAATATCTTACTAAATATCGTGAGACCTCATGCCAG

SEQ ID NO: 10080 - protein, 402 aa, Streptococcus agalactiae
MVTFDFKHVQTLHTISQLPISVMSRDKELVQLYGNEDYLLPYYQFLKHLAIPYNQDITVYEGLFEESFLIFPVCQYLIAIGPFYPYSPDINRQEQLSSRFLEQFSHRSKKEILSYIKLVPCFPTTSIRSLLVSIDAFFQTQFEASCQQAINHLLEESEQIVADPDIVLHLKHTKKNSFQLPTVLNHLNHIIDLVKLGNTQLLKQEINRLPSSSVTSSSIPALRAEKNLTVVYLTKLLELSFEKNTDVAKSYALVKHYMALNEEAPDLIDVSRIRCAALIDFSESLTNKSISDKQQMYNSILHYVDNHLYSKLKVSDIANYLYISNSHLRSVFKKYSDISLQSYILKAKIKEGQLLLQRGVPIGEVAKLLHFYDTTHFLKTFKKYVGISSNEYLTKYRETSCQ

SEQ ID NO: 10081 - protein, 1662 aa, Streptococcus agalactiae
ATGAAATTATCGAAGAAGTTATTGTTTTCGGCTGCTGTTTTAACAATAGTGGCGGGGTCAACTGTTGAACCAGTAGCTCAGTTTGCGACTGGAATGAGTATTGTAAGAGCTGCAGAAGTGTCACAAGAACGCCCAGCGAAAACAACAGTAAATATCTATAAATTACAAGCTGATAGTTATAAATCGGAAATTACTTCTAATGGTGGTATCGAGAATAAAGACGGCGAAGTAATATCTAACTATGCTAAACTTGGTGACAATGTAAAAGGTTTGCAAGGTGTACAGTTTAAACGTTATAAAGTCAAGACGGATATTTCTGTTGATGAATTGAAAAAATTGACAACAGTTGAAGCAGCAGATGCAAAAGTTGGAACGATTCTTGAAGAAGGTGTCAGTCTACCTCAAAAAACTAATGCTCAAGGTTTGGTCGTCGATGCTCTGGATTCAAAAAGTAATGTGAGATACTTGTATGTAGAAGATTTAAAGAATTCACCTTCAAACATTACCAAAGCTTATGCTGTACCGTTTGTGTTGGAATTACCAGTTGCTAACTCTACAGGTACAGGTTTCCTTTCTGAAATTAATATTTACCCTAAAAACGTTGTAACTGATGAACCAAAAACAGATAAAGATGTTAAAAAATTAGGTCAGGACGATGCAGGTTATACGATTGGTGAAGAATTCAAATGGTTCTTGAAATCTACAATCCCTGCCAATTTAGGTGACTATGAAAAATTTGAAATTACTGATAAATTTGCAGATGGCTTGACTTATAAATCTGTTGGAAAAATCAAGATTGGTTCGAAAACACTGAATAGAGATGAGCACTACACTATTGATGAACCAACAGTTGATAACCAAAATACATTAAAAATTACGTTTAAACCAGAGAAATTTAAAGAAATTGCTGAGCTACTTAAAGGAATGACCCTTGTTAAAAATCAAGATGCTCTTGATAAAGCTACTGCAAATACAGATGATGCGGCATTTTTGGAAATTCCAGTTGCATCAACTATTAATGAAAAAGCAGTTTTAGGAAAAGCAATTGAAAATACTTTTGAACTTCAATATGACCATACTCCTGATAAAGCTGACAATCCAAAACCATCTAATCCTCCAAGAAAACCAGAAGTTCATACTGGTGGGAAACGATTTGTAAAGAAAGACTCAACAGAAACACAAACACTAGGTGGTGCTGAGTTTGATTTGTTGGCTTCTGATGGGACAGCAGTAAAATGGACAGATGCTCTTATTAAAGCGAATACTAATAAAAACTATATTGCTGGAGAAGCTGTTACTGGGCAACCAATCAAATTGAAATCACATACAGACGGTACGTTTGAGATTAAAGGTTTGGCTTATGCAGTTGATGCGAATGCAGAGGGTACAGCAGTAACTTACAAATTAAAAGAAACAAAAGCACCAGAAGGTTATGTAATCCCTGATAAAGAAATCGAGTTTACAGTATCACAAACATCTTATAATACAAAACCAACTGACATCACGGTTGATAGTGCTGATGCAACACCTGATACAATTAAAAACAACAAACGTCCTTCAATCCCTAATACTGGTGGTATTGGTACGGCTATCTTTGTCGCTATCGGTGCTGCGGTGATGGCTTTTGCTGTTAAGGGGATGAAGCGTCGTACAAAAGATAAC

SEQ ID NO: 10082 - protein, 554 aa, Streptococcus agalactiae
MKLSKKLLFSAAVLTIVAGSTVEPVAQFATGMSIVRAAEVSQERPAKTTVNIYKLQADSYKSEITSNGGIENKDGEVISNYAKLGDNVKGLQGVQFKRYKVKTDISVDELKKLTTVEAADAKVGTILEEGVSLPQKTNAQGLVVDALDSKSNVRYLYVEDLKNSPSNITKAYAVPFVLELPVANSTGTGFLSEINIYPKNVVTDEPKTDKDVKKLGQDDAGYTIGEEFKWFLKSTIPANLGDYEKFEITDKFADGLTYKSVGKIKIGSKTLNRDEHYTIDEPTVDNQNTLKITFKPEKFKEIAELLKGMTLVKNQDALDKATANTDDAAFLEIPVASTINEKAVLGKAIENTFELQYDHTPDKADNPKPSNPPRKPEVHTGGKRFVKKDSTETQTLGGAEFDLLASDGTAVKWTDALIKANTNKNYIAGEAVTGQPIKLKSHTDGTFEIKGLAYAVDANAEGTAVTYKLKETKAPEGYVIPDKEIEFTVSQTSYNTKPTDITVDSADATPDTIKNNKRPSIPNTGGIGTAIFVAIGAAVMAFAVKGMKRRTKDN

SEQ ID NO: 10083 - protein, 921 aa, Streptococcus agalactiae
ATGAAACAAACATTAAAACTTATGTTTTCTTTTCTGTTGATGTTAGGGACTATGTTTGGAATTAGCCAAACTGTTTTAGCGCAAGAAACTCATCAGTTGACGATTGTTCATCTTGAAGCAAGGGATATTGATCGTCCAAATCCACAGTTGGAGATTGCCCCTAAAGAAGGGACTCCAATTGAAGGAGTACTCTATCAGTTGTACCAATTAAAATCAACTGAAGATGGCGATTTGTTGGCACATTGGAATTCCCTAACTATCACAGAATTGAAAAAACAGGCGCAGCAGGTTTTTGAAGCCACTACTAATCAACAAGGAAAGGCTACATTTAACCAACTACCAGATGGAATTTATTATGGTCTGGCGGTTAAAGCCGGTGAAAAAAATCGTAATGTCTCAGCTTTCTTGGTTGACTTGTCTGAGGATAAAGTGATTTATCCTAAAATCATCTGGTCCACAGGTGAGTTGGACTTGCTTAAAGTTGGTGTGGATGGTGATACCAAAAAACCACTAGCAGGCGTTGTCTTTGAACTTTATGAAAAGAATGGTAGGACTCCTATTCGTGTGAAAAATGGGGTGCATTCTCAAGATATTGACGCTGCAAAACATTTAGAAACAGATTCATCAGGGCATATCAGAATTTCCGGGCTCATCCATGGGGACTATGTCTTAAAAGAAATCGAGACACAGTCAGGATATCAGATCGGACAGGCAGAGACTGCTGTGACTATTGAAAAATCAAAAACAGTAACAGTAACGATTGAAAATAAAAAAGTTCCGACACCTAAAGTGCCATCTCGAGGAGGTCTTATTCCCAAAACAGGTGAGCAACAGGCAATGGCACTTGTAATTATTGGTGGTATTTTAATTGCTTTAGCCTTACGATTACTATCAAAACATCGGAAACATCAAAATAAGGAT

SEQ ID NO: 10084 - protein, 307 aa, Streptococcus agalactiae; identical to SEQ ID NO: 1208

SEQ ID NO: 10085 - protein, 915 aa, Streptococcus agalactiae
ATGGGACAAAAATCAAAAATATCTCTAGCTACGAATATTCGTATATGGATTTTTCGTTTAATTTTCTTAGCGGGTTTCCTTGTTTTGGCATTTCCCATCGTTAGTCAGGTCATGTACTTTCAAGCCTCTCACGCCAATATTAATGCTTTTAAAGAAGCTGTTACCAAGATTGACCGGGTGGAGATTAATCGGCGTTTAGAACTTGCTTATGCTTATAACGCCAGTATAGCAGGTGCCAAAACTAATGGCGAATATCCAGCGCTTAAAGACCCCTACTCTGCTGAACAAAAGCAGGCAGGGGTCGTTGAGTACGCCCGCATGCTTGAAGTCAAAGAACAAATAGGTCATGTGATTATTCCAAGAATTAATCAGGATATCCCTATTTACGCTGGCTCTGCTGAAGAAAATCTTCAGAGGGGCGTTGGACATTTAGAGGGGACCAGTCTTCCAGTCGGTGGTGAGTCAACTCATGCCGTTCTAACTGCCCATCGAGGGCTACCAACGGCCAAGCTATTTACCAATTTAGACAAGGTAACAGTAGGTGACCGTTTTTACATTGAACACATCGGCGGAAAGATTGCTTATCAGGTAGACCAAATCAAAGTTATCGCCCCTGATCAGTTAGAGGATTTGTACGTGATTCAAGGAGAAGATCACGTCACCCTATTAACTTGCACACCTTATATGATAAATAGTCATCGCCTCCTCGTTCGAGGCAAGCGAATTCCTTATGTGGAAAAAACAGTGCAGAAAGATTCAAAGACCTTCAGGCAACAACAATACCTAACCTATGCTATGTGGGTAGTCGTTGGACTTATCTTGCTGTCGCTTCTCATTTGGTTTAAAAAGACGAAACAGAAAAAGCGGAGAAAGAATGAAAAAGCGGCTAGTCAAAATAGTCACAATAATTCGAAA

SEQ ID NO: 10086 - protein, 305 aa, Streptococcus agalactiae; identical to SEQ ID NO: 1214

SEQ ID NO: 10087 - protein, 849 aa, Streptococcus agalactiae
ATGAAAAAGCGGCTAGTCAAAATAGTCACAATAATTCGAAATAATAAAATCAGAACCCTCATTTTTGTGATGGGAAGTCTGATTCTCTTATTTCCGATTGTGAGCCAGGTAAGTTACTACCTTGCTTCGCATCAAAATATTAATCAATTTAAGCGGGAAGTCGCTAAGATTGATACTAATACGGTTGAACGACGCATCGCTTTAGCTAATGCTTACAATGAGACGTTATCAAGGAATCCCTTGCTTATAGACCCTTTTACCAGTAAGCAAAAAGAAGGTTTGAGAGAGTATGCTCGTATGCTTGAAGTTCATGAGCAAATAGGTCATGTGGCAATCCCAAGTATTGGGGTTGATATTCCAATTTATGCTGGAACATCCGAAACTGTGCTTCAGAAAGGTAGTGGGCATTTGGAGGGAACCAGTCTTCCAGTGGGAGGTTTGTCAACCCATTCAGTACTAACTGCCCACCGTGGCTTGCCAACAGCTAGGCTATTTACCGACTTAAATAAAGTTAAAAAAGGCCAGATTTTCTATGTGACGAACATCAAGGAAACACTTGCCTACAAAGTCGTGTCTATCAAAGTTGTGGATCCAACAGCTTTAAGTGAGGTTAAGATTGTCAATGGTAAGGATTATATAACCTTGCTGACTTGCACACCTTACATGATCAATAGTCATCGTCTCTTGGTAAAAGGAGAGCGTATTCCTTATGATTCTACCGAGGCGGAAAAGCACAAAGAACAAACCGTACAAGATTATCGTTTGTCACTAGTGTTGAAGATACTACTAGTATTATTAATTGGACTCTTCATCGTGATAATGATGAGAAGATGGATGCAACATCGTCAA

SEQ ID NO: 10088 - protein, 283 aa, Streptococcus agalactiae; identical to SEQ ID NO: 1216

SEQ ID NO: 10089 - protein, 2670 aa, Streptococcus agalactiae
ATGAAAAAGAGACAAAAAATATGGAGAGGGTTATCAGTTACTTTACTAATCCTGTCCCAAATTCCATTTGGTATATTGGTACAAGGTGAAACCCAAGATACCAATCAAGCACTTGGAAAAGTAATTGTTAAAAAAACGGGAGACAATGCTACACCATTAGGCAAAGCGACTTTTGTGTTAAAAAATGACAATGATAAGTCAGAAACAAGTCACGAAACGGTAGAGGGTTCTGGAGAAGCAACCTTTGAAAACATAAAACCTGGAGACTACACATTAAGAGAAGAAACAGCACCAATTGGTTATAAAAAAACTGATAAAACCTGGAAAGTTAAAGTTGCAGATAACGGAGCAACAATAATCGAGGGTATGGATGCAGATAAAGCAGAGAAACGAAAAGAAGTTTTGAATGCCCAATATCCAAAATCAGCTATTTATGAGGATACAAAAGAAAATTACCCATTAGTTAATGTAGAGGGTTCCAAAGTTGGTGAACAATACAAAGCATTGAATCCAATAAATGGAAAAGATGGTCGAAGAGAGATTGCTGAAGGTTGGTTATCAAAAAAAATTACAGGGGTCAATGATCTCGATAAGAATAAATATAAAATTGAATTAACTGTTGAGGGTAAAACCACTGTTGAAACGAAAGAACTTAATCAACCACTAGATGTCGTTGTGCTATTAGATAATTCAAATAGTATGAATAATGAAAGAGCCAATAATTCTCAAAGAGCATTAAAAGCTGGGGAAGCAGTTGAAAAGCTGATTGATAAAATTACATCAAATAAAGACAATAGAGTAGCTCTTGTGACATATGCCTCAACCATTTTTGATGGTACTGAAGCGACCGTATCAAAGGGAGTTGCCGATCAAAATGGTAAAGCGCTGAATGATAGTGTATCATGGGATTATCATAAAACTACTTTTACAGCAACTACACATAATTACAGTTATTTAAATTTAACAAATGATGCTAACGAAGTTAATATTCTAAAGTCAAGAATTCCAAAGGAAGCGGAGCATATAAATGGGGATCGCACGCTCTATCAATTTGGTGCGACATTTACTCAAAAAGCTCTAATGAAAGCAAATGAAATTTTAGAGACACAAAGTTCTAATGCTAGAAAAAAACTTATTTTTCACGTAACTGATGGTGTCCCTACGATGTCTTATGCCATAAATTTTAATCCTTATATATCAACATCTTACCAAAACCAGTTTAATTCTTTTTTAAATAAAATACCAGATAGAAGTGGTATTCTCCAAGAGGATTTTATAATCAATGGTGATGATTATCAAATAGTAAAAGGAGATGGAGAGAGTTTTAAACTGTTTTCGGATAGAAAAGTTCCTGTTACTGGAGGAACGACACAAGCAGCTTATCGAGTACCGCAAAATCAACTCTCTGTAATGAGTAATGAGGGATATGCAATTAATAGTGGATATATTTATCTCTATTGGAGAGATTACAACTGGGTCTATCCATTTGATCCTAAGACAAAGAAAGTTTCTGCAACGAAACAAATCAAAACTCATGGTGAGCCAACAACATTATACTTTAATGGAAATATAAGACCTAAAGGTTATGACATTTTTACTGTTGGGATTGGTGTAAACGGAGATCCTGGTGCAACTCCTCTTGAAGCTGAGAAATTTATGCAATCAATATCAAGTAAAACAGAAAATTATACTAATGTTGATGATACAAATAAAATTTATGATGAGCTAAATAAATACTTTAAAACAATTGTTGAGGAAAAACATTCTATTGTTGATGGAAATGTGACTGATCCTATGGGAGAGATGATTGAATTCCAATTAAAAAATGGTCAAAGTTTTACACATGATGATTACGTTTTGGTTGGAAATGATGGCAGTCAATTAAAAAATGGTGTGGCTCTTGGTGGACCAAACAGTGATGGGGGAATTTTAAAAGATGTTACAGTGACTTATGATAAGACATCTCAAACCATCAAAATCAATCATTTGAACTTAGGAAGTGGACAAAAAGTAGTTCTTACCTATGATGTACGTTTAAAAGATAACTATATAAGTAACAAATTTTACAATACAAATAATCGTACAACGCTAAGTCCGAAGAGTGAAAAAGAACCAAATACTATTCGTGATTTCCCAATTCCCAAAATTCGTGATGTTCGTGAGTTTCCGGTACTAACCATCAGTAATCAGAAGAAAATGGGTGAGGTTGAATTTATTAAAGTTAATAAAGACAAACATTCAGAATCGCTTTTGGGAGCTAAGTTTCAACTTCAGATAGAAAAAGATTTTTCTGGGTATAAGCAATTTGTTCCAGAGGGAAGTGATGTTACAACAAAGAATGATGGTAAAATTTATTTTAAAGCACTTCAAGATGGTAACTATAAATTATATGAAATTTCAAGTCCAGATGGCTATATAGAGGTTAAAACGAAACCTGTTGTGACATTTACAATTCAAAATGGAGAAGTTACGAACCTGAAAGCAGATCCAAATGCTAATAAAAATCAAATCGGGTATCTTGAAGGAAATGGTAAACATCTTATTACCAACACTCCCAAACGCCCACCAGGTGTTTTTCCTAAAACAGGGGGAATTGGTACAATTGTCTATATATTAGTTGGTTCTACTTTTATGATACTTACCATTTGTTCTTTCCGTCGTAAACAATTG

SEQ ID NO: 10090 - protein, 890 aa, Streptococcus agalactiae
MKKRQKIWRGLSVTLLILSQIPFGILVQGETQDTNQALGKVIVKKTGDNATPLGKATFVLKNDNDKSETSHETVEGSGEATFENIKPGDYTLREETAPIGYKKTDKTWKVKVADNGATIIEGMDADKAEKRKEVLNAQYPKSAIYEDTKENYPLVNVEGSKVGEQYKALNPINGKDGRREIAEGWLSKKITGVNDLDKNKYKIELTVEGKTTVETKELNQPLDVVVLLDNSNSMNNERANNSQRALKAGEAVEKLIDKITSNKDNRVALVTYASTIFDGTEATVSKGVADQNGKALNDSVSWDYHKTTFTATTHNYSYLNLTNDANEVNILKSRIPKEAEHINGDRTLYQFGATFTQKALMKANEILETQSSNARKKLIFHVTDGVPTMSYAINFNPYISTSYQNQFNSFLNKIPDRSGILQEDFIINGDDYQIVKGDGESFKLFSDRKVPVTGGTTQAAYRVPQNQLSVMSNEGYAINSGYIYLYWRDYNWVYPFDPKTKKVSATKQIKTHGEPTTLYFNGNIRPKGYDIFTVGIGVNGDPGATPLEAEKFMQSISSKTENYTNVDDTNKIYDELNKYFKTIVEEKHSIVDGNVTDPMGEMIEFQLKNGQSFTHDDYVLVGNDGSQLKNGVALGGPNSDGGILKDVTVTYDKTSQTIKINHLNLGSGQKVVLTYDVRLKDNYISNKFYNTNNRTTLSPKSEKEPNTIRDFPIPKIRDVREFPVLTISNQKKMGEVEFIKVNKDKHSESLLGAKFQLQIEKDFSGYKQFVPEGSDVTTKNDGKIYFKALQDGNYKLYEISSPDGYIEVKTKPVVTFTIQNGEVTNLKADPNANKNQIGYLEGNGKHLITNTPKRPPGVFPKTGGIGTIVYILVGSTFMILTICSFRRKQL

SEQ ID NO: 10091 - protein, 567 aa, Streptococcus agalactiae
ATGTTAGAAGTCAGAGAGCAGGTTGACCATGTGATGATTCCAAAAATCAATCAGGATTTACCAATCTACGCTGGTTCAGAAGAGGACAATCTGCAACGGGGAGTTGGTCATCTAGAAGGGATAAGTTTGCCGATTGGAGGGGCTTCTACACATGCGGTCTTGAGCGGTCAAAGAGGTATGTCAGCTGCTCGGTTGTTTGCGGATTTGGATAAGATGAAAAAAGGTGATTATTTTTATGTTACCAATCTGAAAGAAACCTTGGCTTATCAAGTGGATCGTATCATGGTGATTGAACCTAGCCAATTGGATGCCGTGAGCATTGAAGAGGATAAAGATTATGTTACCCTTCTGACCTGTACACCTTATATGGGCTCTTTGTCAACTGTAATGGGTGACTTATCATTAACAACGAGAGAGAATCAGCTTGGTTCTCTCTCTTTTTGGATGTTCAAAGCGATGAGAATTTTGCTTTTAAAATTTTTAAAGTTGCGAAAGCCAAAGGCTTGTCGCTTGATGTCTTTGATAAGCTTGTTGGTCGCTTCTAATTTGGCATTGGAAAGGGATAGC

SEQ ID NO: 10092 - protein, 189 aa, Streptococcus agalactiae
MLEVREQVDHVMIPKINQDLPIYAGSEEDNLQRGVGHLEGISLPIGGASTHAVLSGQRGMSAARLFADLDKMKKGDYFYVTNLKETLAYQVDRIMVIEPSQLDAVSIEEDKDYVTLLTCTPYMGSLSTVMGDLSLTTRENQLGSLSFWMFKAMRILLLKFLKLRKPKACRLMSLISLLVASNLALERDS

SEQ ID NO: 10093 - protein, 603 aa, Streptococcus agalactiae
GTGGCGCGCGATCCATATAGTGATAGATCGAGATATTTAGATCCAAAAGTTCTATCATCCTCTTTTGGCGCCTTTTTTCCAGCAGATAATATTAAGGTAGCTTGGTCTAACAACTCCAGCACTTTATTTACACCACCTATTAATGCAAACTACACCACTCAGATTCAAGCTATTGGGACAACGATTAAGTCACAAATTCCGGAATCGATTTTGACGGTTACGGATAAAAAGAGCAGGAAGTTCAGCATTAACAAGATTGACGAAGCTAAAGAAGGCTTAGTAGGTGCGACCTTCACCTTGTCTAAACGCACAACAGTAGCGGCAGATCATCAAGTACAAGGAGATTTCATTCCTGTCAGCAAAGAGACGACAGTCGGTCGGACAACTCTTACCTTTGACAACCTTAAACCTGGATTTTATGACCTTAAAGAAACGAAAGCGCCGAATGCTTACGTACTTGATCCTAAGACTTATGTTGTGGTCGTTCAAAATTCAGGAAAAACGACAATTGTGGATGAAGCTAACTTCAAAGAGGCTGATTACCCAATGGCTGATAATACCAGCCATGTGGAGTGCGTAGCGTTGCTACAACGAAGCAAAGGG

SEQ ID NO: 10094 - protein, 201 aa, Streptococcus agalactiae; identical to SEQ ID NO: 1224

SEQ ID NO: 10095 - protein, 90 aa, Streptococcus agalactiae; identical to SEQ ID NO: 5685

SEQ ID NO: 10096 - protein, 30 aa, Streptococcus agalactiae; identical to SEQ ID NO: 1226

SEQ ID NO: 10097 - protein, 93 aa, Streptococcus agalactiae; identical to SEQ ID NO: 5687

SEQ ID NO: 10098 - protein, 31 aa, Streptococcus agalactiae; identical to SEQ ID NO: 5688

SEQ ID NO: 10099 - protein, 228 aa, Streptococcus agalactiae; identical to SEQ ID NO: 5689

SEQ ID NO: 10100 - protein, 76 aa, Streptococcus agalactiae; identical to SEQ ID NO: 1228

SEQ ID NO: 10101 - protein, 102 aa, Streptococcus agalactiae; identical to SEQ ID NO: 5691

SEQ ID NO: 10102 - protein, 34 aa, Streptococcus agalactiae; identical to SEQ ID NO: 1230

SEQ ID NO: 10103 - protein, 267 aa, Streptococcus agalactiae
ATGGTGAGCTTGCTTCTCTTGAAAGTAAAGCAGGAGGAGTTGATAGAGTTTCATAATGTTTTTTATAGAGAAGCGATATCTTCTTATCTTGAAACAGAAAATTTTGAGAAGGCTAAAGTGACTGAAGATAATTACCAAGTTTTTTTAGGAATCCGTACTTATCAGAAGAGTTATAACTATCAAGATCATAGTGAGAATCTAAAAGGAAATATTGAGGTAGCAATGATAGGAGTTGAAAATAATATTAGCGACGAACATATTTTTTGC

SEQ ID NO: 10104 - protein, 89 aa, Streptococcus agalactiae
MVSLLLLKVKQEELIEFHNVFYREAISSYLETENFEKAKVTEDNYQVFLGIRTYQKSYNYQDHSENLKGNIEVAMIGVENNISDEHIFC

SEQ ID NO: 10105 - protein, 1149 aa, Streptococcus agalactiae
ATGGTACGTAAATTTTTAAAATCGCTCCTATCTCTCTTTCTTATAGCAGTAATCGCCACCGGTATTTCAGTGGCATGTTTCTTTTTTATTCCAGAAAATAAAGGGAATATTACACCGATTTTATTGCATCGCTTTATGCGAAAAAATAATGTTAATGGAATGATGATTGTTAGCGATAATACTGGTAAACCGATTACCATCTCGCATGGGATTAACCGTGGGGAAGTTGAAACGGATATTGAAAATAATAAATTATTTCCAATGGCTTCTCTCCAAAAACTCATGACAGGAATTATTATCCAAAGATTAATTGATCAAGATGTCTTGAGTGAAGACGACCGATTGTCTCAGTTCTTTCCCCAAGTAAAAGGTAGTAATAGTATTACCATCCACCAATTGTTGACCCATACGAGTGGGTTAAGAGAAAAAGGTGTTAAGGTGTCTCCTTATCTAAAAAATGAGAGAGAACAATTACAATTTTGCTTAAAACACTATAACTTTGTTAATAAGAAATCGTGGTATTATTCTAATATCAACTTTAGTTTCCTAACAGGTATAGCCACTCAAGTTACGGGAAGGACCTACGCTGAACTTGTTGATGATGTGATAAAAAATCCTTTGCGATTAGATGATACCCAAAGTTACCAATCAGTTGTTAATCATGACTTAGTTAGCCCAATGCGAAAGAACGGCAAGTTAAATAAAATTAATATCTTTAATCAAGTATCCACAGCATATGGAGCTGGAGATTTTTTCACAACTCCGCTGAACTTTTGGGTGTTGATGCGGTCTTTTTCTAAAGGGTACTTTTTCCCAACGGATGAATATACCAAACATCAAAATGATGCGATATCACATTATTATGGTGGGCTTTACATGCATGGTCGTATAGTTAATTCTAATGGGGCCTTTTTCCAGTATTCAAGTTTTGGTTATGCAGATCTAAAGACGCATGATACAATGGTGCTTTTTATGAATAACAAAGTCTATAGTGATGCTAGTCACGTGGCACCAAAAGCATTTGAATATTATCAAAAATTTATGTTCCTTAATAAGATTTTCCACTTAGTCTTTTACTTTGTATTTTCTTTCTTTTTAATGCTTTTAATACGTCATTCGTTTAGGAAAAGAAGGTATAAGAAACGTCTC

SEQ ID NO: 10106 - protein, 383 aa, Streptococcus agalactiae
MVRKFLKSLLSLFLIAVIATGISVACFFFIPENKGNITPILLHRFMRKNNVNGMMIVSDNTGKPITISHGINRGEVETDIENNKLFPMASLQKLMTGIIIQRLIDQDVLSEDDRLSQFFPQVKGSNSITIHQLLTHTSGLREKGVKVSPYLKNEREQLQFCLKHYNFVNKKSWYYSNINFSFLTGIATQVTGRTYAELVDDVIKNPLRLDDTQSYQSVVNHDLVSPMRKNGKLNKINIFNQVSTAYGAGDFFTTPLNFWVLMRSFSKGYFFPTDEYTKHQNDAISHYYGGLYMHGRIVNSNGAFFQYSSFGYADLKTHDTMVLFMNNKVYSDASHVAPKAFEYYQKFMFLNKIFHLVFYFVFSFFLMLLIRHSFRKRRYKKRL

SEQ ID NO: 10107 - protein, 990 aa, Streptococcus agalactiae
ATGTCAATGATTGAAGTTTCTCACCTTCAGAAAAATTTTATAAAAACCGTTAAAGCACCAGGGTTAAAAGGAGCATTTCAATCATTTCTTCGTCCTGAAAAACACACCTTTGAAGCTGTTAAAGATTTAACATTTGATGTGCCTAAAGGACAAATTTTGGGATTTATTGGAGCGAACGGTGCAGGAAAATCTACAACAATTAAAATGTTAACTGGGATTTTAAAACCAACTTCGGGCTTTTGCCGTATTGATGGCAAATTGCCACAAGAAAACCGACAAAATTATGTTAAGGATATTGGAGTCGTTTTTGGGCAACGTACGCAGTTGTGGTGGGATTTAGCTCTACAAGAAACCTATACAGTGTTAAAAGAAATCTATGACGTTCCTGATAAAGAATTTCGCAAACGCATGGCTTTTTTAAATGAGGTTTTGGAACTAAATGACTTTATAAAGGATCCTGTTAGAACTTTGTCTCTCGGACAGCGTATGAGAGCGGATATCGCAGCTTCTTTATTACATAACCCAAAGGTTCTTTTCTTAGATGAACCCACCATTGGCTTGGACGTTTCAGTGAAAGATAATATCCGACGTGCAATCACACAAATTAATCAAGAAGAAGAGACAACGATTTTACTAACGACACATGACCTCAGTGATATTGAACAACTTTGTCATCGTATTTTTATGATTGATAGAGGACAAGAAATATTTGATGGCACAGTTTCTCAGCTAAAAGAGACATTTGGAAAGATGAAAACTCTTTCTTTTGATTTGCGCCCAGGACAAGAGCATATCAGCTCTAGTTTAATTGGAAAGTCGGAGATTAATATTAAACGTAATGACTTAGTTTTAGATATTCAGTATGATAGTTCTCGCTACCAAACTGCTGACATAATTCAGCAGACATTAGCAGATTTTTCTGTACGTGACCTTAAAATGACAGATGCGGATATTGAAGATATCATTCGTCGCTTCTATAGAAATGAGCTA

SEQ ID NO: 10108 - protein, 330 aa, Streptococcus agalactiae; identical to SEQ ID NO: 1236

SEQ ID NO: 10109 - protein, 816 aa, Streptococcus agalactiae
ATGAACAGAATTTGGAGACGTTATAAACCTTTTATTAGTACAGGAATCCAAGGATTAATCACATATCGTGTTGATTTCATCCTTTATAGGATAGGTGATGTGATAGGAGCATTTGTTGCATTTTATCTATGGAAAGCAGTTTTCGATTCCTCAAGTCAATCCTTAATCCAAGGTTTTCAGCTGTCAGATATGATTCTCTATATTATTATGAGTTTTGTGACTAATTTATTAACAAGAACTGATAGTTCATTTATGATAGGTGACGAAGTAAAAGACGGTTCAATTATTATGCGACTCTTACGTCCAGTTCACTTTGCTGCTTCCTACCTTTTCATGGAGATTGGTTCTAGATGGCTCATCTTTTTAAGTATAGGGGTACCGTTTTTGCTTGTTATTACGGGGGTACGCCTCTTCTTGGGGACTGATTTGATTCAAGCTATAGTGTTAGTGGTATTTTATATTATTAGCATTATTTTAGCTTTTTTGATTAACTTCTTTTTTAATATTTGTTTTGGCTTCTCGGCATTTGTTTTTAAAAATTTATGGGGGTCAAACCTGTTAAAAAATTCGTTAGTCGCATTTATGTCGGGGAGCTTGATTCCTCTTACTTTTTTTCCGAAAATCGTTGCTGATATTTTAGGATTTTTACCATTTTCATCTTTAATTTACACACCAGTAATGATTATTATTGGTAAATATGATGGCAGTCAAATTGTGCAAGCCTTACTTTTACAAATATTTTGGCTAATAGTAATGGTAGCTTTATCTCAATTAATATGGAAAAAAGTACAGTCGCATATCACTATCCAAGGAGGT

SEQ ID NO: 10110 - protein, 272 aa, Streptococcus agalactiae; identical to SEQ ID NO: 5700

SEQ ID NO: 10111 - protein, 537 aa, Streptococcus agalactiae
TTGTGGGCTCTTGGTCAAAGGCTTATTCGAAAAGGAGAATTTGATAAGTATTTAACCAGGCCGATCAGTCCTTTATTTCATGTCCTAGTTGAAACCTTTCAAGTAGATGCATTGGGGGAGTTATTGGTTGGTTTTATTCTGTTATCTACCACAGTATCTAGTATAAGCTGGACCGTGCCAAAAGTATTATTATTTATATTTATTATCCCCTTTGCAACTTTGATTTATACCTCCTTGAAGATTGCTACGTCAAGTATCGCTTTTTGGACCAAACAATCTGGTGCTGTTATCTATATTTTTTATATGTTTAATGACTTTGCTAAGTATCCTGTCGCAATATATAATAATCTATTGCGTTGGATCATTAGTTTTGTCATTCCATTTGCTTTTACAGCTTATTATCCCGCTGCTTACTTCTTACAAGATAGAAATGTCTATTTTAATATTGGTGGGGTTATCTTGATTTCCTTGATTTCTTTTATGGTATCACTAATACTTTGGCATAAAGGAGTAGAAGTATATGAGAGTGCGGGTTCT

SEQ ID NO: 10112 - protein, 179 aa, Streptococcus agalactiae
MWALGQRLIRKGEFDKYLTRPISPLFHVLVETFQVDALGELLVGFILLSTTVSSISWTVPKVLLFIFIIPFATLIYTSLKIATSSIAFWTKQSGAVIYIFYMFNDFAKYPVAIYNNLLRWIISFVIPFAFTAYYPAAYFLQDRNVYFNIGGVILISLISFMVSLILWHKGVEVYESAGS

SEQ ID NO: 10113 - protein, 846 aa, Streptococcus agalactiae; identical to SEQ ID NO: 5703

SEQ ID NO: 10114 - protein, 282 aa, Streptococcus agalactiae; identical to SEQ ID NO: 1242

SEQ ID NO: 10115 - protein, 720 aa, Streptococcus agalactiae
ATGAAAGTAGCAATAGTTACTGGTGGTACCAGAGGAATTGGAAGGGCTATTACAAAAGAGTTATACAAAGAAGGTTACAAAGTCATTGCTATTTATAATAGCAATGATGCTAAGGCAAGAGCTTTACAAGAGGAGTTACCAAAATTAGACGTTTATAAATGCAATATTTCAGATGCAAAAGCAGTACAAAAATTGGTGACTAAAATTTTTAGAGAATATGGCGGTATTGATTGTTTAGTTAATAATGCTGGTATTGTTAGAGATGGCTTTTTCTTGATGATGTCTAAGGAAAAATGGATGGATGTCATTAACATAAATATTATGGGGCTAGTTAACATGAGTAAAGCCGTGTTAAAAATCATGAAGGCTAAGCGTATACAGGGAAAGGTTATCAATATTTCTTCAACTAGTGGTATAGCAGGGCAGATAGGGCAAGCGAACTATTCAGCAACGAAAGGCGCTATCATTTCCATTACTAAAACTCTAGCGAAAGAATTTGCATCAGATGGTATTACGATTAATTGTGTAAGTCCAGGATTCATTGAAACAGATATGACAAATGAATTGCAAAATAAAGAAGAGCTAAAAGAGCATCTTATTCCTCTAAAAAGGTTTGGACAACCTGAAGAGGTGGCTTGGCTCGTAAGCTTTTTAGCAAGTGAGAAGGCAAACTATATTACAGGAAAAAATATTGTGATTGATGGAGGAATGATTAATGAT

SEQ ID NO: 10116 - protein, 240 aa, Streptococcus agalactiae; identical to SEQ ID NO: 1244

SEQ ID NO: 10117 - protein, 303 aa, Streptococcus agalactiae; identical to SEQ ID NO: 5707

SEQ ID NO: 10118 - protein, 101 aa, Streptococcus agalactiae; identical to SEQ ID NO: 1246

SEQ ID NO: 10119 - protein, 474 aa, Streptococcus agalactiae; identical to SEQ ID NO: 5709

SEQ ID NO: 10120 - protein, 158 aa, Streptococcus agalactiae; identical to SEQ ID NO: 1248

SEQ ID NO: 10121 - protein, 927 aa, Streptococcus agalactiae
ATGGAAATTAAACTCAAAAATATTGGAAAAAAATATGGTTCTTTTGAAGCATTGAGAGACATTAATCTCATCTTTGAAGAGGGAAAATTTTATGGCCTTCTTGGACCTAATGGAGCTGGTAAAACAACTTTATTTAACCTTTTAATTCAAAATTTTAAGCAAACGTCAGGCGATATTAAGTGGGAGGTGGATGGAAAACCTCTATCTATTAAAGATTTTTATCGTCACATTGGTATTGTCTTCCAAAGTAATCGCTTAGATGATAATTTAACGGTTGAGGAAAATCTAATTTCTAGAGGTGCTTTGTACGGTTTATCTAAATCACAAGTACGTAATCGCCTTAAAGATCTTCAAACGTATCTAGATATCACAGCAATAAAAAAACAAAAATATGGCAGTTTATCAGGAGGTCAAAAACGAAAAGTTGATATTGCACGCGCCTTGCTGCCACAACCTTCTCTATTATTATTAGATGAACCAACGACTGGTTTAGACCCTCAATCTCGTCGCGATTTATGGGATGCTATCGCACAACTAAATCAACAATCGCAGATGACAGTTGTACTAATTACTCATTATCTTGAAGAAATGTCTGCTTGTGATGTTTTAAATGTTCTTATTGAAGGAAACATTTATTATTCGGGAGATATTAAAAGCTTTATTGAGCAACATTCCACAACAAACTTGAATGTGGTATTGAAACCAGAAAAGTCATTAGACCAACTTTCGATAGCTGATTTTGTTAATAAATGTCAAGTCCTTTCAGAAAGGGAGATAGTATTTAAGGATATTTCTGTTGAGGAAATGATGCAGGTTATCTCAGACAATCAAGATAAATCTATTATTGAGACATTTAATGTTGAATATTCGAACTTAGAGGCGGCGTATCTCAACTTGCTTAGAGAAAAAGAAAGGAAAAACAATGTT

SEQ ID NO: 10122 - protein, 309 aa, Streptococcus agalactiae; identical to SEQ ID NO: 1250

SEQ ID NO: 10123 - protein, 876 aa, Streptococcus agalactiae
ATGTTTGAACTAATTTCTAGAAATCGTAAAGTTTACACGCGAGATCGGTTAGCGTTTTTCATGTCTTTTTTATCAGTTATTATCTTAATTTTGGTCTATCAGATTTTCTTGGGAAAAATTCAATTAGATGCTATAAAAGCAGCATTGAGGAGTAATACAGTATCCAGTGATACTATTCACATGGTTAATTATTGGCTCATTGCAGGTTTGACGACTATTATTTCAATGACTAGTACATTAGGTGCCTTTGGAGTTATGGTGTCCGACAAAGAAAAAAAATTAAATGAAGATTTTAAGGTCAGTCCTATATCAAATATCAAAATTGAATTGTCCTATGCTATATTTGCCGTTTTATTTGGTATTGTCATGACGATGTTCTCTTGCATCTTTGCTATCGGTATTTTTAACGGCTTTAATTCCTTGCTAGAGTATTCAGCTATGGATTATTTAACTATTTTAGGGATCGTTTCCTTAGGGACTGTTTTATCTGCGGCGATGATTTTACCTATTTTAGCCTTTATTCATACTAGTTCAGCTTTTACGACTCTTAGCACAATTGTAGGGACTTTTATTGGTTTTATTTCAGGAGTATATCTCTCAATTGGCTCGGTAGGAAAAGCATTACAACAGGTTATGACATGGTTTCCATTGACTCAAATCAATTCTCTTTTGAAACAGGTCTTAATGAAGGGTTCTATTGCGAAGGTATTTGACAAAGCCAACGAAGCCACTGTCTCTAACTATAAAGAATCATATGGTGTTGTTTTGCGTAATGCTGATGGAGAAAGGCTGAGTAATCACTTTATGTTGATTTATATCATTGCCCTCATTCTTATTTTATTGGCAATTCATTTTATTATTAAAAAGGTTAAAAAA

SEQ ID NO: 10124 - protein, 292 aa, Streptococcus agalactiae; identical to SEQ ID NO: 1252

SEQ ID NO: 10125 - protein, 2001 aa, Streptococcus agalactiae
ATGAAAGATGATAATAAATTAAAGATTTCTGAAGCTTCCTTAGAAGATTATTCTGAAGTGGTTCATTTATTTAATAGGAATCATGTTTATCAATTTCCAGACGGTAGTCCTTTAACTGTTGATGACCTTGATTTAACGTTAAAAGTTAAAGAAGTGACACATTTATTTTTACTGAAAAATCATGGTGTTTTGATTGGAACATCAGCTTTCTTTAAATTTATTACCTATGGTTGTTTAGATTGGAATAGTAGCTTTAGTGGTTTTCTTTTAATTGATTCGAAAAGTCGTAGTGGACAGGCAATCACTTATCTATATAAAACTATCTTAAAGAAGATAACAAAACTGAAGTTTTCTAATATCTATACCGAAATCAGTAACTACAATAAACCCTCCTTAGCTTTATCAAAATTGAATGGCTTCAAAGAGTATGATAAGACATATGAAGACATACTGCATTGTCGATCATTGCGTAGTCACCTCCCTAAGATATTGAATACGTTTCGTATTTCGAATTATTATGGTAAAACATACGACATATCAACTTTTCAAATTATGGAGGAAATTGAAAATCCCTTGGAAGAGGAGACAGAAATTAGGACCAAAGTCTCTGATGAAGAAATATTATTTAAAGCAGAAGATAGTGCTTCACTTCCTTATTATTTAAAAATGAGCTTGTTTCAAATGGAAATTGCTAGGTTAGATAACCGTTATGTTTTACAAGTTGACTTTTTATCGGAACAAGTAAAGAGGGTTCGGGTTAAAACTGGAAAATATCACTTGGCAAACTTAACGAGGGCTCACCCTAGCCTAACTTTAAGTCGTTTTGCCAATTATTATTACATTCAAGCAACTGTGGAAACCCTTTATGGTAATATCGATGTTCAACTGGAACGTCGAAAAAAGCATTATAGAGATGCAACTATTTGTCTTAAGAGAACTTTTCAAGGTTATGATTTACTTATCTCTCCAAATGGCAGCCTTATTTTTGAAAAGCAGAAAAGAAAGATACTTGAAGATAGTTTTTTGATTTTTAGCCAACCTTTGGACAAGAAATTAGTTGTAAAAGAAGAAGAAAATCACATTACAATCAAATGTTTCTATCAAGGTGCTTTAATTGAGAAAATCATGACATTTACAAGTGACGAAGAAATCACTTGTGTTTATAAATGTAATCAAAAGGCTAAAGAGATGTTCCCAAAATTATTGAAACAGACTTTCAAGTTACACTGCCAAGAGCAGTTGATTAGAGATAGTGAAGGTTATCTTGTGAATGTTCCAGGAAGTTACCCGATTGAGCATGATGATTTTCTTCGAGCAGATAAGTTTGAAGATAGACAATTCCATTATTACCTCCCGAATGAAGATAAAATGATTTCCTATTCTCCTCCTGGCAAAGCCAGCAATCAAATGCAATTTAGACCCTTATGTCTTATTGATACAGATAGCCTTTCTTTTCCACTGACTTATCATTTTAGGATTTCACAAGCATCATCGGAGGAGGCGTTAATCAATCTAAAAAAACAGCCAATATGGGACAGCAACTACCAAGCGTCAGCAACTGACCTTTTAAAACATATCTCTAACCTAACATTAGAAGAAGAGAAGGATTATGGCATCAAGAGAATGATAGCTAACAGAAAGCATTATCCTAGTCACAAACTGGTTTTAGCCTATAATCAGATTGTTTTGCCTAAGAATGAAATTCCAAGAGACAGTGAATTATATTCTATTTCTTTTGATTATCGAATTAGAGGAAAGTTTGTCCAAATCCGCCAAGGGGAACATGTCAAATATGATAATAAATCCTATGTTTTGGAAAATAGTCAACAATTAGTATTGTATGTAGCTAGCGATGATAAATATATACTAATTTCTGCTAAAAATGGAATATTTTATTCTTACAAAGAGAACAATCATTTAAAAATAAGGTGCATGTTTAAAAGGAACTCACCTTATGCTACAAATGTGAGCATTACAGAATATAGAAAGTGTGAAGAAAAA

SEQ ID NO: 10126 - protein, 667 aa, Streptococcus agalactiae
MKDDNKLKISEASLEDYSEVVHLFNRNHVYQFPDGSPLTVDDLDLTLKVKEVTHLFLLKNHGVLIGTSAFFKFITYGCLDWNSSFSGFLLIDSKSRSGQAITYLYKTILKKITKLKFSNIYTEISNYNKPSLALSKLNGFKEYDKTYEDILHCRSLRSHLPKILNTFRISNYYGKTYDISTFQIMEEIENPLEEETEIRTKVSDEEILFKAEDSASLPYYLKMSLFQMEIARLDNRYVLQVDFLSEQVKRVRVKTGKYHLANLTRAHPSLTLSRFANYYYIQATVETLYGNIDVQLERRKKHYRDATICLKRTFQGYDLLISPNGSLIFEKQKRKILEDSFLIFSQPLDKKLVVKEEENHITIKCFYQGALIEKIMTFTSDEEITCVYKCNQKAKEMFPKLLKQTFKLHCQEQLIRDSEGYLVNVPGSYPIEHDDFLRADKFEDRQFHYYLPNEDKMISYSPPGKASNQMQFRPLCLIDTDSLSFPLTYHFRISQASSEEALINLKKQPIWDSNYQASATDLLKHISNLTLEEEKDYGIKRMIANRKHYPSHKLVLAYNQIVLPKNEIPRDSELYSISFDYRIRGKFVQIRQGEHVKYDNKSYVLENSQQLVLYVASDDKYILISAKNGIFYSYKENNHLKIRCMFKRNSPYATNVSITEYRKCEEK

SEQ ID NO: 10127 - protein, 951 aa, Streptococcus agalactiae
ATGAATACTATTTATAATACATTGAGAACAGATAAAGGTTATAAAGTTTATGAGGGGTATTTATATGAAATTACTGGTGAAGAATGTGAAGAAGCCTTAGACCTTGTGATTCCTAAGAATATTGTATTTGCAGATACAGATACTTGTGGCTACACTTTTTTACTCAATGAAGATGGAACAGTTTATGATGATGTGACTTTCTACAAATTTGATGATAAATATTGGTTGGCTAGTCATAAAGCTTTGGATTCTTATTTAGACAACATCAATTTTGACTATACCGTAACAGATATTTCTGACGAGTATAAAATGCTGCAAATTGAAGGAAGATATTCGGGAGAAATTGCTCAGTCATTTTATGAATATGATATTTCAACACTTAATTTTCGTACTTTGATAGAGATGACTTATAAAGGTGAGAAAGGTTATCTTGCTAGATTTGGTTTTTCTGGAGAATTTGGCTATCAATTTTTCCTACCATCTTCTATTTTTGCTACTTTTGTTTCGGATGTCTGTGAAGGTATAGCAGAGTATGGGGATGAACTTGATAGATATTTAAGGTTTGAAGTGGGACAACCCATTACTGATATTTATCAACAAGAAGAATATTCTTTATATGAAATAGGTTATTCTTGGAATCTAGATTTCACAAAGGAAGAATTTAGAGGTCGCGATAGCTTGTTAGAGCACATCAGATCAGCAACAGTTAAAAGTGTTGGATTCTCAACGAAGGAAAAACTCGCTTCAGGAACACCAGTGCTATTTGATGACCAAATTGTTGGAAAGATTTTTTGGATAGCAGACGAGAAAGACTCTTCGGAAAATTACCTAGGTTTGATGATTGTTAACCAAACATATGCTCATTCAGGAGTTACTTTTGTAACAGAAGATGGCCAAATTTTGAAAACACAATCAAGCCCTTATTGTATCCCAGAAAGTTGGAACAAAGAA

SEQ ID NO: 10128 - protein, 317 aa, Streptococcus agalactiae; identical to SEQ ID NO: 1256

SEQ ID NO: 10129 - protein, 2193 aa, Streptococcus agalactiae
ATGAGCGTATATGTTAGTGGAATAGGAATTATTTCTTCTTTGGGAAAGAATTATAGCGAGCATAAACAGCATCTCTTCGACTTAAAAGAAGGAATTTCTAAACATTTATATAAAAATCACGACTCTATTTTAGAATCTTATACAGGAAGCATAACTAGTGACCCAGAGGTTCCTGAGCAATACAAAGATGAGACACGTAATTTTAAATTTGCTTTTACCGCTTTTGAAGAGGCTCTTGCTTCTTCAGGTGTTAATTTAAAAGCTTATCATAATATTGCTGTGTGTTTAGGGACCTCACTTGGGGGAAAGAGTGCTGGTCAAAATGCCTTGTATCAATTTGAAGAAGGAGAGCGTCAAGTAGATGCTAGTTTATTAGAAAAAGCATCTGTTTACCATATTGCTGATGAATTGATGGCTTATCATGATATTGTGGGAGCTTCGTATGTTATTTCAACCGCCTGTTCTGCAAGTAATAATGCCGTAATATTAGGAACACAATTACTTCAAGATGGCGATTGTGATTTAGCTATTTGTGGTGGCTGTGATGAGTTAAGTGATATTTCTTTAGCAGGCTTCACATCACTAGGAGCTATTAATACAGAAATGGCATGTCAGCCCTATTCTTCTGGAAAAGGAATCAATTTGGGTGAGGGCGCTGGTTTTGTTGTTCTTGTCAAAGATCAGTCCTTAGCTAAATATGGAAAAATTATCGGTGGTCTTATTACTTCAGATGGTTATCATATAACAGCACCTAAGCCAACAGGTGAAGGGGCGGCACAGATTGCAAAGCAGCTAGTGACTCAAGCAGGTATTGACTACAGTGAGATTGACTATATTAACGGTCACGGTACAGGTACTCAAGCTAATGATAAAATGGAAAAAAATATGTATGGTAAGTTTTTCCCGACAACGACATTGATCAGCAGTACCAAGGGGCAAACGGGTCATACTCTAGGGGCTGCAGGTATTATCGAATTGATTAATTGTTTAGCGGCAATAGAGGAACAGACTGTACCAGCAACTAAAAATGAGATTGGGATAGAAGGTTTTCCAGAAAATTTTGTCTATCATCAAAAGAGAGAATACCCAATAAGAAATGCTTTAAATTTTTCGTTTGCTTTTGGTGGAAATAATAGTGGTGTCTTATTGTCATCTTTAGATTCACCTCTAGAAACATTACCTGCTAGAGAAAATCTTAAAATGGCTATCTTATCATCTGTTGCTTCCATTTCTAAGAATGAATCACTTTCTATAACCTATGAAAAAGTTGCTAGTAATTTCAACGACTTTGAAGCATTACGCTTTAAAGGGGCTAGACCACCCAAAACTGTCAACCCAGCACAATTTAGGAAAATGGATGATTTTTCCAAAATGGTTGCCGTAACAACAGCTCAAGCACTAATAGAAAGCAATATTAATCTAAAAAAACAAGATACTTCAAAAGTAGGAATTGTATTTACAACACTTTCTGGACCAGTTGAGGTTGTTGAAGGTATTGAAAAGCAAATCACAACAGAAGGATATGCACATGTTTCTGCTTCACGATTCCCGTTTACAGTAATGAATGCAGCAGCTGGTATGCTTTCTATCATTTTTAAAATAACAGGTCCTTTATCTGTCATTTCGACAAATAGTGGAGCGCTTGATGGTATACAATATGCCAAGGAAATGATGCGTAACGATAATCTAGACTATGTGATTCTTGTTTCTGCTAATCAGTGGACAGACATGAGTTTTATGTGGTGGCAACAATTAAACTATGATAGTCAAATGTTTGTCGGTTCTGATTATTGTTCAGCACAAGTCCTCTCTCGTCAAGCATTGGATAATTCTCCTATAATATTAGGTAGTAAACAATTAAAATATAGCCATAAAACATTCACAGATGTGATGACTATTTTTGATGCTGCGCTTCAAAATTTATTATCAGACTTAGGACTAACCATAAAAGATATCAAAGGTTTCGTTTGGAATGAGCGGAAGAAGGCAGTTAGTTCAGATTATGATTTCTTAGCGAACTTGTCTGAGTATTATAATATGCCAAACCTTGCTTCTGGTCAGTTTGGATTTTCATCTAATGGTGCTGGTGAAGAACTGGACTATACTGTTAATGAAAGTATAGAAAAGGGCTATTATTTAGTCCTATCTTATTCGATCTTCGGTGGTATCTCTTTTGCTATTATTGAAAAAAGG

SEQ ID NO: 10130 - protein, 731 aa, Streptococcus agalactiae; identical to SEQ ID NO: 1258

SEQ ID NO: 10131 - protein, 1209 aa, Streptococcus agalactiae
ATGAGTAAATTTTTATTTGCTCCTTTCATGATGAATTTAGGAGAGAGCCAAAGATTATCAAAACTGGCTAATTGTTTATATGAACAAGGACATGATATTCATATCCTTGGAGACAATTATTATCCATTTTTATTTAATAATGATGCTTATCGCTATCACCACTGTGTAGAAGATAAATCTGTTTATAATAGTAAGCGATATGATGCTTTCTTTTCTCTTTCAACAGACTTTAATTTTTTATCAGAAGAAGAAATTGAACGCATCTGTTCTATTGAAAGAGACTTGTTACGCCAAGAAAAATTTGATGCTGTATTGACAGGTTACCGTCTATCTATTGTTACAAGTTGTCGTTTAGAAAGCATACCATTAATTTGGATTATTTCAGGGGCAACGCATATCAGTGAAATTGTTGAAAACTCAGAAGGAATATTGCCTAATGGGAAGATAAGTAAAGCTAGTAAGCCTCAAACAAAGGATTTTATCAAAAGAGTAATCACTACTTATTCAACAAATGTTAAAACGTGGAATAACTATATTAAAAAATATGGTGGCAAACCTTTTAATAATGCTTTAGAATTATTTACTGGTGATCTAAACTTGGTAACAGATTACTCTTTGTTTTATGAATTTGATAAAGATTCGTCCTATAAAACGATAGGACCTATTTTGATAGATAATGTAGGTTTTTCAAAATGCAGCCAAATTAATCAAGACAATAAGACTGTACTGCTCAGCTTTGGTACTTCATTTAAACGAGATTGGGTGGAATCTTTTTTAAAGACATTACCAAGGCATTATCATTATTTACTGACAAGCTGTGGTGAGGCTATAAACATTCCAGGAAGTTATATTGAGATAGTTGATTTTATTGATTTTAAAACCATAGATAAAGAGATTTATTTCGCTATTATACACGGTGGGCAAGGAACAGTTTATGCGATGGCTGCACAAGGTATTCCCTTTATAGGTATCCCTTTCTTTAACGAACAATTTTGGAATATTAAGAAGTTCAGTAAAGAAAAGTGCGCTTATTTGGTAAAGAAACCTGATGTAAGAGAGATACGTAAAGCAATTAGCTGTCTTGAAAGAGACTATGATATCTATAAAAGTTATATGATAAGACTAAGCCAAGGAATTAAAGAAGAAGCAGAGGCATCTTTACAAAAAGCGGAGGCAGAAATTGAATCCTTTATCAGAAAAAGACAAAGT

SEQ ID NO: 10132 - protein, 403 aa, Streptococcus agalactiae
MSKFLFAPFMMNLGESQRLSKLANCLYEQGHDIHILGDNYYPFLFNNDAYRYHHCVEDKSVYNSKRYDAFFSLSTDFNFLSEEEIERICSIERDLLRQEKFDAVLTGYRLSIVTSCRLESIPLIWIISGATHISEIVENSEGILPNGKISKASKPQTKDFIKRVITTYSTNVKTWNNYIKKYGGKPFNNALELFTGDLNLVTDYSLFYEFDKDSSYKTIGPILIDNVGFSKCSQINQDNKTVLLSFGTSFKRDWVESFLKTLPRHYHYLLTSCGEAINIPGSYIEIVDFIDFKTIDKEIYFAIIHGGQGTVYAMAAQGIPFIGIPFFNEQFWNIKKFSKEKCAYLVKKPDVREIRKAISCLERDYDIYKSYMIRLSQGIKEEAEASLQKAEAEIESFIRKRQS

SEQ ID NO: 10133 - protein, 573 aa, Streptococcus agalactiae
TTGAATCCTTTATCAGAAAAAGACAAAGTTAACTATATTATGATTTATAAAAATAGGCAGTCTACATTGGAGAATAATTTATCTGGCGATCGGTTGATGAGATATCAACAAGCAAATAGACAGGTAAGCAAAGATAAACTGTTAACAGGGAGTTATTTTGTGTACCAATGCTTAAAAAAGTTAGGTTTTACCAATAAGATTTGTCAGGAATCTTTTTCTAGTGTTAGTAGTTATTTAATTGGTTTGCCAAAGGGGAAAATTAGTTACTCTAATTCTGGTGACTATCATATTCTAACCTATGCTCCCAGTGGTTCAACTGGGGTTGATATTGAGAAATACAAAGATAGATCAGAACAAACCTACCAAAACTACCTAGGAGAATCAGTTAGTAGTGATATGGATTCTAAATTATTATTTTATAAGGCATGGTTACAAAAAGAAATTTCCTATAAATGTGGGAAATCTATAGATATTACCTATCAAACAATGATAGATGGCTATATTTATGGTTATGCTTTTGATAATACTTTTAAAGTAGAAGCGGTTTACTTAAAAGAATTATTACCAGATAAC

SEQ ID NO: 10134 - protein, 191 aa, Streptococcus agalactiae; identical to SEQ ID NO: 1264

SEQ ID NO: 10135 - protein, 339 aa, Streptococcus agalactiae
ATGAGTGAATTCCTTTCAGCCAAACCTATTGGTCATAATGATTCATCTAATACTATTTTAAGAATTATAGAGAATACGAAATATATTCATCACTATGATGGAAAAGTTGTTGTCGAAATTCCTCCTCAAAAAGAGCCTATCAAAGTCTTTTTTATGGATTCACGTCTTCATTATTTAGAATTTTCAGACATATGTCGGTATGTAACTGTTGTTTTGAAAAATAGTACCGTTGATAATATAACCAATTTAGGGCTAGATAATCATATTGTTTATGACAATGGTGATGATATGGTTGATCCGTTGCCGAGTATTCAGCATGGATTATTTCTTAATGATGAT

SEQ ID NO: 10136 - protein, 113 aa, Streptococcus agalactiae; identical to SEQ ID NO: 1266

SEQ ID NO: 10137 - protein, 513 aa, Streptococcus agalactiae
ATGACATTTTATAAAAAGACGGACAAATTTGGATTTAGGAAAAGTAAAGTGTGCCGCAGCCTATGCGGTGCTTTATTGGGTACAGTAGCAGTTGTTAGTCTAGCTACAGCAAGTACAGAGATTCACGCTGATGAAGCAACAACCTCACCTACCACTGTAACGAAAGTACCTCAGCCAGTTCAAGCAGACACAACAGCTCTAAATACCTCTAAGACTCACAGTACACAAGCAACTACAACTCCTGTTGAAGCTAAGGAGAATAAGGTTGTCAAAAGTGAAACTGTTCAATCTGAGAGCCGAGTAATGCCTAGAGATAAGGTAGTAGAAAGGCCAGAAACAGTAAAAGCTAGTGTTAACTCAGACGTTAGCCAACCTATTACAACCACACCCCCAACAATTAATGAAAAAACAGTTGAGATTCCTAACTTAGCTCAAGATACTAAGAAGGTAGCTCCAAAAGTAACTGTTACACCAGAAGTTGTTAATCAGCCAAAGCAGTTGCCTAAATACGAG

SEQ ID NO: 10138 - protein, 171 aa, Streptococcus agalactiae; identical to SEQ ID NO: 1268

SEQ ID NO: 10139 - protein, 2655 aa, Streptococcus agalactiae
GTGACTAAACCACAGGGGGCGGTTGCTGAGAAAGCTACTCCGGCTGTGCCAAAGCCTCAAAAAGTAAGAGTAATTGTTGAATTTAATAAGGAATCTATCTTAGATTATGCGACAGAACAGAAAAAAACAGTTGCACAGTTAAATCAAGCTGATGTTGAGAAAAAATTACAAAGCATCAAGCAAGAGCAAGATAAAGTTCTTAAGAATATTGAAAAAAGTGTTCACTTTGATTCAAGCAAAGTGAAGCGTTACGATGCTATTATTAATGGTGTCGCACTTGATATTCAAGCTCAAGAAATTGAAAAATTAAAAACGATTGCTGATGTTAGAAGGGTCTATGTCTCACAAGAATATGTTCAGACAAAACCTTTACTATCTTCCTCAGGGCAACTTATTGGTTTGCCAGAAGTTTGGAACAACTCCCAGTATAAAGGTGAGGGAACTGTTGTTGCAGTTATTGATTCAGGGGTTGATTTCAAACACCAAGCACTAAAAATCAAAGAACCAAATCGTGCTAAGTATAATAAAACTAGTATTGAAAAACTGATTCATGAAAAGAATCTCAAAGGAAAATTCTATTCCGAAAAAGTACCTTATGGTTATAACTATTATGACTATAATGATAACCTCAAGGATAGCTACGGTGTAATGCATGGTATGCATGTAACAGGTATCGTAGGAGCTAATGATGATAATCAAAAATTGTATGGTGTTGCACCAAATGCTCAAATTTTAGCGATGAAGGTATTTTCAGATGACCAACAAAATCCCACAACCTTCACAGATGTGTGGCTAAAAGCTCTAGACGATGCTATTTTACTAAAAGCTGATGTTGTTAATATGAGTCTTGGAACACCTGCTGGATTTGTACATGAGGGGAAAGACTATCCTGAACTTGAAGTTATTGCAAGAGCGTGTAAGGCAGGAATCGTCATTGCAGTAGCAGCAGGTAATGAAGGAAATATCACTGACGGTAATACTTATGGTGTTAAGCCGCTAGCAGAAAATTATGATACAGCCTTGATTGCCAACCCAGCCCTCGATGATAATACCTTGGCTGTTGCCTCTATGGAGAACCTTAAAAAGCATGCTCATGTTTTGAAATTTAAAGATAAAAAATCTGGAACAGAAGTTACAGAAGTCATTAATCTTCATGTTGCCCCAAACGCTTCAAAAACTATTATTGGATTGGCTGTAGATTTGGGAGCAGGAGCTCCTTCGGAATTGTCAAAACATTTTGATTTAAGTGGTAAAATCGCCATGCTTGAAATTCCAGAAGATAATAAATCTAATGGATTTTTAGAAAAAGTACAGGCGATTACTAAGTTAAATCCAGCTGCTATCTTGCTTTACAATAATGCGAAGGTTAAAGATGATTTAGGCAGTCAATTATTAGTTGAATCAGAAGCAGCTAAATTTAATATTGCTCGCATTACCAGAAGCACGTATAACAATATCAAAAATAATAGCAATAAAATTATTACTATTTTAACAGAGCGTCAAGCTATTGATAATAGTTTAGCAGGACAATTATCTTCTTATTCTTCTTGGGGACCTACACCAGACTTACGTCTAAAACCTGAGATTACAGCTCCAGGTGGTCATATTTTCTCAACTGTGGAGGATAATCAATATGCTGATAAATCAGGAACATCAATGGCTGCACCTCAGGTAGCTGGGGCAGCTGCAGTTTTAAAACAATACATTACAGATAAAAAAATTCCTGTTGATAATGCTGCTGATTTTATTAAATTACTCTTGATGAACACTGCACAGCCAATTATCAATAAACAATCAAAAGATGGCAAAACACCTTACTTTGTGCGCCAACAAGGTAGCGGAGCAATGAATCTTGCCAAAGCTCTTGTTACGACAGTCGTTGCAACTGTAACAGGGACTAACGATAATAATGCAGATGGTAAGTTGGAGTTACGTGAATTAAAAGAGAAAAAATTTAAAGCACGCATTCTACTTCGTAACTTTGGAAAAACTAATAAAACGTATATCATCTCATCAGAAGCGATTGCGGACCCAGTTGATGAAAAAGGATTTCGTACGCAAAATTCAGAACACCTAGTATCAAAAAAAGCTGATGCAGTTACAAGGAAAGTTACTGTAGAAGCAGGTAAGACATTAGCTGTTGACCTTGATGTGGATTATTCTGATGCAGAGGCTTTAACTCGCAATAATTTCTTGGAAGGTTATCTTAACTTAAAAGATACTGAAGGTGTAGCCGATTTACACTTACCATTTTTAGGTTTTTACGGTTCATGGACAGAGCAAAAAGCTATTGATGCTTTTGAAGGCATTTCTGAAATTGGTAACGGTGACAAAAAACGTCGCGTTCAATTCTATGTTAATAAAGAAACCAACAAGACCTCATCAACCTTTACAACTAACGGCATGTTGAGTCTTCCAATCTATAACAATACAGTATTTTTCTCTCCTAATAGTCCTTTCTATGACAAAGCAGGAGTTCGTATTGCAGCTTTGCGTAATATGGAGTATGTTCAATATTCTATTATAGATCCAGATACCAATAAAGAAGTTCGTGTACTTGGTAGATCACACGACGTTAGAAAACTTTATCGCCTAGATTATCGTAATAGTTTTGCCATGATGCCAGATTCTATTTGGGATGGTAAGATTAAAGAT

SEQ ID NO: 10140 - protein, 885 aa, Streptococcus agalactiae
MTKPQGAVAEKATPAVPKPQKVRVIVEFNKESILDYATEQKKTVAQLNQADVEKKLQSIKQEQDKVLKNIEKSVHFDSSKVKRYDAIINGVALDIQAQEIEKLKTIADVRRVYVSQEYVQTKPLLSSSGQLIGLPEVWNNSQYKGEGTVVAVIDSGVDFKHQALKIKEPNRAKYNKTSIEKLIHEKNLKGKFYSEKVPYGYNYYDYNDNLKDSYGVMHGMHVTGIVGANDDNQKLYGVAPNAQILAMKVFSDDQQNPTTFTDVWLKALDDAILLKADVVNMSLGTPAGFVHEGKDYPELEVIARACKAGIVIAVAAGNEGNITDGNTYGVKPLAENYDTALIANPALDDNTLAVASMENLKKHAHVLKFKDKKSGTEVTEVINLHVAPNASKTIIGLAVDLGAGAPSELSKHFDLSGKIAMLEIPEDNKSNGFLEKVQAITKLNPAAILLYNNAKVKDDLGSQLLVESEAAKFNIARITRSTYNNIKNNSNKIITILTERQAIDNSLAGQLSSYSSWGPTPDLRLKPEITAPGGHIFSTVEDNQYADKSGTSMAAPQVAGAAAVLKQYITDKKIPVDNAADFIKLLLMNTAQPIINKQSKDGKTPYFVRQQGSGAMNLAKALVTTVVATVTGTNDNNADGKLELRELKEKKFKARILLRNFGKTNKTYIISSEAIADPVDEKGFRTQNSEHLVSKKADAVTRKVTVEAGKTLAVDLDVDYSDAEALTRNNFLEGYLNLKDTEGVADLHLPFLGFYGSWTEQKAIDAFEGISEIGNGDKKRRVQFYVNKETNKTSSTFTTNGMLSLPIYNNTVFFSPNSPFYDKAGVRIAALRNMEYVQYSIIDPDTNKEVRVLGRSHDVRKLYRLDYRNSFAMMPDSIWDGKIKD

SEQ ID NO: 10141 - protein, 3314 aa, Streptococcus agalactiae
TTGAATAATAAAGGTGTCGGTGGCGATGGTGTCCAAATTTATCAATACTATATCAAAATGGACAACAATAAACCTTACTTAAGTCCCAAAGATAAGACTACTGTAGAGAAGTTAGAAGATCGCTGGAAAAAAATTACTTTCAAAGTTCAGGATACTGGCATTGGTTTGAAAGACGTTTATCTTCAATCTGTTAAGTATGTTGGTGGTGGCAATAATAATTTAGACCTTATCACACCTCCAGGATTTAAAAAAGAAGATAAAAAAGTTGAAAAACCAAAATTAGACCGTCCACCAGGAATGATTTACCAGCACCAACTTCAATGAGAAGTTTTGATTATTCAACCCCACCGGGAACTAAGCCAAGCAAACCCAAAGATAGTTTATCAACTCCTCCAGGTTTCCCAGATTTAAACACGCCGCCGGATGAAGCACCAAAGGATAGTAAAAAAGACGCTATTGAAGATAAATCAGGAGCAATTAAATATGCTAAGTCTCTTCAACTTAGCTTTGTTGATGACCCTATTTTAGCTAGCAAAGTAAATGGCAAAATATTACAAGTCGAATCTGATGGCAAATTAGTCATTCCTAGAAATGCTTTGTCAGCTAATCAATTTGATGACACTAGTCTTAAAATTTATCGTAATAATAATCGCAATAAAGAAATTACTATCACAACAGATTATTTTGCAGATACAAAATATGTCAATATCACAGCGGTTGACTATTTGAGCAATACTACTTTTGAGCAATTAGCTACTGGTGAAACAGTAGATTACCATGCCATTGTATTTTCAAGCTTTGCTGCTATTAAAGACAAGGGTGGTAAGATTTATGTTAACGATAAATTGCAAGAAACTTCTCGTATAGCGCTTAAAGATAAATCTGTTAAGATTGGTATTGAATTACCAAATGATGTCAGACATATTGATAGTTTATCTGTTCGTCGTTTGAATGAGGTTAAAACTGTTGATAATATCTTGAAAAATGATGAACAAGACATTAATCTCAGCAAAACTTACCAATTAAAATACAACCCGACAAATCGTCGTCTAGAGTTTACTATTAATAACATTAACTCAAGTTCAGAAATCATGACCACTTTCAAAGATGGAAAGATGCCAGAATTGGTTGAACAAAAAGATGTTTCTTTGGATATAAACGATATGGACATGAGTAAGTTTAAAACTATTCGACTTGGACGAAAGGATTCTGAATTTAAGGGACAACTTATTGCAAAAACTGGAACAGTTGAATTAGATATGTTTTTCAAACAATCTCAAGACCCAGCTTCAATTATTAAAAAAATATACCTTATCCAAAATGGTGTTCCAAATGAATTGAAAAAATTTGACTCTAGTTTTGGTTTAACTGAAAGTCAGATAGATGGATACTATATTTATAAAGATGCAATTAACCTTAAATTTAAATTAACCAGTGGTGCAAGTCTTAAAGTTGTTTATAAAGGGCAAGAAGATCCATATAGTCATCAGAAAGAAGATATGACTAAAAAAGGTGAACAGCTCAGTCATTCAACTCAAGCCAATGAAAATACAGCAAAAGTAACCTTTGCTAATATTGACTGGTCACATTATAGTAAGGTTACTGTGAATGGAAAAGAAGTTGGTAAAGGTAGTGAGTTACCTTTAACTAAAGGATGGACAACATTTGTATTACATAAAACAGAAAATTCATTAAATGTTAAAAGTTTGATTATGGAGACGGGTAGTGTAAGTAAGAAAGTTCAACAACTTCCTTTAAGTCCTAGATTATCTAAAAATAAGCATATGAGGGATATGCTACTTACTATGCAAAAAGATTCAGCGTATTACGAAACAAGTGACAGTCTAGTCCTTCGAATTAATCTCACTGCAGATACTAAACTTAATTTTAATGCTGTTAAAGGAGCGAGTGCTCTTACTGAAAATATGATGATGAGACAGTTTGCAGTTGCTGGACCACAAGATGATCCTGTTAGTGAACATAAATACCCATCAGTATTTCTCTTAACTCCTGCCTTATTGGAAACTGCTAGTGAGGCAACTCTAAATGGTAAGGAAATCACAGCATCTGGTATTATCGGTCACATCAAGGATGGTGATAAAAGCAAGCATGTTGAAGTCAAAATGGTGAATGAAAATGGAGACATGCTAGGAACCCCTGTTATTATTCAAGGTAAAGACTTGACTAATCGAACAAAACCATTAATGAGTGGACGTAGAGTACTTTATGCCGGTAAACAATATGAGTTCCGGGCTAAATTACCACTTAGTCGTTTTAACACTTGGATTAGGGTTGAAGTGGTAACAGAAGCAGGAGAGAAAGCAAGTATTGTTCGTCGCATGTTCTTTGACCAATCAGTTCCAGAGCTTAACACAGCAGTTGCTAAACGTGATTTGACTTCTGATACTGCTCTTATCCACATCGTTGCCAAAGATGACTCTCTAAAACTAAAATTATATCAAGATGATTCATTACTTGAATCTGTTGATAAAACCGGTCTTTATAGTTTTAGAAATGGTGTAGAAATCACTAAAGATATGACAGTACCACTAGAATTTGGAGATAATATTATTAAGTTATCTGCTGTTGACTTATCAAATTATCGTCGTAATGAGACCCTTCATATCTATAGAAACCGTTTTGATGTTAAAGCAAGCCAAATGACAGCTGACAAAGGAGCTAAAGTAACTGTGGATATGTTGATGAAGCACTTAGTTGTTCCAGAAATGGCAGGAGCTTATACATTAACAATCGACGAAGCTCCAAACACAAATGAATCAGGAATGTTAACAAACGCTAAAGTATCGATTCATTATGTAAATGGTGGTGTTGATAAAGTTGATGTTCCGATTAAAGTAGTTGACTTAGAAGCTATTCGTAAAGCTGAAGAAGCACATAAAGCTGACGAAGCACGTAAAGCTGAAGAAGCACGTAAAGCTGAAGAAGCACATAAAGCTGAAGAAGTACGTAAAGCTGAAGAAGCACATAAAGTCGAAGAAGCACGTAAAGCTGAAGAGGGACATAAAACCCAAGAAGCACCTATAGTTGAAGAAGGCTACAAGGTTAATAACGTTCATCAAACTGATACTACAGTTAAAGCGTCTGATTTACCAAAGACTAAGACAGTTTCCGCAGTTCATATGGCTAGAACAGACAATAAACAGATAACTTCACATCAGACACATGTTGAAAAACAAATTAAAAATACATTGCCATCCACTGGTGACAGCAAACGTGGTTATTATATCACTGGAATGGCTATCGTTATGCTGAGTGTATTATTTAGTTTAGCTAAAAAGTTTAAAAGCAAATAT

SEQ ID NO: 10142 - protein, 1105 aa, Streptococcus agalactiae
MNNKGVGGDGVQIYQYYIKMDNNKPYLSPKDKTTVEKLEDRWKKITFKVQDTGIGLKDVYLQSVKYVGGGNNNLDLITPPGFKKEDKKVEKPKLDRPPGIDLPAPTSMRSFDYSTPPGTKPSKPKDSLSTPPGFPDLNTPPDEAPKDSKKDAIEDKSGAIKYAKSLQLSFVDDPILASKVNGKILQVESDGKLVIPRNALSANQFDDTSLKIYRNNNRNKEITITTDYFADTKYVNITAVDYLSNTTFEQLATGETVDYHAIVFSSFAAIKDKGGKIYVNDKLQETSRIALKDKSVKIGIELPNDVRHIDSLSVRRLNEVKTVDNILKNDEQDINLSKTYQLKYNPTNRRLEFTINNINSSSEIMTTFKDGKMPELVEQKDVSLDINDMDMSKFKTIRLGRKDSEFKGQLIAKTGTVELDMFFKQSQDPASIIKKIYLIQNGVPNELKKFDSSFGLTESQIDGYYIYKDAINLKFKLTSGASLKVVYKGQEDPYSHQKEDMTKKGEQLSHSTQANENTAKVTFANIDWSHYSKVTVNGKEVGKGSELPLTKGWTTFVLHKTENSLNVKSLIMETGSVSKKVQQLPLSPRLSKNKHMRDMLLTMQKDSAYYETSDSLVLRINLTADTKLNFNAVKGASALTENMMMRQFAVAGPQDDPVSEHKYPSVFLLTPALLETASEATLNGKEITASGIIGHIKDGDKSKHVEVKMVNENGDMLGTPVIIQGKDLTNRTKPLMSGRRVLYAGKQYEFRAKLPLSRFNTWIRVEVVTEAGEKASIVRRMFFDQSVPELNTAVAKRDLTSDTALIHIVAKDDSLKLKLYQDDSLLESVDKTGLYSFRNGVEITKDMTVPLEFGDNIIKLSAVDLSNYRRNETLHIYRNRFDVKASQMTADKGAKVTVDMLMKHLVVPEMAGAYTLTIDEAPNTNESGMLTNAKVSIHYVNGGVDKVDVPIKVVDLEAIRKAEEAHKADEARKAEEARKAEEAHKAEEVRKAEEAHKVEEARKAEEGHKTQEAPIVEEGYKVNNVHQTDTTVKASDLPKTKTVSAVHMARTDNKQITSHQTHVEKQIKNTLPSTGDSKRGYYITGMAIVMLSVLFSLAKKFKSKY

SEQ ID NO: 10143 - protein, 1083 aa, Streptococcus agalactiae
ATGCAAAGAAAATCCTATTTAAAATCCATGAGTGTTCTTACTTTAACAGCTTGTCTTATATCAGGATATGTGGTTAAAGATATTGCTATGTTACATGCAGTATCTGCCAGTGAGAAGAAAGCAAATAATGTCAGTCCGAGAGAAAATCTCTACAGGGCTGTCAATGATAATTGGCTAGCCAATACAAAACTCAAACAAGGGCAGATTAGTGTTAATAGTTTTTCAGAAATTGAGGATAAATTAAAGCAACTGTTAGTGTCTGATATGGCTAAAATGGCCTCAGGAAAGATTGAAACAACCAATGATGAACAGAAAAAAATGGTTGCATACTATAAACAAGGTATGGACTTTAAAACAAGAGATAAAAATGGTCTCAAACCTCTAAAACCAGTTTTACAAAAACTTGAAGCAGTCTCTTCAATGAAAGACTTTCAAAGTTTGGCCCATGATTTTGTGATGAGTGGTTTTGTTTTACCATTTGGTTTGACTGTGGAAACCAATGCTCGAGATAATAGCCAAAAGCAATTGGTGCTTCGTCAAGCACCCGCATTACTTGAATCACCTGACCAATATAAGAAGGGCAATAAAGAAGGTGAGGCTAAATTATCAGCTTACCGTACTTCAGCAATGGCTTTGCTTAAACAAGCTGGAAAAAGTAACATTGAAGATAGAAAACTAGTTAAACAAGCTATAGCATTTGATAGACTCTTATCAGAAAAAACGCAAGTTGATCAAAGTAAAATCACAGCTGAAAGTGAGACAGCTGCGGGGCGATATAACCCTGAAAGTATGGAAACGGTTCACAATTACGCCAAGGAATTTGACTTTAAAGAATTGATTGAAAAACTAGTTGGGCCAACGAATAAGGCAGTCAATGTAGAAGATAAAACTTATTTTAAACAGGTTAATGATGTTATAAATAGTAAACAATTAGCCAATATGAAAGCATGGATGATGATTTCTATGCTAGTTGATCAATCAGATTTTCTAGGAGAACAAAATCGTCAAGCAGCGAGTGCTTTTAAGAATGTTGCGTCTGGTTTGACTCAGATTGAATCGAAAGAAAAAATGCTTACACCCAAT

SEQ ID NO: 10144 - protein, 361 aa, Streptococcus agalactiae
MQRKSYLKSMSVLTLTACLISGYVVKDIAMLHAVSASEKKANNVSPRENLYRAVNDNWLANTKLKQGQISVNSFSEIEDKLKQLLVSDMAKMASGKIETTNDEQKKMVAYYKQGMDFKTRDKNGLKPLKPVLQKLEAVSSMKDFQSLAHDFVMSGFVLPFGLTVETNARDNSQKQLVLRQAPALLESPDQYKKGNKEGEAKLSAYRTSAMALLKQAGKSNIEDRKLVKQAIAFDRLLSEKTQVDQSKITAESETAAGRYNPESMETVHNYAKEFDFKELIEKLVGPTNKAVNVEDKTYFKQVNDVINSKQLANMKAWMMISMLVDQSDFLGEQNRQAASAFKNVASGLTQIESKEKMLTPN

SEQ ID NO: 10145 - protein, 816 aa, Streptococcus agalactiae
TTGGGTGATTATTATGGTAAGAAATATTTTGGTGAGGCAGCTAAAAAAGACGTCGAACATATGGCTAAGAAAATCATTAATGTCTATAAAACACGGTTAAAAAACAACACTTGGTTATCAGAAAATACAAAAGCAATGGCCATTAAGAAACTTGATAACATGAGATTAATGATTGGCTATCCAGAAGATTATCCTGATCTTTATCGTCAGTACCAATTTGATAGTAAAGCAAGCTTCTTTGAAAACAATGATAACTACAGAAAATTATCGAACAAGAAAACATTTGAAGAATTTAACCAGTCTAATCAACGTGAACATTGGCAAATGAGTGCCAATGCTGTAAATGCTTATAATGATCCTAATACCAATTCCATAGTCTTTCCAGCAGCGATTTTTCAATCACCACTCTACGATAAAACTAAAACAGTTAGTCAAAATTATGGAGCTATCGGAGCAATTATTGGTCATGAAATTTCACACTCATTTGATATTAATGGTATGAAATATGACGAGAAAGGGAATCTTCACGATTGGTGGACTAAAGAAGATTTAAAACATTATAAGAAAAAAACACAAGCTATGATTGACCAATGGGATGGCCTTAAAGCAGATGGCGGTAAAGTTGATGGTAAATTAACTTTAGCAGAAAATATTGCAGATAATGGTGGTGTTATGGCATCTCTAGAAGCTCTTAAGACTGAAAAAATCCAAACTATAAAGAATTTTTTGAATCATGGGCAAGTATTTGGCGTCAAAAAGCAACCAAAGAACAAAGTAAGTCCTCAATTCAGTCAGATGTTCATGCACCATATGAAT

SEQ ID NO: 10146 - protein, 272 aa, Streptococcus agalactiae; identical to SEQ ID NO: 1276

SEQ ID NO: 10147 - protein, 108 aa, Streptococcus agalactiae
TTGAGAGCTAACATCCCAGTACGTAATTTCCAAGAATTTTATGATGCCTTTGGTGTTAAAAAAGGCGATTCAATGTATCTAAAACCAGAAAAACGTTTGACACTTTGG

SEQ ID NO: 10148 - protein, 36 aa, Streptococcus agalactiae; identical to SEQ ID NO: 1278

SEQ ID NO: 10149 - protein, 1029 aa, Streptococcus agalactiae
ATGAAGAATATAACAAAGCTATCAACTGTTGCTTTAAGCCTACTACTTTGTACGGCGTGTGCTGCATCAAACACGTCTACATCTAAAACACAGTCTCATCATCCTAAACAAACTAAACTCACAGATAAGCAAAAAGAAGAACCCAAAAACAAAGAAGCTGCTGATCAAGAGATGCATCCCCAAGGCGCTGTTGATTTGACAAAATATAAGGCAAAACCGGTCAAAGATCATGGTAAAAAAATCGATGTTGGTGATGGCAAGAAAATGAACATTTATGAAACTGGTCAGGGAAAAATTCCAATTGTTTTTATTCCTGGTCAAGCTGAGATTTCGCCACGCTATGCTTATAAGAATTTAATTGAGCGGTTAAGTAAAAAATATAAAATTTATACAGTAGAACCATTAGGCTATGGTCTCAGTGATATTCCTACTAAACCACGTACGCTAGAAAACATTACAAAAGAAATTCACACAGGCTTAAATAAAATTGGAGTTAAAAATTTCTACCTTGCAGCTCACTCACTTGGCGGTATGTATTCTTTAAATTATGCTAAAAATTATCCAGAAGAAGTCAGAGGATTTATTGGTATGGATACCAGTACACCTTGGATGGAAGGGGAACAAAAAACAAAGTATGACCCTGAAAGTGCTAAATGGGCAATGAAATTACCAGATGTTGATGATAAGACTAACGAACAGTATCTGTCAATTGCGAAAAAAATTAACGGCAATAAGTCTCAACGAGATGAAGATGAGCGCTTAGGTGATAATCTTGGTAAATTGAAGAATGTAAAATTCCCTAAAGGGATGCCAACTAAGTATTTTCTTGCTGATCAATCTGTGGAGGGAATCAAGCTACGTCAAGCAGATTTTAAAGGTTTGAAAAATTGGGATCAGCAGCATATTGATTTATCTGAAGATCCAAAAGATGCTTCCGTTGAAATTCTTAAAGGTAGTCACAATATTTTCCAAACACAATATGAACATATGGCTAAAGCTATTGATGGATTTATCCAATCCCATCAAAAG

SEQ ID NO: 10150 - protein, 343 aa, Streptococcus agalactiae
MKNITKLSTVALSLLLCTACAASNTSTSKTQSHHPKQTKLTDKQKEEPKNKEAADQEMHPQGAVDLTKYKAKPVKDHGKKIDVGDGKKMNIYETGQGKIPIVFIPGQAEISPRYAYKNLIERLSKKYKIYTVEPLGYGLSDIPTKPRTLENITKEIHTGLNKIGVKNFYLAAHSLGGMYSLNYAKNYPEEVRGFIGMDTSTPWMEGEQKTKYDPESAKWAMKLPDVDDKTNEQYLSIAKKINGNKSQRDEDERLGDNLGKLKNVKFPKGMPTKYFLADQSVEGIKLRQADFKGLKNWDQQHIDLSEDPKDASVEILKGSHNIFQTQYEHMAKAIDGFIQSHQK

SEQ ID NO: 10151 - protein, 1017 aa, Streptococcus agalactiae
ATGAATAAAATAACGAAATTATCAACCGTTGCCCTCGCTTTGATGCTTTGCGTTGGATGTTCTGCCAATAAAGATAATCAAAAAACTAAAACTGAGCAGCCTAAGCAAGAAAAGTCAATCGCTAAGCAAAAACAAGAGAGAGAAGCAGAAAAAGCTATGATTGCTAAAGGTGCTATTGACCTAACTAAATATAAAGCGAAACCAATTGAAGATTACGGACAAAAAATTGATGTCGGTGACGGTAAAAAAATGAACATATATACAATGGGTCAAGGGAAAATTCCGCTAGTAGTCTTCCCTGGTCAAGCTGAAATTTCACCACGTTATGCTTACAAAAACTTGCTTGATAGATTAGGGAAAAAATATAAAATTTATACGGTTGAACCGCTCGGTTATGGGCTTAGTGATATGACAGATAAGCCACGTACGATTGAAAATATTACCAAAGAGATTCATACAGCTCTTGAAAAAGTCGGTGTCAAAAATTTCTATCTTATGGCTCACTCGTTAGGTGGCATATACGGTCTAAATTATGCTAAGACATATTCTAACGATGTCAAAGGTTTCATTGGCATGGATACAAGCACACCAAATATGGAAGGTGATGGCACAACTGGAGAATCTTCAGCTTCAACCTTAAAATGGGCAGAATCCATTCCAGAAGTTGATAAGAAAACCAATGAACAATACTTATCAATCGGTGCTAAAAAATCAGGTAATAAAACAGAGCGCGATGAAGATAGGCGTGTTAGTGACAATCTTCATAAAATGGAAAAAGTTAAGTTCCCTAAAGGTATGCCAGCTAAGTATTTCTTAGCTAATGAGTCAGCAGAAGATATAAAAATGCGTAAAAAAATATTCCCTAAGCTTAAAAGCTGGGAACAACAACATATTGACTTATCTGAAGATCCAAAAGACGTTTCTGTTGAGACACTAGATGCTAGCCACTTGATTTATCATACGCAATATAAACATATGGCGAAGGCTATTGACGAGTGGATTCAATCGCATAAAAAA

SEQ ID NO: 10152 - protein, 339 aa, Streptococcus agalactiae
MNKITKLSTVALALMLCVGCSANKDNQKTKTEQPKQEKSIAKQKQEREAEKAMIAKGAIDLTKYKAKPIEDYGQKIDVGDGKKMNIYTMGQGKIPLVVFPGQAEISPRYAYKNLLDRLGKKYKIYTVEPLGYGLSDMTDKPRTIENITKEIHTALEKVGVKNFYLMAHSLGGIYGLNYAKTYSNDVKGFIGMDTSTPNMEGDGTTGESSASTLKWAESIPEVDKKTNEQYLSIGAKKSGNKTERDEDRRVSDNLHKMEKVKFPKGMPAKYFLANESAEDIKMRKKIFPKLKSWEQQHIDLSEDPKDVSVETLDASHLIYHTQYKHMAKAIDEWIQSHKK

SEQ ID NO: 10153 - protein, 353 aa, Streptococcus agalactiae
ATGAATAAAATAACGACATTATCAACCATCGCCCTGACTTTAATGCTTTGCGTTGGATGTTCTACCAATAAAGATAATCAAAAAACTAAAACTGAGGATCCTAAGCAAGAAAACGTAACTGCAAATTCGAAGGAAGACAAGGCAACAGCAGCCAAGCGAATGAAGTTAACGAAAGAACTTGAAAAATATAATAAAGGCACAGAGAGCTTTATTAGTAACAAACAATATCAAAAATATATCAAAACACCTATCAAAGAATATGGTCAAAAGGTTGAAGTCAAAGGCAAGAAGATGAATGTCTATACTGTGGAGAAGTAAAGTACCAATTGTCTTTATTCCTGGTCAAGGGACGG

SEQ ID NO: 10154 - protein, 118 aa, Streptococcus agalactiae
  VARIANT 103: Xaa = Any Amino Acid
MNKITTLSTIALTLMLCVGCSTNKDNQKTKTEDPKQENVTANSKEDKATAAKRMKLTKELEKYNKGTESFISNKQYQKYIKTPIKEYGQKVEVKGKKMNVYTXGEVKYQLSLFLVKGR

SEQ ID NO: 10155 - protein, 704 aa, Streptococcus agalactiae
GTGACTGCCAACATCAGTACCATAATTTGATTAGTAATTTAAGTAAAACTCATAAGGTTGTGGTAGTTGAGCCATTTGGTTCAGGTTTAAGTGATGTCATTGACCAACCACGAAATCTAGCTAATATTACCTCAGATATCCACGAAGCTTTACAAAAAGTTGGTATTACCGGAAAATATGTAATTGCCTCTCATTCAATTGGTGGTGTTTATGCCCTTAAATACATCAGTACTTATCCAAAGGAAGTGCTAGGATTAATAGGTTTAGATACATCAACGCCGGGTATGGAAGGTGGTAAGCAAGTTGATTTCGCTGCTCCAGTGTTAAAAGAATTACCTAAAATTCCTAAAGTATCCGACGATATTAATGCACAATTTTTTGCTATTGGACATAAGATACTTAATAATTCTAATATGAAAGAAGAAGCGAAGAATTCTTCTAATATGATTAACGAAAGTGCCAACTATAAGATTCCAAAGGGAATTCCTGCTATGTATTTATTAGCACGTGAAAGTGACTTAGGGCTTCAATTACGTAGTTTAGATATACCAATTAAAGGCAGTTGGCAAGAGCAACATAAGGAGTTATCAGAAGATCCAAAAGAAGTCTCTATTCATACACTAGACGGAACTCACCAAATTTATGATACTAACCTTAAAGAAGTAATTGATTATACTAACCAATTTATGAAAACATTTGAGAAA

SEQ ID NO: 10156 - protein, 235 aa, Streptococcus agalactiae
MTAKHQYHNLISNLSKTHKVVVVEPFGSGLSDVIDQPRNLANITSDIHEALQKVGITGKYVIASHSIGGVYALKYISTYPKEVLGLIGLDTSTPGMEGGKQVDFAAPVLKELPKIPKVSDDINAQFFAIGHKILNNSNMKEEAKNSSNMINESANYKIPKGIPAMYLLARESDLGLQLRSLDIPIKGSWQEQHKELSEDPKEVSIHTLDGTHQIYDTNLKEVIDYTNQFMKTFEK

SEQ ID NO: 10157 - protein, 1227 aa, Streptococcus agalactiae
GTGAACCTATGGACATTAAGTTTAGCTTATTTGAAACGTCAAAAAATGAAAACAGTAACCTTGTTCTTAGTTTTTCTAACTATAGGCACATGTTTAATCAGTCTGATGAGTATTCAGCATTCTTTGGAAAAAAATATCCTAACAAAACAAGGGAAAAGCATTTATTTAACCTCCAAAGAAAAGGCTTATTGGCCTGAACAAGCATACGAAGCTTTGAAAAAAGCAAAAATGGTTGAGTCAGTAGAGGCAAGTTTAAGCATTGATGTTGGTAGCCGTTTAAAATCTGTATCACCATATAACTCTTCTAAAGAAGAGAATCAAGTTACATTAGCAGGTTATCAAAGTACAGAAGATTTACGAGCTTTTCAGACAAAAGCATTGGTCTTAAAGAAAGGAAGCCATTTAGCGGCCGATAATACAAAACAAGTACTAGTTTCATTGAAATTAGCACAAAAGAATCATTTAAGTGTGGGTAACAAATTGAGATTAGGCAAAGAAAATGTTACTATTGCAGGAATTTATGATGCGAATAGTGCTAAGTCTAAAAATACTTTTAATCCCAATATTGATAATACATTGATTGCTCAGGCAACATTGGTTAGGAAGATTAGTAAACAAAAAGGTTATCAGACGGTTGCAGTGCGCTTAAGTGATAAACGTTTAGTGGATACAGTTATCCAAAACATCAAACAATGGCCGCTTGATTTCGGGAAATTAGATGTTCAAACAGCTAAAGAGTTTTATGGAGATTCTTATCGTAATATCGAGACATTGCATCGTCTAGTGGGACGAATCATTCTTATTGTTAGTCTCGTGGCGATGGCAATATTAGTTGTCATGCTAACATTTTGGATTAATAACCGCATTAAAGAGACGGGAATTTTACTCGCTATCGGAAAAACTAAGTTTGAAATCATAGGTCATTATCTGATAGAAGTACTGTTAGTAGCAGGTGCTGCCTTCACACTATCTATTATTGGTGGTGTCTTTCTTGGAAAAACATTTGCAGCTGGCCTTTTATCACAAGTTAATGGTGGTGTGAGTTCACAAATTGTACAAAATAGTAGTCTAATTATTGATAGAATTGATAACCTCGCTGTTTCTGTTGGAGTAATGGATGTCTTTAGACTCTATGCTCAGGGTGCTTTAATTTGCTTATTTGCAGTTGTATTATCTAGTTATTCTATTCTTAAACTACAACCAAAGCAAATATTGTCACGAATGTCA

SEQ ID NO: 10158 - protein, 409 aa, Streptococcus agalactiae
MNLWTLSLAYLKRQKMKTVTLFLVFLTIGTCLISLMSIQHSLEKNILTKQGKSIYLTSKEKAYWPEQAYEALKKAKMVESVEASLSIDVGSRLKSVSPYNSSKEENQVTLAGYQSTEDLRAFQTKALVLKKGSHLAADNTKQVLVSLKLAQKNHLSVGNKLRLGKENVTIAGIYDANSAKSKNTFNPNIDNTLIAQATLVRKISKQKGYQTVAVRLSDKRLVDTVIQNIKQWPLDFGKLDVQTAKEFYGDSYRNIETLHRLVGRIILIVSLVAMAILVVMLTFWINNRIKETGILLAIGKTKFEIIGHYLIEVLLVAGAAFTLSIIGGVFLGKTFAAGLLSQVNGGVSSQIVQNSSLIIDRIDNLAVSVGVMDVFRLYAQGALICLFAVVLSSYSILKLQPKQILSRMS

SEQ ID NO: 10159 - protein, 792 aa, Streptococcus agalactiae
ATGAATTTATTTAAACGTTCCTTTTTATATGTTAGCCGTAAAAAGCGTAAGAGTATCACTTTATTCGTATGTTTATGGCTAGTTGCTTCTACATTAATTAGCGGTATTGCGGTAAAAAATGCTGGTCTTACTGCTAAGAAGACATTTTCAAGGCAAACTGGATCAATTTTGCATATTTCATCGGATAGTACTGACCTTGTTGGTGATGGTTACGGATCTGGAGAAATCCCTGAAAAAGCAATAGTTAACATAGCAAGTAATCTAAATGTTAAGCGCGTTAATAATAATTTGATGGCTTATGCTGGACTAACCTCGGAAAAAATGGTTACACGACCAAATGATAAAGAACAATATAAAGAACAAGTTTTACAAGTTCATGGTAATAGTTACTCCGATACAGATCCTAAATACACAGCGGGGATGATTTCTCTTAAGGGAGGGCGACATATCACGCCGAAAGATCAGCGAGTTATAATTGTTCATCAGGCTTTTGCGAAGACAAATCATCTTAAAGTTGGCGATAAGTTAATGTTTTCAAAAGACCCCGTTAGAAACAGTAAGGATAAAACATTAGTTGAAGCAACTATTGTTGGCATATATAAAGGTAAAACGGTACAAAAATCAAATTACCCTTATGAGATGCTAGAAAATACAGCCTTTTCAGATACGCAATTGATTAAGGATTTATACGGCTATTCTAAAGGTAAGGCCTTTTATCGCCAAACAACTGTATATCCTAAAAAGAATGCTGATATAGAAACTCTTAAAAGTTTTATCAAAAAACAATCCTAT

SEQ ID NO: 10160 - protein, 264 aa, Streptococcus agalactiae
MNLFKRSFLYVSRKKRKSITLFVCLWLVASTLISGIAVKNAGLTAKKTFSRQTGSILHISSDSTDLVGDGYGSGEIPEKAIVNIASNLNVKRVNNNLMAYAGLTSEKMVTRPNDKEQYKEQVLQVHGNSYSDTDPKYTAGMISLKGGRHITPKDQRVIIVHQAFAKTNHLKVGDKLMFSKDPVRNSKDKTLVEATIVGIYKGKTVQKSNYPYEMLENTAFSDTQLIKDLYGYSKGKAFYRQTTVYPKKNADIETLKSFIKKQSY

SEQ ID NO: 10161 - protein, 192 aa, Streptococcus agalactiae
TTGCTAACAAGTTATGCAAAAAGTATAGATGTCTTGAATCAATTAATTACTTCTCTACAAGGCGGCATGTTAGTAGTATCTATTATTCTAGTGATGATGGCTCTGCTATTCTGGATTGGTGGTAGAACCCATGAGACAGGTATTTTATTAGCTATTGGTAAGTCTAAAGCAATTATCATTGTCAGTACGCAG

SEQ ID NO: 10162 - protein, 64 aa, Streptococcus agalactiae; identical to SEQ ID NO: 1292

SEQ ID NO: 10163 - protein, 192 aa, Streptococcus agalactiae
ATGATTGCTATTCCAGCCTTTGCTTTATCAGTACTTATCAGTCAATTTATTGGTCAAAAATTAGCAGACTCCTTAGTGTATCAGGCCTCTAGAACTGTCAGAGCAGACTTTATGAAAGGGTTTGGGAATATGCAGCTTGGGTCTGATAGTGATACAGATATGTTTATGCAAACGAAATGTACAAGTGAAGCC

SEQ ID NO: 10164 - protein, 64 aa, Streptococcus agalactiae
MIAIPAFALSVLISQFIGQKLADSLVYQASRTVRADFMKGFGNMQLGSDSDTDMFMQTKCTSEA

SEQ ID NO: 10165 - protein, 668 aa, Streptococcus agalactiae
ATGTTCGAATTAAAAAATATTGCTTATCGTTATAAGGGGAACGACAATAAAACATTAGAAAATATCAATTATAGTTTTCAGTCAGGGGTATTTTATACTATATTAGGGAATTCTGATTCAGGTAAAACAACCCTTCTATCCTTGATGGCAGGTCTTGATTCGCCCACTGAGGGACAAGTATTATTTAACAAAAAAGATATTAAAGAAGCAGGTTATGCTCAGCATCGCAAAAAGAATATAGCTTTGGTCTTTCAAAATTATAACCTTTTAGACTATCTAACCCCATTGGAAAATGTTCAGTTGGTAAAACCTACTGCAGATAAACAATTATTGTTGGATTTAGGTTTAAAAGAAGATATGTTAACGCGAAATATCTTGAGATTATCAGGAGGGCAACAACAACGTGTAGCTATTGCGAGGGCTTTGGTTGCAGGAACACCAGCTATTTTACTTGATGACCTACGGGGAATTTAGATTTTGACATTGCACGTGATATTACGATGCGTCTTAAAGATTTTGCGCATAAGGAAAAACGATGTGTTATTATGGTGACACATAGTAGAGAAATCGCTCATATGGCTGATACTGCTTTACAATTGACAGGAGATAACTTAAAAGAATTATCAAAAGAAAGTATAGCACAGTCTATATTACAACAAAGGAATTTA

SEQ ID NO: 10166 - protein, 223 aa, Streptococcus agalactiae
  VARIANT 153: Xaa = Any Amino Acid
MFELKNIAYRYKGNDNKTLENINYSFQSGVFYTILGNSDSGKTTLLSLMAGLDSPTEGQVLFNKKDIKEAGYAQHRKKNIALVFQNYNLLDYLTPLENVQLVKPTADKQLLLDLGLKEDMLTRNILRLSGGQQQRVAIARALVAGTPAILLDXPTGNLDFDIARDITMRLKDFAHKEKRCVIMVTHSREIAHMADTALQLTGDNLKELSKESIAQSILQQRNL

SEQ ID NO: 10167 - protein, 481 aa, Streptococcus agalactiae
ATGTCATTATCAGATAAGAAAGAGTATAAAGCACTATATGGAAAAGCGATTATTAACTTGCGAAATCCTATGCCTGATGAATCTGCTAAAGTAATTTTGAAAGCTGCACAAAAAGGGACTTTTTCCCTGATCAATAACGTCAAGACAATTGCAAAAAATGACGAAGGATTTTCAATAGAAAAAGAAAAACAAAATCATATATCTGTCGATCGCGTCATTAATGCTACTGGTTACCAGTAAATACTAAAAACTGGACAAAAGCCAATCCACTCCTAAAATCGCTCATCAATCAAGAATTTGTCAAATTGACGATCAAGGAGGGATTACTATTTTAACTGAAAATGCACAAGTTTTGTCTCCAAAATATGGTCCAATGCCAGGTTTATATGCGCATGGTGCACTGGTTAATGGTGTCGTTTATCAGAATAACTCTACAATTAAAATTCAACAAATGGCAGAGCGAGCCTTTTCTGATAATAAA

SEQ ID NO: 10168 - protein, 161 aa, Streptococcus agalactiae; identical to SEQ ID NO: 5734

SEQ ID NO: 10169 - protein, 112 aa, Streptococcus agalactiae
TGGAAGGAAAACAGTTGCTATCATCGGGACTGGTCTAGCTGCATTGATGTATAAAATGGTGCTACTCATACACAATCTTCTGGTTAAGCATTTTTCAGAACCACTACTTCCC

SEQ ID NO: 10170 - protein, 39 aa, Streptococcus agalactiae
  VARIANT 1, 18: Xaa = Any Amino Acid
XEGKTVAIIGTGLAAIDXIKWLLLIHNLLVKHFSEPLLP

SEQ ID NO: 10171 - protein, 562 aa, Streptococcus agalactiae
ATGGGAGTTAGTGGTTTAGCTGTTCTACTAGCACTTTCTCGTAAAAAAGAGAAAGAGTTAAAACAGTTAGCTATTTTTTGTTTTGATGATACTGTCCACTTTGGACGAGGAATTCCTTTTCAAGAAGACGTTGACTCAGCTTTAATCAATTCCCCAATCAACGATATTTCATTTGATTATCGCCATATGTCTGACTTCATGGATTGGTTAGAAGAAAATTACTATGACACAAATCTAACCTATGTATCAAGGACACTTTACGGACAATACCTTTCAGAAAGAACTAAATTACTTTTAGATAAACTCCCTGTCACGGTTATTAAAACAAGAGTGGATAAACTAAACTATTTATCAGATAAGCAACAATGGCAAGTCTATATTCAAGATAAGCTTTTTCCTGTCACATTTGATGAATTACATTTAGCTTGTGGTGCTCTGCCTGTTATAGACCCTTATCATTTGGAAGGGAAGACTGATATATCAAAGACCCTTATCCTATCAACACTTGGCTCAGGAAATGGAAGGAAAACAGTTGCTATCATCGGGACTGGTCTAGCTGCAT

SEQ ID NO: 10172 - protein, 189 aa, Streptococcus agalactiae
  VARIANT 159, 174, 189: Xaa = Any Amino Acid
MGVSGLAVLLALSRKKEKELKQLAIFCFDDTVHFGRGIPFQEDVDSALINSPINDISFDYRHMSDFMDWLEENYYDTNLTYVSRTLYGQYLSERTKLLLDKLPVTVIKTRVDKLNYLSDKQQWQVYIQDKLFPVTFDELHLACGALPVIDPYHLEGKTXYIKDPYPIKHLAQEXGRENSCYHRDWSSCX

SEQ ID NO: 10173 - protein, 471 aa, Streptococcus agalactiae
ATGCTTGATAGAACCATTCGTCAATATCAAAATCGCAGAGATACCACTCTTCCCGATGCAAATTGGAAACCATTAGGTTGGCATCAAGTAGCTACTAATGACCATTATGGGCATGCAGTCGACAAGGGGCATTTAATTGCCTATGCTTTAGCTGGAAATTTCAAAGGTTGGGATGCTTCCGTGTCAAATCCTCAAAATGTTGTCACACAAACAGCTCATTCCAACCAATCAAATCAAAAAATCAATCGTGGACAAAATTATTATGAAAGCTTAGTTCGTAAGGCGGTTGACCAAAACAAACGTGTTCGTTACCGTGTAACTCCATTGTACCGTAATGATACTGATTTAGTTCCATTTGCAATGCACCTAGAAGCTAAATCACAAGATGGCACATTAGAATTTAATGTTGCTATTCCAAACACACAAGCATCATACACTATGGATTATGCAACAGGAGAAATAACACTAAAT

SEQ ID NO: 10174 - protein, 157 aa, Streptococcus agalactiae
MLDRTIRQYQNRRDTTLPDANWKPLGWHQVATNDHYGHAVDKGHLIAYALAGNFKGWDASVSNPQNVVTQTAHSNQSNQKINRGQNYYESLVRKAVDQNKRVRYRVTPLYRNDTDLVPFAMHLEAKSQDGTLEFNVAIPNTQASYTMDYATGEITLN

SEQ ID NO: 10175 - protein, 634 aa, Streptococcus agalactiae
ATGTTTTTAATCGATTTTATTTTACATATTGATACTCATATCTATGCTATGGCTAACACTGTTGGTAATTGGACCTATCTATTGCTCTTCCTCGTTATTTTCGTTGAAACTGGGGCTGTCATCTTTCCATTTTTACCAGGTGATAGTTTATTATTTGCTGCTGGAGCCCTTGCTGCAAATCCAAAAATGTCCTTCAATATTGTAACTTTCCTTATTATTTTCTTTATTGCAGCATTTATTGGTGATAGTTGCAATTTCTTGATTGGTCGTACATTTGGTTACCGTTTTATCAAACATCCTTTCTTTCGTCGTTTCATTAAAGAAAAAAATATTCGAGATGCTGAGCTTTATTTGAGAAAAAAGGTACTGCTGCCATCATTTTAGGGCGCTATATCCCTATTATCAGAACCTTTGTTCCTTTTGTAGCAGGTATTAGTCAGCTCCCTCCAAAAGTATTTATCAAACGCGCCTTCATTGCAGCATTATCTTGGTCAGTTATTGCAACAGGTTCTGGTTTTCTCTTTGGTAATATTCCTTTGTGAAGCAGCACTTCTCGCTTATTATCTTGGGAATTGTATTTGTTACCTTAATTCCTGTCCTTATTTCTGGTGTCAAATCATATCGGAACACTAAG

SEQ ID NO: 10176 - protein, 212 aa, Streptococcus agalactiae; identical to SEQ ID NO: 1302

SEQ ID NO: 10177 - protein, 654 aa, Streptococcus agalactiae
ATGTCCTATTTAACCTTTAAACACGTTGATTTTAAAACGGATGATAAGTTGGTTTTAAATGATATCAACTTTGCAATTGATGAAGGTGATTTTGTTTCTATTGTAGGACCATCTGGAAGTGGTAAGAGTACTGTTTTAAAATTGGCCAGTGGTTTAATGAGTCCTACTGCAGGTCATATTTTCTTTGATGGAAAAGATTTGAACCAATTAGAACCGATTGAAAGTCGAAAAATGATTTCTTACTGTTTTCAAACGCCACATTTATTTGGTAATACAGTGGAAGACAATATTAGTTTTCCTTACCACATTCGACACGAAAAAGTAGATTATAGACGCGTTGATGATTTATTTCAACGTTTTGAAATGGACCAGTCTTACCTGAAACAGGATGTCAAAAAACTATCAGGAGGAGAAAAGCAACGTATTGCTCTGATTAGGCAATTATTGTTTGAACCTAAAGTTTTACTCTTAGATGAAGTTACTTCGGCTTTAGACAATCATAATAAAGTTATTGTTGAAAAGGTTATTAAATCATTACATGACAAAGGAATAACGATTTTGTGGATTACGCATGATGAGGAGCAGAGTCGTCGATTTGCCAATAAAGTCTTAAAAGTTGTCAATGGTAGTATTGAAGCAATGGAGGTTATAAAA

SEQ ID NO: 10178 - protein, 218 aa, Streptococcus agalactiae
MSYLTFKHVDFKTDDKLVLNDINFAIDEGDFVSIVGPSGSGKSTVLKLASGLMSPTAGHIFFDGKDLNQLEPIESRKMISYCFQTPHLFGNTVEDNISFPYHIRHEKVDYRRVDDLFQRFEMDQSYLKQDVKKLSGGEKQRIALIRQLLFEPKVLLLDEVTSALDNHNKVIVEKVIKSLHDKGITILWITHDEEQSRRFANKVLKVVNGSIEAMEVIK

SEQ ID NO: 10179 - protein, 771 aa, Streptococcus agalactiae; identical to SEQ ID NO: 5747

SEQ ID NO: 10180 - protein, 257 aa, Streptococcus agalactiae; identical to SEQ ID NO: 1306

SEQ ID NO: 10181 - protein, 816 aa, Streptococcus agalactiae; identical to SEQ ID NO: 5749

SEQ ID NO: 10182 - protein, 272 aa, Streptococcus agalactiae; identical to SEQ ID NO: 5750

SEQ ID NO: 10183 - protein, 882 aa, Streptococcus agalactiae
ATGGATATTAGACAACTTACTTACTTTATTGCTGTTGCAGAAGCAAAAAATTATTCACACGCTGCAAAAAGTCTTTTTGTGACCCAACCTACACTTTCACAATCCATTAAAAAATTAGAAGCAGAATTAAATACTATTTTATTCTTACAAAATGGTCGTCAACTCGCTTTAACTGAAGCAGGAGAAATTCTCTATGAGAAAGGACAATTGTTGATGACTAATTTTAATCAAATGGTTACGGAAATCCAGCAATTAAATCAAGAAAAAAAGGAAGGTATCCGTGTAGGGCTTACTTCTCTTTTTGCTATTCAATTTATGAAACAGATTTCAACTTTTATGGCTACACATTCAAATGTTGAAGTATCTTTGATTCAAGATGGTTCCCGTAAATTACAAGAATTGTTAGCAAAAGGAAAGATCGATATTGGCTTATTGTCCTTTCCAAGTACCCGCAATGATATCACTATCGAACCACTGCAAACCTCAACTAAAGGATATAAAGTAAGCATTGTCATGCCAAAATCGCATCCTCTTGCAACACTTCCTGAAATTGAACTTAATGATTTAAGAGATTACAAAGTTGCCTCACTCAACGAACATTACATGCTAGGAGAGATGTTGCCTCGTAAATGTCGTGCTTTAGGATTTGACCCCCATATCGTCTTTAAACACAATGACTGGGAAGTTCTTATTCATAGTTTACAAGACCTCAATGCAGTCACTATTTTACCAAGTGAATTTGAAAGCATTAGCCAAGTTCAAGATTTATGCTGGGTCCCACTTAAGGATAAAAATAATTTTTATCCGATTGGTATTGCTTACCGAAATGATACTTCTTTTAGTCCTATGATTGAAGAATTTTTAAGTCTTTTAAAGACCAAT

SEQ ID NO: 10184 - protein, 294 aa, Streptococcus agalactiae
MDIRQLTYFIAVAEAKNYSHAAKSLFVTQPTLSQSIKKLEAELNTILFLQNGRQLALTEAGEILYEKGQLLMTNFNQMVTEIQQLNQEKKEGIRVGLTSLFAIQFMKQISTFMATHSNVEVSLIQDGSRKLQELLAKGKIDIGLLSFPSTRNDITIEPLQTSTKGYKVSIVMPKSHPLATLPEIELNDLRDYKVASLNEHYMLGEMLPRKCRALGFDPHIVFKHNDWEVLIHSLQDLNAVTILPSEFESISQVQDLCWVPLKDKNNFYPIGIAYRNDTSFSPMIEEFLSLLKTN

SEQ ID NO: 10185 - protein, 510 aa, Streptococcus agalactiae
ATGGGATTAAATTTAAAATTGAGACCAACCATAATACCAATAACAAGCCCCATCATACTTGTTGCAACTGCTGTTGCAGCGATTAAAGTTGCAAATCCGCTCCACATTGGCAGTAAAGCTTTCATTAATTCTCCAAGGATTGCTCCTGGTATCAAGACAATAACAGTCCCTAAAGCTAAACCATTTAATACGTTCATTATAAACGATTTAGCTGTTTGTTTTTCGACAACATCCGACATAAGATGCCTCCTACTAATAATGATTGTTTGTGATTTCACTAACTATATTAACTATATCATAGCTATTTGCAAAAGGAAAATTGGAAAAAATTATATAAGTATAGCTTTTACTAATATTATTGTGGAAATAATCATAAAGGTCAGATTGATAGACTTGTGCTATACTATTACTAAGAAAAAAGGACAGATATTATGGATATTAGACAACTTACTTACTTTATTGCTGTTGCAGAAGCAAAAAATTATTCACACGCTGCAAAAAGTCTTTTTG

SEQ ID NO: 10186 - protein, 170 aa, Streptococcus agalactiae
MGLNLKLRPTIIPITSPIILVATAVAAIKVANPLHIGSKAFINSPRIAPGIKTITVPKAKPFNTFIINDLAVCFSTTSDIRCLLLIMIVCDFTNYINYIIAICKRKIGKNYISIAFTNIIVEIIIKVRLIDLCYTITKKKGQILWILDNLLTLLLLQKQKIIHTLQKVFL

SEQ ID NO: 10187 - protein, 1056 aa, Streptococcus agalactiae
ATGTCGGATGTTGTCGAAAAACAAACAGCTAAATCGTTTATAATGAACGTATTAAATGGTTTAGCTTTAGGGACTGTTATTGTCTTGATACCAGGAGCAATCCTTGGAGAATTAATGAAAGCTTTACTGCCAATGTGGAGCGGATTTGCAACTTTAATCGCTGCAACAGCAGTTGCAACAAGTATGATGGGGCTTGTTATTGGTATTATGGTTGGTCTCAATTTTAAATTTAATCCCATTCAATCAGCATCACTAGGATTAGCGGTTATGTTTGCAGGTGGAGCTGCAACCTTCCTTAAAGGCGCTATTATGCTAAAAGGAACAGGCGATATCATTAATATGGGAATTACTGCTGCCTTAGGTGTCCTTTTGATCCAATTTTTATCTGACAAGACGAAATCATTCACTTTGATTGTCATTCCAACAGTAACACTCTTACTAGTTGGAGGAGTAGGTCATGTGTTATTACCTTATGTCAAAATGATTACCACCATGATTGGACAAGGGATTGCTTCATTACTTGGTTTACAACCTGTTTTGATGTCAATTTTAATTGCGATGATTTTCTGTTTCTTGATCGTATCTCCAATCACAACAGTTGGGATTGCTTTGGCAATTAGTTTGTCCGGAATTGGTTCTGGTGCTGCTAATTTAGGTATCTGTGCTGCTAGTTTTGGGCTTTGTATGGCTGGGTGGTCAGTCAATTCTAAGGGGACAGCCTTAGCGCATGTTTTAGGGTCTCCTAAGATTTCGATGGCTAATGTATTAGCAAAACCGAAGATTATGCTACCTATGATATCTTCAGCAGCAATACTAGGAATTCTCGGAGCTCTCTTTAATATTCAAGGAACACCAGCTAGTGCAGGTTTTGGTATCAGTGGTTTGATTGGACCGATTAATGCTCTTAATTTAGCAAAAGGTGGATGGTCAGTTATGAATATGTTATTGATAATTATAATATTTGTTGCTGCACCAATTATATTGAATTTTATTTTTAATTACCTCTTTATAAAAGTACTTAAAATTATTGATCCAATGGACTATAAATTAGATATT

SEQ ID NO: 10188 - protein, 352 aa, Streptococcus agalactiae; identical to SEQ ID NO: 5756

SEQ ID NO: 10189 - protein, 990 aa, Streptococcus agalactiae
ATGAAACTCAAAGTATTTAATGTTAGAGAAGAAGAAGCAACATTAGCACAAGATTGGGCAAACCGAAATCATGTGGAACTTTCTATGAGTGAAGGACCTTTGACATTGGAAACTGTTAATGAGGTAGAAGGTTTTGATGGGATTGCTAATGCACAGATTGGGCCTTTAGATGATGCTATTTATCCTCTTCTCAAAGAAATGGGAATTAAGCAAATCGCTCAGCGCAGTGCTGGTGTCGATATGTATAATCTTGAGTTAGCTAAGCAACATGGTATTATCATTAGCAATGTGCCAAGTTACTCACCGGAGTCTATTGCAGAATTTACAGTGACAATCGCTCTTAACCTTATTCGAAAAGTTGAGCTTATTAGAGCTAATGTTCGTGAACAGAATTTTTCATGGACCTTGCCAATTCGAGGACGAGTCCTAGGTAACATGACTGTGGCTATAATAGGAACTGGTCGCATTGGTCTAGCGACTGCTAAAATTTTTAAAGGGTTCGGATGTCGTGTTATTGGTTATGATATTTACCATAATCCAATGGCAGATGGTATCCTTGAGTATGTCAATTCGGTAGAAGAAGCTGTTGAAAAAGCTGATCTTGTGTCCTTACATATGCCACCAACTGCTGAAAATACGCATCTATTTAATTTAGATATGTTTAAACAGTTTAAAAAAGGTGCTATTTTAATGAATATGGCACGTGGAGCATTGGTGGAAACCAAAGATCTTCTTGAGGCTTTAGATCAAGGGCTTTTGGAGGGAGCTGGTATTGATACTTATGAATTTGAGGGGCCATATATACCTAAAAATTGTCAAGGTCAGGACATTTCAGACAAGGATTTCCTAAGACTGATTAACCATCCGAAAGTAATATACACTCCTCATGCGGCTTATTATACAGATGAAGCGGTCAAAAATCTAGTAGAGGGTGCCTTAAATGCTTGTGTAGAAGTGGTTGAAACGGGAACAACTACTACGAGAGTCAAC

SEQ ID NO: 10190 - protein, 330 aa, Streptococcus agalactiae; identical to SEQ ID NO: 5758

SEQ ID NO: 10191 - protein, 1548 aa, Streptococcus agalactiae
ATGGAGAAAACAATGGATATGGAACAACGTGAAGAAGTTGTATCTTATAACCGAGCGAAAGTATGGCAGTTAGTTATGTTTGCCATGAACAATGCTTCTACAAATATATACTTATTTACGTTTATGTTTGTTACCTATTTCTCAACTGGCGTTCTTGGCTTGGCAGCCATTTTTGTCAGTCAAATTATGGGTTATATCCGTATTTTTGATGGTTTTATTGATCCAGCTATTGGTATTATGATTGATAAAACTGATACAAAATTTGGTAAGTATCGTCCTATTTTGATTATTGGGAACGTTATTACGGCTTTGTCATTGATTTTTCTTCTTGCATTGAGAGGTGTCGATGAAAATATTCGTTTCCCATTATTTGTCCTTGTTCTAATTATCCATAAAATTGGATACTCAATGCAACAGACAATAACTAAAGCAGGGCAAACAGCACTGACAAATGACCCTAAGCAACGTCCTATTTTTAATATCGTTGATGCAGTTATGACAACATCATTAATGACAGGCGGTCAGTTTGTCGTTTCAGGTTTCTTAGTACCAAAATTTGGTAATTTTACACCTCAATTCTTCAATGTCCTTATTTTTGGAACAATTCTTATTTCAGCTATTTTAGCAATCGTTGCAATTATTGGGATTTGGGCAAAAGACAGAAAAGAATTCTTTGGTTTAGGAGAAAATACCCAAAAGACTGCTCTAAAAGATTACTGGAAGGTGTTGAAAGGAAATAAACCGCTTCAGATATTATCCATTGCTGCAGCTTTGGTAAAATTTGCCATCCAATTCTTTGGCGATTCCGTTGTTATGGTTCTATTGTTTGGTATTTTATTTGGTAATTATGCTTTATCAGGACAATTCTCACTTCTTTTCATTGTTCCTGGTGTTATTATTAATATTTTGTTCTCAACAATTGCTCGTAAAAAAGGTCTTCGTTTTTCATATGTCAGAGCAATTCAGATCGGTATGATTGGTTTACTTGCTTTTGGTGCAGTTCTTTACGTTGGTAAGCCTGGTGACCTTAGTTTAACAAGCCTAAATCTTTATACTATTTTATTTATCGTTACTAATATTATTGCGAGATACGCTTCACAAGCACCTGCTAGTTTAGTATTGACTATGGGAGCAGATATTTCTGACTATGAAACTTCTGAATCCGGTCGTTATGTATCAGGAATGATTGGAACTATCTTCTCCTTAACAGATTCGATTGCTTCTTCATTTGCTCCTATGGTAGTAGGTTTTGTGTTAGCAGGAATTGGATTTTCAAAATCGTTTCCAACTATCGAAACACCACTGACCCCTGATTTAAAAATGGCAGCTATTAGTCTCCTTGTGGCCATTCCATTTATAGCTTTGTCTATAGCCCTTCTTTTAATAAAATTTTACAAACTAGATAAAGAAGAAATGGTTCGTATTCAAGAGAAGATTCAAGTTATGAAAGCAGCAACTACTAAGGAACGTGCTAAAGATATTGCTCGTAATGTTCCTTTGACAGATATGGATTATGTTGATGTAACAAAATATCCTATTGATAAAGAT

SEQ ID NO: 10192 - protein, 516 aa, Streptococcus agalactiae
MEKTMDMEQREEVVSYNRAKVWQLVMFAMNNASTNIYLFTFMFVTYFSTGVLGLAAIFVSQIMGYIRIFDGFIDPAIGIMIDKTDTKFGKYRPILIIGNVITALSLIFLLALRGVDENIRFPLFVLVLIIHKIGYSMQQTITKAGQTALTNDPKQRPIFNIVDAVMTTSLMTGGQFVVSGFLVPKFGNFTPQFFNVLIFGTILISAILAIVAIIGIWAKDRKEFFGLGENTQKTALKDYWKVLKGNKPLQILSIAAALVKFAIQFFGDSVVMVLLFGILFGNYALSGQFSLLFIVPGVIINILFSTIARKKGLRFSYVRAIQIGMIGLLAFGAVLYVGKPGDLSLTSLNLYTILFIVTNIIARYASQAPASLVLTMGADISDYETSESGRYVSGMIGTIFSLTDSIASSFAPMVVGFVLAGIGFSKSFPTIETPLTPDLKMAAISLLVAIPFIALSIALLLIKFYKLDKEEMVRIQEKIQVMKAATTKERAKDIARNVPLTDMDYVDVTKYPIDKD

SEQ ID NO: 10193 - protein, 1023 aa, Streptococcus agalactiae
ATGGCAAAAATTATTTCATTAGGTGAGGTTCTTTTGCGATTATCTCCACCTCAATATCACACACTGATGCAGGCTAATCACCTAAAATGCCAATTTGGTGGTTCAGAACTTAATGTCTTAGCAAGCCTTGCTCAACTAGGTCACCATGTAGGATTAGTCTCAGCTTTGCCTGATAATGATTTGGGTAAGATGGCAAGACAATTTATATTGTCACAGCAAATTAGTCCAGCTGCTATAATTAAAAAAGAAGGACGACTAGGAATTTATTATTATGAACAAGGATTTTCGGTAAGAACAAATAAGGTTATCTACGATCGTAACTATTCATCTTTTTGGGAAAGTACCTTGAGTGATTATGATTTTACTTCTATTTTTAAGGGAGTGGATTGGTTTCATGTTTCTGGAATTACTCCAGCACTAACCAAGGACTTATATGAGGTGACTCGGTTCCTTATGACAAAAGCTAAAGAAGGAGGTGTAAAAGTATCGATTGATCTCAATTTTCGTGAGAGTTTATGGTCATCTTTTCAAGAGGCGCGTGAGCAATTATCGCCACTATTAGGATTATCAGATGTTTGCTTTGGCTTAGAGCCGATTTATTTAGCTGGTGAAAGTGAAGATTTAAAAGATGAGTTGGGCTTATCCAGACCTTACCTTGATATTGAATTACTTGAAAAGATAACTCAAAAGATTGTTCAAGAATATGGGTTAGACTATATTGCCTTTACTCAAAGGGAAATGGGATATACTAATCAGTATATGTTAAAATCATATTTGTATCATAATAATATGTTATATCAAACTGATAAAACTGGCGTTGAAGTATTAGATCGTGTGGGGACGGGAGATGCCTTTGCTGCAGGTTTAATTCATGCGCTTCTGGAAAAAGAAACTCCTCAAAGGGCCTTAGAAATTGCTATGACTACATTTAAATACAAACATACCATTCAAGGAGATATCAATATCATGACACGAGATGATATTGCTTACCTCATTGAAAAAGAAACAAATGATATTAAACGA

SEQ ID NO: 10194 - protein, 341 aa, Streptococcus agalactiae; identical to SEQ ID NO: 5764

SEQ ID NO: 10195 - protein, 1797 aa, Streptococcus agalactiae; identical to SEQ ID NO: 5765

SEQ ID NO: 10196 - protein, 599 aa, Streptococcus agalactiae; identical to SEQ ID NO: 5766

SEQ ID NO: 10197 - protein, 669 aa, Streptococcus agalactiae; identical to SEQ ID NO: 5767

SEQ ID NO: 10198 - protein, 223 aa, Streptococcus agalactiae; identical to SEQ ID NO: 1324

SEQ ID NO: 10199 - protein, 615 aa, Streptococcus agalactiae
ATGTTAAATCAATTGAAAAACAACTATTTCTTCGCTGTTATTCGAGGAAAATCATCTGAGGATGCACTAGAAATCGCAAAGCATGCTATTTTAGGTGGTATTCGGAATATTGAAGTAACTTTTTCGACTCCTGAAGCAAGCAAAGTCATCAAACAATTATCAGATGACTTTAAAAATAATAAAAAAATTATTGTGGGGGCCGGAACGGTTATGACAACTGAACTTGCTAAAGATGCTATTGATGCTGGAGCTAAATTTTTGGTTAGCCCACACTTTGATTCAGATATTGCTAATTTAGCTAATGAAAACAAGGTTTATTATTTCCCAGGCTGTGCAACGGCAACAGAAATCGTGGTAGCTAGAAAGTATAAATGTCAGATTATAAAGCTTTTTCCAGGTGGAGTTGTGGGCCCAGATTTTATCAAAGATATTCATGGTCCTATTCCAGATGTTGATTTAATGCCATCAGGTGGCGTCTCTGTTTCAAATGTAGCTGAATGGAGAAAAGCAGGAGCAGTTGCGGTTGGTGTTGGCTCAGCATTATCTAGTAAAGTAGCCACAGAAGGCTATGATAGTGTTACTAAAATAGCTAAACAGTTTGTTTCTGCACTTGAT

SEQ ID NO: 10200 - protein, 205 aa, Streptococcus agalactiae
MLNQLKNNYFFAVIRGKSSEDALEIAKHAILGGIRNIEVTFSTPEASKVIKQLSDDFKNNKKIIVGAGTVMTTELAKDAIDAGAKFLVSPHFDSDIANLANENKVYYFPGCATATEIVVARKYKCQIIKLFPGGVVGPDFIKDIHGPIPDVDLMPSGGVSVSNVAEWRKAGAVAVGVGSALSSKVATEGYDSVTKIAKQFVSALD

SEQ ID NO: 10201 - protein, 1398 aa, Streptococcus agalactiae
ATGACGTTTAATACTGAAACATTTATGTTAAAAAATCAAGCAGCTATACAGCTGTATGAAGAGGTCAAGAGGCAACCTATTTTTGATTATCATTGCCACTTAGATCCAAAGGACATTTTTGAAGATCGTATTTTTGATAATATTGTGGATTTGTGGCTTAGTGGTGACCACTATAAATGGCGTCTTATGAGGGCTAATGGTATTTCTGAAGCAGAAATTACAGGTCCAGCATCCAACCTTGAGAAATTTAAAGCATTTGCTAGAACACTAGAAAGAGCATACGGTAATCCTGTTTACCATTGGTCTGCTATGGAATTGAAAAATGTCTTTGGTGTTAATGAGATTTTGACAGAATCAAATGCTGAGGAAATTTATCATCGTTTAAATCATTTCTTGAAAGAGCATAAAATAAGTCCTAGACGTTTAATTGCAGATAGCAAAGTTATGTTTATTGGTACTACAGACCATCCTCTTGATACTCTCAAGTGGCATAAAAAGTTGGCTGCTGATGAGAGTTTTAAAACAGTTGTTGCTCCGACATTTAGGCCGGATGAAGCTTTTATTGAACATCGACATTTTGTTGATTTTATAACTAAACTGGGTGACATTACTCAAAAAGAGATTACAGATTTTTCAACATTTATAGCAGCAATGGAAGAACGCATTGCGTATTTTGCTCAAAATGGTTGTAGGGCTAGCGATATCAGTTTTACGGAAATCGTCTTTGAACAAACTGATGAATTGGAGTTGAACGATTTATTTAATAAAGTTTGTGAAGGCTATATCCCAAATCAATCAGAAATCAGCAAATGGCAAACAGCTGTTTTTATGGAACTTTGCCGATTATATAAAAAATATGGTTTTGTAACACAGGTGCATTTTGGAGCTTTGAGAAATAATCATTCTACTATTTTTGAAAAATTGGGAGCTGACGTGGGTGTGGATTCACTTGGTGACCAAGTGGCTTTAACTGTTAATATGAACCGTTTATTGGATTCCTTGGTTAAAAAAGATAGTCTGCCTAAAATGATTTGGTATAATCTCAATCCAGCTTACAATATAGCAGTAGCTAACACTTTGGCAAATTTTCAAGCTAACGAACTTGGAGTGAGATCTTACCTTCAATTTGGTGCAGGTTGGTGGTTTGCAGATACTAAATTAGGGATGATTAGTCAAATGAATGCCTTAGCAGAGCAAGGCATGTTGGCGAATTTTATTGGTATGTTAACAGATTCTAGAAGTTTTCTATCTTATCAACGTCATGACTATTTTCGACGTATTTTATGTACCTACTTAGGAGAATGGATTGAAGAAGGAGAAGTTCCAGAAGATTATCAAGCTTTAGGAAGTATGGCTAAAGACATTGCTTATCAAAATGCAGTTAATTATTTTAAGAAC

SEQ ID NO: 10202 - protein, 466 aa, Streptococcus agalactiae
MTFNTETFMLKNQAAIQLYEEVKRQPIFDYHCHLDPKDIFEDRIFDNIVDLWLSGDHYKWRLMRANGISEAEITGPASNLEKFKAFARTLERAYGNPVYHWSAMELKNVFGVNEILTESNAEEIYHRLNHFLKEHKISPRRLIADSKVMFIGTTDHPLDTLKWHKKLAADESFKTVVAPTFRPDEAFIEHRHFVDFITKLGDITQKEITDFSTFIAAMEERIAYFAQNGCRASDISFTEIVFEQTDELELNDLFNKVCEGYIPNQSEISKWQTAVFMELCRLYKKYGFVTQVHFGALRNNHSTIFEKLGADVGVDSLGDQVALTVNMNRLLDSLVKKDSLPKMIWYNLNPAYNIAVANTLANFQANELGVRSYLQFGAGWWFADTKLGMISQMNALAEQGMLANFIGMLTDSRSFLSYQRHDYFRRILCTYLGEWIEEGEVPEDYQALGSMAKDIAYQNAVNYFKN

SEQ ID NO: 10203 - protein, 1044 aa, Streptococcus agalactiae
ATGGAAATGTCATTTAGGTGGTATGGTGAAGACGACCCCGTTACTTTAGAAAATATTGGTCAAATTCCAACAATGAAAGGGATTGTTACAGCGATATACGATGTACCAGTAGGAGAAGTTTGGTCACGTGAGCGCATTCAACAGCTGAAAGAAAAGGTAGAGGCAGCAGGGCTTAAAATTTCGGTTATCGAATCAGTTCCTGTTCATGAAGATATCAAATTGGGACGTCCAACACGTGACCTCTTGATTGATAATTATATTCAAACCGTCAAAAATTTGGCTGCGGAAGGTATTGATACTATTTGCTATAATTTTATGCCAGTATTTGACTGGACACGCACTGATTTAGCATATCAATATCCAGATGGTTCTACAGCTTTGATATTTGATGAGACGGTTTCTAAAAAAATGGATCCAGTAAACGGTGAATTATCTTTGCCAGGATGGGATGCCAGCTATAGTAAAGAAGAAATGAAGGCTATCATGGATGCCTATGCTGAAATTGATGAGGAAAAACTTTGGGAAAATCTCACTTATTTTATTAAACGTATTATTCCTGAAGCGGAAGCCGTAGGCGTTAAAATGGCCATTCATCCGGATGACCCACCATATTCTATTTTTGGTTTACCTCGCATTATTACTGGGTTAGAGGCTATTGAGCGTTTTGTGAAATTGTACGATAGTAAAAGTAATGGCATCACTTTATGTGTGGGTTCTTACGCTTCTGATCCCCAGAATGATGTTTTAGAGATTTCGCGACGTGCTTTTGAGTTAGATCGTGTAAACTTTGTTCATGCTCGCAATATTAAATTAGGTGATGGAAAGTCATTTAAAGAATCGGCTCATCCATCAGAATACGGGTCAATAGACATGTATGAAGTTATTAAGTTATGCCATGAATTTGGGTTTGAGGGTGCTATTCGACCTGACCACGGGCGTATGATTTGGGGAGAAACAGGTCGTCCAGGATATGGCCTATACGATAGAGCTTTAGGAGCCACTTACCTTTCTGGTTTATACGAAGCTGTTATTAAAGGTTCAAAA

SEQ ID NO: 10204 - protein, 348 aa, Streptococcus agalactiae; identical to SEQ ID NO: 5774

SEQ ID NO: 10205 - protein, 837 aa, Streptococcus agalactiae
ATGTCAAAAATAATTACATTTACCAATAAAGTTGTCGTCATAACAGGTGCAGGCGGTGTTCTCTGTGGTTATATGGCTAAAGAATTTGCGAAAGCAGGCGCTAAAGTGGCATTATTAGATTTGAATCAAGAAGCTGCTCAAACATTTGCTGATGAAATTGTAGAAGAAGGTGGTATCGCTAAGGCTTATAAAGCTAACGTTTTGTCTAAAGAAAACCTTGAAGAAGTACATCAAGCCGTTTTAGAGGATCTTGGACCAACTGATATTTTAGTTAATGGTGCAGGAGGCAACAATCCTAAAGCCACAACTGATAATGAATTTCACGAATTAGACTTACCTTCAGAAACAAAAACCTTCTTTGAGTTAGATGAAGCTGGTATTAGCTTTGTTTTTAACTTAAATTATTTAGGAACATTATTGCCAACGCAAGTATTTGCCCAAGATATGGTTGGACGTGAAGGAGCGAATATTATTAATATCTCTTCAATGAATGCTTTCACCCCTCTGACCAAAATACCAGCTTATTCTGGAGCTAAAGCAGCTATTAGTAACTTCACACAATGGCTAGCTGTTCATTTCTCAAAAGTTGGTATCCGTTGTAATGCTATTGCACCTGGTTTCTTGGTAACAAATCAGAACCGAAGCTTGTTATTTACTGAGGACGGTCAGCCAACTGCGCGTGCTGAGAAAATTCTTAATAATACACCAATGGGAAGATTTGGAGAAGCAAGTGAGCTGATTGGCGGATTGTTCTTTTTAGCAGATGAAAAATCATCAAGTTTTGTTAATGGCGTTGTCCTTCCGATTGATGGTGGATTTGCTGCTTACTCTGGTGTT

SEQ ID NO: 10206 - protein, 279 aa, Streptococcus agalactiae
MSKIITFTNKVVVITGAGGVLCGYMAKEFAKAGAKVALLDLNQEAAQTFADEIVEEGGIAKAYKANVLSKENLEEVHQAVLEDLGPTDILVNGAGGNNPKATTDNEFHELDLPSETKTFFELDEAGISFVFNLNYLGTLLPTQVFAQDMVGREGANIINISSMNAFTPLTKIPAYSGAKAAISNFTQWLAVHFSKVGIRCNAIAPGFLVTNQNRSLLFTEDGQPTARAEKILNNTPMGRFGEASELIGGLFFLADEKSSSFVNGVVLPIDGGFAAYSGV

SEQ ID NO: 10207 - protein, 810 aa, Streptococcus agalactiae
ATGGTAGATACAAATCACAAAATCGCTTTTTGCATAGATTCCGATGGTTGCGCAATGGATACAATGACATATAAGCATCAACTCTTTTTCGGTCCAATTGCTGCAGATATATTTGGGATATCAGAACAAGAAAGAACAAGTTTTTTAAAAGAGTGGGATAGAGTCAATCTTTATTCAAGAACTCGTGGAGTTAATCGGTTTGTGGGATTGGTTATGGGCCTTGAGTTTGCCGGAGTAGAACATATTGATAAATTAAAAGAATGGGTCGAAACAACAGATTCATTGTCCAATAATTCCTTAGAGTTAGAGCTTGCCAACGATTTTAGTAGAGATTTAGAGAAGGCTTTAGAATGGTCCAATGAAGTGAATCGCCAAATCAAAAATTATGAGGGAGATTCTTTAGCGTTTTCAGGTGTGTTAGAAGGTTTAGAACAATTAAGTCAATTTGGTAATGTTTATGTCGTGAGTTCTGCTAACAAGGAAGCTGTTTGGCAAGAGTGGGAAGAACAGGGATTGCTAAAGTATGTTGATGATATCTATTGTCAAGATAGAGGTAAAAAAGAAGATGTTATCGCCACTTTAATTGCAAATGGTTACTGCCGTGACACTATTTTGATGGTAGGAGATTCCCCGGGTGATTTGGCTGCAGCAGAACAAAATGGTATTGCATTTTACCCAGTACTTGTTGGTAAGGAAGTCAAATCATGGGAAATTCTTAGAGAAGATATTGGTGAAGCTTTTGCAAAAGGTCAATTCGAACAGCAAAGGCAAAAAGAATCTATTAATACCTTTTGGGCTAATTTAGATAAC

SEQ ID NO: 10208 - protein, 270 aa, Streptococcus agalactiae
MVDTNHKIAFCIDSDGCAMDTMTYKHQLFFGPIAADIFGISEQERTSFLKEWDRVNLYSRTRGVNRFVGLVMGLEFAGVEHIDKLKEWVETTDSLSNNSLELELANDFSRDLEKALEWSNEVNRQIKNYEGDSLAFSGVLEGLEQLSQFGNVYVVSSANKEAVWQEWEEQGLLKYVDDIYCQDRGKKEDVIATLIANGYCRDTILMVGDSPGDLAAAEQNGIAFYPVLVGKEVKSWEILREDIGEAFAKGQFEQQRQKESINTFWANLDN

SEQ ID NO: 10209 - protein, 1788 aa, Streptococcus agalactiae
ATGACACATTTAGTTGACTTAACAAAGAAACCCTTCAATCTAAATCAAGAAGCAATTGAGTGGATTGAAAAAACAATTAATGAGATGACATTGGATGAGAAAATTGGGCAACTTTTTTTCAATATGGGAGCTAGTCGTTCAGAAGAATATTTAACAGATGTTTTGGATCGGTATCATATTGCTGCTGTTCGCTATAATAGAGGTAGTTCAAGTGAAATCTATGATCAGAATTTAATTTTACAGACAAAGTCGAAATTGCCGATGTTGATTGCTGCAAATACAGAAGCTGGTGGAGACGGTGCTGTCACGGATGGAACTAAAGTTGGCGATGAAATAAAAGTGGCTGCTACAAATGATCCGAAATATGCTTATGAAATGGGAAGAATCGCAGGGATGGAGGCATCTGCTGTGGGTTGTAATGCTTCATTTGCTCCAATTGTAGATTTGACACGTAATTGGCGTAATCCTATCATAGCTAGTCGAAATTGGGGTGCTAACGTTGATCAAATTATTTCACTTTCAAAAGAGTATATGAAAGGAATCATGCAATATAATATTGTACCTTTCGCTAAACATTTTCCAGGGGATGGCATTGATGAGCGTGATCATCATTTGTCATTTGCTTCCAATCCTATGAGTAAAGAGGAATGGATGTCGACATTTGGCCGCATTTATGGTGAATTGGCTGACGCAGGTCTACCAGGAGTCATGGCAGGTCACATACATTTACCAAATGTTGAAAAAGAAATGCATCCAGAGCGAGACCTTGATGATATGTTACCAGCTTCATTGAATAAAACACTTTTAGATGAGTTATTGAGAGGAGAGTTAGGTTATAATGGAGCTATTGTAACGGACGCTTCTCATATGGTTGGAATGACTGCTTCAATGTCAAGGAGAGATTTGTTGCCAACGGCGATTGAAGCAGGTTGTGACTTATTCTTATTCTTTAATGACCCCGATGAAGACATTCAATGGATGAAAGAAGGTTACGAAAAAGGTATCCTAACAGAGGAACGTCTCCATGACGCTTTACGTCGTACTCTCGGTCTAAAAGCGAAATTAGGCTTGCATAACTATGAGGGACGTCGCCAAGAACTCTTTATGCCTAAAGATAAGGCTATGGCTTTAATCAACACATCAGAGTCGCAAAAAATAGCTGATGAAGTTGCTGATAAAGCAGTAACTCTGGTAAAAGATAAACAAAAAGATATCTTTCCAGTAAATCCAGAACGTTATCGTCATATCTTACTTGTTAACGTTGAAGGATATAAGGGAGGTTTTGGTGCTATGATTGCTGGAAACAAGCAACGTGCATCGGATTACATGAAAGAGTTACTTGAGGCACGTGGCCATGAAGTAACTGTCTGGGAGTCTACCGAAGAGCGCATTATGAAATTGCCTCAAGAGGAGCGGGCAGCAGCTATCGCTAATGTTTACGCACAAAAACAGCCAATCGCAAATCTAACAGATCGCTATGACCTGATTATTAACTTGGTAGATGTCAATGCTGGAGGAACAACACAACGTATTATTTGGCCAGCAGCTAAAGGGACCCCTGATCAGCCTTTTTACGTTCATGAAATACCATCTATTGTGATTTCAGTACAACATGCATTTGCTTTAGCAGATATGCCACAGGTAGGGACTTATATTAATGCTTACGATGGGCTTCCTAGCACGATAAGTGCAGTAGTTGCGAAATTGGCTGGAGAATCAGAATTTACAGGAGTTTCACCAGTAGATGCTTACTGTGGTTTAATTGATACACATTTATGGCGTCAATGC

SEQ ID NO: 10210 - protein, 596 aa, Streptococcus agalactiae
MTHLVDLTKKPFNLNQEAIEWIEKTINEMTLDEKIGQLFFNMGASRSEEYLTDVLDRYHIAAVRYNRGSSSEIYDQNLILQTKSKLPMLIAANTEAGGDGAVTDGTKVGDEIKVAATNDPKYAYEMGRIAGMEASAVGCNASFAPIVDLTRNWRNPIIASRNWGANVDQIISLSKEYMKGIMQYNIVPFAKHFPGDGIDERDHHLSFASNPMSKEEWMSTFGRIYGELADAGLPGVMAGHIHLPNVEKEMHPERDLDDMLPASLNKTLLDELLRGELGYNGAIVTDASHMVGMTASMSRRDLLPTAIEAGCDLFLFFNDPDEDIQWMKEGYEKGILTEERLHDALRRTLGLKAKLGLHNYEGRRQELFMPKDKAMALINTSESQKIADEVADKAVTLVKDKQKDIFPVNPERYRHILLVNVEGYKGGFGAMIAGNKQRASDYMKELLEARGHEVTVWESTEERIMKLPQEERAAAIANVYAQKQPIANLTDRYDLIINLVDVNAGGTTQRIIWPAAKGTPDQPFYVHEIPSIVISVQHAFALADMPQVGTYINAYDGLPSTISAVVAKLAGESEFTGVSPVDAYCGLIDTHLWRQC

SEQ ID NO: 10211 - protein, 1083 aa, Streptococcus agalactiae
ATGTCAAAACTTAATCGTATACGCCATCACTTACATTCAGTCCAAGCTGAACTTGCTGTCTTTTCTGATCCTGTGACAGTCAACTATTTAACAGGTTTCTTTTGCGATCCCCATGAAAGACAAATGTTTTTATTTGTCTATGAAGATCGCGATCCTATTTTATTTGTACCAGCACTAGAAGTATCGCGTGCAAAACAAAGTGTACCATTTCCCGTCTTTGGTTACATAGATTCAGAAAATCCTTGGCAAAAAATAGCTAGCAACTTACCATCCTTTTCTGTTTCTAAAGTTCTAGCCGAATTTGATAATCTTAATGTTACTAAATTCCAAGGTCTCCAAACCGTTTTTGATGGTCATTTTGAAAACCTAACACCTTATATTCAAAACATGCGCCTAATTAAATCACGAGATGAAATTGAGAAAATGTTAGTCGCTGGAGAATTTGCTGATAAAGCTGTTCAAGTTGGATTTGACAATATCTCGCTAAACAACACTGAAACCGATATTATCGCTCAAATCGAATTTGAAATGAAAAAACAAGGTATCAATAAAATGAGTTTCGACACTATGGTTTTGACTGGCAATAATGCAGCAAATCCACATGGTATCCCAGGAACTAATAAAATCGAAAATAATGCTTTGTTATTATTTGATTTAGGTGTAGAAACACTAGGTTATACGTCAGATATGACCCGTACAGTAGCAGTGGGGAAACCTGATCAATTCAAAAAAGATATTTACCATTTATGTCTTGAAGCACATCAAGCGGCTATTGATTTTATTAAGCCAGGAGTCCTTGCTTCTGAAGTTGACGCAGCAGCAAGAAATGTTATTGAAAAGGCTGGTTATGGACAATACTTTAACCACCGCCTTGGTCATGGATTAGGTATGGACGTCCATGAATTTCCATCAATTATGGCTGGTAACGATATGGAGATTCAAGAAGGCATGTGCTTCTCTGTTGAACCAGGTATTTATATACCAGATAAAGTTGGTGTGCGAATTGAAGACTGCGGTTACGTGACTAAAACCGGCTTTGAAGTATTTACCAAAACACCCAAGGAACTACTCTATTTTGAAGGA

SEQ ID NO: 10212 - protein, 361 aa, Streptococcus agalactiae; identical to SEQ ID NO: 1338

SEQ ID NO: 10213 - protein, 945 aa, Streptococcus agalactiae
ATGGCAACTGTTAGTCGTGTGGTAAATGGAAATAAAAATGTCAAGGAAAATACACGTAAGAAAGTCCTTGAAGTTATTGATCGTCTTGACTATCGTCCAAATGCTGTGGCGCGTGGTTTAGCAAGTAAAAAAACGACAACTGTTGGTGTTGTCATTCCTAATATCGCAAATAGCTACTTTTCAATTTTAGCGCGTGGTATTGATGATATTGCAGCAATGTACAAATATAACATTGTCCTTGCTTCAAGTGATGAAGACGATGATAAAGAGGTTAATGTTGTTAATACTTTGTTTGCTAAGCAAGTAGACGGTATTATTTTTATGGGACACCACTTAACTGAAAAGATTCGTGCAGAGTTCTCTCGTTCACGCACACCGATTGTTTTAGCAGGTACTGTGGACCTTGAGCATCAATTACCAAGTGTTAATATCGATTACAAAGCAGCAGCAGTTGATGTTATTGATATTTTAGCTGGCAATCATAAAGACATTGCTTTTGTATCAGGACCACTTATTGACGATATTAATGGCAAGGTTCGTTTGGCAGGATACAAAGAAGGTCTCAAGAAAAATGGCTTAAACTTTAAAGAGGGGTTGGTTTTTGAAGCCAACTACCGTTATGCTGAAGGCTTTGCATTAGCTCAACGCGTGATTAATGCTGGAGCAACAGCAGCATATGTTGCTGAGGATGAGTTAGCGGCAGGTTTGTTAAATGGTCTTTTTGAGGCAGGTAAACGTGTCCCTGAAGATTTTGAAATTATCACAAGCAATGACTCGCCAATCGCACAATATACACGTCCTAACTTAACTTCTATCAGTCAACCGGTTTATGATTTGGGTGCTGTTAGCATGCGTATGCTAACAAAAATTATGCACAAAGAAGAGTTGGAAGAAAAAGAAATAGTGCTTAATCACGGGATTGTTAAACGTGGCACAACAAATAAT

SEQ ID NO: 10214 - protein, 315 aa, Streptococcus agalactiae; identical to SEQ ID NO: 1340

SEQ ID NO: 10215 - protein, 1464 aa, Streptococcus agalactiae
ATGACAAATGAATTGATAATGCAAGCTTTTGAGTGGTATTTACCTAGTGATGGGAATCACTGGAAGAAATTAGAGGACTCTATATCAGACCTTAAAAAACTTGGAGTTAGTAAAATCTGGTTACCACCAGCATTTAAGGGAACTAGCAGTGATGATGTAGGATATGGTGTTTATGATCTCTTTGATTTAGGAGAATTTGACCAGAATGGAACAATTAGAACAAAATATGGTAGGAAAGAAGAGTATCTAAAGCTTATTAAGTCGTTAAAGGCAAATGGCATTAAACCATTTGCAGATATCGTTCTTAACCATAAAGCCAATGGTGATCATAAAGAAAAATTTCAAGTCATAAAAGTCAATCCTGAAAATCGTCAAGAAGCATTAAGTGAACCCTATGAGATTGAAGGATGGACGGGATTTGATTTCCCAGGTAGACAGGGTGAGTACAATGATTTTAAATGGCACTGGTACCACTTTACTGGTTTAGATTACGATGCTAAAAATAATGAAACAGACATCTTTATGATTGTAGGCGATAATAAAGGTTGGGCAGACGATGATTTGATTGATGATGAAAATGGTAATTTCGATTATCTCATGTACAATGACATTGATTTTAAGCATCCTGAAGTTATAAAAAACTTACAAGATTGGGCTAAGTGGTTTATTGAAACTACCGGTATTGAAGGTTTTCGTTTGGATGCTGTGAAACATATCGATTCTTACTTTATTCAAACTTTCATTAATGATATTCGTACAAAAATAAAACCCGATTTAGAGGTCTTTGGCGAATATTGGAAATCTGACCAAACATCAATGAAGGACTATTTAGAGGCAACACAATTTCAATTTTCTCTTGTTGATGTTACCTTGCATATGAATTTTTTTGATGCCAGTCACCAAAACCGTGATTTTGATATGCGAACAATTTTTGATGATAGTCTTGTTATTGATAATCCTGAGTATGCTGTCACATTCGTAGAAAATCACGATACGCAAAGTGGACAAGCTCTAGAAAGTAGAGTGGAAGATTGGTTTAAACCTTTAGCTTATGGCTTGATACTTTTACGCCAACAAGGGACTCCATGTCTTTTTTATGGTGATTATTATGGCATTCAAGGAGAATTTGGCCAACCATCCTTTAAAGAGGTTATTGATAAAATGGCTGAGCTACGCCAAAACTATGTATTTGGCAAACAAGTCGATTATTTTACGCATTCAAATTGTATTGGTTGGACTTGTCTTGGGGATGAGGAATATAATTCTTGTTTAGCTGTGGTCCTAACAAATGGTGATCAGGGATGGAAACATATGGAAGTAGGGGAAATTTATGCAGGCAAAACGTTTGTTGATTATTTAGGTAATTGTGAACAAGAGGTTGTTATAGGAGATGATGGTTGGGGTGATTTTTTAGTTGAATCTGCGTCTATCTCGGCTTGGGTCCCTAAAATAGAGGAAGCTAAC

SEQ ID NO: 10216 - protein, 488 aa, Streptococcus agalactiae
MTNELIMQAFEWYLPSDGNHWKKLEDSISDLKKLGVSKIWLPPAFKGTSSDDVGYGVYDLFDLGEFDQNGTIRTKYGRKEEYLKLIKSLKANGIKPFADIVLNHKANGDHKEKFQVIKVNPENRQEALSEPYEIEGWTGFDFPGRQGEYNDFKWHWYHFTGLDYDAKNNETDIFMIVGDNKGWADDDLIDDENGNFDYLMYNDIDFKHPEVIKNLQDWAKWFIETTGIEGFRLDAVKHIDSYFIQTFINDIRTKIKPDLEVFGEYWKSDQTSMKDYLEATQFQFSLVDVTLHMNFFDASHQNRDFDMRTIFDDSLVIDNPEYAVTFVENHDTQSGQALESRVEDWFKPLAYGLILLRQQGTPCLFYGDYYGIQGEFGQPSFKEVIDKMAELRQNYVFGKQVDYFTHSNCIGWTCLGDEEYNSCLAVVLTNGDQGWKHMEVGEIYAGKTFVDYLGNCEQEVVIGDDGWGDFLVESASISAWVPKIEEAN

SEQ ID NO: 10217 - protein, 996 aa, Streptococcus agalactiae
ATGAAAGTTTTACTGTATTTAGAGGCTGAAGAATACTTGAAAAAGTCAGGTATCGGTCGTGCTATCAAACATCAAGAGAAAGCTCTTCAAATTGCTGGGATAGATTATACCACTAATCCTGCAGATGACTTTGACCTTGTTCATATGAATACCTATGGTATTAGAAGTTGGCTTTTGATGAGTAAAGCTAAAAAAACTGGGAAAAAAGTAATTATGCATGGTCATTCCACTGAAGAGGACTTTAGAAATTCTTTTATTGGCTCAAATTTAGTATCCCCGCTTTTTAAATGGTACCTTTGCCGTTTTTATCAAAAAGCAGATGCCATTATAACCCCAACTGATTATTCTAAACAACTAATAAAAGCATATGGCATCAAGAAACCAATTTTTGTTTTATCTAACGGGATTGATCTAAGTCGCTATCAGAGGTCAGAAAAGAAAGAAGCTGCATTTCGTCACTATTTTCACTTGAGTAAAGATGATAAAGTTGTTATGGGGGCCGGTCTTTATTTCATGCGTAAGGGAATTGACCAATTTGTTGAAGTAGCTGCAAAAATGCCTGATATTCGTTTTATTTGGTTTGGAGAAACAAATAAGTGGGTTATTCCTCGAAAGGTTAGGCAAATCGTTACCAAGCAACATCCCTCAAATGTTACTTTTGCTGGTTACATAAAAGGTGACGTTTATGAAGGTGCCATGAGTGCTAGCGATGCTTTCTTCTTTCCGAGTCGTGAAGAGACAGAAGGGATAGTAGTTTTAGAGGCTTTAGCTAGTCATCAGCATGTGGTTTTAAGAGATATCCCTGTGTATCACGGTTGGGTGACCGAAGACAGTGTTGAATTAGCGACTGATGTTGATGGTTTTGTTGAAAAATTGGATAAAGTCTTATCTGGTAAGAGTGATAAGATTAAAGAAGGTTATCATGTGGCTGAGAGTCGAAGTATCGAACGAATTGCCCATGAATTGGCAAGTGTTTATCAAAAAGTAATGGAGTTG

SEQ ID NO: 10218 - protein, 332 aa, Streptococcus agalactiae
MKVLLYLEAEEYLKKSGIGRAIKHQEKALQIAGIDYTTNPADDFDLVHMNTYGIRSWLLMSKAKKTGKKVIMHGHSTEEDFRNSFIGSNLVSPLFKWYLCRFYQKADAIITPTDYSKQLIKAYGIKKPIFVLSNGIDLSRYQRSEKKEAAFRHYFHLSKDDKVVMGAGLYFMRKGIDQFVEVAAKMPDIRFIWFGETNKWVIPRKVRQIVTKQHPSNVTFAGYIKGDVYEGAMSASDAFFFPSREETEGIVVLEALASHQHVVLRDIPVYHGWVTEDSVELATDVDGFVEKLDKVLSGKSDKIKEGYHVAESRSIERIAHELASVYQKVMEL

SEQ ID NO: 10219 - protein, 1332 aa, Streptococcus agalactiae
ATGCGTATAGGTCTATTTACAGATACATACTTCCCCCAAGTTTCGGGAGTTTCAACAAGTATCCGCACTTTAAAGGAAGGGTTGGAGAAGGAAGGACACGAAGTTTATATTTTCACAACTACCGACCGTAATGTCAAACGTTTTGAAGACCCTACAATTATTCGTTTACCAAGTGTCCCTTTTATTTCTTTTACGGATCGTCGAGTAGTTTATAGAGGTTTAATTTCTGCTTATAGGATAGCTAAAGACTACGAACTTGATATTATTCATACTCAAACAGAATTCAGCTTAGGGCTTTTAGGAAAATTAGTTGCAAAAGCTTTAAGAATACCTGTTGTGCATACTTATCATACTCAATATGAGGATTACGTTGGTTATATCGCAAAAGGCAAATTGATTAAGCCAAGTATGGTCAAATATATCATGCGTACCTACCTAAGTGATTTGGATGGTGTCATATGTCCTTCTCGAATTGTTCTCAATCTTCTAGATGGTTACGGTGTCAAAATTCCAAAACAAGTTATTCCGACAGGTATTCCTGTTGAGAACTATCGTCGAGAGGATATCTCTGAAGAAACAATCAAGAATCTACGAACGGAGCTTGGACTTGCGGATAATGATACAATGCTATTGAGTTTATCACGGGTATCTTTTGAAAAAAATATTCAAGCAATCTTGATGCATTTATCAGCTGTCGTTGATGAAAATCCTCACGTAAAATTAGTGATAGTTGGAGATGGTCCTTATCTTTCAGATCTAAAAGAACTTGTTCACTCTCTAGAACTTGAAAATTCAGTTATTTTTACAGGTATGGTTGAGCATAGCCAAGTGGCTATCTACTATAAAGCATGTGATTTCTTTATTAGTGCTTCAACAAGTGAAACGCAAGGATTAACCTACATTGAGAGTCTGGCGAGTGGACGTCCAATCATTGCGCAAAGTAATCCTTATCTAGATGATGTTATTTCAGATAAAATGTTTGGAACTCTGTACAAGAAGGAAAGTGATTTGGCAGATGCTATCCTAGATGCAATAGCAGAGACACCCAAAATGACTCAAGAAGCTTATGAACAGAAATTATATGAGATTTCTGCTGAGAATTTCAGCAAGTCTGTATATGCTTTTTACCTAGACTTTCTGATTTCACAAAAAGCTAGTGTGAAAGAAAAAGTCTCTCTGACAATAGGAAATAAGGATAGCCATTCTACTCTTCGTTTTGTCAGAAAAGCGGTATATTTACCTAAGAAAGTTTTTACCTTTACAGGAAGAGCCTCTAAAAAAGTGGTAAAAGCACCTAAACGTCGTATTTCATCTATTCGAGATTTTTTAGAT

SEQ ID NO: 10220 - protein, 444 aa, Streptococcus agalactiae
MRIGLFTDTYFPQVSGVSTSIRTLKEGLEKEGHEVYIFTTTDRNVKRFEDPTIIRLPSVPFISFTDRRVVYRGLISAYRIAKDYELDIIHTQTEFSLGLLGKLVAKALRIPVVHTYHTQYEDYVGYIAKGKLIKPSMVKYIMRTYLSDLDGVICPSRIVLNLLDGYGVKIPKQVIPTGIPVENYRREDISEETIKNLRTELGLADNDTMLLSLSRVSFEKNIQAILMHLSAVVDENPHVKLVIVGDGPYLSDLKELVHSLELENSVIFTGMVEHSQVAIYYKACDFFISASTSETQGLTYIESLASGRPIIAQSNPYLDDVISDKMFGTLYKKESDLADAILDAIAETPKMTQEAYEQKLYEISAENFSKSVYAFYLDFLISQKASVKEKVSLTIGNKDSHSTLRFVRKAVYLPKKVFTFTGRASKKVVKAPKRRISSIRDFLD

SEQ ID NO: 10221 - protein, 1941 aa, Streptococcus agalactiae
ATGATTAAAATCACTTTCCCAGATGGTGCAATTCGTGAATTTGAATCTGGCATCACAACATTTGAAATTGCACAATCAATTTCTAACTCTTTAGCTAAAAAAGCTTTAGCTGGTAAATTTAATGGTCAACTTATTGATACAACACGTGCTATTGAAGAAGATGGTAGTATTGAGATTGTAACACCTGACCACGAAGATGCTTTAGGAGTTCTGCGTCACTCAGCAGCGCATTTATTTGCTCAAGCTGCAAAACGCCTTTTTCCAGACTTATGTTTAGGTGTAGGTCCAGCTATTCAAGATGGTTTTTACTATGATACTGATAATAAATCAGGTCAAATTTCAAATGATGATCTTCCTCGTGTTGAAGAAGAAATGAAAAAAATTGTTAAGGAAAATCACCCTTGTATTCGTGAAGAAATCAGTAAAGAAGAAGCGTTAGAACTTTTTAAAGATGACCCTTATAAAGTTGAATTAATTAGTGAACATGCTGAAGATGGTTTAACTGTTTATCGTCAAGGTGAATTTGTAGACCTTTGTCGTGGACCTCATGTCCCATCAACAGGACGTATTCAAGTCTTTCATCTTCTAAATGTCGCTGGTGCTTACTGGCGTGGTAACAGTGATAATGCTATGATGCAGCGTGTCTATGGTACTGCTTGGTTTGATAAAAAAGATTTGAAAGCATATCTTAAACGCCGTGAAGAAGCTAAGGAACGTGACCATCGCAAATTAGGTAAAGAACTTGATTTATTTATGGTTAATCCTGAAGTAGGTCAAGGATTGCCATTCTGGTTGCCAAATGGAGCAACTATTCGCCGCGAATTGGAACGTTACATTGTTGATAAGGAGATTGCTTCAGGTTATCAACACGTTTACACACCTCCGATGGCATCTGTTGAATTTTACAAGACTTCTGGGCACTGGGACCACTATCGTGAAGATATGTTCCCAACAATGGATATGGGAGATGGAGAGGAATTCGTTCTTCGTCCAATGAACTGCCCACACCATATTGAAGTTTATAAACATCATGTTCACTCATACCGTGAATTGCCAATTCGTATCGCTGAACTTGGTATGATGCACCGTTATGAAAAATCAGGGGCCCTCACAGGATTGCAACGTGTACGCGAAATGACACTCAACGATGCCCATATTTTCGTTACACCTGAGCAAATTAAAGATGAATTTCTTAAAGCTCTTAATCTCATAGCAGAAATTTATGAAGATTTTAACTTAACAGATTACCGTTTCCGCTTATCTTATCGTGACCCAGAAGATAAACATAAGTATTATGATAACGATGAGATGTGGGAAAATGCACAAGCTATGCTAAAAGAGGCTATGGATGATTTTGGATTAGATTATTTTGAAGCAGAAGGCGAAGCAGCTTTTTACGGTCCTAAATTGGATATCCAGGTGAAAACTGCTCTTGGTAATGAAGAAACATTATCTACTATCCAACTAGATTTCCTTCTTCCAGAACGCTTTGATCTTAAATACATCGGTGCAGATGGTGAAGAACATCGTCCAATTATGATTCACCGCGGTGGTATTTCAACAATGGAGCGATTTACAGCTATTTTAATTGAAACTTACAAAGGTGCCTTTCCAACTTGGCTTGCTCCACAACAAGTTTCTGTTATTCCAATTTCAAATGAAGCCCACATTGATTATGCTTGGGAAGTGGCTCGTGTCCTTAAAGATCGTGGTATTCGTGCTGAAGTGGATGACCGTAACGAAAAGATGCAATATAAGATTCGTGCGGCTCAAACCCAAAAAATTCCATATCAATTGATTGTTGGTGATAAGGAAATGGAAGAAAAAGCCGTAAATGTGCGCCGCTATGGAAGCAAAGCGACTGAAACAAAATCTATAGAGGAATTTGTAGAAAGTATTTTAGCTGATATTGCAAGAAAATCTAGACCTGACGAAGTTAAA

SEQ ID NO: 10222 - protein, 647 aa, Streptococcus agalactiae
MIKITFPDGAIREFESGITTFEIAQSISNSLAKKALAGKFNGQLIDTTRAIEEDGSIEIVTPDHEDALGVLRHSAAHLFAQAAKRLFPDLCLGVGPAIQDGFYYDTDNKSGQISNDDLPRVEEEMKKIVKENHPCIREEISKEEALELFKDDPYKVELISEHAEDGLTVYRQGEFVDLCRGPHVPSTGRIQVFHLLNVAGAYWRGNSDNAMMQRVYGTAWFDKKDLKAYLKRREEAKERDHRKLGKELDLFMVNPEVGQGLPFWLPNGATIRRELERYIVDKEIASGYQHVYTPPMASVEFYKTSGHWDHYREDMFPTMDMGDGEEFVLRPMNCPHHIEVYKHHVHSYRELPIRIAELGMMHRYEKSGALTGLQRVREMTLNDAHIFVTPEQIKDEFLKALNLIAEIYEDFNLTDYRFRLSYRDPEDKHKYYDNDEMWENAQAMLKEAMDDFGLDYFEAEGEAAFYGPKLDIQVKTALGNEETLSTIQLDFLLPERFDLKYIGADGEEHRPIMIHRGGISTMERFTAILIETYKGAFPTWLAPQQVSVIPISNEAHIDYAWEVARVLKDRGIRAEVDDRNEKMQYKIRAAQTQKIPYQLIVGDKEMEEKAVNVRRYGSKATETKSIEEFVESILADIARKSRPDEVK

SEQ ID NO: 10223 - protein, 684 aa, Streptococcus agalactiae
GTGCAAGGTGATGACGAAACAATAGAGTTATTAAGGTCGTATTTAGAGGGAGCTCTTTATAAGGTTGTGATGGCTAGTGATGGTGAGGAGGCTTTTTCTTTATTTCAGCAACATCAGATTGATTTAGCAATCATAGATATTACGCTACCTAAAATAGATGGATATGAGTTGACGCGACTCATTCGTCAAGATAGTCAGATTCCTATTATTATGCTAGCAGCTAAGACAACAGATATGGACAGAATATTAGGATTGAATATTGGAGCAGATGATTTTATCACGAAACCGTTTAATTCTTTGGAGGTTTTAGCTCGAATTAATTCGCAACTGCGTCGTTACTATGAATTCAATAGTCTTGCCAAACCTAAAAATCAATTTATAAAGATAGGGGAATTGGAATTAGATGAGGAACATGTTGAACTAACTAAAAATGGTAAACATATCAAGTTGACTGCTACAGAATTTAAGATTCTTCATATCTTAATGTCATCACCAGGAAGGATTTATACTAAAACACAACTCTATGAGAAGATTAATGGTAGGTATTTAGAAGGTGATGAGACAACGATTATGGTGCATATTTCTAATATCCGTGACAAAATCGAAGATGATAGTAAATATCCTAAATATATAAAAACACTTAGAGGAGTAGGATATAAAATCGAAAAACCGCAGTATCTTGTT

SEQ ID NO: 10224 - protein, 228 aa, Streptococcus agalactiae; identical to SEQ ID NO: 5794

SEQ ID NO: 10225 - protein, 1017 aa, Streptococcus agalactiae
ATGGCAAAGACCGCTCTTAATATTCCTTTTACAGTTGAAGGGATAGAAAATTATTATCAAAATATAAAAATGATACTGTCTTTAGCAGATAAATGGAGCATACCTAAAGATGATCTATTACTCTTTTTAAAGGGACTCAAGGCTATTGATGATATAAAAGTTGGCTCTCCTATTTTTAAGTATTTTTGGACTTCTTTAAGTTTACAAGCACCCCTCAAAGCTTTAGAATTCGTGTTAGAGCAGGCTAAAATGCCAACTGAATTGTCAGGAGAATTATCAGAAACACAATACTTGGTCGCACAGTTTTCAGATGAGTTAGCTCCACATGATGATTTCTGGATAGCCTTATCACAAGTTATTTATGATTCTTTTCCTGGGAATAGTCTAGCCGAAGATACTGTATTAAATAGGAAACTCCATCAATTCCGCTATTTGATTTCTAGTCAGCAAGCACAGTATGTTCGACGATACTTTAAAGATGTTGGTATGACTGATAGAGATGCTTTAGTAAACTATCTATCATGTTTAAGAGAACCAGATAATATCGCCTACTATGAATCTGCTCGTTTGCATAATAAACGTCGGAGAAATGGTGAAATCTTTGCTTTCCCAGATGATGAGCCGGTTATTAATAGTAAGCTTTTAATTTCATTCCATACGGAATTTATTATTGATGACAAAGGAAATTTTTTAAACGAGATTGACGCAGAAGTAATAACAAGTAATGGCATTATCAATGGAGCTAGCTTTAATTATGCTTTTAAAAATAATACACGTCATAAAGAATTAGATGTTGATCCTGTAAAATTAGACCCAAAATTTCGAAACGATATGACTAGAGGTTATAGATCGCCAAATCTATCTAGAAGGAAATGGTTTTTCTTTAAAGAAGAGGATTACGATTGTAGTTATTTCAATAAAAAAGGATATTACGCATTTGGAAGGCGTAGTGCTAAGCAATCGGTTGATAAACAAGTCAAATACTTGAAGAAGGCTGTGCAGAAAATGCGCCTCAAC

SEQ ID NO: 10226 - protein, 339 aa, Streptococcus agalactiae
MAKTALNIPFTVEGIENYYQNIKMILSLADKWSIPKDDLLLFLKGLKAIDDIKVGSPIFKYFWTSLSLQAPLKALEFVLEQAKMPTELSGELSETQYLVAQFSDELAPHDDFWIALSQVIYDSFPGNSLAEDTVLNRKLHQFRYLISSQQAQYVRRYFKDVGMTDRDALVNYLSCLREPDNIAYYESARLHNKRRRNGEIFAFPDDEPVINSKLLISFHTEFIIDDKGNFLNEIDAEVITSNGIINGASFNYAFKNNTRHKELDVDPVKLDPKFRNDMTRGYRSPNLSRRKWFFFKEEDYDCSYFNKKGYYAFGRRSAKQSVDKQVKYLKKAVQKMRLN

SEQ ID NO: 10227 - protein, 564 aa, Streptococcus agalactiae
ATGATTAAGAAAAATAAAGTTTTTTTAGGAGTTCTTTTAGTCCTTGTTGTTATCCTTGGAGGTGGTGTATTATTTTACCAATCACAATTCCAAAAGACAACTAATCAAGCGTTAGCTATTGCTTATAAAGATGCTAAAGTGGCTAAGAAGGATGTCATACATCAAAAAATTGACAAAGAATTTGAAAACTTTAGAGGGAGCTACGAAATTGAGTTCAATACCAAAAGCGCAGAATACAGCTATCATGTAGATGCTAAGACTGGACAAATCCTTGAGCGGGACATGGATAATAATGGCTTTTCAAAATCGACTTCTCAGTCAAGTTCATCGTCAAGTCAAAAATCTCATAAAATAAGTCAAGAAGAAGCCAAAAAGATTGCATTTAAAGATGCTAATATAGAGGAATCAGAAGTCAGTAATCTTAAGATCAAAGAAGAAATTGAAAATGGAAAATCAGTTTATGATATTGACTTTGTGGACCTGAAAAATAAAAATGAAGTTGATTATCAAATTGATGCAGAAACTGGAAAAATCATTGAACGTTCTAGAGATCATATGAATGAT

SEQ ID NO: 10228 - protein, 188 aa, Streptococcus agalactiae; identical to SEQ ID NO: 5798

SEQ ID NO: 10229 - protein, 648 aa, Streptococcus agalactiae
ATGTCATCAGTCTTAACACTAACAAATATACTATTTCTCCTTCAAGGGTTCGGTTTAACCTTATATATATCTTTTATTTCCATTTTACTATCAATGTTTTTTGGAACTCTATTAGCAATTATGAGAAATAGCAAAAATCCTATCTGGAAATTAATAGCTAGTATCTATATCGAATTTGTCAGAAATGTTCCAAATCTACTTTGGATTTTTATCATTTTCTTAGTATTCCAGATGAAATCAGTCAGCGCTGGTATTACTTCGTTTACAATTTTTACCTCCGCTGCTTTAGCAGAAATTATTCGGGGAGGTTTAAATGGAGTCGATAAAGGACAGACAGAAGCCGGACTTTCTCAAGGATTCACTTATTTGCAAGTTTTCATTATTATTATTTTCCCACAAGCTTTTCGCAAAATGTTACCAGCCATTATTTCTCAGTTTGTAACGGTTATAAAAGATACATCACTACTTTATTCTGTTATAGCTATTCAAGAAATCTTCGGAAAAAGTCAAATTCTAATGGGAAGATATTTCGAAGCTGGACAAGTTTTTACACTCTACGCTATTATAACTGCTGTCTATTTTATTACAAACTTTATCATTTCAAGTTTTTCACGTAAACTTTCAAAACGTTGGGAGCAAGCTACTGAG

SEQ ID NO: 10230 - protein, 216 aa, Streptococcus agalactiae; identical to SEQ ID NO: 5800

SEQ ID NO: 10231 - protein, 693 aa, Streptococcus agalactiae
ATGACTTTATTAAACATCAGTCCTTTTGCCATTTCAAGGTGGGGCGCTTTCTTTAACCATTTTGACCTATTCTTTAAAGGCTTCTTATATACTCTAGGTATTTCGTTTGGTGCACTCCTACTTGCTCTGATATTAGGAATTCTCTCTGGTGGTTTATCAACTTCTAAAAGTAAAGTTGGTAAGTTGATATCACGTATCTATGTTGAAGTTTTTCAAAACACACCTCTTTTAGTTCAAATGGTTTTTGTCTACTATGGACTAGCAATCATTAGTAATGGACATGTTATGATTAGTGCTTTTTTCACCGCCGTTTTGTGCGTTGGCCTATACCATGGTGCCTATATTTCTGAAGTTATTCGCTCAGGAATTGAAGCTGTCCCTAAAGGACAAACAGAGGCTGCTTTAGCTCAAGGATTCACAGCTAATCAAACCATGCAATTTATCATTTTGCCTCAAGCTGTCAGAACAATTTTACCACCAATGACCAACCAAGTTGTTAACCTAATCAAGAATACCTCTACCGTAGCAATCATTTCTGGAGCCGATATCATGTTTGTAGCTAAGGCCTGGGCTTATGATACAACTAATTATATCCCAGCTTTTGCAGGAGCTGCTATCTTCTATTTTGTTATTTGTTTCCCACTAGCAAGCTGGGCAAGAAAACAAGAAGAATTAAATAAGAAAACTTATTCT

SEQ ID NO: 10232 - protein, 231 aa, Streptococcus agalactiae
MTLLNISPFAISRWGAFFNHFDLFFKGFLYTLGISFGALLLALILGILSGGLSTSKSKVGKLISRIYVEVFQNTPLLVQMVFVYYGLAIISNGHVMISAFFTAVLCVGLYHGAYISEVIRSGIEAVPKGQTEAALAQGFTANQTMQFIILPQAVRTILPPMTNQVVNLIKNTSTVAIISGADIMFVAKAWAYDTTNYIPAFAGAAIFYFVICFPLASWARKQEELNKKTYS

SEQ ID NO: 10233 - protein, 798 aa, Streptococcus agalactiae
ATGCTGAGACGAAAAAGATTAACGCTCTATCTATTATCCTGTATTTTCATTTTCCTGTTATTTTATCCCAACTCAACGTCAGCTAATCAATTATCAGAAATCAAAAAATCGGGTGTCCTTAAAGTTGGAGTCAAACAAGATGTGCCTAACTTTGGTTATTATAATGCTGAGACGAATCAATACGAAGGAATGGAAATTGATATTGCCAAAAAAATTGCCAAATCCTTAGGTGTCAAACCAGTTTTTGTACCGACAACTGCACAAACCAGAGAGCCTCTGATGGACAATGGGCAAATTGATATTCTAATCGCAACATACACTATCACGCCCGAAAGAAAAGCTAACTATAATATTTCTAAAGCTTATTATCACGATGAAATTGGATTTTTGGTGCGTAAAAATAGTCATATCAAAACTATAAAAGAATTGGATGGTAAACACATTGGTGTGGCTCAAGGTGCCACTACAAAAGGCAATTTAGAAAAATATGCTAAAGAACACAAGCTAAAATTTAGCTATGCTCAATTAGGGAGTTTCCCAGAATTAGCAATATCACTGTACGCTAATCGTATTGATGCTTTTTCAGTTGATAAATCTATCCTTAGCGGCTACCTTAGCCCTCATACAACCATATTAAAAGAAGGGTTCAATACGCAAGAATACGGTATTGCAACCAGTAAACAGGACAAAGTCTTGATTCCCTACGTTAATAAGTTACTGGTATCATGGGAAAAAGATGGTAGTTTAAAACACATTTATCAAAAATTTAAGCTTAAACCCGCTAAAGTAAAAAAAGAA

SEQ ID NO: 10234 - protein, 266 aa, Streptococcus agalactiae
MLRRKRLTLYLLSCIFIFLLFYPNSTSANQLSEIKKSGVLKVGVKQDVPNFGYYNAETNQYEGMEIDIAKKIAKSLGVKPVFVPTTAQTREPLMDNGQIDILIATYTITPERKANYNISKAYYHDEIGFLVRKNSHIKTIKELDGKHIGVAQGATTKGNLEKYAKEHKLKFSYAQLGSFPELAISLYANRIDAFSVDKSILSGYLSPHTTILKEGFNTQEYGIATSKQDKVLIPYVNKLLVSWEKDGSLKHIYQKFKLKPAKVKKE

SEQ ID NO: 10235 - protein, 753 aa, Streptococcus agalactiae
ATGTCACTCATATCTTATAAGAATGTTAACAAGTATTATGGAGATTATCACGCCCTTCGTCAGATTAATTTGGAAATAGAGCCAGGGCAAGTGGTTGTTCTATTAGGACCTTCTGGATCAGGTAAATCAACACTTATTAGAACAATGAACGCTCTCGAATCTATTGACGATGGTAGTTTGGTCGTGAATGGACATGAATTAGCAAATAGTTCATCTAAAGAATTGGTCAACCTCCGTAAAGAAGTTGGTATGGTTTTTCAACATTTTAACCTTTATCCCCACAAAACCGTGTTAGAAAATATTACATTAGCTCCTATTAAAGTATTAAAACAATCTAAAAAAGAAGCTATGGAAATTGCTGAAAAATATTTAAAATTTGTCAATATGTGGGAAAGAAAAGATTCCTACCCATCTATGCTATCGGGTGGTCAAAAACAAAGAATTGCTATTGCTAGAGGGCTTGCCATGCATCCAAAACTCCTCCTCTTTGATGAGCCTACCTCTGCCCTTGATCCCGAAACCATCGGAGACGTTCTTTCAGTGATGCAAAAATTGGCAAATGACGGAATGAATATGGTCGTTGTAACTCATGAAATGGGATTTGCACGAGAAGTTGCTGATCGTATTATTTTTATGGCTGATGGGGAAATTTTAGTGGATACTACGGATGTACAAGACTTTTTTGATAACCCCACAGAACCACGTGCCAAACAATTTTTAAGCAACATTATCAACCATACCAGTACTGACCTT

SEQ ID NO: 10236 - protein, 251 aa, Streptococcus agalactiae
MSLISYKNVNKYYGDYHALRQINLEIEPGQVVVLLGPSGSGKSTLIRTMNALESIDDGSLVVNGHELANSSSKELVNLRKEVGMVFQHFNLYPHKTVLENITLAPIKVLKQSKKEAMEIAEKYLKFVNMWERKDSYPSMLSGGQKQRIAIARGLAMHPKLLLFDEPTSALDPETIGDVLSVMQKLANDGMNMVVVTHEMGFAREVADRIIFMADGEILVDTTDVQDFFDNPTEPRAKQFLSNIINHTSTDL

SEQ ID NO: 10237 - protein, 708 aa, Streptococcus agalactiae
ATGAAAAAAATACTTATCGTTGATGATGAAAAACCAATTTCAGATATTATCAAATTTAATTTAACCAAAGAAGGATATGAGACGGCGACAGCTTTCGATGGCCGTGAAGCTTTAGTACAATATGCAGAATTTCAACCAGATTTAATCATTTTGGATTTAATGCTCCCTGAACTAGATGGTTTAGAAGTGGCTAAAGAAGTTCGTAAAACCAGCCATATTCCTATTATTATGCTTTCTGCAAAAGATAGTGAGTTTGACAAAGTCATTGGTTTAGAAATCGGTGCAGATGATTATGTTACTAAACCTTTTTCAAATCGTGAACTTTTGGCACGGGTCAAAGCACATTTACGACGTACTGAAAATATTGAAACAGCTGTAGCAGAAGAAAGTGCTCAAAATGCTTCTTCGGATATTACTATTGGTGAGTTGCAAATTTTACCAGACGCCTTTATTGCTAAGAAACGTGGCGAAGAAATTGAATTAACGCACCGAGAATTTGAATTACTTCACCATTTAGCGACACATATCGGACAAGTCATGACACGCGAACATTTATTGGAAACAGTTTGGGGATATGATTATTTTGGAGATGTCCGTACAGTTGATGTGACGGTGAGACGTTTACGTGAAAAGATTGAAGATACTCCTGGTCGTCCAGAATATATTTTGACTCGACGTGGTGTAGGTTATTACATGAAGTCTTATGAA

SEQ ID NO: 10238 - protein, 236 aa, Streptococcus agalactiae; identical to SEQ ID NO: 1364

SEQ ID NO: 10239 - protein, 1347 aa, Streptococcus agalactiae
ATGAATAATAGTGCTGCAAATATTAGGTCGTTTGAGCTAGCCTTACTTTTTTTACTAGTTTTTGTTGCTGTCTATTTTGTTTATCTAGCGGTTAGAGATTTTAAAATGTCTAAAAATATCCGGCTTTTGAATTGGAAAGTCAGAGATTTGATAGCAGGAAATTATTCAGATAGTATTCTAATTCAAGGTGATGCAGATTTGGTAGAATTAGGGGAAAGTCTAAATGATTTATCTGATGTCTTCCGAATGGCACATGATAACTTAGAACAAGAAAAGAATCGCTTAGCAAGTATCTTAACTTATATGACTGACGGTGTGCTGGCTACAGATCGTTCAGGAAAAATCGTTATGATTAATGAGACAGCCCAACAGCAGTTCAATCTAGCATATGATGAAGCTTTATCAATGAATATTGTTGATATGTTAGGGTCGGGAAGTCCATATTCGTTCCAAGATTTAGTCTCTAAAACGCCAGAGGTAGTTCTTAATAGACGTGATGAAAATGGTGAATTTGTTACCTTACGGATTCGATTTGCTTTGAACCGTCGTGAAAGTGGTTTTATTTCCGGTTTAGTTGCAGTATCACACGATGCTACTGAGCAAGAGAAAGAAGAGCGTGAAAGAAGACTTTTTGTATCTAATGTTTCTCATGAACTTCGTACACCTTTGACATCTGTAAAATCTTATTTAGAAGCTTTAGATGAGGGAGCGCTCAATGAAGAAGTTGCTCCAAGCTTCATTAAGGTATCTCTAGATGAAACAAATCGTATGATGCGTATGATATCAGATTTATTAAGTTTATCGCGCATTGATAATGAAGTAACGCATTTAGATGTTGAAATGACGAATTTTACAGCTTTCATGACCTCAATTTTGAATCGATTTGACCAGATTAGAAATCAAAAAACAGTCACAGGAAAAGTTTATGAAATTGTCAGAGATTATCCTCTTAAGTCAATTTGGGTGGAAATTGATACAGATAAAATGACTCAAGTGATTGATAACATTTTAAATAATGCAGTCAAGTATTCACCAGATGGTGGTAAGATTACAGTTAATCTACGCACAACTAAAACGCAGATGATTTTATCAATATCAGACCAAGGCTTAGGTATTCCCAAAAAAGATTTACCTCTCATCTTTGATCGTTTTTATCGTGTTGATAAGGCGAGAAGTCGTCAACAGGGTGGGACTGGACTTGGTTTGTCAATTGCAAAAGAAATTGTTAAGCAGCATAAGGGATTTATTTGGGCTAAGAGTGAGTATGGTAAAGGGTCTACTTTTACAATCGTCTTGCCTTATGATAAAGATGCTGTAACTTATGAAGAATGGGAGGACGTTGAAGAT

SEQ ID NO: 10240 - protein, 449 aa, Streptococcus agalactiae; identical to SEQ ID NO: 1366

SEQ ID NO: 10241 - protein, 807 aa, Streptococcus agalactiae
ATGTCAGAAATAGGATTTAAATATAGTATCTTAGCTTCAGGTTCAACTGGAAATTGTTTTTATATTGAGACACCCCAAAAACGTCTTTTAATCGATGCTGGTTTAACAGGCAAGAAAGTGACTAGCCTTCTTGCAGAAATTAATCGTAAGCCAGAAGATTTAGATGCTATACTAGTTACCCACGAACATTCTGACCACATTAAAGGTGTTGGCGTATTGGCTAGGAAATATCACCTTGATATTTATGCTAATGAGCAGACGTGGAAAGTTATGGATGAGCGTAACATGTTAGGCAAAGTTGATGTTAGTCAAAAGCATGTTTTTGGACGCGGTACAACCTTAACTTTCGGGGATTTAGATATTGAGAGCTTTGGTGTAAGTCATGATGCTGTGGATCCCCAATTTTACCGTATGATGAAAGATGATAAGAGCTTTGTGATGTTGACAGATACAGGATATGTTAGCGACCGAATGGCAAGCTTGATTGAGAATGCAGATGGTTATTTGATCGAGTCAAATCACGACATTGAGATTCTACGTTCGGGTTCTTATCCTTGGACACTTAAGCAACGTATTTTATCAGATAAAGGACATTTATCTAATGAAGATGGTTCAGAAACCATGATTCGCACTATAGGTAACCGTACTAAACACATCTATTTAGGACACTTGAGTAAGGAAAATAATATTAAGGAACTTGCTCACATGACTATGGAAAACAATTTAATGAGAGCTGACTTTGGTGTGGGCACAGATTTTTCTGTTCACGATACTTCCCCTGATTCAGCTACCCCACTGACGAGGATT

SEQ ID NO: 10242 - protein, 269 aa, Streptococcus agalactiae
MSEIGFKYSILASGSTGNCFYIETPQKRLLIDAGLTGKKVTSLLAEINRKPEDLDAILVTHEHSDHIKGVGVLARKYHLDIYANEQTWKVMDERNMLGKVDVSQKHVFGRGTTLTFGDLDIESFGVSHDAVDPQFYRMMKDDKSFVMLTDTGYVSDRMASLIENADGYLIESNHDIEILRSGSYPWTLKQRILSDKGHLSNEDGSETMIRTIGNRTKHIYLGHLSKENNIKELAHMTMENNLMRADFGVGTDFSVHDTSPDSATPLTRI

SEQ ID NO: 10243 - protein, 366 aa, Streptococcus agalactiae
TTGAAAAAGATTTTTTACATTAGTTTAGGATTTATTAGTTTAGGGATAGGCATTGCAGGTATTGTCTTGCCGGTAGTTCCAACGACTCCATTAGTATTGCTTTCAGCTTTTTGCTTTTCGAGAAGCTCTGAAAAATTTGATATTTGGTTGCGTCAAACTAAAGTTTATAAATACTACGCTGCAGATTTTGTTGAAAGCAGAAGTATTGCCCCAGCGCGTAAAAAGTCAATGATTTGGCAAATTTATATCTTGATGGGAATTTCAATCTATTTTGCTCCTCTAATGTGGCTCAAACTGGGATTATTGATTGGAACTATTGTAGGAACTTATGTGCTTTTTTATGTAGTACCTGATAAAATTGATGAA

SEQ ID NO: 10244 - protein, 122 aa, Streptococcus agalactiae; identical to SEQ ID NO: 1370

SEQ ID NO: 10245 - protein, 684 aa, Streptococcus agalactiae
ATGAAAGAATTAAGATCAAAGCTGGAAAAAGACTATGGTATTGTTTTTGCTAATCAAGAATTATTAGATACAGCTTTTACCCATACATCATACGCAAATGAGCATCGCCTCCTAAACATTTCACATAATGAACGTTTGGAATTTTTAGGAGACGCTGTTCTACAATTACTTATTTCACAGTATCTTTTTACAAAGTACCCTCAAAAGGCAGAAGGTGATTTATCAAAATTACGTTCAATGATTGTTCGTGAGGAAAGTCTTGCAGGTTTTTCACGTCTATGTGGCTTTGATCACTATATTAAACTTGGAAAAGGAGAAGAAAAATCTGGTGGACGTAATCGTGACACTATTTTAGGAGATTTATTTGAGGCTTTTTTAGGAGCTTTATTATTAGATAAAGGTGTTGAAGTGGTTCATGCCTTTGTTAACAAGGTAATGATCCCTCACGTTGAAAAAGGGACCTATGAGCGTGTTAAAGATTACAAGACAAGCTTGCAAGAATTACTTCAATCTCATGGGGATGTAAAAATAGATTATCAAGTTACTAATGAAAGTGGTCCAGCACATGCAAAGGAATTTGAGGTGACTGTATCTGTCAACCAAGAAAATTTGAGCCAAGGAATTGGACGATCAAAGAAAGCTGCTGAACAAGACGCTGCCAAAAATGCTTTAGCAACGTTACAA

SEQ ID NO: 10246 - protein, 228 aa, Streptococcus agalactiae; identical to SEQ ID NO: 1372

SEQ ID NO: 10247 - protein, 3357 aa, Streptococcus agalactiae
ATGCCAGACGTTATATTTGCTGGTACAGAAAATCGTAAGCCCCTTAATTATGCGCAAGTGAGTGTTACTTTAGATAATAGCGACCATTTTATCGAAAATATAGCTGACGAAGTTCGAGTTGAACGTCGTATTTTTCGAAACGGAGATAGTGAATATTTAATAGATGGACGCAAAGTTCGCTTACGTGATATTCATGATTTATTTATGGATACTGGATTAGGAAGAGATTCTTTTTCTATTATTTCCCAAGGACGCGTTGAAGCTATTTTTAATAGTAAACCAGAAGAGCGCCGTGCCATATTTGAAGAAGCCGCTGGTGTTCTGAAATACAAAACACGTAAGAAAGAAACACAATCCAAATTAGAACAAACTCAAGGGAACTTAGATCGCTTAGAGGATATTATTTATGAATTGGACATGCAAGTCCAACCATTAGAAAAACAAGCAAGTATTGCCAAGCGTTTTTTAGTATTAGATGAGGAACGACAAGGACTCCACTTATCTATTTTGATTGAAGATATTTTACAACATCAATCAGATTTAACTACTGTTGAGGAAAAGCTATTGACAGTAAGAAAAGAGTTAGCAACTTATTACCAACAACGTCAGTCCCTTGAAGATGAAAATCAATCGTTAAAACAGAAACGTCACCATTTATCTGAAGAAATTGAGGCTAAACAGTTAGCTCTTTTAGACGTTACAAAGTTAAAGTCAGATTTGGAACGCCAAATTGATCTGATTCGTTTAGAGTCAAACCAAAAGGCTGAAAAAAAAGAAGAGGCAGGTCAACGCTTAGCAGAGTTAGAAATTAAAGCTAAAGATTGTAGTGACCAGATTACCCAAAAAAATATAGAGTTAACTACTCTGTCGGAAAAAATAGCCCAAATAAGATCAGAAATTGTTAGTACAGAAAGTTCCTTGGAGCGTTTTTCAACTAATCCGGATCAGATTATTGAAAAACTTCGAGAAGACTTTGTTACCTTGATGCAAGAAGAAGCCGACACTTCAAACGCTTTAACAGCTTTACTAGCTGATATAGAGAATCAAAAACAAGCTTCTCAAGCTAAATCTCAAGAAATACAAGAAGTTAGCAAAAATTTAGAAGTATTAAAAAGTAACGCAAAGGTAGCATTGGAACGATTTGAGGCTGCAAAGAAGAATGTTCGTCAGTTATTATCTCACTACCAAGATTTAGGTCAAACCTTGCAAAATCTAGAAGGTGAGTATAAGAATCAGCAGTCAATTTTATTTGATCATTTAGATGAAATCAAATCAAAGCAAGCACGTATTTCGAGTTTAGAATCTATTTTGAAAAATCATAGTAATTTCTATGCTGGAGTGAAGTCAGTTCTACAGGCTAAGGACCAGCTTGGAGGTATCATAGGTGCTGTTAGTGAGCATCTTAGCTTTGACAAACATTACCAAACAGCATTGGAGATAGCTTTGGGAGGTAGCAGCCAACACATCATTGTTGAAGACGAGAGTGCTGCCAAACGTTCAATTGCTTTTTTAAAGAAAAACCGCCAAGGTAGAGCGACATTTCTGCCTTTAACTACAATAAAACCAAGAGAATTAGCACAACATTATCTCTCAAAATTACAAAGTTCTCAAGGGTTTTTAGGAATAGCTAGTGAATTGGTAACCTATGATCAACGCTTGTCAAACATTTTTAAAAATAACTTAGGGTTAACTGCTATTTTTGATACGGTTGATAATGCTAATGTAGCTGCGAGACAATTGAATTATCAAGTACGTTTAGTAACCTTAGATGGAACAGAGTTACGCCCTGGAGGGTCGTACTCAGGGGGAGCAAATCGTCAAAATAATACTGTTTTTATCAAGCCTGAATTGGATAATCTAAAAAAAGAATTGAAACAGGCACAAAGTAAACAATTAATTCAAGAAAAAGAAGTTGCCACATTGTTAGAGCAACTCAAAGAGAAACAAGAAACCTTAGCACAACTTAAGAATGATGGAGAACAAGCTCGTCTTGAGGAACAAAGAGCTGATATAGAGTATCAACAACTATCAGAAAAGCTTGCTGATTTAAATAAACTATATAATGGCTTGCAATTAAGCAGCGGGGCGTTGGAACAAACTACTTCTGAAAATGAAAAAAATCGTTTAGAAAAAGAACTTGAACAATTTGCTATTAAAAAAGAAGAGTTGACAACTTCAATTGCTCAAATTAAGGAAGATAAAGATTCAATTCAAGAAAAAGTCAATAATCTAACAACATTATTGTCAGAGGCACAGCTAGAAGAACGTGATTTGCTAAACGAGCAGAAATTTGAACGTGCCAACTGTACACGTCTAGAGATTACCTTGTCTGAAATAAAACGTGACATTAGTAATTTACAAACATTACTAAGCCATCAGGACAGTCAATTAGACAAAGAAGAGCTTCCACGTATAGAAAAACAGTTGCTACAAGTAAATAATAGAAGAGAAAATGACGAAGAAAAGCTTGTGAGTCTCCGTTTTGAATTGGAGGATTGTGAAGCTGCTTTAGATGATTTAGCTGCTTCTCTGGCTAAAGAGGGACAAAAAAATGAAAGTCTTATTCGTCAGCAAGCTCAATTAGAGTCACAATGTGAACAATTATCTCAACAATTGATGATATTCTCACGTCAATTATCAGAAGACTATCAGATGACATTGGATGAAGCGAAGGTAAAAGCAAATGTCTTGGAAGATATTTTGATGGCGCGTGAACAATTGAAATCTCTACAAGCTAAAATTAAAGCTTTAGGACCTGTTAATATTGATGCAATTGCTCAATTTGAAGAAGTTCATGAACGATTGACCTTCCTTAACACACAGCGAGACGACTTAGTTCATGCCAAAAATTTATTACTAGAGACGATTACAGATATGGATGATGAAGTTAAGACTCGTTTTAAATCGACATTTGAAGCCATTCGTCATAGTTTCAAAGAAACCTTTGTACAGATGTTTGGTGGAGGTTCTGCGGACCTTATTCTGACAGAAGGTGATTTATTATCAGCTGGGGTTGATATTTCGGTTCAACCTCCTGGTAAAAAAATCCAGTCTTTAAACTTGATGTCAGGTGGTGAAAAAGCATTATCAGCGTTAGCATTATTATTTGCCATTATCCGTGTTAAGACAATTCCATTTGTCATCTTGGATGAAGTTGAGGCCGCTTTAGATGAAGCAAATGTTAAGCGATTTGGCGATTATCTTAATCGATTTGATAAATCAAGTCAATTTATCGTTGTTACTCACCGAAAAGGGACTATGTCTGCTGCTGATAGTATCTATGGGGTAACGATGCAAGAATCAGGCGTTTCCAAAATTGTTTCTGTAAAATTAAAAGAAGCTCAAGAAATGACCAAT

SEQ ID NO: 10248 - protein, 1119 aa, Streptococcus agalactiae
MPDVIFAGTENRKPLNYAQVSVTLDNSDHFIENIADEVRVERRIFRNGDSEYLIDGRKVRLRDIHDLFMDTGLGRDSFSIISQGRVEAIFNSKPEERRAIFEEAAGVLKYKTRKKETQSKLEQTQGNLDRLEDIIYELDMQVQPLEKQASIAKRFLVLDEERQGLHLSILIEDILQHQSDLTTVEEKLLTVRKELATYYQQRQSLEDENQSLKQKRHHLSEEIEAKQLALLDVTKLKSDLERQIDLIRLESNQKAEKKEEAGQRLAELEIKAKDCSDQITQKNIELTTLSEKIAQIRSEIVSTESSLERFSTNPDQIIEKLREDFVTLMQEEADTSNALTALLADIENQKQASQAKSQEIQEVSKNLEVLKSNAKVALERFEAAKKNVRQLLSHYQDLGQTLQNLEGEYKNQQSILFDHLDEIKSKQARISSLESILKNHSNFYAGVKSVLQAKDQLGGIIGAVSEHLSFDKHYQTALEIALGGSSQHIIVEDESAAKRSIAFLKKNRQGRATFLPLTTIKPRELAQHYLSKLQSSQGFLGIASELVTYDQRLSNIFKNNLGLTAIFDTVDNANVAARQLNYQVRLVTLDGTELRPGGSYSGGANRQNNTVFIKPELDNLKKELKQAQSKQLIQEKEVATLLEQLKEKQETLAQLKNDGEQARLEEQRADIEYQQLSEKLADLNKLYNGLQLSSGALEQTTSENEKNRLEKELEQFAIKKEELTTSIAQIKEDKDSIQEKVNNLTTLLSEAQLEERDLLNEQKFERANCTRLEITLSEIKRDISNLQTLLSHQDSQLDKEELPRIEKQLLQVNNRRENDEEKLVSLRFELEDCEAALDDLAASLAKEGQKNESLIRQQAQLESQCEQLSQQLMIFSRQLSEDYQMTLDEAKVKANVLEDILMAREQLKSLQAKIKALGPVNIDAIAQFEEVHERLTFLNTQRDDLVHAKNLLLETITDMDDEVKTRFKSTFEAIRHSFKETFVQMFGGGSADLILTEGDLLSAGVDISVQPPGKKIQSLNLMSGGEKALSALALLFAIIRVKTIPFVILDEVEAALDEANVKRFGDYLNRFDKSSQFIVVTHRKGTMSAADSIYGVTMQESGVSKIVSVKLKEAQEMTN

SEQ ID NO: 10249 - protein, 795 aa, Streptococcus agalactiae
ATGATAAAATTAGTAGCAACCGATATGGACGGTACATTCTTAGATGAAAACGGTACCTATGATAAAAAACGTTTAGCAAATGTGCTAAAAAAATTTAAAGAACAAGGAATTGTCTTTACGGCAGCAAGTGGGCGTTCCTTATTATCACTTGAACAATTATTTGCTGACTTTCGTGATCAGATGGCTTTTATAGCAGAAAACGGAAGTGCAGCAGTCTTATTTAATCGCTTGGCATATGAACAGCACTTGAGTCGAGAACAATACTTAGATATTATTGACCATTTGAGTAAGAGCCCTTATATGGAGAATAATGAATATGTCTTATCTGGCAAGGATGGTGCATATATTCTAAGTGATGCCAATCCAGATTATATTGAATTCATCACTCATTATTATGATAATTTGCAAAAAGTTTCTCACTTTGAAGATGTTGATGATATTATTTTCAAAGTAACGGCTAACTTTACTGAAGAGACTGTTAGACAAGCTGAGGAGTGGGTAAATCAAGCTATACCGTATACCACAGCAGTGACAACAGGTTTTAAATCCATTGATATTATTCTAAGCTCAGTTAATAAACGAAATGGTTTAGAGCACCTCTGTGAACAATACGGTATTAGAGCAGAAGAAGTCTTATCTTTTGGTGACAATATTAATGATTTAGAAATGCTAGAGTGGTCAGGAAAAGCTATCGCAACAGAAAATGCTAGACCAGAAGTTAAAGAGATAGCAGATTGTATTATAGGTCATCACAATAATCAAGCTGTAATGGCTTATTTAGAAAGTATGGTGGAT

SEQ ID NO: 10250 - protein, 265 aa, Streptococcus agalactiae
MIKLVATDMDGTFLDENGTYDKKRLANVLKKFKEQGIVFTAASGRSLLSLEQLFADFRDQMAFIAENGSAAVLFNRLAYEQHLSREQYLDIIDHLSKSPYMENNEYVLSGKDGAYILSDANPDYIEFITHYYDNLQKVSHFEDVDDIIFKVTANFTEETVRQAEEWVNQAIPYTTAVTTGFKSIDIILSSVNKRNGLEHLCEQYGIRAEEVLSFGDNINDLEMLEWSGKAIATENARPEVKEIADCIIGHHNNQAVMAYLESMVD

SEQ ID NO: 10251 - protein, 822 aa, Streptococcus agalactiae
ATGTCGGATATTAAAATACTTGCCTTAGATTTAGATGGCACTTTATTTACAACAGATAAGAAAGTTTCAGAAGAAAATAAAGTGGCCTTAAAAGCAGCTAGAGAAAAAGGTATAAAAGTTGTTATTACAACAGGGCGTCCTTTAAAAGCAATTGGTAATTTGTTAGAGGACCTAGAGTTAGTATCTGATGAAGATTACAGCATTACTTTTAACGGTGGTTTAGTTCAACAAAATACAGGGAAAATCTTAGCTAAAACTGCAATGACACGACAAGAAGTGGAAGATATCCATGAGGAGTTGTATCAAGTGGGTTTGCCAACAGATATCTTAAGTGAGGGAACGGTATATAGTATCGCTAACAAGGGACACCATTCTCAATATCATTTAGCCAACCCGCTCTTAGAATTTATAGAAGTTGATGATTTAGAGCAAGTGCCAAAGGATGTAGTTTATAATAAAATTGTTAGTGTTATTGATGCTACATATCTTGATCAACAAATTGCTAAACTTCCTGATAGACTTAAAGTTGACTATGAAATGTTTAAATCACGTGATATCATTTTAGAATTGATGCCTAAAGGTGTTCATAAAGCAGTCGGCTTAGAACTACTGACAAAACACCTTGGGTTAGATAGTAGTCAAGTTATGGCAATGGGAGATGAAGCAAATGATTTATCAATGCTAGAGTGGGCAGGCTTAGGAGTTGCAATGGCTAATGGTATTCCAGAAGCTAAGGCAATAGCAAAAGCGACAACTATTTGTAATAACGATGAGTCTGGAGTCGCCGAAGCAATTGGGAAATATATTTTAAGTGAGGAAAAT

SEQ ID NO: 10252 - protein, 274 aa, Streptococcus agalactiae; identical to SEQ ID NO: 1380

SEQ ID NO: 10253 - protein, 1608 aa, Streptococcus agalactiae
ATGGGATTATTTGACCGCCTATTTGGACATAAGAAAAAAGATAAAGAACCAGAAATTGAAGCATCAGAATCTGTTGTTTTAGAAGATGAAGATTCAGTTATTGATAAAGAGGAGGGCAGCAACTTTTCGAAGGAGTCAACTTTGAATCGAACCTCTGAAGTCCCTGTTGCAGAAGATGATTCTTTCTTAGAATTAGAAAGAGATACAGCATTGTCAGAATCACATCAACCAGTTACCTCTGAAATTCATCCTTTAGAGTCAGAAGATACCGATGAAATTCCTGTAAAAGAAGACGATAGTTTTTTAGAACTAGAAGATAGGGCTAAGACAAAGGTAGCAGATACTTCTGAGGTAGAAAATGTAGTTCCTGATTCCACGACTCTTTCTGACAATGTTTCTGCTAAATCTGAGGCATCTTTTAGTGATAAGGAGCAATTAAGTGATAGTCAGGCTTCAGATCAGTTTTCAGAAACTCCCCTTCAAGAAGAGATGTCTAGTGGAAAAACTGAGGTACAAACAGAGTCAGAGGATACATCTGCGGCTGATGCTTTTTTAGCAGATTACTATGCTAAACGTAAAGCAATTGAGAAAGAAATCTCGTCTAATTCGCTGTCAACAGATGAGTCAGAATTTTCTGAGGCACAGGAAGTTTTATCGCAATCACAGGCAGACACTATAAAAGCTGAGAGTCAAGAGGAAAAATATAATCGTAGCCTGAAAAAAACACGCACAGGTTTTAGTGCACGCCTTAATGCTTTCCTTTCTAACTTCCGTCGTGTTGACGAAGAGTTCTTTGAAGAATTAGAAGAAATGTTAATCTTATCTGACGTTGGGGTAAATGTTGCAACACAGTTAACCGAAGATCTTCGTTATGAAGCAAAATTAGAGAATGCCAAGAAATCAGAGGATTTAAAACGTGTTATCGTTGAAAAATTAGTTGAAATCTACGAAAAAGATGGTATTTATAATGAGGCTATCAATTTCCAAGAAGGTTTAACCGTAATGCTTTTTGTAGGTGTTAATGGTGTTGGAAAAACGACATCTATAGGTAAGTTAGCTCATCAATACAAGTCTCAAGGGAAAAAAGTTATGTTAGTAGCAGCTGATACTTTCCGTGCAGGTGCTGTGGCTCAACTAGTAGAATGGGGACGCCGTGTTGATGTACCAGTTGTCACTGGAGAAGAAAAAGCAGATCCGGCTAGCGTTGTCTTTGATGGCATGGAAAAAGCCGTTGCTCAAGGCGTTGATGTCTTGTTAATTGATACAGCAGGACGTCTGCAAAATAAAGAAAACCTTATGGCAGAGTTGGAAAAAATTGGACGTATTATTAAGCGTGTCGTACCTGATGCTCCCCACGAAACTTTGCTTGCTTTAGATGCATCTACAGGACAAAATGCTTTAAGTCAAGCTAAAGAGTTCTCGAAAATTACACCATTAACTGGCCTTATTCTGACTAAAATTGATGGTACTGCTAAGGGTGGTGTGGTACTGGCTATTCGTCAAGAACTAGATATTCCTGTTAAATTCATTGGTTTCGGCGAAAAAATCGATGATATTGGTGAATTTAATTCAGAAGATTTCATGCGTGGCCTTCTGGAAGGAATTTTA

SEQ ID NO: 10254 - protein, 536 aa, Streptococcus agalactiae; identical to SEQ ID NO: 1382

SEQ ID NO: 10255 - protein, 810 aa, Streptococcus agalactiae
ATGATTCGATTTCTTATTCTTGCTGGTTATTTTGAATTAAGCATGTATTTAAAGTTATCAGGTAAACTAAATCAGTATATTAATACTCATTATACCTATTTGGCCTATATTTCAATGGTCCTATCTTTTATTTTAGCAATTGTACAGCTAATTATTTGGGTTAAAAATATGAAAATGCATAGTCACCTACATGGTAAAATAGCTAAATCAACAAGCCCAATGATTTTAGTATTTCCCGTTTTAGTAGGTTTGTTAGTACCTACAGTTAGTTTAGACTCAACCACAGTCTCTGCCAAGGGATATAATTTCCCTCTAGCAGCCGGCTCTACTGGTACTGTAAGTCAAGATGGGACACGCGTTCAATATTTGAAACCAGATACCAGCACTTATTTTACTTCTTCAGCCTATGAAAAAGAAATGCAAAAAGAGCTTAAAAAATATAAAGGCTCTGGTACATTAACCATCACAACTGAAAATTACATGGAAGTTATGGAACTAATTTATCTCTATCCCGAGCAATTCATGGATCGCCAAATACAATATACTGGGTTTGTTTATAACGAACCCAAACACGAAGGATATCAATTTATTTTCCGCTTTGGAATCATTCATTGTATTGCCGATTCAGGAGTTTATGGTCTACTAACGACTGGAAATCAAAAAAGTTATCCGGACAATACTTGGGTAACTGTTAGAGGTACAATTAAATCCGAGTATAATCAATTGTTACAACAAAACTTACCAGTCTTACACATTGAAGAGTCTCGTCAAGTTTCTAAACCTAATAATCCTTATGTTTATCGTGTCTTT

SEQ ID NO: 10256 - protein, 270 aa, Streptococcus agalactiae; identical to SEQ ID NO: 5828

SEQ ID NO: 10257 - protein, 900 aa, Streptococcus agalactiae
ATGGATATCTTTAATCAATTACCGGATAGTGTCCTTCAATGGTTTGCCATTTTCATTTCCATTATTATTGAGGCACTTCCTTTTGTTTTGCTTGGAACTATTTTATCAGGAATTATTGAAGTCTTTATAACACCTGATATAGTCAATAAGTTCTTACCGAAAAATAAATTTCTCAGAGTCTTATTTGGAACCTTCGTTGGCTTTGTCTTTCCTTCTTGCGAATGTGGTATCATTCCTATTATTAATCGATTCCTTGAAAAGAAAGTGCCTTCATACACGGCAGTTCCGTTTCTTGCTACTGCCCCTATTATTAATCCTATTGTTTTATTTGCGACCTACTCAGCATTTGGAAATTCCATACGCTTCCTGATATTACGCTTTGTAGGTGCTACCATTGTAGCCATTGCTTTAGGAGTCATGCTTGCCTTTTTAGTAGATGATAATATTCTAAAAGAAGACGCTAAACCTACTCATTTTCATGATTATTCTGATAAGAAGTGGTATCAAAAAATCTTTCTAGCCTTAGCTCATGCCATCGATGAATTTTTTGATACAGGACGCTATCTAGTATTTGGTACTTTAATTGCTTCAGCTATGCAAATTTATTTACCAACTCGAGTTCTTACTACTATCGGACATAGCCCTATCACAGCCATCTTAGTTATGATGTTGCTTGCTTTCATCTTGTCATTGTGTAGTGAAGCTGACGCTTTTATAGGTGCTTCTTTATTATCAACCTTTGGAATCGCGCCAGTGATGGCTTTCCTTTTAATTGGACCCATGATTGATATTAAGAATTTAATGATGATGGTAAATTCTTTTAAAACAAGGTTTATTGTCCAATTCATTAGTGTATCTTCTCTTATTATTATTATCTATTGTTTATTTGTGGGGGTAATA

SEQ ID NO: 10258 - protein, 300 aa, Streptococcus agalactiae; identical to SEQ ID NO: 1386

SEQ ID NO: 10259 - protein, 126 aa, Streptococcus agalactiae; identical to SEQ ID NO: 5831

SEQ ID NO: 10260 - protein, 42 aa, Streptococcus agalactiae; identical to SEQ ID NO: 1388

SEQ ID NO: 10261 - protein, 1041 aa, Streptococcus agalactiae
ATGATTGAATTAGGTATTACAACATTCGGAGAGACAACAATCCTTGAAGAAACAAACCAAAGCTATTCACATCCTGAGAGGATTCGCCAATTAGTTGCTGAGATTGAACTAGCTGATCAAGTTGGTTTAGATGTATATGGTATTGGAGAGCACCATCGTGAAGATTTTGCGGTCTCTGCACCCGAAATTGTCCTAGCAGCAGGAGCGGTTAGAACTAATAATATCCGTTTATCTAGTGCAGTAACGATTCTCTCTTCCAATGATCCTATTCGCGTCTACCAGCAATTTTCAACGATTGACGCACTTTCAAATGGTAGAGCAGAAATTATGGCAGGGCGTGGTTCCTTTATTGAGTCTTTTCCATTGTTTGGATACGATTTAGCGGATTATGATGATTTATTTAATGAAAAAATGGATATGTTGTTAGCAATTAACTCAGCGACAAATCTCGATTGGAAAGGTCATTTGACACAAACAGTTAATGAGCGACCAATTTATCCAAGAGCATTACAGAGACAGTTACCAATATGGGTGGCAACAGGAGGAAATGTTGATTCTACAATTCGTATTGCAGAACAAGGTTTGCCAATTGTTTATGCAACTATTGGTGGGAATCCCAAAGCATTTCGTCAATTGGTCCATATTTATAAAGAAGTTGGTAGTCGTAATGGACACAAACCAGAACAACTAAAAGTTGCTGCTCACTCTTGGGGATGGATTGAAGAGGATAATCAAACCGCTATTGACCGTTATTTTTTCCCTACGAAACAGACCGTCGATAATATTGCTAAGGGACGCCCTCATTGGTCTGAAATGACCAAAGAGCAGTATTTACGTTCAGTAGGTCCAGAAGGTGCTATTTTTGTAGGAAGTCCTGAAGTGGTTGCACATAAAATTATAGGACTTGTTGAAGCACTTGAGTTAGACCGTTTTATGTTACATCTACCAGTTGGCTCTATGCCTCACAAAGACGTCCTAAATGCTATCAAACTTTATGGTAAGGAAGTAGCACCAATTGTTCGAAAATATTTTGAAAAGAAT

SEQ ID NO: 10262 - protein, 347 aa, Streptococcus agalactiae; identical to SEQ ID NO: 1390

SEQ ID NO: 10263 - protein, 2241 aa, Streptococcus agalactiae
TTGTTAGATTATAAAAACGCTATCTTGAAATCGCTTTTTAAAACTCTTCGTAAGTCAAAAATATGCTATAATAAAAGCGTTATGGAAAATTTAAATATTACACAAATTGCTATTGATTTAGGTATTAAAGCGTCACAAATCGAAAAGGTTTTAGAATTAACAGATGAAGGAAATACTATTCCTTTTATTGCCCGTTATCGTAAAGAAATGACAGGTAATTTGGATGAAGTTCAAATCAAATCAATTATTGACCTTGATAAGAGTATGACAGCTCTTTCAGATCGTAAAACTACGGTCTTAGCCAAAATTGAAGAACAAGGAAAGTTGACTCAAGAACTCAAAAAGGCTATTGAAGAAGCAACTAAACTAGCAGATGTTGAGGAACTCTACCTACCTTATAAAGAAAAACGTCGTACGAAAGCTACGATTGCACGTGAAGCAGGTCTTTTTCCTTTAGCACGTCTTATTTTACAAAATAAGGATAACCTTGAGGAAGAAGCTCAAAACTATCTTACAGATGGTTTTGAGACAACTACGAAGGCACTTTCTGGAGCAGTAGATATTCTTATCGAAGCTTTTTCTGAGGATAATAAATTACGTTCATGGACATATAATGAGATCTGGAACTACAGCTCAATCACTGCAGTTGTTAAAGATGAGTCACTTGATGAAAAACAGGTCTTCAAAATCTACTATGACTTTTCTGAAAAAATAAGTAAACTCCATGGCTATCAAGTTTTAGCATTGAATCGTGGTGAGAAAATGGGTGTTCTTAAGGTTAATTTTGAGCATAACCTTGAAAAAATGTTTCGCTTTTTTGCTGTTCGATTTAAAGAAACTAGCCAATATATAGATGACCTTATTGTACAGACTGTCAAGAAAAAAATCGTTCCAGCTATGGAACGCCGTATCCGTACAGAACTAAGTGAAGGAGCAGAAGATGGTGCAATTTCACTGTTTTCAGAGAATCTTCGTAACTTATTGTTAGTCTCACCGCTTAAGGGGAAAATGGTGTTAGGTTTTGACCCTGCCTTTCGTACAGGAGCAAAATTAGCAGTAGTAGACCAAACTGGAAAATTAATGACAACACAAGTGATTTATCCAGTTCCTCCAGCTAATCAAGCAAAAATCGAACAATCAAAAATAGAGTTAGCAAAACTTATCAAAGAATTCAATATAGAAATTATTGCTATAGGGAATGGAACAGCGAGTCGTGAATCAGAAGCATTTGTTGCAGAAGTTTTACAAGATTTTCCAGACGTATCCTATGTGATTGTTAACGAAAGTGGTGCCTCTGTTTATTCAGCCTCAGAATTGGCACGTCATGAATTTCCAGACTTAACGGTTGAAAAACGTTCGGCCATCTCAATTGCAAGACGTCTGCAAGACCCATTAGCAGAACTAGTCAAAATTGATCCAAAATCTATTGGTGTGGGTCAATATCAACATGATGTTAGCCAAAAAAAATTAGCAGAAAATCTTGATTTTGTTGTTGAAACTGTAGTTAACCAAGTAGGTGTTAATGTTAATACAGCAAGTCCAGCCTTGTTAGCTCATGTTTCAGGTTTAAATAAAACAATATCTGAAAATATTGTTAAATATCGTGAAGAGAATGGGCAAATTAAGTCACGTGCTGAAATTAAGAAAGTGCCCAGATTAGGAGCAAAAGCTTTTGAGCAAGCTGCTGGATTCTTACGTATTCCTAATGCTAAAAATTTCTTGGATAATACAGGTGTTCACCCTGAGTCTTATGAAGCTGTTAAAAAGTTGCTTGACCAACTGACTATCAAAGAATTAGATGATCTTGCTAAAGAGAAGTTACAAAACCTTGACTTAATTGCAACAGCAGAAAGTATTGGGGTAGGTCAAGAAACATTAAAAGACATTATAGAAGATCTTTTGAAACCAGGTCGTGATTTGCGTGATGATTTTGAAGCGCCTGTTTTGAGACATGATGTTTTAGATGTCAGTGATTTAAAAGTTGGACAGGAATTGCAAGGAACTGTTCGAAACGTCGTTGATTTTGGTGCTTTTGTTGATATTGGTGTTCATGAAGATGGTCTAATCCACCAGTCTCGCCTTATTAAGCGAAAACGCGATAAAAAAACTAGAAAAATGCCTCCTTTACAACATCCAAGCAAATATCTCTCTGTTGGTGATATTGTAACTGTTTGGGTTGTAGAGGTAGATGCGGAGCGTAGCAGAATTGGACTTAGTCTTATCAAGCCAGACGGACTTGAC

SEQ ID NO: 10264 - protein, 747 aa, Streptococcus agalactiae; identical to SEQ ID NO: 1392

SEQ ID NO: 10265 - protein, 456 aa, Streptococcus agalactiae
TTGGACTTAGTCTTATCAAGCCAGACGGACTTGACTAATTATGTTAAGAAGGTGTCTATAGAAGATTTTGGATGTCAGTTTTTACATACTGCACATTGGAATAATCGCTTAAGAACAACTGGAGGACGCTTCTTTCCAAACGATAGACACCTTGACTTTAATCCCAAAATTTATCGTGAGTTTGGTATTGATATTTTTCGTAAGATTGTAAGACATGAGCTTTGCCATTATCATCTCTATATACAAGGTAAAGGATATCAACATAGGGATAAAGCTTTTAAAGAGTTACTAGAAAAAGTCGATGGCTTACGATATACCCCTAGAGTTACGGCTGTTAAAGTGAATTATCATCATTACTCTTGCCAATCTTGCGGTCAAGTATACCGACGTAGGAGACGTGTTAATTTACGCAAGTTTGCTTGTGGTTATTGTCATGGTCGCTTGATAGAGAGTTTT

SEQ ID NO: 10266 - protein, 152 aa, Streptococcus agalactiae; identical to SEQ ID NO: 5838

SEQ ID NO: 10267 - protein, 261 aa, Streptococcus agalactiae; identical to SEQ ID NO: 5839

SEQ ID NO: 10268 - protein, 87 aa, Streptococcus agalactiae; identical to SEQ ID NO: 5840

SEQ ID NO: 10269 - protein, 132 aa, Streptococcus agalactiae
ATGATGACGGTTGGTTCTGGTAATTCATATAAAGGAGATTTGCTAGATGAATCTCCTTTTTTCTTAGCTTTATTTAGACCACTTTTTCAAAATATCTTCTTTTTTTCAGAAAAACGCGTTAGCGCTTACTTT

SEQ ID NO: 10270 - protein, 44 aa, Streptococcus agalactiae
MMTVGSGNSYKGDLLDESPFFLALFRPLFQNIFFFSEKRVSAYF

SEQ ID NO: 10271 - protein, 933 aa, Streptococcus agalactiae
ATGGCAGTTACTGTTCAAATGTTAGTTGACCGCTTAAAGTTAAATGTCATCTATGGTGATGAACATCTATTATCTAAGCGGATTACAACAGCTGACATTTCACGTCCTGGTCTAGAAATGACAGGGTATTTTGATTATTATGCACCAGAGCGTTTGCAACTTGTTGGTATGAAAGAGTGGTCATATTTAATGGCTATGACAGGACATAATCGTTATCAAGTGTTACGTGAAATGTTCCAAAAAGAAACACCAGCTATTGTTGTAGCACGTGATTTAGAAATTCCAGAAGAGATGTATGAGGCGGCTAAAGATACCGGTATTGCTATTCTTCAAAGTAAGGCCCCTACAAGTCGTTTATCAGGTGAAGTTTCTTGGTATTTAGATTCTTGCTTAGCTGAGAGGACAAGTGTTCATGGTGTCTTGATGGATATCTATGGTATGGGTGTTCTGATTCAAGGTGATTCCGGTATTGGTAAGAGTGAGACAGGACTAGAGCTAGTTAAGCGAGGACATCGTTTGGTAGCAGATGATCGTGTTGATGTTTATGCTAAAGACGAAGAGACGCTTTGGGGAGAGCCTGCTGAGATATTACGTCATTTACTTGAAATTAGAGGTGTGGGAATCATTGATATTATGAGCCTATATGGAGCTAGTGCGGTTAAAGATTCATCGCAAGTGCAATTAGCTATATACCTTGAAAACTTTGAAACTGGAAAAGTTTTTGATAGACTCGGGAATGGCAATGAAGAGATCGAATTATCTGGAGTTAAGGTTCCTCGGATACGTATTCCTGTTAAAACAGGCCGAAACGTGTCAGTAGTTATTGAAGCAGCGGCTATGAATCACAGAGCTAAACAAATGGGGTTTGATGCTACCCAGACTTTTGAGGATCGTTTAACACATTTGATTAGTCAGAACGAGGTCAATGATGAT

SEQ ID NO: 10272 - protein, 311 aa, Streptococcus agalactiae; identical to SEQ ID NO: 1396

SEQ ID NO: 10273 - protein, 771 aa, Streptococcus agalactiae
ATGATTAATCCAGTAGCAATACGATTAGGCCCCTTTTCTATTCGCTGGTATGCTATTTGCATAGTGTCTGGTATGTTGTTAGCAGTTTACTTAGCAATGAAAGAGGCCCCTCGTAAGAACATTAAGTCGGATGATATTCTAGATTTCATTCTCATGGCTTTTCCACTATCCATTGTTGGAGCTCGTATTTATTATGTTATCTTCGAATGGGCTTATTACTCTAAGCACCCAGTAGAGATTATCGCCATCTGGAATGGCGGTATTGCTATTTACGGAGGGTTAATTACCGGGGCCATTCTCCTTGTGATTTTTTCATATCGTCGCTTGATTAATCCCATTGATTTTCTGGATATTGCTGCTCCAGGAGTGATGATTGCCCAAGCCATAGGTAGGTGGGGGAATTTTATTAATCAAGAAGCATACGGTAGGGCAGTAAAAAATCTGAATTACGTACCAAACTTTATAAAAAATCAAATGTATATTGATGGAGCTTACCGAGTACCTACATTTTTATATGAGTCTCTTTGGAACTTCCTAGGTTTTGTCATCATCATGTCTATTCGTCATCGACCGCGCACTTTAAAACAAGGTGAAGTGGCATGTTTTTATTTAGTTTGGTATGGATGTGGACGGTTCATTATTGAAGGGATGAGGACAGATAGCCTTTATTTGGCGGGTTTGCGCGTGTCACAATGGTTATCAGTTATTTTAGTTATTATCGGAATTGTCATGATTATTTATCGTCGTCGTGAACAACATATTTCATATTAT

SEQ ID NO: 10274 - protein, 257 aa, Streptococcus agalactiae
MINPVAIRLGPFSIRWYAICIVSGMLLAVYLAMKEAPRKNIKSDDILDFILMAFPLSIVGARIYYVIFEWAYYSKHPVEIIAIWNGGIAIYGGLITGAILLVIFSYRRLINPIDFLDIAAPGVMIAQAIGRWGNFINQEAYGRAVKNLNYVPNFIKNQMYIDGAYRVPTFLYESLWNFLGFVIIMSIRHRPRTLKQGEVACFYLVWYGCGRFIIEGMRTDSLYLAGLRVSQWLSVILVIIGIVMIIYRRREQHISYY

SEQ ID NO: 10275 - protein, 396 aa, Streptococcus agalactiae
ATGATAGAAATTGCTGTATTAATTATTGCCATTGCGTTTGTTGTTTTAGTTTTAGGAATACTTTTCGTTCTGAAAAAAGTATCAGAAACGATTGAGGAAACCAAGCAAACTATTAAAGTATTAACAAGCGATGTTAACGTGACTCTTTACCAAACTAATGAAATTTTAGCCAAAGCTAATGTTTTAGTTGATGATGTTAATGGTAAAGTATCTACTATTGATCCTCTTTTTGTAGCTATTGCTGACTTATCAGAATCTGTATCTGATTTAAACCTACAGGCAAGACATATTGGACAAAAGGCAAGTAGTGCAACCTCAAGTGTTACTAAGGCAGGTTCAGCTTTAGCTATTGGAAAAGCGGCTTCAAAAATTTTTCGTAAAAAAGGAGACAAAAAA

SEQ ID NO: 10276 - protein, 132 aa, Streptococcus agalactiae; identical to SEQ ID NO: 5848

SEQ ID NO: 10277 - protein, 429 aa, Streptococcus agalactiae
ATGAGTAAATTATTTAAAACTTTAGTTATCAGTGCTGCATCAGGTGCAGCAGCAGCTTATTTTTTAACAACAAAAAAAGGAAAAGAGCTAAGGAAAAATGCAGAAAAATTCTATGGAGAATATAAAGAAAATCCAGAAGAATATCATCAAATAGCTAAAGATAAAGCAAGTGAATATTCAAATTTAGCTGTTGATACTTTTAAAGATTATAAAGGTAAATTTGAATCAGGTGAATTGACAACAGAGGATATCGTCTCAGCCGTTAAGGAAAAAAGCGGAGAAGTAGTTGACTTTGCTAATGATTTTGTCAATCAAGCTAAATCAAAATTCTCAGACGAGGATACTGCTAAAAAAGAAGATAAGGCTCCTGAAACAAAAGTAGAAGATATTGTCATTGATTATAAAGAAAACACAGAAGATAAAGAAAAA

SEQ ID NO: 10278 - protein, 143 aa, Streptococcus agalactiae; identical to SEQ ID NO: 1402

SEQ ID NO: 10279 - protein, 273 aa, Streptococcus agalactiae; identical to SEQ ID NO: 5851

SEQ ID NO: 10280 - protein, 91 aa, Streptococcus agalactiae; identical to SEQ ID NO: 5852

SEQ ID NO: 10281 - protein, 909 aa, Streptococcus agalactiae
TTGACAGCGACAGCTGAATCTATTGAACAAGTAAAGCAATTGCTAGCAATAGGAATTGACCGCATCTATGTAGGGGAAGAAAATTACGGTCTTCGTTTACCACATTCATTTTCAGACGATGAATTGCGTGAAATCGCTAAATTAGTACATGATGCTGGTAAAGAATTGACAGTAGCTTGTAATGCACTCATGCATCAAGAGATGATGGATAATATCAAACCATTTTTGGAGTTGATGAAAGAAATTAATGTGGATTATTTGGTAGTTGGTGATGCAGGAGTATTTTATATCAACAAGCGTGATGGTTATAACTTCAAACTTATCTACGACACTTCTGTCTTCGTTACATCAAGTCGTCAAGTTAATTTTTGGGGACAACATGGAGCAGTAGAAACGGTTTTAGCACGTGAAATACCTTCTGAAGAACTTTTTAAGATGTCTGAGAATCTTGAATTTCCTGCTGAGATTTTAGTTTATGGGGCTTCTGTAATTCATCACTCTAAGCGTCCGTTATTGCAAAACTATTATAATTTTACTCATATCACTGATGAAAAAACACGTGAGCGTGGTCTTTTTTTAGCAGAACCAGGTGATCCAGAAAGTCACTATTCTATTTACGAAGATAAGCATGGGACTCATATTTTTATTAACAATGATATCAATATGATGACTAAAGTGACTGAACTAGTTGAACATCACTTTACTCACTGGAAATTAGATGGTATTTATTGTCCAGGAGATAATTTTGTTGCTATTGCTGAAATTTTTGTCGAAACAGCTCGTTTGATTGAAAATGGAACATTCACTCAGGCTCAGGCTTTCTTGTTTGATGAACGAATTAGAAAACTGCACCCTAAAGGACGTGGTTTAGATACTGGATTTTATGATTTTGACCCATCAACAGTAAAA

SEQ ID NO: 10282 - protein, 303 aa, Streptococcus agalactiae
MTATAESIEQVKQLLAIGIDRIYVGEENYGLRLPHSFSDDELREIAKLVHDAGKELTVACNALMHQEMMDNIKPFLELMKEINVDYLVVGDAGVFYINKRDGYNFKLIYDTSVFVTSSRQVNFWGQHGAVETVLAREIPSEELFKMSENLEFPAEILVYGASVIHHSKRPLLQNYYNFTHITDEKTRERGLFLAEPGDPESHYSIYEDKHGTHIFINNDINMMTKVTELVEHHFTHWKLDGIYCPGDNFVAIAEIFVETARLIENGTFTQAQAFLFDERIRKLHPKGRGLDTGFYDFDPSTVK

SEQ ID NO: 10283 - protein, 1284 aa, Streptococcus agalactiae
ATGTCTAATGTAAAAAAACGCCCTGAGGTTTTATCACCTGCAGGAACACTAGAAAAATTAAAAGTTGCTATTGATTATGGAGCAGATGCTGTATTTGTTGGAGGTCAAGCGTATGGTCTTCGAAGTAGAGCTGGTAACTTTTCTATGGAAGAGTTACAAGAGGGAATAAACTATGCTCATGCAAGAGATGCTAAAGTTTATGTAGCGGCTAATATGGTTACTCATGAAGGTAATGAGCTTGGGGCAGGTCCGTGGTTTCGTGAATTACGTGATATGGGACTAGATGCAGTCATTGTTTCAGATCCTGCTCTTATTGTTATTTGTGCTACAGAAGCACCAGGCTTAGAAATTCATTTGTCAACTCAAGCCTCTTCCACGAACTATGAAACTTTTGAATTTTGGAAAGAGATGGGGCTTACTCGTGTCGTATTAGCACGTGAGGTTACTATGGCAGAGTTGGCTGAAATCAGGAAGAGGACAGATGTTGAGATAGAAGCATTTGTTCATGGCGCGATGTGTATTTCATACTCAGGACGATGTGTTCTATCAAACCATATGAGCCATCGTGATGCTAATCGTGGCGGTTGCTCTCAGTCATGTCGTTGGAAATATGACCTCTACGATATGCCATTTGGACAAGAACGTCAATCGTTAAAAGGCGAGATTCCAGAACCTTTCTCAATGTCAGCTGTGGATATGTGTATGATTGAGCATATTCCAGATATGATTGAAAATGGTGTAGATAGTTTAAAAATAGAAGGACGTATGAAATCCATTCATTATGTTTCTACAGTAACTAATTGCTATAAAGCTGCTGTAGATGCCTATATGGAAAGTCCAGAAGCTTTTGAAGCTATTAAAGAAGACTTGATTGATGAACTTTGGAAGGTTGCACAACGCGAATTAGCAACAGGTTTTTACTACCATACACCAACTGAAAATGAACAACTCTTTGGAGCTCGTCGTAAAATTCCTCAATACAAATTTGTTGGGGAAGTGGTTTCATTTGACAATGCTAAAATGGAGGCTACAATTCGTCAGCGTAATGTTATTATGGAAGGAGATCGCGTAGAATTCTATGGTCCTGGCTTCCGTCACTTTGAATGTTTTATTGATGGTCTGCGTGATGCTGAAGGAAATAAAATAGACCGTGCTCCAAATCCGATGGAATTATTAACCATAACATTACCAAATCCAGTAAAAAAAGGGGATATGATTCGTGCTTGTAAAGAAGGATTAGTGAACCTTTATCAAAATGATGGTACTAGCAAGACTGTAAGAGCT

SEQ ID NO: 10284 - protein, 428 aa, Streptococcus agalactiae
MSNVKKRPEVLSPAGTLEKLKVAIDYGADAVFVGGQAYGLRSRAGNFSMEELQEGINYAHARDAKVYVAANMVTHEGNELGAGPWFRELRDMGLDAVIVSDPALIVICATEAPGLEIHLSTQASSTNYETFEFWKEMGLTRVVLAREVTMAELAEIRKRTDVEIEAFVHGAMCISYSGRCVLSNHMSHRDANRGGCSQSCRWKYDLYDMPFGQERQSLKGEIPEPFSMSAVDMCMIEHIPDMIENGVDSLKIEGRMKSIHYVSTVTNCYKAAVDAYMESPEAFEAIKEDLIDELWKVAQRELATGFYYHTPTENEQLFGARRKIPQYKFVGEVVSFDNAKMEATIRQRNVIMEGDRVEFYGPGFRHFECFIDGLRDAEGNKIDRAPNPMELLTITLPNPVKKGDMIRACKEGLVNLYQNDGTSKTVRA

SEQ ID NO: 10285 - protein, 210 aa, Streptococcus agalactiae
ATGTCAGAATTTACATTTGAAATTGTTGAGAAGTTATTGGTCCTATCTGAAAATGAAAAAGGTTGGACAAAAGAGTTGAATCGTGTGAGCTTCAACGGAGCGCCAGCTAAATTTGATTTGCGTACATGGAGTCCAGATCATACAAAAATGGGTAAAGGTATCACTTTATCTAATGAAGAATTTAAAGTCATTTTAGATGCTTTTCGTAAA

SEQ ID NO: 10286 - protein, 70 aa, Streptococcus agalactiae; identical to SEQ ID NO: 1410

SEQ ID NO: 10287 - protein, 795 aa, Streptococcus agalactiae
ATGATTAGACATTCATTTAAAAGTAAGGTGTTATTGTTAGTCTTTATCTTAACAATAATAGTGAATTATTTATCCGCAACAGGTTTTTTAACAGGGAACAGTCAGAAGAGTCTGTCTGATCGTTATCAAACGCTCTTGACACCAGCACCATTAGCCTTTTCAATTTGGTCAGTCATCTATTTATTGACCTTTTTAGTAATATTAAGAGCTATATTCAGTAAGAGTCAATCTTACCAAGATAACTTTGCTAGCATTTTTCCATACTTTTTGGGTCTTCTATTAGTTAATAATATATGGACTGTATTTTTTACGAGTAATTTGATTGGCCTATCAACAATAATAATTTTTGCTTACTGTATTCTTCTGGTTATCATTATCAAGATACTAAGTAAAAATAAATCAAAATTACTGCTTAGAATAACATTTGGAATTCATGCAGGATGGTTGCTAGTTGCGTCATTGGTCAATTTAGCGGTCTACTTAGTTAAAATTGATTTTAATTACCCATTACCAAAGGTATATATAGCTATCATTGCCTTGATTTTTATAACTGTTTTAAGTCTTTACCTAGCTAGAGTATTACAAAATGCTTACTTAATCTTATCCGTTTTTTGGGCTTGGTTGATGGTTTTTAAAGCACATTTAGAAGGAAATTTTCAACACCTATATTTTAGTATCCAAATTTTATCTTTGATTGCAGCAATTATCCTTGGCGTATCGTTTTTCATCATCGGTTATTATAATGTCAAGGAGAGGTACAAGCAAAAAAATACTAGCCCTTACTCACGGGTTCTT

SEQ ID NO: 10288 - protein, 265 aa, Streptococcus agalactiae; identical to SEQ ID NO: 1412

SEQ ID NO: 10289 - protein, 1338 aa, Streptococcus agalactiae; identical to SEQ ID NO: 5861

SEQ ID NO: 10290 - protein, 446 aa, Streptococcus agalactiae; identical to SEQ ID NO: 1414

SEQ ID NO: 10291 - protein, 1107 aa, Streptococcus agalactiae
ATGATGAAAAAAGAAGACTACATGGCATTAGCCTTGAAAGAGGCTGAGAAAGGTATGGGGTTCGTTGCTCCCAACCCATTAGTAGGTGCTGTTATTGTTAAAGATGATCGTATAATTTCCAAAGGTTATCATAAACGATTTGGAGATTTACATGCGGAAAGACAGGCTATTAAAAATGCTGATGAGGATATCTCTGGAAGTACTCTGTACGTGACTTTAGAACCATGCTGTCATGTTGGTAAGCAACCACCTTGTACTGAAGCTCTTATTAAATCTGGTATCAAAAAAGTAGTAGTTGGAAGTTTAGATCCAAATCCTTTAGTTTCAGGAAAAGGGATTGCCTTGTTGAGAAAAGAAGGTTTAAATGTTGAAGTTGGTATCTTAAGAGAAGAATGCGATGCTCTGAATGAAAGATTTATTTTTTACATGACCTATAAGCAGCCTTTTGTTTATTTGAAATATGCTATGACTTTAGATGGGAAGATAGCTACAAAGACGGGCGATTCTAAGTGGATATCAAATGAGCACTCAAGACAATCTGTTCAGAAATTGAGGCAAAAATGTAGTGCTATTATGGTCGGTATCAATACTGTATTAGCTGATAATCCACGTTTAACTTGCCGTATTCCTAAAGGTGAAGCGCTTGTGAGGATCGTATGTGATAGTCAGTTGAAGATACCTTTAGACTCTTACCTAGTTAAGAGCGCTAAAACAATACCAACATGGATTGCAACATGTTCAGATAATCTTGCTCAGCAACAAACATTAAAAGAAATGGGTTGCCGTTTGATTAAGGTCCCAAGAAAAGATGGAAAGCTGGATTTGAAAGTATTAATGACTATTTTAGGACAAGAAGGGATTGATAGCCTTCTTATTGAAGGAGGAAGTAGTTTACATTTTTCAGCTTTAAAAGCTGGTATTGTTAACAGACTAATTGTTTTTATTGCACCCAAAATAATAGGAGGTCTGAAAGCAAAAACAGCTATTTCTGGAGAAGGTTTGGATTGGCTTAACCAAGCTTTCAGAGTAAAAGATATTGAACTTAGTCGTATGGATTCTGACGTTGTTATTGAAGGAAAGGTAGAACATTATGTTTACAGGAATTAT

SEQ ID NO: 10292 - protein, 369 aa, Streptococcus agalactiae
MMKKEDYMALALKEAEKGMGFVAPNPLVGAVIVKDDRIISKGYHKRFGDLHAERQAIKNADEDISGSTLYVTLEPCCHVGKQPPCTEALIKSGIKKVVVGSLDPNPLVSGKGIALLRKEGLNVEVGILREECDALNERFIFYMTYKQPFVYLKYAMTLDGKIATKTGDSKWISNEHSRQSVQKLRQKCSAIMVGINTVLADNPRLTCRIPKGEALVRIVCDSQLKIPLDSYLVKSAKTIPTWIATCSDNLAQQQTLKEMGCRLIKVPRKDGKLDLKVLMTILGQEGIDSLLIEGGSSLHFSALKAGIVNRLIVFIAPKIIGGLKAKTAISGEGLDWLNQAFRVKDIELSRMDSDVVIEGKVEHYVYRNY

SEQ ID NO: 10293 - protein, 624 aa, Streptococcus agalactiae
ATGGGTCAAGTCAGTCGTATTCGGAATGGCATAAAGTCCCAACAATTAAGTATTGATGCTCCCAAACTAGTCCCTTTATTAAGAAAAGGGGATAGCGTAGCTGTTAATGGTGTTTGTTTGACGGTTCTTGACAAAAGTGAAACAGCTTTTATAGCAGACGTCATGCCAGAAAGTATGATGCGAACAAGCTTAGCTGCTTTACGACTTCATTCTAAAGTTAACTTAGAATTAGCACTCAGAAGTGACTCAAGGTTAGGGGGGCATTTTGTTCTTGGACATGTGGATGGGGTTGGAAAAATAGAAAAAATCCAAAAAGATGATATTGCTGTCAGATTTTCAATTGATGCTCCACCTAGTATTATGTCTTATATTATAGAGAAAGGTTCGGTGGCTCTAGATGGGATTAGCTTAACAGTGGTATCATTTACAGAGCATTCTTTTGAAGTTTCGGTCATTCCCCACACGATGGCTCAAACTAATCTATCCTTAAAAAAGGTTGGGGATTTATTAAATATCGAAGTGGATGTTTTAGGCAAATATGCTGAGAAATTTTTAGCACCCACTAATAGAACTAATCACACTTCATCGGTAATGGATTGGTCTTTTTTATCAGAAAATGGCTAC

SEQ ID NO: 10294 - protein, 208 aa, Streptococcus agalactiae; identical to SEQ ID NO: 1418

SEQ ID NO: 10295 - protein, 1191 aa, Streptococcus agalactiae
ATGGCCTTTAGTCCAATAAAAAAACTTTTACAAGACATCAAATCAGGGAAAATGGTAGTGTTGATGGATGACGAAAATAGAGAGAATGAAGGAGACCTTATTTGTGCGGCTGAAATGGTGACAAAAGAGTCGATTAATTTTATGGCTAAATTTGGGAAAGGATTAATTTGCTTACCTCTGTCTAATTACTATGCTGAAAAGTTAGAATTAGCTCAAATGGCTAGCCATAATACTGATAATCATGAAACAGCTTTTACCATATCTATTGATCATCTATCAACTAGTACTGGGATTTCTGCGGAAGATAGAGCTTTGACAGCTAAGATGGTTGCTAACGACAGTAGCAAAGCTAAAGACTTTAGACGTCCTGGGCACTTATTTCCCTTGTTAGCCAAGGAAGGAGGTGTTTTAGCTAGAAATGGACATACTGAAGCAACCGTTGATCTATGTCGTTTAGCTGGATTAAAGGAATGTGGACTTTGTTGTGAAATAATGGCTGAAGATGGTAGTATGATGAGAAAGGATGAGTTATTAGCATTTGCTCAAAAGCACGATTTAGCTATCGCTACCATAAAACAATTGCAAGACTATAGACGTCAAGAAGAGGGAGGGGTGGTTAGAGAAATTGAGATTCAGCTACCAACGCAATTCGGTCATTTTACGGCTTATGGATATAGCGAAGTTGTGGCAAATAAGGAACATGTTGCCCTTGTTAAAGGGGATATTAGTAGTGGTGAAGATGTTTTATGTCGTTTACACTCAGAATGTTTGACAGGTGATGTCTTTCATTCCTTGAGATGTGATTGTGGGGAACAACTGGCTAATGCCCTCCAACAAATAGAGGCTGAAGGTCGTGGAGTCCTTCTTTATATGAGACAGGAAGGTCGAGGAATTGGTTTGATTAATAAGTTAAAAGCTTATCATTTGCAAGAAGAAGGCTTAGATACTTTAGAAGCTAATTTGGCTTTAGGTTTTGAAGGAGATGAGAGAGACTATGGAGTTAGTGCTCAACTTTTAAAAGATTTAGGTATAAATTCTATAAACTTACTAACCAATAATCCAGATAAAATCCAACAACTTGAAGCAGAAGGAATTTGCGTCAAAAACAGAGTGCCATTACAGGTGGCAGCAACAGCTTATGACCTTAATTATTTAAAAACTAAAAAAGAAAAAATGGGACATCTTTTAGAT

SEQ ID NO: 10296 - protein, 397 aa, Streptococcus agalactiae
MAFSPIKKLLQDIKSGKMVVLMDDENRENEGDLICAAEMVTKESINFMAKFGKGLICLPLSNYYAEKLELAQMASHNTDNHETAFTISIDHLSTSTGISAEDRALTAKMVANDSSKAKDFRRPGHLFPLLAKEGGVLARNGHTEATVDLCRLAGLKECGLCCEIMAEDGSMMRKDELLAFAQKHDLAIATIKQLQDYRRQEEGGVVREIEIQLPTQFGHFTAYGYSEVVANKEHVALVKGDISSGEDVLCRLHSECLTGDVFHSLRCDCGEQLANALQQIEAEGRGVLLYMRQEGRGIGLINKLKAYHLQEEGLDTLEANLALGFEGDERDYGVSAQLLKDLGINSINLLTNNPDKIQQLEAEGICVKNRVPLQVAATAYDLNYLKTKKEKMGHLLD

SEQ ID NO: 10297 - protein, 468 aa, Streptococcus agalactiae
ATGACAATTATTGAAGGACAATTAGTGGCAAACGAAATGAAAATAGGAATCGTAGTCTCACGTTTCAATGAATTGATTACATCTAAATTATTATCAGGAGCAGTAGATGGACTGCTGAGACATGGTGTTTCAGAAGAAGATATAGATATTGTATGGGTACCTGGTGCTTTTGAAATCCCCTATATGGCTAGAAAAATGGCATTATATAAAGATTATGATGCTATTATCTGTCTTGGGGTAGTCATTAAAGGCAGCACTGATCATTATGATTATGTTTGTAATGAGGTGACAAAAGGTATTGGTCATTTAAATAGCCAGTCAGATATCCCTCATATCTTTGGTGTTCTAACAACGGATAACATCGAACAAGCTATTGAGAGGGCAGGAACAAAAGCAGGAAATAAAGGTTATGATTGTGCTCTTTCGGCTATTGAAATGGTGAACCTTGATAAAAAATTGCGTGAGCGA

SEQ ID NO: 10298 - protein, 156 aa, Streptococcus agalactiae; identical to SEQ ID NO: 1422

SEQ ID NO: 10299 - protein, 1488 aa, Streptococcus agalactiae
ATGTCTAACCAACATATTGAAGAATTAAATGACCAACAGATTGTTCGTCGTGAAAAAATGGCTGCTTTGACTGAACAAGGCATTGATCCTTTTGGTAAACGATTTGAACGTACAGCAACATCTGGTCAATTAAATGAAAAATACGCTGACAAATCAAAAGAAGACTTGCACGACATTGAAGAAACTGCTACAATCGCTGGTCGTTTAATGACTAAGCGCGGTAAGGGGAAAGTTGGCTTTGCGCATATCCAAGATCGCGAAGGTCAAATTCAAATTTATGTCCGTAAAGATTCTGTTGGCGAAGAAAACTACGAAATCTTTAAAAAAGCTGATTTAGGTGACTTCCTTGGTGTTGAAGGGCAAGTAATGCGTACAGATATGGGAGAACTTTCTATCAAGGCTACTCATATTACTCACCTTTCAAAAGCACTCCGTCCACTTCCTGAAAAATTCCACGGCCTAACTGATATTGAAACAATCTATCGTAAACGTCATCTTGATTTAATCTCAAATCGTGACAGCTTTGACCGTTTTGTAACACGCTCAAAAATCATTTCAGAAATTCGTCGCTTTATGGATAGCAATGGTTTCTTAGAGGTTGAAACACCTGTTCTTCATAATGAAGCTGGTGGTGCTTCTGCTCGCCCATTTATCACACATCACAATGCACAAGACATTGACATGGTTCTTCGTATCGCAACTGAATTGCATCTAAAACGTCTTATTGTAGGTGGTATGGAGCGTGTTTATGAAATCGGACGTATTTTCCGTAATGAAGGGATGGATGCAACCCACAATCCAGAGTTCACATCTATTGAAGCCTACCAAGCCTATGCTGACTACCAGGATATTATGGACTTGACAGAAGGTATTATCCAGCATGTTACAAAAACTGTAAAAGGTGATGGACCAATTAATTATCAAGGCACAGAAATTAAAATTAATGAACCATTCAAACGTGTTCATATGGTTGATGCGGTTAAAGAAATCACTGGTATTGACTTCTGGAAAGAAATGACTCTTGAAGAAGCACAAGCTTTGGCACAAGAAAAAAATGTTCCGCTTGAAAAACATTTCACAACAGTTGGTCACATCATTAATGCCTTCTTCGAAGAATTTGTTGAAGACACTTTAATTCAACCAACTTTTGTCTTTGGTCATCCAGTTGAAGTGTCTCCACTTGCTAAGAAAAATGATACAGACCCTCGTTTTACAGACCGTTTCGAACTCTTTATCATGACTAAAGAATACGCTAATGCTTTTACAGAATTAAATGACCCAATTGATCAGCTATCTCGCTTTGAAGCACAAGCATCTGCTAAAGAACTTGGCGATGATGAAGCAACTGGAGTTGATTACGATTATGTTGAAGCACTTGAATATGGTATGCCACCTACTGGTGGACTAGGTATTGGTATCGACCGTCTCTGTATGCTGTTAACTGATACAACAACTATCCGAGACGTCCTACTTTTCCCTACAATGAAA

SEQ ID NO: 10300 - protein, 496 aa, Streptococcus agalactiae; identical to SEQ ID NO: 1424

SEQ ID NO: 10301 - protein, 900 aa, Streptococcus agalactiae
ATGATTACTTCAATTGTTTTTGATGTTGATGATACGATTTACGATCAACAAGCACCTTACCGTATTGCTGTGGAGAAATGCTTTCCTGATTTTGATATGAGCGCTATTAACCAAGCTTATATTCGCTTTCGTCATTATTCAGATATTGGCTTTCCACGAGTAATGGCTGGTGAATGGACAACAGAATATTTTCGTTTCTGGCGATGCAAAGAAACGCTTTTAGAGTTTGGTTATCGTGAAATTGACGAAGCTACTGGTATTTATTTTCAAGAAATATACGAACATGAACTTGAAAATATTACAATGCTTGATGAGATGCGTATGACACTTGACTTTTTGAAATCAAAAAATGTACCAATGGGAATTATTACAAATGGTCCTACGGAACATCAATTGAAAAAAGTTAAAAAATTGGGACTTTATGACTATGTTGATCCAAAACGTGTTATAGTTAGTCAAGCAACTGGTTTTCAAAAGCCTGAAAAGGAGATTTTTAATTTAGCAGCAGAGCAATTTGATATGAACCCTTCAACTACACTTTATGTGGGTGATTCATATGATAATGATATTATGGGTGCATTTAATGGTGGTTGGCATTCTATGTGGTTCAACCATAGAGGACGTTCTTTAAAACCGGGAATTAAACCAGTTTATGATGTTGCTATTGATAACTTTGAGCAATTATTCGGTGCTGTTAAAGTGTTGTTTGACTTACCTGATAATAAATTTATTTTTGATATCAACGATAAAAGTAATCCAGTCCTTGAAATGGGACTTAATAATGGTTTAATGATGGCAGCAGAGCGTCTGCTTGAGAGTAATATGAGCGTTGACAAAGTTGTTATTTTACTGCGCCTAACTGCAAAACAAGAAAAAGTATTACGCATGAAGTATGCTAGA

SEQ ID NO: 10302 - protein, 300 aa, Streptococcus agalactiae; identical to SEQ ID NO: 1426

SEQ ID NO: 10303 - protein, 639 aa, Streptococcus agalactiae
ATGAAATTTTATCTTGTTAGACACGGAAAAACACAATGGAATTTAGAGGGGCGTTTCCAAGGTGCTAACGGAGACTCACCTCTCCTTGAAGAAGCTATTGAAGAATTAGAAGAACTTGGACAATACCTATCATCTATTCATTTTGATGCTGTTTATTCTAGCGACTTAGGTCGTGCTAGAGATACTGTTAATATCCTCAATGATGCTAATTCATGCCCAAAAGAAATCCACTATACTCCTCAACTTCGTGAATGGGCATTGGGAACTTTAGAAGGTTGTAAAATTGCAACTATGCAAGCTATCTATCCTCGTCAAATGACCGCATTTTATCAAAATCCCTTACAATTTAAACATGACATGTTCGGTGCAGAATCTCTTTATCAGACAACGCATCGTGTAGAGAGTTTCTTACGTTCTCTAGCTTCAAAAAATTACGACAAGGTCCTTATTGTAGGACATGGAGCAAACCTAACTGCGTCTATTCGTTCCTTACTGGGTTATCAATATGGTAGTTTACACTACAAAGATAAACTTGATAATGCCAGCCTCACAATCATAGAAACTCATGATTTTAAAGACTTCAACTGTCTGACTTGGAACGATAAATCTTATTTAAGGCAAGAGGTCAAAATGACACAC

SEQ ID NO: 10304 - protein, 213 aa, Streptococcus agalactiae; identical to SEQ ID NO: 1428

SEQ ID NO: 10305 - protein, 471 aa, Streptococcus agalactiae; identical to SEQ ID NO: 5877

SEQ ID NO: 10306 - protein, 157 aa, Streptococcus agalactiae; identical to SEQ ID NO: 1430

SEQ ID NO: 10307 - protein, 615 aa, Streptococcus agalactiae
ATGGAAATACTGATTGCAGGTGGTAGTGGTTTTTTAGGAAAGCAGATAATAAAAGCAGCGCTTACAAAAGGGCATAAAGTGGCTTACTTATCAAGACATGAAGGTAAAGGTGATATATTTAAGGATCCTAGATTAACCTACATTAGGGGAGATATTACAGAAGCTGATAAGATTCATTTAGAAGACAGAACTTTTGATATATTAATTGACTGTATTGGAGCGATTAAGCCCAATCAACTAGATGAGCTTAACGTTAAAGCAACCCAAAAAGCAGTAGCACTCTGTCACAAAAATCAAATACCAAAGTTAGTTTATATTTCAGCCAACAGCGGCTATTCAGCTTACATTAAAAGTAAAAGGAAGGCAGAGCAGATAATCAAAGCAAGCGGTCTGGATTATCTTTTTGTAAGACCAGATTTGATGTATGGTGAAGAGCGACCTCTCTCGATTTTCCAAGCCAAGTGTATAAAGTTATTTAGTCATTTGCCTTTCTTAGGTATTGTTGTACAAAAGGTCTTTCCAACTAAGGTTGTGATAGTGGCAGAAGCAATCGTTACTACGCTTAGGAAAAAACCAACCCAAAAAATCCTTTCTATTGAAGAATTAAATAATAAA

SEQ ID NO: 10308 - protein, 205 aa, Streptococcus agalactiae
MEILIAGGSGFLGKQIIKAALTKGHKVAYLSRHEGKGDIFKDPRLTYIRGDITEADKIHLEDRTFDILIDCIGAIKPNQLDELNVKATQKAVALCHKNQIPKLVYISANSGYSAYIKSKRKAEQIIKASGLDYLFVRPDLMYGEERPLSIFQAKCIKLFSHLPFLGIVVQKVFPTKVVIVAEAIVTTLRKKPTQKILSIEELNNK

SEQ ID NO: 10309 - protein, 846 aa, Streptococcus agalactiae
ATGAGAAGAAGAATTAAACCTATTGTTGTTGCGGTTTTTTTCAGTTTATTTGGACTTTTATTAATTATTGGTCATTTACATTCGACAAATACTTTGAAAAAAGAATTAGTTGAAGCTAAAAAGACAATTCCATCCGTAAAAGCTTCAAAAGTACCGCAAAAATCAACATCATCGAAAGATAAAGAGTTTGTTCTTAAACCGATTATCGATGTCTCTGGTTGGCAACTTCCTAAGGAGATTGATTACGATACGCTTTCAAAAAATATTTCAGGTGTTGTTATTCGTGTCTTTGGTGGATCAAAGATATCTAAGACTAATAACGCTGCTTATACAACTGGAATCGATAAATCGTTTAAGACCCATATCAAAGAATTTCAAAAGCGAAATATCCCAGTAGCTGTCTACAGTTATGCACTTGGTTCAAGTGTTAAAGAAATGAAAGAAGAGGCTCAGATATTTTATAAGAATGCAGCTCCTTACAAACCAACTTTTTATTGGATTGACGTAGAAGAGGAGACAATGTCTAACATGAATAAAGGTGTCCAAGCATTCCGAAAAGAATTAAAAAGACTTGGTGCTAAAAATGTTGGTATCTACATTGGTACTTACTTTATGACTGAGCAAGGCATCTCTGTAAAAGGATTTGACGCTGTTTGGATTCCAACTTATGGTAGCGATTCTGGATACTATGAAGCGGCTCCGCAAACTGAACTTAAATACGATTTACACCAATACACCTCTCAAGGTTATCTACCAGGATTCAATCAACCGCTTGATTTAAATCAAATTGCAGTTAATAAAGACAAGAAGAAAACTTATGAGAAACTTTTTGGAAAAGTAAAAGAG

SEQ ID NO: 10310 - protein, 282 aa, Streptococcus agalactiae
MRRRIKPIVVAVFFSLFGLLLIIGHLHSTNTLKKELVEAKKTIPSVKASKVPQKSTSSKDKEFVLKPIIDVSGWQLPKEIDYDTLSKNISGVVIRVFGGSKISKTNNAAYTTGIDKSFKTHIKEFQKRNIPVAVYSYALGSSVKEMKEEAQIFYKNAAPYKPTFYWIDVEEETMSNMNKGVQAFRKELKRLGAKNVGIYIGTYFMTEQGISVKGFDAVWIPTYGSDSGYYEAAPQTELKYDLHQYTSQGYLPGFNQPLDLNQIAVNKDKKKTYEKLFGKVKE

SEQ ID NO: 10311 - protein, 522 aa, Streptococcus agalactiae
ATGATAAAGAATTCAACTTTAACTAAATTGACTAGAGTCGCTATATTATCTGCTTTGTGTGTTGTGTTGAGATATGCTTTTGCGCCTCTGCCTAACATTCAGCCAATTACTGCCATTTTTTTGATTACAGTTGTCTTATTCGATTTAAAAGAAGGTGTAGCTACTGTAACTATAACAATGCTAGTTTCTTCTTTTTTAATGGGCTTTGGGCCATGGGTCTTTTTGCAAATCATTTCCTTCACTTTAATTTTATGCTTGTGGAAATTTCTGATATATCCGCTGACAAAAGCTGTATGTTTTGGTAAAATAACGGAGGTAGTACTTCAAACTTTCTTTGCAGGAGGGTTAGGGGTTGTTTATGGCGTCATTATTGATACCTGTTTTGCTTGGTTATATCATATGCCTTGGTGGACTTATGTATTAGCAGGACTTAGTTTTAATATGGCACACGCTTTATCAACTTGTTTATTTTATCCTCTTTTGTTACCGATTTTAAGGAGATTTAGGAATGAAAAAATACAT

SEQ ID NO: 10312 - protein, 174 aa, Streptococcus agalactiae
MIKNSTLTKLTRVAILSALCVVLRYAFAPLPNIQPITAIFLITVVLFDLKEGVATVTITMLVSSFLMGFGPWVFLQIISFTLILCLWKFLIYPLTKAVCFGKITEVVLQTFFAGGLGVVYGVIIDTCFAWLYHMPWWTYVLAGLSFNMAHALSTCLFYPLLLPILRRFRNEKIH

SEQ ID NO: 10313 - protein, 387 aa, Streptococcus agalactiae; identical to SEQ ID NO: 5885

SEQ ID NO: 10314 - protein, 129 aa, Streptococcus agalactiae; identical to SEQ ID NO: 1436

SEQ ID NO: 10315 - protein, 1797 aa, Streptococcus agalactiae
ATGAAACTTAAAAAACGCTCTGAATTCCCTGAAAATGAACTTTGGGATCTGACTGCTCTCTACAAAGATCGTCAAGATTTTTTACTGGCTATTGAAAAAGCTCTTGAGGATATCAAGGTTTTCAAAAAAAATTACGAGGGAAAACTTAATTGTGTTGAGGATTTTACTAGTGCCCTTATGGAAATCGAGCATATTTATATCCAGATGAGTCACATTGATACGTATGCTTTTATGCCTCAAACTACTGACTTTAGCAACGAAGAGTTTGCACAAATTTCTCAAGCAGGATCAGACTTCGCAACTAAAGCTAATGTACTACTTTCTTTCTTTAATACTGCCCTAGCAAATGCAGATATAAAGATTTTAGATTCTTTAGAAAATAACCCTCATTTCAAAGCAACTATTCGCCAAGCTAAAATTCAAAAGCAACACTTATTAAGTCCAGAAGTCGAAAAAGCTTTGACAAACTTAAATGAAGTCCTAAATACACCATATGATATTTATACTAAAATGCGTGCTGGCGATTTTGATATGGAAGATTTTGAAGTTGACGGAAAAACCTACAAAAATAGTTTTGTAACTTATGAAAATTACTTTCAAAATCACGAAAATGCAGAGATACGTGAAAAATCCTTCCGTTCATTCTCGAAAGGTCTACGTAAGCACCAAAATGCTGCAGCTGCGGCTTATCTTGCAAAAGTCAAATCTGAAAAGTTAATTGCTGATATGCGTGGTTACGATAGTGTTTTTGATTATCTTCTTTCCGAACAAGAAGTTGACCGTTCAATGTTTGACAGACAAATTGATCTTATCATGGATGAATTTGGTCCAGTAGCTCAACGATTCCTCAAACATATCGCCGATGTTAATGGTATTGAAAAGATGACTTTTGCAGATTGGAAATTAGACATTGATAACGAACTTAATCCCGAAGTAAGTATCAATGATGCTTATGACTTAGTAATGAAATCAGTTGCTCCTTTAGGAAAAGAATATTCTCAAGAGGTTGAGCGCTATCAAAAAGAGCGTTGGGTTGATTTTGCAGCTAACGCTAATAAAGATTCTGGAGGATATGCTGCGGATCCTTACAAAGTTCATCCCTATGTACTCATGAGCTGGACGGGGCGTATGAGCGATGTCTACACACTTATTCATGAGATTGGACATTCTGGTCAATTTATCTTCTCAGATAATCACCAAAGTTTTTTCAATACTCACATGTCCACTTACTATGTTGAAGCTCCATCTACTTTTAACGAACTTTTACTTAGTGACTACTTAGAAAACCAATTTGATACAGCACGTCAAAAACGCTTTGCTCTTGCACATCGCTTAACTGATACTTACTTCCACAATTTCATTACTCACTTACTTGAAGCTGCTTTCCAACGTAAAGTTTACACTCTAATTGAGGAGGGAGGAACTTTTGGAGCAGAACAATTAAATGCTATTATGAAGGAAGTATTAACACAATTCTGGGGAGATGCTATTGAAATAGATGACGATGCCGCTTTGACATGGATGAGACAAGCTCATTACTACATGGGGCTCTATAGCTATACTTACTCTGCTGGATTAGTAATCTCGACAGCCGGCTATCTCAATCTCAAAAATAATCCAAACGGAGCAAAAGAGTGGTTAGCATTCTTGAAATCTGGTGGGAGCCGTACCCCTTTAGAAACAGCTCTATTAATCAGTGCTGATATTTCTACTGATAAGCCTCTGCGCGATACTATTAATTTCTTATCTAACACTGTAGACCAAATTATTAATTACAGTAATCTTATTGAGCAAGGC

SEQ ID NO: 10316 - protein, 599 aa, Streptococcus agalactiae; identical to SEQ ID NO: 1438

SEQ ID NO: 10317 - protein, 2793 aa, Streptococcus agalactiae
TTGTCCCACCCGAAATTAGAAAGTAGTAGCAATAAAGAAATCATTACCGAAGAGGTCGGTTTACTGAAGCAGCTTTTGGATGAAGCAACGCAAAAATTGATTGGTAGTGAATCATTTGACAAGATTGAAAAAATAGTTTCATTATCATTAACTGACGATTATACTGGTCTGAAGGAAACTATTTCGGCTTTAAGCAACGAGGAGATGGTTATTGTTTCTCGTTACTTCTCTATTTTGCCGCTCTTAATTAATATTTCAGAAGACGTTGATTTAGCATATGAAATTAATTATAAAAATAATCTTAACCAAGATTACCTAGGAAAGTTATCAACGACTATTGATGTTGTAGCTGGCCATGAAAATGCTAAAGATATTCTTGAACACGTCAATGTTGTGCCTGTGCTAACAGCTCATCCTACTCAGGTGCAGCGTAAAACGGTGCTCGAATTAACGTCTAAGATTCATGATTTATTACGTAAATACAGAGATGTCAAGGCAGGAATCGTGAATCAAGAAAAATGGTATGCTGACTTGCGTCGTTACATCGGCATTATCATGCAAACAGACACTATTCGCGAGAAAAAATTGAAAGTCAAAAATGAGATAACCAATGTAATGGAATATTACAACCGTTCTCTTATTAAAGCAGTTACCAAATTAACAGCAGAATATAAGGCACTGGCAGCTAAAAAAGGTATTCACTTGGAGAATCCTAAGCCTCTGACTATGGGGATGTGGATTGGTGGTGATAGAGATGGCAATCCCTTTGTAACTGCTGAGACACTAAGATTATCAGCTATGGTACAAAGTGAAGTGATTATTAACCATTATATTGAGCAGCTAAATGAACTTTATCGTAATATGTCACTTTCAATAAATCTAACTGAAGTCTCTCCCGAACTTGTTACATTGGCAAACCAGTCACAAGATAATTCGGTATATAGGGAAAATGAACCTTACCGTAAAGCTTTCAATTTTATCCAAGATAAACTGGTACAAACCCTACTAAATTTAAAAGTTGGTTCTTCCCCAAAAGAGAAATTTGTTAGTCGCCAAGAATCTTCTGATATTGTAGGAAGGTATATAAAATCACATATCGCTCAAGTAGCTTCTGACATACAGACAGAAGAACTACCAGCATACGCTACTGCTGAGGAGTTTAAACAAGATTTGTTACTTGTGAAGCAATCTTTAGTTCAATATGGACAAGATTCTCTTGTTGATGGCGAATTAGCTTGTCTTATTCAAGCAGTAGATATCTTTGGATTTTATTTAGCTACTATTGATATGCGTCAAGATTCTAGTATTAATGAAGCTTGTGTAGCAGAATTATTGAAGTCTGCCAATATTGTAGATGATTACAGTTCTCTTTCAGAAGAAGAAAAATGTCAACTTCTCTTAAAAGAATTAACAGAAGATCCTAGAACATTATCTTCTACGCATGCTCCTAAATCCGAGTTACTTCAAAAAGAATTGGCTATTTTCCAAACAGCACGTGAGTTAAAAGATCAATTGGGTGAAGACATTATAAACCAGCATATCATTTCTCACACAGAGAGCGTTTCGGATATGTTTGAGTTAGCTATCATGTTAAAAGAAGTTGGACTAATTGATGCCAATCAAGCTCGTATTCAGATTGTACCGTTATTTGAAACCATCGAAGATTTGGATAATTCACGTGATATTATGACCCAGTATCTACATTATGAATTAGTTAAAAAATGGATTGCTACTAACAACAATTATCAAGAAATAATGCTAGGTTATTCAGATAGTAATAAAGATGGTGGCTATTTATCATCTGGTTGGACTCTATATAAAGCTCAAAATGAGCTAACAAAAATAGGTGAAGAAAACGGTATTAAAATCACATTTTTCCACGGTCGTGGTGGAACTGTTGGTCGTGGTGGTGGTCCATCTTATGAAGCTATCACATCACAACCTTTTGGTTCAATCAAAGATCGAATTCGCCTAACAGAGCAAGGTGAAATCATTGAGAATAAATATGGTAATCAAGATGCAGCCTATTATAACCTTGAAATGCTTATTTCAGCTTCCATAGACCGCATGGTAACACGTATGATTACTAACCCTAATGAAATTGATAATTTCCGTGAGACAATGGATGGTATTGTGTCTGAAAGTAATGCCGTTTATAGAAATTTAGTTTTTGATAATCCTTATTTCTATGACTATTTCTTTGAAGCAAGTCCAATTAAAGAGGTATCAAGTTTAAATATTGGTTCTCGGCCAGCAGCACGTAAAACAATTACAGAAATTTCAGGTTTACGTGCAATTCCATGGGTATTTTCATGGTCACAAAATCGTATTATGTTTCCAGGATGGTATGGTGTTGGATCAGCCTTCAAGCACTTTATTGAACAAGATGAGGCAAACTTAGCAAAATTACAAACCATGTATCAAAAATGGCCATTCTTTAATTCTCTTTTATCTAATGTAGATATGGTTTTATCAAAATCAAATATGAATATTGCGCTTCAGTATGCTCAGTTAGCTGGAAGTAAAGAAGTTCGAGATGTTTTTAATATCATCCTTAATGAATGGCAGTTAACTAAAGATATGATTTTAGCTATTGAACAGCATGATAATTTATTAGAAGAAAACCCAATGTTACATGCAAGTTTAGATTATCGTTTGCCATATTTCAATGTTTTGAATTATGTTCAAATTGAATTGATTAAACGTCTTCGTAGTAACCAACTAGATGAAGACTATGAGAAGTTGATTCATATTACTATTAATGGTATTGCAACAGGTTTACGAAATTCAGGT

SEQ ID NO: 10318 - protein, 931 aa, Streptococcus agalactiae; identical to SEQ ID NO: 1440

SEQ ID NO: 10319 - protein, 929 aa, Streptococcus agalactiae
ATGAAAATTGATAAAAGGCATCTTCTGAATTATTCCATCCTCATTCCCTATTTGATATTGTCTATTCTAGGCTTAATTGTAATTTATTCGACAACTAGTGCAACTCTAATTCAGCTTGGAGCTAACCCTTTTCGTTCAGTAATCAACCAGGGTGTCTTTTGGGCAGTCAGTTTGGTTGCAATTATCTTTATCTATAAACTGAAACTAAATTTTTTGAAAAATTCTAAAGTGTTGACTATGGCAGTATTGGTAGAAGTATTTTTACTACTAATAGCGCGCTTTTTTACACAAGAAGTTAATGGAGCACATGGTTGGATTGTTATTGGTCCTATTAGTTTTCAACCTGCTGAATATTTAAAAGTTATCATTGTATGGTATTTAGCGTTTACTTTTGCTCGAAGGCAAAAAAAGATAGAAATATATGATTATCAAGCTTTGACAAAAGGGAGATGGCTTCCGAGATCACTAAGCGACCTAAAAGATTGGCGATTTTATTCTTTATTTATGATTGGTTTGGTAATTGCACAACCTGATTTAGGAAATGGTTCGATAATTGTTCTAACGGTCATTATTATGTACTGTATTAGTGGTATTGGTTATCGATGGTTTTCAGCTTTACTTGGTCTAATCGTCGTGGGGTCAACTTTATTTATCGGAACTATTGCAGTTGTTGGAGTTGAGACAATGGCTAAAGTCCCTGTCTTTGGTTATGTAGCTAAGCGATTTAATGCTTTTTTTGACCCATTTAAAGATTTAACAGATTCAGGACACCAGTTGGCTAATTCGTATTATGCAATGAGCAACGGTGGCTGGTTTGGTCGAGGACTTGGGAATTCTATTGAAAAATTAGGGTACTTACCAGAAGCAACAACAGACTTTGTCTTTTCAATTGTTATTGAGGAATTAGGATTATTTNNNNNTTAATTAAT

SEQ ID NO: 10320 - protein, 310 aa, Streptococcus agalactiae
  VARIANT 304, 306, 307: Xaa = Any Amino Acid
MKIDKRHLLNYSILIPYLILSILGLIVIYSTTSATLIQLGANPFRSVINQGVFWAVSLVAIIFIYKLKLNFLKNSKVLTMAVLVEVFLLLIARFFTQEVNGAHGWIVIGPISFQPAEYLKVIIVWYLAFTFARRQKKIEIYDYQALTKGRWLPRSLSDLKDWRFYSLFMIGLVIAQPDLGNGSIIVLTVIIMYCISGIGYRWFSALLGLIVVGSTLFIGTIAVVGVETMAKVPVFGYVAKRFNAFFDPFKDLTDSGHQLANSYYAMSNGGWFGRGLGNSIEKLGYLPEATTDFVFSIVIEELGXIXXLIN

SEQ ID NO: 10321 - protein, 230 aa, Streptococcus agalactiae
ATGCAAGTTTTTGTTAACATTGGTGGTATTTCTGGGTTAATCCCCTCAACTGGAGTGACATTTCCTTTCTTATCCCAAGGAGGGAACAGCTCTTGGTACTTTCTGTAGCTATCGGATTCGTGCTTAATATTGATGCTAACGAGAAAAAGGAACTCATAATGAAAGAAGCAGAAGAGCAATATAAGCCACAAGAAAAAAATGAAAAAATAATCAACCTTGATGCCTTTAAA

SEQ ID NO: 10322 - protein, 77 aa, Streptococcus agalactiae
  VARIANT 31: Xaa = Any Amino Acid
MQVFVNIGGISGLIPSTGVTFPFLSQGGNSXLVLSVAIGFVLNIDANEKKELIMKEAEEQYKPQEKNEKIINLDAFK

SEQ ID NO: 10323 - protein, 1080 aa, Streptococcus agalactiae
ATGGCAAAAGAAAAATACGATCGTAGTAAACCACACGTTAACATTGGTACAATCGGACACGTTGACCACGGTAAAACTACTTTAACAGCAGCTATCACAACTGTATTGGCACGTCGCTTGCCTACTTCAGTTAACCAACCAAAAGATTACGCTTCTATCGATGCTGCTCCAGAAGAGCGCGAACGCGGAATCACAATCAACACTGCACACGTTGAGTACGAAACTGAAAAACGTCACTATGCCCACATCGACGCTCCAGGACACGCGGACTACGTTAAAAACATGATCACTGGTGCTGCTCAAATGGACGGAGCTATCCTTGTAGTTGCTTCAACTGATGGACCAATGCCACAAACTCGTGAGCACATCCTTCTTTCACGTCAAGTTGGTGTTAAACACCTTATCGTATTCATGAACAAAGTTGACCTTGTTGATGATGAAGAATTGCTTGAATTGGTTGAAATGGAAATTCGTGACCTTCTTTCAGAATACGACTTCCCAGGTGATGACCTTCCAGTTATCCAAGGTTCAGCTCTTAAAGCACTTGAAGGCGACGAAAAATACGAAGACATCATCATGGAATTGATGAGCACTGTTGATGAGTACATTCCAGAACCAGAACGTGATACTGACAAACCTTTACTTCTTCCAGTTGAAGATGTATTCTCAATCACTGGACGTGGTACAGTTGCTTCAGGACGTATCGACCGTGGTACTGTTCGTGTCAACGACGAAGTTGAAATCGTTGGTATTAAAGAAGATATCCAAAAAGCAGTTGTTACTGGTGTTGAAATGTTCCGTAAACAACTTGACGAAGGTCTTGCAGGGGACAACGTTGGTGTTCTTCTTCGTGGTGTTCAACGTGATGAAATCGAACGTGGTCAAGTTCTTGCTAAACCAGGTTCAATCAACCCACACACTAAATTTAAAGGTGAAGTTTACATCCTTTCTAAAGAAGAAGGTGGACGTCATACTCCATTCTTCAACAACTACCGTCCACAATTCTACTTCCGTACAACTGACGTAACAGGTTCAATCGAACTTCCAGCAGGAACAGAAATGGTTANNNNNTTAATTAAT

SEQ ID NO: 10324 - protein, 360 aa, Streptococcus agalactiae
  VARIANT 356, 357: Xaa = Any Amino Acid
MAKEKYDRSKPHVNIGTIGHVDHGKTTLTAAITTVLARRLPTSVNQPKDYASIDAAPEERERGITINTAHVEYETEKRHYAHIDAPGHADYVKNMITGAAQMDGAILVVASTDGPMPQTREHILLSRQVGVKHLIVFMNKVDLVDDEELLELVEMEIRDLLSEYDFPGDDLPVIQGSALKALEGDEKYEDIIMELMSTVDEYIPEPERDTDKPLLLPVEDVFSITGRGTVASGRIDRGTVRVNDEVEIVGIKEDIQKAVVTGVEMFRKQLDEGLAGDNVGVLLRGVQRDEIERGQVLAKPGSINPHTKFKGEVYILSKEEGGRHTPFFNNYRPQFYFRTTDVTGSIELPAGTEMVXXLIN

SEQ ID NO: 10325 - protein, 755 aa, Streptococcus agalactiae
ATGTCACGTAAACCATTTATCCCTTGTAACTGGAAAATGAATAAAAATCCAGAAGAAGCAAAAGCATTCATCGAAGCAGTAGCTTCTAAATTACCATCATCAGAACTTGTTGAAGCAGGGATTGCTGCTCCAGCGCTTACTTTATCAACAGTTCTTGAAGCAGCTAAAGGTTCAGAATTGAAAATCGCTGCTCAAAATAGCTATTTGAGAATTCAGGTGCATTCACTGGTGAAAACAGCCCTAAAGTATTGGCTGAAATGGGTACAGACTACGTTGTTATCGGTCACTCAGAACGTCGTGATTATTTCCATGAAACTGACCAAGATATCAACAAAAAAGCAAAAGCTATCTTTGCTAATGGTTTGACTCCAATCATTTGTTGCGGTGAGTCTCTTGAAACTTACGAAGCTGGTAAAGCGGTTGAATTCGTAGGTGCTCAAGTTTCAGCAGCTCTTGCAGGTTTGTCAGAAGAGCAAGTATCATCACTTGTTATCGCTTACGAACCAATCTGGGCTATTGGTACTGGTAAATCAGCAACTCAAGACGACGCACAAAACATGTGTAAAGCAGTTCGTGACGTTGTTGCAGCAGACTTCGGTCAAGCAGTTGCTGACAAAGTTCGCGTTCAATACGGTGGTTCAGTTAAACCTGAAAACGTTGCAGAATATATGGCTTGCCCAGACGTTGACGGTGCCCTTGTAGGTGGAGCTTCACTTGAAGCAGAAAGCTTCCTTGCCTTATTAGATTTTGTTAAA

SEQ ID NO: 10326 - protein, 252 aa, Streptococcus agalactiae
MSRKPFIPCNWKMNKNPEEAKAFIEAVASKLPSSELVEAGIAAPALTLSTVLEAAKGSELKIAAQNSYFENSGAFTGENSPKVLAEMGTDYVVIGHSERRDYFHETDQDINKKAKAIFANGLTPIICCGESLETYEAGKAVEFVGAQVSAALAGLSEEQVSSLVIAYEPIWAIGTGKSATQDDAQNMCKAVRDVVAADFGQAVADKVRVQYGGSVKPENVAEYMACPDVDGALVGGASLEAESFLALLDFVK

SEQ ID NO: 10327 - protein, 690 aa, Streptococcus agalactiae
ATGGTAAAATTAGTATTCGCACGCCACGGTGAATCTGAGTGGAATAAAGCTAACCTTTTCACTGGATGGGCTGACGTAGATCTTTCAGAAAAAGGTACACAACAAGCTATTGATGCTGGGAAATTAATTCAAGCAGCAGGTATTGAGTTCGACCTTGCTTTTACATCAGTTCTTAAACGTGCCATCAAAACAACTAACCTTGCCCTTGAAGCAGCTGATCAACTTTGGGTACCAGTTGAAAAATCATGGCGCTTGAACGAACGTCATTACGGTGGATTGACAGGAAAAAATAAAGCAGAAGCAGCTGAACAATTTGGTGATGAGCAAGTTCATATTTGGCGTCGTTCATATGATGTATTGCCTCCAGATATGGCTAAAGATGATGAACATTCAGCACATACTGATCGTCGCTATGCTTCACTAGATGATTCTGTTATTCCAGATGCAGAAAACCTAAAAGTTACTTTAGAGCGTGCTCTTCCTTTCTGGGAAGATAAAATTGCTCCTGCTCTTAAAGATGGTAAAAATGTGTTTGTTGGTGCACACGGTAACTCAATCCGTGCTCTTGTAAAACATATCAAACAATTGTCAGATGATGAAATCATGGACGTTGAAATTCCTAACTTCCCACCACTTGTTTTCGAATTTGATGAAAAATTAAACCTTGTTTCAGAATATTACTTAGGTAAA

SEQ ID NO: 10328 - protein, 230 aa, Streptococcus agalactiae; identical to SEQ ID NO: 1448

SEQ ID NO: 10329 - protein, 2043 aa, Streptococcus agalactiae
ATGTTGAATCGTAAAAAAAGGTATCGTCTCACTGTAAAAAAGCAAAATGCTAGCATACCTAGACGATTAAATCTTCTATTTTTTATTATTGTTTTATTATTTACTGTTCTAATTCTTCGTTTAGAGCAAATGCAGATTGGGCAACAATCATTTTACATGAAAAAACTGACAGCTCTTACGAGTTATACAGTGAAAGAATCAAAAGCGAGAGGTCAGATTTTTGATGCTAAGGGAGTTGTCTTAGTTGAAAATGATGAACGTCCTACTGTGGCGTTTTCTAGAGGAAACAATATTTCATCTCAGTCTATCAAAGAGTTAGCGAATAAATTATCACATTACATTACCTTAACCGAAGTTGCTTCAAGCGATAGAGCAAAGAGAGATTATTATTTAGCAGATAAAGCCAACTACAAAAAAGTTGTTGAAAGTTTACCAGATTCTAAACGTTACGATAAATTTGGTAACCATCTAGCCGAATCAACCGTATATGCAAATGCAGTTGCTGCAGTTCCAGTGAGCGCTATTAACTATTCTGAAGATGAGTTAAAAGTGGTTGCCTTATTTAACCAAATGAATGCGACACCAACGTTTGGTTCAGTGAAATTAAGTACAGGCGAATTAAGTGATGATCAAATCAAGAAACTGGATGCTGATAAGAAGGAACTGTTAGGAATTTCTGTAACAAGTAATTGGCATCGTCGTAAAAAAGGAACTTCTTTATCGGATATATTAGGTACTATTTCTACAGAAAAGGCAGGTTTACCAAGAGAAGAAGTTAAAAAATATTTGAAAAAAGGCTATTCACTGAATGACCGAGTGGGAACTTCTTACCTTGAAAAACAATATGAAGATGACTTACAAGGAATCAGACAAATTCGCAAAGTAGTTGTTAATAAAAAAGGTAAAGTTGTTTCAGATAATATTACGCAAGAAGGTAAGTCAGGAAGAAATCTTAAATTAACGATTGATCTTAATTACCAAAACAAAGTAGAAAGTATCTTGAAACAATACTATGGCAGTGAATTATCTAGTGGACGCGCTAGTTTTTCCGAAGGGATGTATGCAGTTGCTATAGAACCTTCAACTGGTAAAGTGTTAGCAATGGCTGGTCTGAAAAATGATCATGGGAATTTAGTTGATGACAGCCTAGGCACTATTGCTAAGAATTTCACGCCAGGATCTGTTGTGAAAGGTGCGACGCTATCATCAGGATGGGAAAATAAAGTTCTTAGAGGAAATGAAGTGCTTTATGACCAAGAAATTGCTAATATACGGTCATGGTTTACACGAGGTTTGACTCCAATATCTGCGGCACAAGCGCTAGAGTATTCATCTAATACTTATATGGTTCAAGTAGCACTTCGTTTAATGGGACAAGACTATAATACAGGAGATGCTTTAACTGATCGAGGCTATCAAGAAGCAATGGCTAAACTAAGGAAAACTTACGGCGAATATGGTTTAGGGGTTTCTACAGGATTAGATTTACCTGAATCAGAAGGTTATGTACCTGGAAAATACAGCTTAGGAACAACTCTAATGGAATCGTTCGGTCAGTATGATGCCTATACACCAATGCAACTTGGTCAGTATATCTCAACTATTGCGAATAATGGGAATCGTTTAGCACCTCACGTGGTTTCAGATATCTATGAAGGGAATGATTCTAATAAGTTCGCTCAATTGGTTCGTTCAATCACTCCTAAAACACTAAATAAGATAGCTATCTCAGATCAAGAGTTAGCCATTATTCAAGAAGGTTTTTATAACGTTGTCAATAGTGGAAGTGGCTATGCAACTGGTACGTCAATGAGGGGGAATGTGACAACCATTAGTGGTAAAACTGGTACCGCTGAAACATTTGCTAAAAATGTAAATGGACAAACAGTTTCTACCTACAACTTAAACGCTATTGCCTACGATACTAATCGTAAAATAGCAGTAGCGGTAATGTATCCGCATGTTACAACTGATACAACAAAATCCCATCAATTAGTTGCACGAGATATGATTGATCAATATATTTCACAGTTCACAGGACAA

SEQ ID NO: 10330 - protein, 681 aa, Streptococcus agalactiae; identical to SEQ ID NO: 1450

SEQ ID NO: 10331 - protein, 594 aa, Streptococcus agalactiae
ATGCTTTACCCAACACCAATTGCTAAATTGATTGACAGCTTTTCAAAATTACCGGGTATAGGTACTAAAACAGCAACACGTTTAGCTTTTTACACCATTGGTATGAGTGATGAAGATGTTAATGAATTTGCTAAGAATTTATTAGCTGCTAAGCGGGAATTAACCTATTGTTCTGTTTGTGGTAATTTGACTGATGATGATCCTTGCTTAATTTGTACAGATAAGACGCGTGACCAGTCTGTTATCTTGGTTGTTGAAGATAGTAAAGATGTGTCAGCTATGGAAAAAATTCAAGAGTATAATGGTTTGTATCATGTCTTACATGGCTTAATTTCACCTATGAATGGTATTAGCCCTGATGACATTAATTTGAAAAGTTTAATTACTCGATTGATGGATGGTCAGGTGACAGAAGTTATTGTTGCTACCAATGCGACTGCTGATGGTGAAGCTACATCAATGTATATTTCACGAGTCTTAAAACCAGCTGGTATCAAAGTGACACGATTAGCGAGAGGTTTAGCTGTTGGTTCAGATATCGAATATGCAGATGAAGTAACCTTGCTTCGAGCAATCGAAAATCGTACAGAGTTA

SEQ ID NO: 10332 - protein, 198 aa, Streptococcus agalactiae; identical to SEQ ID NO: 1452

SEQ ID NO: 10333 - protein, 1044 aa, Streptococcus agalactiae
ATGTCAAAAGAAACATTGATCTTGCTTTACGGTGGTCGCTCTGCGGAACGTGAAGTATCTGTACTGTCTGCAGAAAGCGTCATGCGTGCTATTAATTATGATAAATTTTTTGTTAAAACTTATTTTATCACGCAAGTAGGTCAATTTATTAAAACACAAGAATTTGATGAAATGCCATCTTCAGATGAAAAGTTAATGACAAACCAAACTGTTGATTTAGACAAAATGGTTCGTCCAAGTGATATCTATGATGATAATGCAATTGTTTTCCCCGTTTTACATGGACCAATGGGGGAAGATGGTTCTATCCAAGGATTTTTAGAAGTTTTAAGGATGCCTTATGTTGGGACTAATATTCTATCTTCAAGCGTGGCTATGGATAAAATTACAACAAAACAAGTCCTTGCAACAGTAGGTGTACCTCAGGTTGCATATCAAACTTATTTTGAGGGTGATGATTTGGAACATGCGATTAAACTCTCTTTAGAAACTTTAAGTTTCCCAATTTTTGTAAAACCGGCTAATATGGGGTCATCAGTAGGTATTTCAAAAGCGACAGATGAATCCTCACTTCGCTCTGCAATTGACTTAGCTCTCAAGTATGATAGCCGTATTTTGATTGAACAAGGCGTGACAGCTCGTGAAATTGAAGTAGGTATTTTAGGCAATAATGATGTTAAGACAACTTTTCCTGGCGAAGTCGTTAAAGACGTCGATTTCTATGACTATGACGCCAAATATATTGATAATAAAATTATTATGGATATTCCAGCTAAAGTTGATGAAGCAACTATGGAAGCAATGCGTCAATATGCAAGTAAAGCTTTTAAAGCAATCGGGGCTTGTGGTTTATCACGCTGTGATTTCTTTTTGACGAAAGATGGACAAATCTTCTTAAACGAACTGAATACAATGCCCGGTTTTACTCAGTGGTCAATGTATCCCCTGCTTTGGGAAAATATGGGGCTAACTTATAGTGATTTGATTGAAAAGTTAGTTATGTTAGCTAAAGAAATGTTTGAAAAACGTGAGAGTCATTTAATT

SEQ ID NO: 10334 - protein, 348 aa, Streptococcus agalactiae
MSKETLILLYGGRSAEREVSVLSAESVMRAINYDKFFVKTYFITQVGQFIKTQEFDEMPSSDEKLMTNQTVDLDKMVRPSDIYDDNAIVFPVLHGPMGEDGSIQGFLEVLRMPYVGTNILSSSVAMDKITTKQVLATVGVPQVAYQTYFEGDDLEHAIKLSLETLSFPIFVKPANMGSSVGISKATDESSLRSAIDLALKYDSRILIEQGVTAREIEVGILGNNDVKTTFPGEVVKDVDFYDYDAKYIDNKIIMDIPAKVDEATMEAMRQYASKAFKAIGACGLSRCDFFLTKDGQIFLNELNTMPGFTQWSMYPLLWENMGLTYSDLIEKLVMLAKEMFEKRESHLI

SEQ ID NO: 10335 - protein, 1365 aa, Streptococcus agalactiae
ATGAAGCTTAGTTTGCATGAAGTTGCTAAAGTAGTTGGCGCTAAAAATCAAGTATCAGAGTTTGAAGACGTTCCCCTGGGAAATATTGAATTTGATAGTCGTAATATCAGTGAAGGTGACTTATTTCTTCCCTTAAAAGGAGCAAGAGATGGACATGAGTTTATAGAGATGGCTTTTGATAATGGAGCAATAGCAACCATTTCAGAGAAGGAAATAGAGGGTCATCCTTATCTTTTAGTGTCTGATGCACTTAAAGCATTTCAAGTCTTGGCACAGTATTATATTGAAAAGATGAACGTTGATGTTATTGCAGTAACTGGCTCAAATGGTAAGACAACAACTAAAGATATGATAGCTGCAATCTTATCAACCACATATAAGACTTATAAAACACAAGGAAACTACAATAACGAGATTGGCTTACCCTATACTGTGCTACACATGCCAGAAGATACTGAAAAAATTATTTTGGAGATGGGACAGGATCATCTTGGAGATATCCATGTGTTATCTGAAATTGCAAAACCACGTATTGCTGTTGTTACTTTGATTGGTGAAGCACACTTAGAATTTTTTGGTAGTCGAGAAAAGATTGCAGAAGGGAAAATGCAAATCACAGATGGTATGAGTTCAGATGGCATATTAATTGCACCGGGAGATCCAATTATTGATCCATATCTTCCAGCAAACCAGATGACTATTCGTTTTGGTCATGACCAAGAATTGCAAGTGACAGAACTCAAAGAAGAAAAACATTCCTTAACTTTTAAAACTAATGCTTTGGAGCACCAATTACGTATACCAGTACCTGGTAAGTACAATGCAACTAATGCGATGGTCGCTGCCTATGTTGGAAAATTATTAGCAGTAGCAGAAGAAGATATAGTGGATGCTCTAGAAAATCTTCAACTAACTCGTAATCGCACCGAATGGAAGAAATCAGCCAATGGAGCAGATATTTTATCAGATGTTTACAATGCTAACCCAACGGCTATGCGATTGATACTAGAAACCTTTTCAGCTATTCCCAATAATGATGGTGGAAAGAAGATTGCTCTTTTAGCTGATATGAAAGAACTGGGAGAACAATCTGTGGATTTACATAATCAAATGATTATGAGTATCAGACCTGACTCTATTGATACTTTGATTTGTTATGGCCAGGATATTGAGGGGTTGGCTCAATTAGCAAGCCAGATGTTCCCAATTGGTAAAGTGTATTTCTTTAAAAAGAATCAAGAAGTAGATCAGTTTGATCAATTGCTTGCAAAAGTAAAAGATACTCTTAAGGAGAAAGATCAAATATTATTAAAAGGTTCTAACTCAATGAATCTTTCTAAAATAGTTGATATTCTTGAAGTAGGA

SEQ ID NO: 10336 - protein, 455 aa, Streptococcus agalactiae
MKLSLHEVAKVVGAKNQVSEFEDVPLGNIEFDSRNISEGDLFLPLKGARDGHEFIEMAFDNGAIATISEKEIEGHPYLLVSDALKAFQVLAQYYIEKMNVDVIAVTGSNGKTTTKDMIAAILSTTYKTYKTQGNYNNEIGLPYTVLHMPEDTEKIILEMGQDHLGDIHVLSEIAKPRIAVVTLIGEAHLEFFGSREKIAEGKMQITDGMSSDGILIAPGDPIIDPYLPANQMTIRFGHDQELQVTELKEEKHSLTFKTNALEHQLRIPVPGKYNATNAMVAAYVGKLLAVAEEDIVDALENLQLTRNRTEWKKSANGADILSDVYNANPTAMRLILETFSAIPNNDGGKKIALLADMKELGEQSVDLHNQMIMSIRPDSIDTLICYGQDIEGLAQLASQMFPIGKVYFFKKNQEVDQFDQLLAKVKDTLKEKDQILLKGSNSMNLSKIVDILEVG

SEQ ID NO: 10337 - protein, 1164 aa, Streptococcus agalactiae
ATGCTAGGATCAACTTATGCTTGGAGTGTGTTTCGTAACCCAATCATCTCAGAGACTGGTTGGGATATTTCATCAGTTTCATTCGCTTTTAGTTTGGCTATTTTTTGTCTAGGAATGTCTGCAGCTTTTATGGGACACTTAGTAGAGCGTTTTGGTCCTAGGATAATGGGAATGATTTCTGCTATTTTATATGGAGCAGGGAATGTGTTAACAGGTTTAGCCATTGAAACTCAGCAGTTATGGTTACTGTATGTTGCATACGGTATTTTAGGAGGAATCGGACTTGGTTCAGGTTATATTACTCCAGTATCGACTATTATTAAATGGTTTCCTGATAGGAGGGGACTAGCAACAGGATTCGCTATTATGGGATTTGGCTTTGCTTCTTTAGTAACAAGTCCGCTTGCACAATCCTTAATGATTAGGATTGGTGTAGGTAAAACATTTTATATTTTGGGATTAGTATATTTTTTTGTCATGATGATTGCCTCACAATTTATTAAACAACCACCTCAGGAAAAAATAACTATTTTGACTCACGACGGTAAAAAGAATGCTATGAATTCACAAATTATTACTGGATTAAAAGCAAATGCTGCTATAAAATCAAAAACCTTTTACATCATTTGGTTGACTTTGTTTATTAATATTTCGTGTGGCTTAGGTTTAATATCAGCAGCTTCACCAATGGCACAAGATTTAGCAGGCTATTCCGCAGAATCTGCAGCCTTATTAGTAGGGGTACTAGGGATATTTAACGGTTTTGGACGTCTGTTATGGGCAAGTCTCTCTGACTACATTGGACGCCCGTTGACCTTTATAATATTATTTATTGTGAACTTTATTATGACTTCTAGTTTATTTTTGTCATTCAATGCTATTGTATTTGCAATAGCAATGTCTATTTTAATGACTTGTTATGGTGCAGGCTTTTCCTTATTACCTGCTTATCTAAGTGATATTTTTGGAACAAAGGAATTAGCTACTTTACATGGTTATAGTTTAACAGCATGGGCAATAGCAGGTCTGTTTGGGCCCCTATTGTTATCAAAGACATATTCATGGGGAAATTCCTATCAATTGACATTAATGGTTTTTGGTTTTTTATTCTTATTCGGATTATTGTTATCTCTATATTTAAGAAAATTAACAACTAAAGTTGTG

SEQ ID NO: 10338 - protein, 388 aa, Streptococcus agalactiae
MLGSTYAWSVFRNPIISETGWDISSVSFAFSLAIFCLGMSAAFMGHLVERFGPRIMGMISAILYGAGNVLTGLAIETQQLWLLYVAYGILGGIGLGSGYITPVSTIIKWFPDRRGLATGFAIMGFGFASLVTSPLAQSLMIRIGVGKTFYILGLVYFFVMMIASQFIKQPPQEKITILTHDGKKNAMNSQIITGLKANAAIKSKTFYIIWLTLFINISCGLGLISAASPMAQDLAGYSAESAALLVGVLGIFNGFGRLLWASLSDYIGRPLTFIILFIVNFIMTSSLFLSFNAIVFAIAMSILMTCYGAGFSLLPAYLSDIFGTKELATLHGYSLTAWAIAGLFGPLLLSKTYSWGNSYQLTLMVFGFLFLFGLLLSLYLRKLTTKVV

SEQ ID NO: 10339 - protein, 684 aa, Streptococcus agalactiae
ATGATAGAATTCTTTTCTAATATCAGAACAGAGATTCCGCAGATGCCTTTACTTATCCATAGTTTGATTTTATCTGTCTTACCTTTTCTGATGTGGCTGACTTTGGTTAATAGAGATAAGCCTTTGTATAAAACTATTTGGAGTATCCTTTTAGGACTTCAGTTAATTACGATTTATACTTGGTTTTTCTGGGCAAAATTGCCTTTATCTGAAAGTCTTCCCCTTTACCATTGTCGAATAGGCATGTTTGTCGTTCTCTTGGCGAGGCCTGGAATATTAAAGGATTATTTCGCATTGTTAGGAGTAGTAGGTGGAGTATTGGCAATGATTCACCCAGACTTTTACCCTTACCAGTTTCTACATGTGACTAATATTTTCTTCTTTATTGGACATTTTGCTTTATTTGTCCTTAGTTTACTACATCTGATGACACAGTCCAATTTGGACAAATTAAATCCAAAATTGATTATACAACTAACGCTTCTCATTAATATGTCTTTGATTTTTATTAACCTCTTGACTGGGGGGAATTATGGCTTTATGATGAAGACACCAATACTAGGAATAACAAATCCCTTTTTAAACCTTTTTATAGTGACAACTCTATTAAGTTTTCTCGTCCTATTTGTTAAACAAATTTTCCAAAAAGTGAGAATGAGAGCTAGTCTTAAAACAGAAGAATCT

SEQ ID NO: 10340 - protein, 228 aa, Streptococcus agalactiae
MIEFFSNIRTEIPQMPLLIHSLILSVLPFLMWLTLVNRDKPLYKTIWSILLGLQLITIYTWFFWAKLPLSESLPLYHCRIGMFVVLLARPGILKDYFALLGVVGGVLAMIHPDFYPYQFLHVTNIFFFIGHFALFVLSLLHLMTQSNLDKLNPKLIIQLTLLINMSLIFINLLTGGNYGFMMKTPILGITNPFLNLFIVTTLLSFLVLFVKQIFQKVRMRASLKTEES

SEQ ID NO: 10341 - protein, 653 aa, Streptococcus agalactiae
GTGAGAGACCAGAATGCTGAACCTGTTTCAGGCAGGACAGTTACCTTAAAAACACAAGCTGGTCGTGAGATTGCTAGCTTGGTTTCTGGTGACAATGGATTAACTCGCTTTACTGATCGTTTACTAGATGGAACATTCTACCAATATTTTGTTGATGGGAAAAAAATTGGTGATATTGTACCTGGAGAATCAAGAAGTGCATATGTTAATGTTGCACCTAAAAAAGATTATTTTACCTTTACAGTCACTGCTTTAGATAAAGATGGACTTGTTGTTAAGGGAAAAGAAGTAACGTTGACTGATATTACTGATGGTAAAGCAGTAGCGCTTGCTTCTTTAAAAACGAATGATAATGGACAAGCTATCTTTACCAACCTACCATTATCAAGAAATATCAGTGTTTCAATTGATGGAAAATCAAAGGGCTATACTCTTCGAACTGATGTAGCAGGCTCTCATAAAGCGGCTGCATTCTATGTAGATGGTAAAGGTACCAAAGCACCTCAATTTAGTGCAGAAGCAGCGGTTGTAACTGTTTACGATGCTAATGGAAATACTATAGCAAACCAAGAAGTGACATTAACTAATTCAAATGGGACAATTGTTGCAAAAGGTTTGACGAAAAGATGGCAAAGCAAGGTTCGCCAATAAAT

SEQ ID NO: 10342 - protein, 218 aa, Streptococcus agalactiae
MRDQNAEPVSGRTVTLKTQAGREIASLVSGDNGLTRFTDRLLDGTFYQYFVDGKKIGDIVPGESRSAYVNVAPKKDYFTFTVTALDKDGLVVKGKEVTLTDITDGKAVALASLKTNDNGQAIFTNLPLSRNISVSIDGKSKGYTLRTDVAGSHKAAAFYVDGKGTKAPQFSAEAAVVTVYDANGNTIANQEVTLTNSNGTIVAKGLTEKMAKQGSPIN

SEQ ID NO: 10343 - protein, 444 aa, Streptococcus agalactiae
ATGGCAGGAACGTTATACAATATTTTTGTAAATGGTATTGAGATGCCTAAAACTGCCCTTGTTGGTAGTGATGTCAGTGTTTTTCTAACAGATAAACAAATTAAGAAAGAAAAACCTGTTACTCCTGATAAATTGGATAAAGAAATGAACCAAGAGAAGGAAAAGGAGCTCTTAGATACTCCAAAACCAGTACCACCTACTTCGAAACCAACAGCACCAATTAAAAATAAAAAGGACGATTCCCCTAAGAAGTTCACGAAAAGTCAATCTTCTAGTTTGAAGTCAAGTGTTAAGGCTATAGGTGCTAAGCCAAAAGCTATGACAGCCTTAGCTAAAAAATTGCCTAAAACTGGTGATCAAGCCATTAGTATTTTAACTTTGGTTGGTTTTATTGTAACAGGGTTAGCGATTATGTTAGGCTTCCTTAAAAAATCACGATCAAAA

SEQ ID NO: 10344 - protein, 148 aa, Streptococcus agalactiae
MAGTLYNIFVNGIEMPKTALVGSDVSVFLTDKQIKKEKPVTPDKLDKEMNQEKEKELLDTPKPVPPTSKPTAPIKNKKDDSPKKFTKSQSSSLKSSVKAIGAKPKAMTALAKKLPKTGDQAISILTLVGFIVTGLAIMLGFLKKSRSK

SEQ ID NO: 10345 - protein, 1542 aa, Streptococcus agalactiae
ATGACATTACAAGACGAAATCAAAAAACGCCGTACTTTTGCCATCATCTCTCACCCGGATGCTGGTAAGACGACTATTACTGAGCAATTATTATATTTTGGTGGTGAAATTAGAGAAGCAGGGACAGTAAAAGGGAAAAAATCAGGTACTTTTGCAAAGTCCGACTGGATGGATATTGAAAAGCAACGGGGTATCTCTGTTACTTCATCTGTTATGCAATTTGATTACGCGGGTAAACGTGTTAATATTTTGGATACACCTGGACATGAGGATTTCTCGGAAGATACATACCGGACCTTAATGGCTGTGGATGCAGCTGTCATGGTTGTAGATTCGGCTAAAGGTATTGAGGCTCAAACTAAAAAACTTTTTGAAGTTGTTAAGCATCGTAATATTCCGGTTTTTACGTTTATTAATAAATTGGACCGTGATGGACGTGAGCCATTGGATTTGCTTGAAGAGTTAGAAGAAGTACTAGGTATTGCTTCTTATCCAATGAATTGGCCGATTGGTATGGGGAAATCATTTGAAGGGCTTTATGATTTACATAATAAACGTTTAGAACTCTATAAGGGAGACGAGCGTTTTGCAAGTATTGAAGACGGTGATCAGCTGTTTGCCAATAATCCATTTTATGAACAAGTCAAAGAAGATATTGAACTTCTTCAAGAAGCAGGTAATGACTTTTCAGAACAAGCTATTCTTGATGGTGACCTAACTCCAGTATTCTTTGGCTCTGCCCTTACGAACTTTGGAGTTCAGACTTTTCTTGATACTTTCTTGGAGTTTGCTCCAGAACCTCATGGTCACAAGACTACAGAAGGTAATGTTATTGACCCCTTGGCTAAAGATTTTTCAGGTTTTGTCTTTAAAATTCAAGCTAACATGGACCCACGTCATCGCGACCGTATTGCTTTTGTTCGTATTGTTTCTGGTGAATTTGAGCGCGGTATGGGAGTTAATTTGACACGTACTGGTAAAGGTGCTAAGCTCTCCAATGTTACTCAATTTATGGCAGAATCACGTGAAAATGTGACGAATGCTGTTGCTGGGGATATTATCGGGGTTTATGATACAGGAACTTATCAAGTTGGGGATACCTTAACAGTTGGGAAAAATAAATTTGAATTTGAACCATTACCAACTTTTACCCCAGAATTATTTATGAAAGTATCAGCAAAAAATGTTATGAAGCAGAAATCATTCCACAAAGGTATTGAGCAATTAGTACAAGAAGGAGCAATCCAGCTTTATAAGAATTATCAGACAGGCGAATACATGCTGGGTGCTGTGGGTCAACTTCAGTTTGAAGTTTTTAAACATCGTATGGAAGGTGAATACAATGCTGAAGTTGTTATGACACCAATGGGTAAAAAGACTGTACGTTGGATTAACTCAGACGATTTAGACGAACGCATGTCTTCAAGCCGAAATATTTTAGCAAAAGATCGTTTTGACCAACCAGTTTTCCTATTTGAAAATGATTTTGCACTTCGCTGGTTTGCTGATAAGTATCCTGATGTGAAGCTTGAAGAAAAAATG

SEQ ID NO: 10346 - protein, 514 aa, Streptococcus agalactiae; identical to SEQ ID NO: 5914

SEQ ID NO: 10347 - protein, 378 aa, Streptococcus agalactiae
ATGGGAATTTTTTCGGGATTAATGGGAAATGCTTCACAAATGGATACCGATAAAGTCGAGAATCAGTTATCTGATATTCTGATTTCAGATGAACAGGTTGATTTAGCTTATACCTTAATTCGTGATTTGATTGTTTTTACTAATTATCGTTTAATTTTAGTCGATAAACAGGGGGTGACAGGTAAAAAGGTTTCTTATAATTCTATACCTTATGCTTCTATATCACGTTTTACAGTGGAAACTAGTGGTCATTTTGATTTAGATGCTGAGTTAAAGATTTGGATATCATCAGCAATAGAACCAGCAGAAGTACTTCAGTTTAAGAACGACCGTAACATAGTGAGTATACAGAAAGCTTTGGCGACAGCTGTTTTAAAA

SEQ ID NO: 10348 - protein, 126 aa, Streptococcus agalactiae
MGIFSGLMGNASQMDTDKVENQLSDILISDEQVDLAYTLIRDLIVFTNYRLILVDKQGVTGKKVSYNSIPYASISRFTVETSGHFDLDAELKIWISSAIEPAEVLQFKNDRNIVSIQKALATAVLK

SEQ ID NO: 10349 - protein, 731 aa, Streptococcus agalactiae
ATGATAATAGAATTAAAGAGTGTTGGAAAAATTTTTCCAAAATCACAGTTTAGATTAGATGATATTTCTTTTAATATAGAAGAAGGCGAGATAGTTGGTCTGATTGGTTCTAATGGTACTGGAAAGAGTACTATTTTGAAGATGATTAATGGCTTAATCCCTTATGATAAAGGAAATATTTATTATCAAGGAAAAGAAGTGAAGTCTTTTTCTGATAATAAGTTACGTCAGATGCGTAAAGATATTGCTTATATTTTTCAAAATCATAATTTGTTAGCAGGAGAAAGTGTATATTATCATCTAGCTTTAGTTTATAAATTAAATCATCAAAAAGTAAATCATGACGCAATTAATGATATCTTAGATTTTTTAGGTTTGATGGATTTAAAACAGGTGAAATGCCATAGTTTGAGTGGTGGGCAGCAACAAAAAGTTGCAATCGCTATGGCTGTTTTGCAAAAACCGAAACTTATTCTATGTGATGAGATCAGCTCTGCCTTAGATACTAATAGTGAAAAAGAGATATTTAACTTGTTGTCTGATCTTCGTGAAAAATATGGTATCTCTATCTTGATGATTGCTCATCACCTATCTCTTTTAAAACAATATTGTGATCGTGTAATGATTTTGGATCACCAGACTATTGTAGATACTGTTGTTCCAGTGAAAGCAACCTGAATCAATTAAAGTCAAACTACGTAGATCAAGTAAAGGAGTTTTTGTTACATGAT

SEQ ID NO: 10350 - protein, 244 aa, Streptococcus agalactiae
MIIELKSVGKIFPKSQFRLDDISFNIEEGEIVGLIGSNGTGKSTILKMINGLIPYDKGNIYYQGKEVKSFSDNKLRQMRKDIAYIFQNHNLLAGESVYYHLALVYKLNHQKVNHDAINDILDFLGLMDLKQVKCHSLSGGQQQKVAIAMAVLQKPKLILCDEISSALDTNSEKEIFNLLSDLREKYGISILMIAHHLSLLKQYCDRVMILDHQTIVDTVVPVKATLNQLKSNYVDQVKEFLLHD

SEQ ID NO: 10351 - protein, 660 aa, Streptococcus agalactiae
ATGATTGACATTATTGAAAAACATGGCGAAGGTATCTTAAAATCATTTTGGGAAACCAATTTAATGTTAGGGTTAACCTTGATTCTTTGTTTTCTAATTGCTTTTCCAACAGGTATTTTATTGTTTTCATTGAGAAAGTCTTACTTGATTAAACATTCTTTAGCCTATCAACTACTAAATTTATTTTTAGGTACGTTACGGAGTGTCCCTTTCCTTATTTTTATTTTTATCTTAATCCCTCTCAATCGATTAATTTTTGGGACCTCATTTGGAACGATAGCGGCAATCTTACCTCTTACTTTGGTTTCAGTCAGTTTGTATGCACGTTATGTGGAACAAGCTTTATTAAATATACCTCAAGTTGTTGTAGATCGAGCTCTCAGTCTAGGGGCTAACAAGAGACAGATAATTTATTATTTTTTAATCCCCTCCATCAAGATTGACCTTGTTTTATCATTTACTGCAACGGCTATAAGTATTCTTGGCTACTCGACAATAATGGGAGTTATTGGTGCAGGAGGTTTGGGTGAATATGCCTATCGTTTTGGCTATCAAGAGTATGACTACCCAGTTATGTACTTGATTGTTGTCTTATTTATAATATATGTGTTTATCTTACAGAGTTTGGGCTATTTTATAGCAAACCGCTACTCAAGAAAA

SEQ ID NO: 10352 - protein, 220 aa, Streptococcus agalactiae; identical to SEQ ID NO: 1466

SEQ ID NO: 10353 - protein, 827 aa, Streptococcus agalactiae
ATGAAAAAATTACTTTCCCTAACATGTCTAATCATGATGTCTTTATGTTTAGTGGCATGTACTAAGCAAGCAATGTCGTCTAAGAAAATTAAAGATAAGAATAGTAAAGAAAAGGTGATTACTGTTGCAACTTACAGCAAACCTACATCTACCTTTTTAGATTTGGTTAAAGATAATGTAAAAGAAAAAGGATATACTTTAAAGGTTGTCATGGTCTCTGACTATATTCAGGCTAACATTGCTTTAGAAAACAAAGAACATGATGCTAACCTTTTACAACATGAATTTTTCATGAGTATCTTTAATAAGGAAAATGATGGTCATCTAGTATCAATTACACCAATTTATCATTCATTGGCTGGTTTTTATGGTCAACATTTGAAAAATATTGCCGAGCTTAAAGACGGTGCTAAGGTAGCGATTCCGTCTGATCCTGCCAATATGACTAGAGCTCTGCTATTATTGCAAGAAAAGAAACTTATCACCTTAAAGAATACGTCCAAAAAGACCAAGGCTATCGAAGATATTATTACTAACCCTAAAAAATTACGAATTGAACCTGTAGCATTACTTAACCTCAATCAGGCCTATTTTGAATATGACCTTGTCTTTAATTTCCCTGGATATGTGACAAAAATCAATCTAGTTCCTAAAAGGGATAGATTATTATATGAGAAAAAACCAGATATCCGTTTGCAGGTGCCTTGGTAGCTCGTGAAGATAATAAAAATAGTGATAAAATAAAAGTACTTAAAGAAGTACTAACAAGTAAAGAGATTCGTCACTATATCACTAAGGAGATTCCAAGTGAAGCAGCCGTTGCGTTC

SEQ ID NO: 10354 - protein, 276 aa, Streptococcus agalactiae; identical to SEQ ID NO: 1468

SEQ ID NO: 10355 - protein, 1583 aa, Streptococcus agalactiae
TTGAAATTTACAGAACTTAACTTATCGCAAGATATTCTTTCAGCGGTAGAAAAAGCAGGCTTTGTAGAGCCATCACCAATCCAAGAAATGACTATCCCACTTGCTCTTGAAGGCAAAGATGTCATTGGTCAAGCGCAGACAGGTACAGGAAAAACTGCAGCTTTTGGGTTACCAACTTTAAATAAAATTCATACTGAAGATAATACTATCCAAGCACTTATTATTGCTCCTACACGTGAACTTGCAGTACAATCACAAGAAGAATTGTTCCGTTTTGGACGCGATAAAGGTGTTAAGGTCCGCTCTGTTTATGGTGGGTCAAGTATGAAAAACAAATCAAGGCATTACGTTCAGGAGCACACGTTGTTGTTGGAACTCCAGGTCGATTACTTGATTTAATTAAACGTAAAGCACTTAAACTTAATCACATTGAAACTCTTATTCTTGATGAAGCAGACGAAATGCTTAACATGGGATTTTTAGAGGACATTGAAGCAATCATTAGTCGTGTACCAGAAACACGTCAAACTCTTTTATTCTCAGCGACAATGCCTGATCCAATCAAACGTATCGGGGTTAAATTCATGAAAGATCCTGAGCATGTTAAAATTAAAGCAACTGAATTAACTAATGTGAATGTTGATCAGTATTATGTTCGTGTTAAGGAAAATGAAAAATTCGATACTATGACACGTTTGATGGACGTTGATCAACCAGAATTGTCAATTGTCTTTGGACGTACGAAACGTCGTGTAGATGAATTAACTCGTGGACTAAAATTACGTGGTTTCCGAGCAGAAGGAATTCATGGAGACTTAGATCAAAATAAACGTCTTCGTGTTATCAGAGACTTTAAAAATGACCATATTGATATTCTTGTTGCCACAGATGTTGCTGCGCGTGGTTTAGATATTTCAGGCGTTACACATGTTTACAACTATGATATTCCCCAAGATCCCGAAAGTTATGTTCACCGTATTGGACGTACTGGTCGTGCTGGTAAATCTGGTCAATCTATCACTTTTGTTTCACCAAACGAAATGGGATATTTGACAATTATTGAAAACTTAACTAAAAAACGTATGACTGGAATGAAGCCTGCTACTGCAAGCGAAGCATTTCAGGCTAAGAAAAAAGTTGCATTGAAACGTATTGCACGTGACTTTGAGGATCAGGAATTAGTTTCTAAATTTGATAAATTTAAAGCCGATGCTTTAGAATTAGCAACTCAATACACACCAGAAGAACTTGCTCTTTATGTCTTAAGCTTAACAGTTCAGGATCCAGAATCGTTACCAGAAGTTGAAATCACACGTGAAAAACCATTACCATTTAAACCATCAGGTGGTGGCTTTAAAGGTAAAGGTGGACGAGGCAATGGCCGTGGTGGCGATCGTCGACGCAATGATCGTGGTGATCGTCGTGGAAATCGTGACCGTGATGATCGTGGTGGTCGTTGTGATTTTAAACGTCGTGATGATAAGTTCAAGAAAGATAATCGTCGTCAAGAAAATAAAAAACCTCATAAAAACACTTCAAGTGAAAAACAAACTGGATTTGTTATTCGCAACAAAGGCGATAAA

SEQ ID NO: 10356 - protein, 528 aa, Streptococcus agalactiae; identical to SEQ ID NO: 1470

SEQ ID NO: 10357 - protein, 264 aa, Streptococcus agalactiae; identical to SEQ ID NO: 5925

SEQ ID NO: 10358 - protein, 88 aa, Streptococcus agalactiae; identical to SEQ ID NO: 1472

SEQ ID NO: 10359 - protein, 762 aa, Streptococcus agalactiae
ATGATAGATACAATTTTAAAAGAAAATGAACGCATTGATCAGCTTTTTTCAACTGATGTCAAAATCATCCAAAACAAAGAAGTTTTTTCCTATTCCATAGATAGTGTTTTATTGTCTCGGTTCCCTAAACTTCCTTCTCGTGGTCTTATCGTTGACTTATGTAGTGGTAATGGTGCTGTCGGTTTGTTTGCCAGCACCAAAACAAATGCGACAATTATAGAGATCGAACTACAAGAGAGCCTTGCGGATATGGCTAAGCGTTCGATTAAGCTCAATAAATTGGAAAAACAGGTTACTATGATTAATGATGATTTAAAAAATCTTCTTGATCATGTTCAACGTTCAAACGTTGATTTAATGCTTTGCAATCCACCTTATTTCAAAGCAAGCGAAACCTCTAAAAAAAATCTAAGCCCGCATTATCTCCTTGCAAGACACGAAATAACAACAAACCTTAGAGAGATTTGTCAAATTGCTCAACATGCTCTAAAAACAAAAGGACGTATCGCTATGGTACATCGTCCAGACCGTTTCCTTGAAATTATTGATACGATGCGTCAGTTCAATTTAGCACCTAAACGTATCCAATTTGTTTATCCAAAATTAGGAAAAGATGCTAATATGCTTTTAATTGAAGCTATTAAAGATGGCTCGACAGAAGGTATGAAAATACTTCCTCCTCTTGTTGTTCATCAAGATAATGGAGACTATACTGAGACTATTTTTGATATATATTTCGGAGAAAACGGAAAATCTCATGAT

SEQ ID NO: 10360 - protein, 254 aa, Streptococcus agalactiae; identical to SEQ ID NO: 1474

SEQ ID NO: 10361 - protein, 738 aa, Streptococcus agalactiae
ATGTTCTATACTTACTTACGTACTTTAGTTATGTTCTTGATTTGGGTGGCTAATGGTAATGCGCACTATCATAATGAAGATAAAATGTTAAAAGATGATGAAAATTATATTTTAGTAGCTCCACACAGAACATTTTGGGATCCTGTGTACATGGCTTTTGCTGCTAGACCCAAACAGTTTATTTTTATGGCCAAAAAAGAATTATTCACGAATCGTTTGTTTGGTTGGTGGATTAAAATGTGTGGTGCTTTCCCTATTGATCGTGAAAAGCCAGGGCAAGATGCTATTCGATATCCTGTAAAGATGCTGAAAAATAGCAACCGTTCTTTGGTGATGTTTCCGAGTGGAAGCCGCCACTCCAAAGATGTCAAAGGAGGCGTAGCTGTTATTGCAAAAATGGCAAAAGTCAGAATTATGCCAGCAGCATATAGAGGTCCTATGGTTTTTAAAAATCTATTAAAGGGGCATCGTGTTGATATGAATTTTGGTAACCCTATTGATGTTTCTGATATTAAGCGTATGGATGCCGAAGGGATTGCAGAAGTATCTCGTCGTATTCAGGAAGAATTTGATCGTTTAGATAGAGAAAATGAAACTTATGATGATGGTAAGAAATTAAATCCATTGACTTATATTTATCGTCTACCTTTAGCAATTATAGCTATTGTCTTGCTTGTCCTAACTCTAATTTTTAGTTATTTAGCAAGCTTTGTGTGGGATCCACAAAAACATCTAAAA

SEQ ID NO: 10362 - protein, 246 aa, Streptococcus agalactiae; identical to SEQ ID NO: 1476

SEQ ID NO: 10363 - protein, 651 aa, Streptococcus agalactiae
ATGTTTGAAATAGTATTGGAAAAAATTAAATCGCATAAATGGGAGACAACAGGAATTATTGTAGGACTCTTATTATTTGGAATTTTGGGTTTAAATCATTTTGGCACTCATCATAAAGAAGACAATTTAAATATCAATTTAGAGAAAAAAGTATCAACTATAACAGAAAAAAAGGTACCAATGATTAGTCACGTCAAAGATAAAGTATCTAATCAAGTAACGGTTGACGTAAAAGGGGCAGTCAATCATCCAGGTGTTTATAGTTTGCCTTCTCAAAGTCGTGTAACAGATGCGATTAAGCGTGCAGGTGGACTAAGCAATCTCGCTGATAGTAAATCCGTTAATCTAGCACAGAAATTACAAGATGAGACGGTTATCTATGTTGCTCAAAAAGGTGAAAAAATAACTGTTGTGGAAGAGGAGAAAGCAAATAATATCGCTACTCAGGGAAATAGTAAGGGGAAAATTAATCTTAATAAAGCAGATTTATCAAGTCTTCAGACCATATCAGGCGTTGGGGCTAAAAGAGCTCAAGATATTTTAGATTATCGTGATAGTCAAGGTGGTTTTAAAACTATTGATGACCTCAAAAACGTATCAGGTATTGGTGAGAAAACACTAGAAAAATTACGTCAAGATGTTACAATTGAC

SEQ ID NO: 10364 - protein, 217 aa, Streptococcus agalactiae; identical to SEQ ID NO: 5932

SEQ ID NO: 10365 - protein, 2226 aa, Streptococcus agalactiae
TTGACTAAGTATTTTCCTCTAAAACCTATTTATTTAGCATTGTTGGTCTTCCAAATTTACTTACTAGTGTTTTCTTGGACAATGCTTGGTTGTGCCTTTCTTTTATTTTCTTTTATTTTTCTGATTTATCAATATGATCGTGAAACTATTTTTAAAACAATAGCAATAGTAATTTTTTTCTTATTTTATTTTTTATGGCAAAATCACAATATGAATGTCCAATATCAAAGAGTACCGAATCATATTAGCCAGATTAAAGTGCGTATTGATACTATTTCTATCAATGGTGATGTTTTATCATTCCAGGCAGATGCTTCAGGTAACACTTATCAAGCTTTTTACACATTAAAAAATAAAAGTGAGAAAGATTATTTTCAAAATCTTGATAATAATATAATGATAATTGCAGATATCAAACTTGAAGAAGCAGAGGAGAGAAGGCATTTTAATGGCTTTGATTATCGTCAGTATTTAAAAAGACATGGAATTTATCGTATCGCCAAAGTGACAAAGATAAAACAGATACGCTTATTTCAACATAGGTCTTTCTTTGCTCTTATGTCTAAGTGGCGTAGAAGTGCAATTGTTATTAGTCAAACTTTTCCAAATCCTATGCGTCACTATATGTCAGGGCTTTTGTTTGGATATCTAGATAAGACCTTTGATGACATGTCCGATTTATATAGTAGTCTAGGTATTATACATTTATTTGCTTTGTCAGGTATGCAAGTAGGTTTTTTTCTCGGTATTTTTCGTTATATCTGTCTACGTATTGGCTTACGTCTAGACCATGTTTGGTTACTTCAAATACCATTCTCGCTAATTTATGCTGGTTTAACAGGCTTTAGTATCTCAGTCGTTAGGGCACTTATTCAATCTTTATTATCACATAGCGGTGTCAAGAAAGATGAGAACTTTGCTCTCTGCTTGTTAATTTGTCTTATCTCCCTCCCCCACTCACTTTTGACTACGGGAGGAGTTCTTAGCTTTGCTTATGCTTTTATACTTACGATGACCTCCTTTGATCATTTTTCGAGTATAAAAAAAGTAGCTATCGAATCTTTGACAGTCTCTGTAGGAATTCTTCCCATACTAACCTACTATTTTTCGGGTTTTCAACCAATATCAATTATATTAACAGCACTTTTATCTTTTGCATTTGATATTATATTTTTGCCTTTATTAACTGTTATATTTGTCTTATCGCCTATCGTTAAATTAAGTTGTATTAATAGTTTGTTTGAAATCCTAGAAGTGTTATTAAAATGGACTGGGCAACTGTTTCCAAGGCCACTTATTTTTGGAAAGCCCAGCCTTTTTCTTTTAATAGTCATGATTATAATTTTGGGATTACTTTATGATTATTATCATTCTAAATGTTTTCGTTATTGCTCCCTTCTTATTATCTTTACCTTGTTTTTTATCACTAAGAATCCAATTACTAACGAGGTTGCGATTTTAGATGTTGGACAGGGAGATAGTATTTTAGTGAGGGATTGGTTAGGAAAAACAATTTTAATTGATACTGGGGGAAGGGTGAGATTTGAACAGCCTGAAGAATGGAAACAAAAAGTAAATCAGTCTAATGCTAAGAGAACGCTCATTCCTTACTTGAAAAGCAGAGGTATTAGCAAGATAGATGATTTAGTGATAACTCATACCGATACAGATCATATGGGGGATATGGAAGTTATCTCAAAGCATTTTAAAGTTGCACGTTTGATTACAAGTTCAGGTTCTTTAACGAATTCGCAGTACGTTAAGCATTTATCAAAGATAGGTGTAGCGGTAAAATCTATAGAAGCCGGTGATAAACTTGCTGTCATGGGAAGTTATTTACAAGTACTTTACCCATGGCACAAGGGTGATGGAAAAAATAATGATTCAATTGTTTTATATGGACATTTATTAGGAAAAGGCTTCTTATTTACCGGTGATTTGGAGGAAGAGGGAGAAAAGCAGTTATTAGAAGCTTATCCTAATTTATCAGTAGATATCCTTAAAGCAGGACATCATGGTTCTAAGGGCTCATCAAGTCTATCCTTTCTGAAAAAGTTGTCTCCTAGTGTGGTTCTAGTTTCAGCTGGTAAAAATAATCGTTACCAGCATCCTCATCAAGAGACTTTACAAAGGTTCCAAAAGATTAAAAGCAAGATTTTCCGAACGGATCAATCAGGTACAATTAGGCTAACAGGATGGTGGAAGTGGCATATTCAGACAGTTCGT

SEQ ID NO: 10366 - protein, 742 aa, Streptococcus agalactiae
MTKYFPLKPIYLALLVFQIYLLVFSWTMLGCAFLLFSFIFLIYQYDRETIFKTIAIVIFFLFYFLWQNHNMNVQYQRVPNHISQIKVRIDTISINGDVLSFQADASGNTYQAFYTLKNKSEKDYFQNLDNNIMIIADIKLEEAEERRHFNGFDYRQYLKRHGIYRIAKVTKIKQIRLFQHRSFFALMSKWRRSAIVISQTFPNPMRHYMSGLLFGYLDKTFDDMSDLYSSLGIIHLFALSGMQVGFFLGIFRYICLRIGLRLDHVWLLQIPFSLIYAGLTGFSISVVRALIQSLLSHSGVKKDENFALCLLICLISLPHSLLTTGGVLSFAYAFILTMTSFDHFSSIKKVAIESLTVSVGILPILTYYFSGFQPISIILTALLSFAFDIIFLPLLTVIFVLSPIVKLSCINSLFEILEVLLKWTGQLFPRPLIFGKPSLFLLIVMIIILGLLYDYYHSKCFRYCSLLIIFTLFFITKNPITNEVAILDVGQGDSILVRDWLGKTILIDTGGRVRFEQPEEWKQKVNQSNAKRTLIPYLKSRGISKIDDLVITHTDTDHMGDMEVISKHFKVARLITSSGSLTNSQYVKHLSKIGVAVKSIEAGDKLAVMGSYLQVLYPWHKGDGKNNDSIVLYGHLLGKGFLFTGDLEEEGEKQLLEAYPNLSVDILKAGHHGSKGSSSLSFLKKLSPSVVLVSAGKNNRYQHPHQETLQRFQKIKSKIFRTDQSGTIRLTGWWKWHIQTVR

SEQ ID NO: 10367 - protein, 807 aa, Streptococcus agalactiae
ATGACTATCAAACGTATTTTTTGTGACATGGATGGTACACTATTAAATAGTGAAGGACAAGTGAGTAAAAGTAACGCTACCTTAATACGTGAGGCAGCGATTCCAGTAACTTTAGTGTCTGCTAGGGCACCTATGGAAATGAAGGATGCCGTAGATGCACTTCAATTAGGAGGAGTCCAAGTTGCTTTTAATGGAGGATTGATTTATAGAATAGGAGATAATAATCAAGTTCTACCTATTCATACACAAATCATTAAAAAAAGCACAGTAAAACAATTGCTAAGAGGAATACGGTTTCATTTTCCTCAAGTTAGTTTATCTTATTACGATCTTAATAACTGGTATTGTGATAAAATAGATGAAGGAATCCGATACGAACATAGTTTAACTCAACAATGCCCAACGTTTATTCATAATGAGGATCAGTTTTTAGAAGGTCACACAAATACTTTTAAAATTATGATGATTACTTTCGATGAAGCAAATATGCTAGAATTAGAAAAATATCTTCAAAGTTTGGAGTTACCAGAAATCACTATTCAACGTTCAGGTAAAGCGTATCTTGAAATTACACATCTCTTAGCCAAAAAATCTAAAGGAATTGCTTACATCCTTCAAAAAGAGCAGTTAGCTAGAGAAGAAACGGCTGCATTTGGAGATGGACATAATGATTTGCCTATGCTTGAAATGGTAGGTTACCCTATTGTTATGGATAATGCTTTTGATGATATCAAAGCGATAGCATATCAACTAACTAAGTCTAATGATGAAGACGGAGTGGGATATGGGATTCAAAAATTTTTAAAG

SEQ ID NO: 10368 - protein, 269 aa, Streptococcus agalactiae; identical to SEQ ID NO: 5936

SEQ ID NO: 10369 - protein, 942 aa, Streptococcus agalactiae
ATGACAAGTATTAGTGATATAGCTAAAAAGGCAGGTGTTGCTAAATCAACAGTTTCCCGTGTTATCAATCATCACCCACATGTTTCTGATGAGACGCGACAAAAAGTAATGGCTCTTATCACCGAATTGGATTATATACCAAATCAACTAGCGCGGGATTTAAGTCGAGGCAAAACACAAAAAATAGGTGTCGTCATTCCCCACACGCGCCATCCTTATTTTACACAATTAATAAATGGCCTATTAGATGCTGCTAAAACTACCGACTATCAACTTGTTATGATGCCTTCGGATTACAACCAAGAATTAGAACTTTCCTACTTGAAACAGCTCAAGATGGAAGCTATTGATGCTTTAATATTCACTTCAAGAGCAATTAGCCTCGATATTATTGAAACTTATGCAAAATATGGACGAATAGTAGTTTGTGAAAAATTGCAGGAATATAATCATCTATCCTCTGCTTACCTTGATCGCTATTCTTCATTTCTAGAGGCGTTTTCTGATATGAAGTTACGAGGTTTGGAGCACTTAGTTTTATTATTTTCAAGGAATAATGAATCCTCTGCTACCTATCAATCCGCATTATTAGCTTATCAAGAGGTCTATGGGCAACTATCCTCTCCATATATGGTAGTTGGGAATGTTCATGACTTTAATGATGGACTAAATTTATCTTATCAATTGGTAAAAGAAGTTAGTATAGATGGTATATTAGCTACAAGTGATGAAGTTGCGGCAGGGCTAATAAAAGGTTATGAAGAAAGTAGGAAAAAATGTCCTTATATTATTGGTCAGGAATGTTTATTAGTTGGGCAACTTTTGAAACTCCCAACAATTGACCACAAATCCTATTATTTAGGGAAATTAGCTTTTAAACAGGCTTTAGCTGAAAAGATTAGTCAAGAAGTTTTATTCTCAGAGTTTTTATCTCAAGACAAT

SEQ ID NO: 10370 - protein, 314 aa, Streptococcus agalactiae
MTSISDIAKKAGVAKSTVSRVINHHPHVSDETRQKVMALITELDYIPNQLARDLSRGKTQKIGVVIPHTRHPYFTQLINGLLDAAKTTDYQLVMMPSDYNQELELSYLKQLKMEAIDALIFTSRAISLDIIETYAKYGRIVVCEKLQEYNHLSSAYLDRYSSFLEAFSDMKLRGLEHLVLLFSRNNESSATYQSALLAYQEVYGQLSSPYMVVGNVHDFNDGLNLSYQLVKEVSIDGILATSDEVAAGLIKGYEESRKKCPYIIGQECLLVGQLLKLPTIDHKSYYLGKLAFKQALAEKISQEVLFSEFLSQDN

SEQ ID NO: 10371 - protein, 990 aa, Streptococcus agalactiae
ATGAAAAACTATCGAAAACTTATTGTACTACTACTTCTAACCTTTTTTGTCATTTTTATGGGAGCATATGCTTACACGCATATTGTTGAAAAAAGATCCCTAACTAGCAATACTATTGAAAAAACTCTACCTGTGGTAAATCAGATTAAGCCTCAAACCATCAAAGAATACCAAAATTACTTAACTAAGGTAGCTAAACGTAATGTTCTTCCTGTAGACATTCCTCAGGCATTAAATAATGAAAAGGTAGAAATTACCGCTACTGATGGCATGCAAACATTCACTTGGAATGATAAAAATAATCCTAAGCAAAAGGTTATCTTCTATGTTCATGGAGGATCATATATCCATCAAGCTTCTGAATTACAATATATTTTTGTCAATAAACTAGCTAAAAAATTAGATGCAAAAGTTGTCTTTCCTATTTACCCTAAAGCTCCTACATATAATTATAGTGATGCTATCCCCAAAATTAAAAAATTATACCAAAATACATTAGCTAGCGTCACATCTCCCAAACAAATTATCCTAGTAGGTGAAAGTGCAGGCGGAGGTCTTGCTTTAGGTCTTGCTGATAACCTTGTCACGGAGCATATCAAACAACCAAAAGAAATTATTTTAATATCACCATGGTTAGATATTGCTACTAATAATCCAAAGATTGAAAAAGTTCAAAAAAAAGATCCCCTTCTTAAAGCTTGGCAATTACAACAAGTAGCTCCTTACTGGGCAAATGGAAAAAAGAATTTTAAAAATCCTCAAGTTAGTCCTCTTTACAGTAGCCAATTTAACAAGATGGCTCCAATATCATTTTTTATAGGAACGCACGATATTTTCTACCCCGATAATCAATTATTACATCAAAAATTAGCAAAAGAAAACATTAAACACCACTATATCGTTGGTCAAAAAATGAACCACGTTTATCCAGTCTTACCGATTCCTGAAGCAGAGACTGCTTTCAAACAAATGCTTAAAATTATCAATCAT

SEQ ID NO: 10372 - protein, 330 aa, Streptococcus agalactiae
MKNYRKLIVLLLLTFFVIFMGAYAYTHIVEKRSLTSNTIEKTLPVVNQIKPQTIKEYQNYLTKVAKRNVLPVDIPQALNNEKVEITATDGMQTFTWNDKNNPKQKVIFYVHGGSYIHQASELQYIFVNKLAKKLDAKVVFPIYPKAPTYNYSDAIPKIKKLYQNTLASVTSPKQIILVGESAGGGLALGLADNLVTEHIKQPKEIILISPWLDIATNNPKIEKVQKKDPLLKAWQLQQVAPYWANGKKNFKNPQVSPLYSSQFNKMAPISFFIGTHDIFYPDNQLLHQKLAKENIKHHYIVGQKMNHVYPVLPIPEAETAFKQMLKIINH

SEQ ID NO: 10373 - protein, 726 aa, Streptococcus agalactiae
ATGTTTCACAGAGAAGATTTTTCAAAAGCATTATTAAAAAAAGCTTTGCAGCCCGGTATGAGAGTTATGGATATTGGTTGTGGTAGTGGGGAATTGACGCGTTTGGCTGCTGATATCGTTGGTAAAGAAGGTGATGTTGTAGGAATTGATATTAATGAGCAACTTTTATGGCAAGCTAGACATGATAATGGCTATGCTAATGTTAGTTATCAAAACGCAGATTTAGCAGCACTTTCCTCCTTTGAAACAAAAAGTTTTGATGCAATTATTGGACGTCGTGTATTAATGTATCAAAAAGATCCAAAGAAAGTAATAGAAAGTTTAACACCTTTGTTAAAGCCAAATGGTTTTTATGTTTTTCAAGAAAGTGATGCAATGTGTTTAGAACTAGCTAAGCCTAGCTTTGTAAATATGAATAAAATACAATCACTAATCTGGCAAACTGTTGAGAAGGAAGGAGGACACATTCATATTGGAAGTCAACTTGAGCAATTAATGTTAGAAGCAGGCTTAATCGTTGACCATTTTGTATCAGAAAATGTCATTCAAACGTCACAAACTGGTACAGATTTATCTTGGCTACTAAATATCATGAAAGAAAGAATACAAAAATATAGTGACCTTCAGGGATTAGAAGATGTCAATTTACAAAAAGAATTAGAAGAGAATAATGACCATTTTATCCGAGATTGTCAATTTGGAATTATTTCTCATAGAGTTGATGAA

SEQ ID NO: 10374 - protein, 242 aa, Streptococcus agalactiae
MFHREDFSKALLKKALQPGMRVMDIGCGSGELTRLAADIVGKEGDVVGIDINEQLLWQARHDNGYANVSYQNADLAALSSFETKSFDAIIGRRVLMYQKDPKKVIESLTPLLKPNGFYVFQESDAMCLELAKPSFVNMNKIQSLIWQTVEKEGGHIHIGSQLEQLMLEAGLIVDHFVSENVIQTSQTGTDLSWLLNIMKERIQKYSDLQGLEDVNLQKELEENNDHFIRDCQFGIISHRVDE

SEQ ID NO: 10375 - protein, 942 aa, Streptococcus agalactiae
ATGAAAGAGAAGCTATTTCAGGTAATTGGATTCAATAAAGACGATTTAGCCTATTCTTATTTTGATTTAAGTGAAGAAGACTATCAAAATGCGGAATTAGACTTAGAAAGTTTACCTTTTTTATCAGACTACAAGGTTGTTATTTTTGATCAGTTTCAAGATATTACAACTGATAAAAAAACTTATTTAGATGAACAAGCAATGAAGCGCTTTGAAGCCTACTTGCAGAATCCTGTAGATACTACGAGACTTGTTATTTGTGCTCCAGGAAAACTTGATGGAAAACGTCGACTTGTAAAGTTATTGAAACGTGATGCTCGTGTTTTAGAGGCTAATACTTTAAAAGAATCAGATTTAAAGACGTATTTTCAAAAATATGCTCACCAAGAAGGATTAGTTTTTGAAGCAGGTGTTTTTGATGAGTTATTGATTAAGTCTAACTATGATTTTAGTGATACTTTAACGAATATCGCTTTCTTAAAGTCATATAAAACAGACGGTCATATTTCGTCCAATGATGTTAGAGAGGCTATCCCTAAAAGCCTGCAAGATAATATATTTGATTTGACTCAAGATGTCTTACTTGGCAGGATAGATTTAGCGCGTGATTTAGTAAGAGATTTACGTCTACAAGGCGAAGACGAAATCAAATTGATTGCAATCATGTTAGGACAGTTTCGGATGTTTTTGCAAGTTAAAATATTGGCTAGTAAAGGGAAGTCAGAGAGTCAAATTGTTTCTGAACTATCCCATTACATAGGACGTAAAATCAACCCTTATCAAGTAAAATTTGCTGTCAGAGATTCTAGAAACCTTCCCCTTGCTTTTTTAAAAGAAGCGATTAGGATTTTAATCGAGACTGACTATGCTATTAAAAGAGGGACTTATGATAAGGATTATCTCTTTGATTTAGCCTTATTAAAAATTGCTCATAAAAAGCCC

SEQ ID NO: 10376 - protein, 314 aa, Streptococcus agalactiae; identical to SEQ ID NO: 1486

SEQ ID NO: 10377 - protein, 606 aa, Streptococcus agalactiae
ATGGCAATTATTTTACCAGATTTACCCTATGCATATGATGCGCTTGAGCCACATATTGATGCTGAGACAATGACACTACATCATGATAAGCACCATGCAACTTATGTTGCTAATGCAAATGCTGCTCTTGAGAAACATCCTGAAATTGGAGAAGACTTAGAGGCGCTCTTAGCTGATGTTTCTCAAATTCCAGAAGATATTCGTCAGGCAGTCATCAATAACGGTGGTGGACATCTTAACCACGCTCTTTTCTGGGAATTGATGTCACCAGAAGAAACTCAAATTTCACAAGAGTTATCTGAAGACATTAATGCAACTTTTGGTTCATTTGAAGACTTTAAAGCTGCTTTCACAGCAGCAGCAACAGGACGTTTTGGTTCAGGTTGGGCTTGGCTTGTTGTTAATGCTGAAGGCAAACTTGAAGTGCTTTCAACTGCCAATCAAGATACTCCAATTATGGAAGGCAAGAAACCTATTTTAGGGCTTGATGTATGGGAGCATGCTTATTACTTAAACTATCGTAATGTTCGTCCTAACTACATCAAAGCTTTCTTTGAAATTATTAACTGGAATAAAGTAAATGAACTTTACCAAGCTGCTAAAGCT

SEQ ID NO: 10378 - protein, 202 aa, Streptococcus agalactiae; identical to SEQ ID NO: 1488

SEQ ID NO: 10379 - protein, 849 aa, Streptococcus agalactiae
ATGATTATAAAACGCGTATTAAATCATAATGCAGTCATATCAGTAACACATCAAGGATTAGATGTGCTACTGATGGGGAAAGGAATTGCATTTAAGAAAAGAATAGGTGATAGGATTAATAGCGATGCTATTGAGAAGTCATTTGTTTTAAAAAATAGTGATAACATGAACCGTTTTACGGAGTTATTTATTACTGTTCCAGAAGAAGTAGTTGCATGTTCAGAACGAATTATCAACCTAGGTAAAATCAAATTGGGTAAGAACTTAGATGAAATTCTTTATATCAATTTGACAGATCATATTCATTCGGCTATTGAAAGACATGAACAAGGAATGGTTATCCAAAATCCACTAAGGTTGGAAATCCAACGTTACTATCCTGATGAATACTCCATTGGGATGAAGGCTCTGGAACTTATAAAGGATGAATTGGGCATTTGTTTAACAATCGATGAGTCGGCTTTTATTGCTATGCACTTTGTAAATGCTGGATTGGATAATCCGTTTAATGAAGCGCATAAAATCACTGAGATTGTATCTTACATTGAACAGAAAGTAAAAATAGATTTTCGAACAGAACTAGATGAAAGTTCAATTGATTATTATCGTTTCATGACACATACCAAATTATTTGCTCAACGCGTTTTATCAGGAATGAAATACGAAGATGATGATGCTGATTTACTTTTGGTAGTTAAGAAAAAATATCCGAGAGAATATAAATGTGTTAAAGAGATCGGCAACAATATGGCTATCCAATACCAATATCAACTTAATTCAAGTGAACTCCTATATCTGACGGTGCATGTTAAACGATTAGTTAAAAATTTAAAGGAGATATCAGATGAC

SEQ ID NO: 10380 - protein, 283 aa, Streptococcus agalactiae; identical to SEQ ID NO: 1490

SEQ ID NO: 10381 - protein, 1866 aa, Streptococcus agalactiae
ATGACTAAATACCAAGAGACTGCTAAAGCTATTTTAGCAGCAGTAGGGGGAGAAAAAAATATTCAACACGTAACCCACTGTGTGACACGATTACGATTAGTTTTAGACAATGATGAAATTGTCAACGATCAGGTTATTAAAACTATTCCGAATGTTATCGGTGTTATGCGTAAAAATGATCAATACCAAATTATTTTGGGAAATGATGTCAATAATTATTATAATGCTTTTTTGGCCTTAGGTCATTTTGAAAATACTACCAGAGAATTTTCATCACAAAAAAAGAGTTCAATACTTGAGAAATTAATTGAAACGATTGCAGGAGTCATTACGCCGCTTATACCTGCTCTTCTAGGAGGAGGGATGCTCAAGGTTATAGGTATTTTGCTCCCTATGCTCGGTATAGCAAGCTCTAGTTCTCAAACAGTAGCTTTTATCAATTTTTTTGGTGATGCCGCTTATTATTTTATGCCAATAATGATTGCTTATTCAGCTGCGTCACGATTTAAAGTTACACCTGTATTAGCTGCTACAGTAGGAGGGATTCTCTTACACCCTGCTTTTGTGACAATGGTAGCTGAAGGAAAACCATTATCTTTATTTGGAGCTCCGGTTACACTGGCTAGTTATGGTTCTTCTGTTATTCCAATCTTAATTATGGTTTTTCTTATGCAATATATTGAGAGATGGATTAATAAAATTGTTCCTAGTGTAATGAAGAGTTTTTTACAACCGACTTTGATTATTCTCATTTCTGGCTTTTTAGCTTTAGTGGTCGTGGGGCCACTGGGGGTAATTATTGGTAAAGGATTGTCTAGTGCAATGCTTTCGATTTACCATGTGGCGCCATGGTTAGCTTTATCTATTCTTGGTGCTATTATGCCATTGGTTGTTATGACAGGAATGCACTGGGCATTTGCTCCAATATTTTTAGCTGCTTCTGTTGCGACACCAGATGTTTTGATTTTACCAGCAATGTTAGCTTCTAATTTAGCTCAAGGTGCGGCTTCTCTTGCTGTTGCAGTTAAGGCTAAACAAAAACAAACACGTCAGGTGGCCTTTGCAGCAGGTTTATCAGCACTACTAGCTGGTATCACAGAACCTGCACTTTATGGTGTCACACTGAAATTCAAGAAGCCTTTATACGCTGCAATGATATCAGGTGGTTTAGTAGGAGCTTATATTGGATTAGTTAATATTGCTTCCTATACATTTGTAGTACCATCTATTATTGGTTTGCCACAATATATCAATCCACAGGGGGGCAATAATTTCAGTAATGCTGTTATTGCAGCAATAGCTACTATTATTTTGACTTTCATTATTACATGGTTCTTGGGAATTGATGAAGGAGAAAACGAAAAAAGTAGTATTAATGCTCAAGAGCACACACATATTAGAAGTGGTTTATCAAAAAAAGAGACATTGTATTCACCTATGGTAGGCAATGTATTACCTTTATCTAAAGTACCCGATGAAACATTTTCATCTAAATTACTAGGTGAAGGTTTAGCAATCACTCCTAGTGTGGGTGAAGTTTATGCACCATTTGATGGTGAAATTATAAGTTTATTTCCTACAAAACATGCCATTGCCTTAAAGGATGATAAGGGAGTCGAAGTGTTAATCCATATTGGAATAGATACTGTAGAACTAAATGGAGAAGGTTTTGAACAATTGGTCAAAGTTGGCGATTTTGTTAAACGAGGACAGTTACTTTTGCGAATGGATATTGATTTTATTAGTTCAAAGGGGTATTCTCTTATTAGTCCGGTTGTAGTTACAAATTCAATTGACCAACTTGAAATTATCGTTAAAGACGCAGAGACAATGGTTACAAATGAAGATGATTTACTTGTAATTCTT

SEQ ID NO: 10382 - protein, 622 aa, Streptococcus agalactiae
MTKYQETAKAILAAVGGEKNIQHVTHCVTRLRLVLDNDEIVNDQVIKTIPNVIGVMRKNDQYQIILGNDVNNYYNAFLALGHFENTTREFSSQKKSSILEKLIETIAGVITPLIPALLGGGMLKVIGILLPMLGIASSSSQTVAFINFFGDAAYYFMPIMIAYSAASRFKVTPVLAATVGGILLHPAFVTMVAEGKPLSLFGAPVTLASYGSSVIPILIMVFLMQYIERWINKIVPSVMKSFLQPTLIILISGFLALVVVGPLGVIIGKGLSSAMLSIYHVAPWLALSILGAIMPLVVMTGMHWAFAPIFLAASVATPDVLILPAMLASNLAQGAASLAVAVKAKQKQTRQVAFAAGLSALLAGITEPALYGVTLKFKKPLYAAMISGGLVGAYIGLVNIASYTFVVPSIIGLPQYINPQGGNNFSNAVIAAIATIILTFIITWFLGIDEGENEKSSINAQEHTHIRSGLSKKETLYSPMVGNVLPLSKVPDETFSSKLLGEGLAITPSVGEVYAPFDGEIISLFPTKHAIALKDDKGVEVLIHIGIDTVELNGEGFEQLVKVGDFVKRGQLLLRMDIDFISSKGYSLISPVVVTNSIDQLEIIVKDAETMVTNEDDLLVIL

SEQ ID NO: 10383 - protein, 1425 aa, Streptococcus agalactiae
ATGACGGTTTTTCCTAAACATTTTCTATGGGGAGGTGCAGTTGCTGCCAATCAGGTAGAGGGTGCATTTAGAACAGATGGCAAAGGTTTATCTGTACAAGATGTACTTCCAAATGGTGGTTTAGGCGATTTCACCGCCAAACCTACTCCAGACAATTTGAAGCTAGAAGCAATTGATTTTTATCATAACTATAAAAATGATATAAAACTGTTTGCAGAGATGGGCTTTAAAGTTTTTAGAACCTCTATTGCCTGGTCTCGAATTTTTCCAAATGGTGATGATAGTGCTCCAAACGAAGCTGGCTTACAATTTTATGATAATTTATTTGATGAGTTGCTTAAATATAATATCGAGCCCTTGGTTACCTTATCTCATTATGAAACACCGCTTCATCTTGCAAAAACTTATAATGGTTGGGCTGATAGACGTTTGATAGCATTTTTTGAGAAATTTGCTCAAACAGTCATGGAGCGTTATAAAGATAAGGTGAAATATTGGTTGACTTTTAATGAAGTGAATTCTATTTTACATATGCCTTTCACCAGTGGTGCTATTATGACCGACAAATCACAACTAAGTCCTCAGGAGCTTTATCAAGCTATTCATCATGAATTAGTAGCATCGGCTAGAGTGACAAAATTAGGGCGTTCTATCAATCCTAATTTTAAAATTGGCTGTATGATTCTGGCTATGCCAGCTTATCCTATGACATCTGATCCAAGAGATGTCCTGGCTGCAAGACAATTTGAACAACATAATCTGCTATTTTCAGATATACATGTCAGAGGTAAATATCCCACTTATATTCAGTCCTATTTCAAAAATAATGGTATTAAAATTAAATTTGAAGAAGGAGATGAGGAAGTATTGGCACAAAATACAGTAGATTTTCTATCGTTTAGTTACTATATGAGCGTGACACAAGCTTATGACTTTGAAAATTATCAAAGTGGTCAGGGAAATATCCTTGGAGGCCTAACTAATCCTCATTTAACAACTTCAGAATGGGGATGGCAAATCGATCCCATCGGGCTACGCCTAGTCTTAAATCAGTATTATGAACGTTATCAGATTCCGTTGTTTATTGTAGAAAATGGATTGGGAGCAAAAGATCAATTGATAGAAACACTAGACGGTGATTATACTGTCGAAGATGATTATCGTATTGATTATATGAATCAACATTTAGTTCAAGTTGCTAAAGCTATTGAAGATGGTGTTGAAATAATGGGATATACATCTTGGGGGTGTATTGATTGTGTATCCATGTCTACAGCTCAACTAAGTAAACGTTATGGTCTAATATATGTTGATCGAAATGATGATGGAACAGGGAGTCTACAACGTTACAAGAAGAAGTCATTTGGTTGGTACCAAAAAGTGATTAAGACAAATGGCCAATCATTGTTTGAACATCATAACAGA

SEQ ID NO: 10384 - protein, 475 aa, Streptococcus agalactiae; identical to SEQ ID NO: 1496

SEQ ID NO: 10385 - protein, 1092 aa, Streptococcus agalactiae
ATGAAATTAAGAAAACAACTCGCACAACAAATCGTTACCTCTATCAAAGATGTTTGTCAACAAGATATTAATTTTATTAATACCAAAGGAATCATTTTCGCTAGTACCAATCCAAAACGTGTTGGAGAATTCCATGAAATTGGTTTAAAAGTAGCACAGACAGGACAAATGATTGAAGTAACAGATCAAGAATCTTATTTTGGGACACAAGCAGGGATCAATATTCCTTTCTATTATAATTGTGAATTATTAGCTACTATTGGGATTAGTGGAAACCCCAACCAAGTAGGAAAATATGCTTTACTTGCTCAAAAAATGACTCGACTCATCTTAAAAGAGCATGAATTAGATTATCTGGATTTCGGGCGAAAAAACGAAGCTTCTATTGTCTTACATCATCTTGTTGAAGGCAGAGAGTTAGACTACTATTACCTCAATCAATTTTTAAACCAATACCACCTATCAGAAAAAACTGACTATCGTCTACTCACTTTTGAAATCAATAGTCAAAAACAAAAATTACTCTTAAGTCAATCTGAAATGTCACTCTTGAACTTTTTTGATAAACTTGACACTGCTATTTATACCTTTAATTATCCCAATCAATACTGGCTTTTACTTTCTGACCAGATGTTTGACTATTATTATCCAAATATCCTATCAAAGTTTGAATGCGAAAAGGGCCTCTATAAAGTTGGTATCGGACAAAAATCATCTTTATCACTTTTAAAAAGATCATATGAAACGTCTATCTTAGCCCTGAAAGCTTTAAAAGGTCAACAAAAGGTCAACCTCGTCGACGACCTTGATCTTGAACTGTTATTAACAAGTATTGATTCTAATATTAAACAATATGTGCTAAATAAAGCGCTTGTAAACTTATCTGAAAATGATAAGATCTTGCTTAACTCATATTTTAAGCATAATCTATCATTAAAAGAATGTAGTCAGGAACTTTTTATCCATAAAAATACTGTTCAATATAGGTTAAATAAGATTTATGAATCAACGCAACTCAATCCAAGAAACTTTAAGGATGCAACTTTATTGTATCTAGCACTTAAATCAGAAGATATTAACCTTCATAAATTA

SEQ ID NO: 10386 - protein, 364 aa, Streptococcus agalactiae
MKLRKQLAQQIVTSIKDVCQQDINFINTKGIIFASTNPKRVGEFHEIGLKVAQTGQMIEVTDQESYFGTQAGINIPFYYNCELLATIGISGNPNQVGKYALLAQKMTRLILKEHELDYLDFGRKNEASIVLHHLVEGRELDYYYLNQFLNQYHLSEKTDYRLLTFEINSQKQKLLLSQSEMSLLNFFDKLDTAIYTFNYPNQYWLLLSDQMFDYYYPNILSKFECEKGLYKVGIGQKSSLSLLKRSYETSILALKALKGQQKVNLVDDLDLELLLTSIDSNIKQYVLNKALVNLSENDKILLNSYFKHNLSLKECSQELFIHKNTVQYRLNKIYESTQLNPRNFKDATLLYLALKSEDINLHKL

SEQ ID NO: 10387 - protein, 1140 aa, Streptococcus agalactiae
ATGAAGGTAGTAGTAGCTATTGATTCTTTGAAAGGGAGTCTTTCTTCTTTAGAAGCTGGCAATGCTATAAAGGAGTCAATTAATGAAGTAATCTCAGGGGCGGATGTGGAAGTACATCCATTAGCAGACGGGGGAGAAGGAACTGTTGAAGCTTTGACGCTAGGTATGGGGGGTACGATCGAAACAATCCCTGTTAAGGGGCCTCTTGGAGAAAAAGTACATGCGAGTTATGGTATTATTCCACAGCGTCAGTTAGCTATTATTGAAATGGCTGCAGCTGCTGGTATTACCCTAATTGCTACTGAAGAGAGAAATCCTCTCCACACAACCACTTATGGAGTTGGAGAAATGATAAAGGATGCTATAAGTAAAGGCTGTAGGCACTTTATTATTGGTATTGGAGGTAGTGCTACTAATGATGGTGGGGCAGGTATGCTACAAGCTTTGGGATATGCATTATTAGATAAAGATAATCAAGAAATCAGTTTGGGAGCACAAGGATTGGCAGATTTAAAATCTATCTCTACTGATAAGGTTATTGAGGAATTAAAAGAATGTGATTTTAAAATTGCATGTGATGTAACAAATCCTTTATGTGGTGCTCAAGGTTGTAGTTCGATTTTTGGACCGCAAAAAGGTGCTGATGAAGATATGATTACAAAAATGGATACTTGGTTAAGTAATTATGCTACCTTAGCTACTTCAGTTAGTGAAAAAGCAGATGCAACTATTGAAGGAACAGGTGCAGCGGGTGGGCTTGGATTTGCCTTTTTAGCCTTTACAAATGCTACCTTAGAACCTGGTATTGATATTATTCTATCAGAAATTAATATAGAAAAAGCGATTTCTGAAGCTGATTTAGTAGTTACTGGTGAAGGTCGTTTGGATGGGCAAACGGTGATGGGAAAAGCTCCAATTGGCGTAGCAAAATTAGCTAAAAAATATGGTAAGAAAGTAGTGGCATTTTCTGGATCTGTCACCGAAGATGCTATACTTTGTAATCAACATGGTATTGATGCTTTTTTTCCAATCGTACGACGCCTTATCAGTTTAGATGAGGCTATGTCTAAAGAGGTAGCTTATAAAAATATGAAAGAAACTGCTACTCAAGTCTTTAGATTAATCAATTTGTATAATCAT

SEQ ID NO: 10388 - protein, 380 aa, Streptococcus agalactiae; identical to SEQ ID NO: 1500

SEQ ID NO: 10389 - protein, 1254 aa, Streptococcus agalactiae
ATGGAAGCTACATTTACAACAACAGGGGCTTTAATAGGATTAGCGCTTGCTATTTTACTGATTATCAAAAAAGTTCATCCTGCCTATAGTCTCATTCTTGGAGCATTAGTTGGTGGTTTGATTGGTGGCGGTGATTTAGTTACAATTGTCAATACAATGGTATTAGGTGCGCAAGGGATGATGTCATCCATATTACGCATTTTAACATCAGGGATTTTAGCGGGTGCTTTAATTAAAACCGGATCAGCTGAAAAAATTGCAGAAAGTATCATTAAAAAATTAGGACAACAGCGAGCCATCACAGCTTTAGCCATCGCAACAATGATTATTTGTGCAGTAGGTGTCTTTATTGATATTGCAGTTATTACAGTTGCTCCGATTGCATTAGCAATAGGTAAAAAAGCTAATCTTTCTAAATCTAGCATACTGTTAGCAATGATTGGTGGTGGTAAGGCTGGGAATATTATCTCACCCAATCCTAATACAATTGCTGCTTCAGAAGCATTTAAGGTTGATTTAACAAGCTTAATGGTACAAAATATTATTCCTGCAATTGCAGCTTTAGTAGTTACGATTATATTAGCAAAGATTGTTTCCAAGAAAAATAACGATATTTCTTATGATAGTGAGGAGCAAGTGGGCTCTGATCTGCCAGCATTCTTACCGGCTATTTCTGGTCCACTTGTGGTTATCTGCTTATTAGCTCTTCGTCCTTTATTTGGAATCACTATTGATCCCTTGATTGCACTGCCGTTGGGTGGTCTAATTAGTATTTTAGCAACAGGTTACCTAAAAGAAACGGTACCGTTTGTTGAATACGGTTTATCAAAAGTTGTTGGCGTTTCAATTCTTTTGATTGGAACAGGTACGCTCTCAGGTATTATTAAAGCATCTAATCTACAATTTGATATGATTCATCTCCTTGAATTTTTAAATATGCCGACCTTTATCCTTGCCCCACTCTCAGGTATTTTTATGGGAGCAGCAACAGCATCAACGACTTCTGGAACAACTATTGCTTCACAAACGTTTGCTGAAACCTTGATTAAATCAGGGGTACCGGCGGTTTCGGGTGCAGCTATGATTCACGCAGGTGCGACTGTTTTGGATTCGCTACCTCATGGATCCTTCTTCCATGCGACAGGCGGAGCTGTCAATATGGCTATAAAAGATCGTATGAAACTAATTAGCTATGAAGCTTTGATTGGATTAACTAGCACAATAGTTGCTGTCGTTTACTATTGTTTCTTTGGG

SEQ ID NO: 10390 - protein, 418 aa, Streptococcus agalactiae; identical to SEQ ID NO: 1502

SEQ ID NO: 10391 - protein, 1062 aa, Streptococcus agalactiae
GTGAAACAAACAAAGAAAGAATTTATTTTAGGATTAACCATTATTATTACCCTTACTTTATTAATCATGCTGATTTTTTTAGTAATGTTTAATAAGTCCAGTAACTCTAAGTTGAAGCAGACAAAAGATAGAAGAATATCATCTACTTCAACCACAAGGACATCCAGTAGCTCACATGATCAAAAAATTGTAGAAAAGTCTCTTGAAAAAAAGAAAATGGTCATGGAACAAGATATGGAATTGATGAATGCCTATAGGCTCTATTATGATTATGCCCATTTGTCCTTGAAAGAGGTTGTTCTGGCCTATATGTCTGAATATGGCATTGAAAAAAATAGTGTTGCTTTTTCTTATAAAAATTTAAAAACAGGACAAAGGGACGCTATGAATGATACTCAGGCTATGACAGCAGGGAGCACCTATAAGTTACCTCTTAACATGTTGGTAGTAGATGCAGTGGTCAAGGGCAAGTTGTCCATGGAAGAACGCTTTGATATTACCGAGACTGACTATGAATATATTGGTGAACATAATAATTATGTTGCTGCTTTCTCGGGGGCAATGTCTATTGATGATATGCAAAAATACTCTTTAGTTTATTCAGAAAATACACCCGCCTATGCTTTAGCTGAGCGTATTGGTGGCATGGATAGTGCTTATTCAAAGTTTGGTCGTTATGGCCAATCTAAAGGAGACATCAAAAATATACAAAAAAACGGTAATAAAGTGACAACAGATTACTATATTCAAGTGCTAGACTATCTCTGGAAACATCGTAAAAAGTATGATAGTTTAATTACTTATTTAGAAGAAGCTTTTCCAACAGATTATTATCGTGCTTTGATACCATCTGATGTTGTTGTTGCTCAAAAGCCAGGGTATGTCCGTGAGGCGTTGAATGTTGGAGCAATTGTCAAAGAAGAAGTGCCTTATATTGTTGCTATTTATACTGCAGGTTTAGGTGGCTCTACTCAGGAAGATTCAGAAATTAATGGAGTGGGACTATATCAGCTAGAACAATTATGTTTTGTTATTAATCAATGGCATCGTGTTAATATGAAT

SEQ ID NO: 10392 - protein, 354 aa, Streptococcus agalactiae; identical to SEQ ID NO: 1504

SEQ ID NO: 10393 - protein, 441 aa, Streptococcus agalactiae
ATGATAATGAGTAATCGAAGTATTTTAGACGAGCGATTATGTTTTACGGTTAGTGAAACACATCGACTTTTCAATAAATTTTACCAAAAAGCTTTGGATGAATTTCAATTGACTTATCTCCAATACGTTATCTTGTTAGTCCTTTGGGAAGAGGATCATCGGCATATGAAGGAACTTAGTTATGCACTATCTCTTAATTCGAATACCCTAACTCCAGTTTTAAAGCGTATGGAAAATCGTGGGTGGATTGTACGAGAAAAACCAAGAGATGATAAAAGGCAACTCATTATTCATCTAAGTAACAAAGGTATTGAGTCACAAGATGCCGTTGTCAATGCGGTGCAATCGTGCGGGTATTTTTTCTCAGAAATTAGTCCTGAATCTTATCAAAAAACTGTTTCTGCCCTTTCTTCACTTAACCAAGTTATAAAATCACATTTA

SEQ ID NO: 10394 - protein, 147 aa, Streptococcus agalactiae; identical to SEQ ID NO: 1506

SEQ ID NO: 10395 - protein, 1026 aa, Streptococcus agalactiae
ATGAATACAAACGATTTTGATTTTTATTTACCAGAAGAACTCATTGCCCAAACACCACTTGAAAAAAGAGACGCTTCTAAATTATTAGTCATTGATCATAAGAATAAGACGATGACAGATAGCCATTTCGATCATATCTTAGATGAACTCAAGCCTGGTGATGCTTTAGTAATGAATAACACACGTGTTCTGCCCGCTCGCCTTTATGGTGAAAAGCAAGATACACACGGCCATGTAGAGTTATTACTTCTCAAAAATACAGAAGGCGATCAATGGGAAGTGCTTGCTAAACCCGCTAAACGCTTACGAGTAGGGACCAAAGTTTCATTTGGTGATGGTCGGTTAATAGCAACAGTCACAAAGGAATTAGAACATGGTGGGCGTATTGTAGAATTCTCATATGATGGTATTTTTCTAGAAGTCCTTGAAAGTTTGGGCGAAATGCCACTTCCGCCATATATTCATGAAAAACTAGAAGATCGTGACCGCTATCAGACTGTGTATGCAAAAGAAAATGGTTCTGCTGCTGCACCAACAGCCGGTCTCCATTTTACAAAAGAACTATTGGAAAAAATTGAAACAAAAGGTGTGAAGCTTGTCTATTTGACGCTTCACGTTGGACTTGGAACTTTCCGTCCTGTTTCAGTTGATAATCTTGATGAACACGAAATGCATTCTGAGTTTTACCAATTATCTAAAGAAGCTGCTGATACTCTCAATGCAGTTAAAGAATCTGGTGGACGTATTGTAGCTGTTGGTACAACTTCTATTCGCACATTAGAGACAATCGGTTCTAAATTCAATGGTGAATTAAAAGCCGACTCAGGGTGGACAAATATTTTTATCAAGCCTGGTTATCAGTTCAAGGTTGTAGACGCTTTTTCAACCAACTTTCACTTACCAAAGTCTACTCTTGTCATGTTAGTATCAGCATTTGCTGGACGTGATTTTGTACTAGAAGCTTACAACCATGCAGTTGAAGAACGATATCGTTTCTTCAGCTTTGGTGATGCTATGTTTGTTAAG

SEQ ID NO: 10396 - protein, 342 aa, Streptococcus agalactiae; identical to SEQ ID NO: 1508

SEQ ID NO: 10397 - protein, 678 aa, Streptococcus agalactiae
ATGAAAGAAGCAAAAAATTTTTCCCAACAATTGAATATTTTAAGAGCTGGTGTTCTTGGTGCTAATGATGGTATCATCTCTGTAGCTGGTGTTGTTATTGGTGTTGCGAGTGCAACTCATAACCTTTGGATTATTTTTTTATCAGCAGCTTCCGCGATTTTAGCTGGTGCATTTTCTATGGCTGGCGGGGAGTATGTTAGTGTTTCTACTCAAAAAGATACTGAACAAGCAGCAGTTGCGCGTGAAGAGAAACTACTAGAAAATAATCCAGAACTTGCCAAAAAATCCTTAGTTGATATCTACTTAGCAAAAGGAGAAAGTCACGAACATGCTCAATGGCTAGTTGACAAGGCTTTTTCAAAGAATGCTATTGAGCATTTAGTTGAAGAAAAATATGGTATTGAGTTCGGTGAATATACAAGCCCCTGGCATGCTGCTATATCTAGTTTTATAGCTTTTGCCATCGGATCAATTTTTCCAACTATAACTATTCTGTTATTGCCATTTTCGGTACGAATTGTAGGAACGGTAATAATTGTTATTGTTTCACTATTATCAACTGGTTATGTAAGTGCTAAGTTAGGTCAAGCTCCTACAGTACCTGCCATGAGTCGAAATGTGATGATTGGTTGTTTGACAATGTTGGCAACCTACGTCATTGGACAATTATTTTCAATA

SEQ ID NO: 10398 - protein, 226 aa, Streptococcus agalactiae
MKEAKNFSQQLNILRAGVLGANDGIISVAGVVIGVASATHNLWIIFLSAASAILAGAFSMAGGEYVSVSTQKDTEQAAVAREEKLLENNPELAKKSLVDIYLAKGESHEHAQWLVDKAFSKNAIEHLVEEKYGIEFGEYTSPWHAAISSFIAFAIGSIFPTITILLLPFSVRIVGTVIIVIVSLLSTGYVSAKLGQAPTVPAMSRNVMIGCLTMLATYVIGQLFSI

SEQ ID NO: 10399 - protein, 698 aa, Streptococcus agalactiae
ATGAGAGTTATTACAGTTAAGAACGACATTGAGGGGGGAAAAATTGCATTTACTCTTTTAGAAGAGAAAATGAAAGCTGGTGCTCAAACTTTAGGATTGGCAACAGGAAGTAGCCCAATCACCTTTTACGAAGAGATTGTAAAAAGTAATCTTGATTTTTCAAATATGGTTTCTATTAACCTTGATGAATATGTTGGAATTGCCGCAAGTAATGATCAAAGTTACTCTTATTTTATGCATAAACATCTTTTTGATGCTAAACCTTTCAAGGAAAATAACCTTCCAAACGGCTTGGCTAAAGATTGAAAGAAGAAATAAAACGATACGATGCTGTCATAAATGCTAATCCAATTGATTTTCAAATCCTTGGAATTGGTCGTAACGGTCATATTGGTTTTAATGAACCAGGTACACCTTTTGATATTACAACACATGTGGTTGATTTAGCTCCAAGTACAATTGAAGCTAATAGTCGTTTCTTTAATAGTATTGATGATGTACCAAAGCAAGCCTTATCAATGGGTATAGGCTCTATTATGAAATCAAAAACAATCGTATTAGTGGCGTATGGTATTGAAAAAGCAGAAGCGATTGCAAGTATGATTAAAGGACCTATCACAGAAGATATGCCAGCAAGTATCCTCCAAAAACATGATGATGTTGTGATTATTGTGGATGAAGCAGCGGCATCAAAGTTG

SEQ ID NO: 10400 - protein, 233 aa, Streptococcus agalactiae; identical to SEQ ID NO: 5968

SEQ ID NO: 10401 - protein, 954 aa, Streptococcus agalactiae
ATGGGACTTTTAGTAGATGGCAAATGGGTTGATCAATGGTATGATACTGCATCAACTGGTGGTAAATTCGTCCGAACCGTTACACAATTCCGTCATTGGGTTACTAAAGATGGTTCAGCAGGGCCTAGTGGGGATGCAGGTTTTAAAGCAGAATCTGGACGATATCATCTCTACGTTTCACTAGCTTGCCCTTGGGCATCACGTGTATTAATCATGAGAAAGCTTAAAAATCTAGAATCTCATATCTCTATCTCCATTGTTAACCCTTTAATGTTGGAGAATGGTTGGACTTTTCAAGAATATAAAGGCGTTATTCCTGATATGATTAACCAAAGCCAATACCTTTACCAAATCTATCAAGCAAGTCAAAGTGATTATACAGGACGCGTGACAGTCCCTGTTCTTTGGGATAAAAAATTCCATACAATCGTTAACAATGAATCATCTGAAATTATGCGTATGTTAAATACTGCATTTAATCATATTACTGGAAATACTGACGATTACTATCCCGATTCCTTACAAGGACAAATTGACGAAATGAATAATTTTATTTATCCAAAAATAAATAATGGTGTCTATAAAGCTGGTTTTGCCACTTCTCAGAACGTTTATCAAAAGGAAGTTGAAACCTTATTCACAGCTTTAGATCAGTTAGAAAAACACTTATCTGATAACCATTATCTTGTTGGAGAACAATTTACCGAAGCTGATATTCGCCTTTTCACAACTTTAGTTCGCTTTGACACCGTTTATTATGGTCATTTTAAATGTAATTTAAAAGCGCTACATGATTACCCACATTTATGGCATTATACAAAACGTATTTACAACCTACCTGGAATTGCTGAGACAGTTAATTTTGATCATATCAAAAAACACTATTACGGTAGCCATAAAACCATTAACCCTACTGGTATTATTCCAGCTGGACCTAACTTAGACTGGACAATT

SEQ ID NO: 10402 - protein, 318 aa, Streptococcus agalactiae; identical to SEQ ID NO: 1514

SEQ ID NO: 10403 - protein, 717 aa, Streptococcus agalactiae
ATGCGTTTAGATAAATTATTAGGTCAGGCAGGATTTGGGTCTAGAAATCAGGTTAAGAAATTAATTTGTTCTAGGCAAGTTTCTGTAGATGGTCAAATTGTTACAAAGGATAATGTTATTGTAGATAGTGGTCTACAATCGATTTTTGTAGGAAAAGAGAGGGTCTGCCTAAAAGAAAGTTCTTATTACCTTCTTTATAAGCCATCAGGAGTTGTTTCAGCAGTTAGAGATTCAGAACATAAAACAGTCATAGACTTAATTAGCGAAAAAGATAAGGTGGAGGGATTGTATCCGATTGGTCGTCTAGATCGTGATACGGAAGGGCTTTTAATAATCACGAATAATGGTCCACTGGGTTACCGAATGTTACATCCAAAACACCACGTTGCAAAAACATATTATGTTGAAGTAAATGGTTTCTTGGAAAGAGATGCTATTACCTTTTTTGAAGAAGGAGTTGTATTTGACGATGGAACAAAGTGTAAACCAGCTGAATTAACGATTGATACGGCTAATAATGACAAAAGTACCGCAAGAATAACTATCACAGAAGGGAAATTTCACCAAGTAAAAAAGATGTTTCTTGCATATGGCGTTAAAGTTATATACTTGAGGCGTATTTCTTTTGGTGACTTGAGGCTTGATATGAATTTGAAACCAGGTCAGTATCGTAGATTGAGAGATTCAGAGGCAGCTATCTTAAAAAGGTATTTAGAT

SEQ ID NO: 10404 - protein, 239 aa, Streptococcus agalactiae
MRLDKLLGQAGFGSRNQVKKLICSRQVSVDGQIVTKDNVIVDSGLQSIFVGKERVCLKESSYYLLYKPSGVVSAVRDSEHKTVIDLISEKDKVEGLYPIGRLDRDTEGLLIITNNGPLGYRMLHPKHHVAKTYYVEVNGFLERDAITFFEEGVVFDDGTKCKPAELTIDTANNDKSTARITITEGKFHQVKKMFLAYGVKVIYLRRISFGDLRLDMNLKPGQYRRLRDSEAAILKRYLD

SEQ ID NO: 10405 - protein, 1148 aa, Streptococcus agalactiae
TTGAATTCAAAACTTTCATTGAATTGACTATTTTATCGATTTCTATCTTTTTGATGTCTCATTTAGCAATTGCTCCTGCAATTCCTAAATTGTATGCCTTTTACCATACTCAAAACCCTCATATTGGACTAGCTTCAGTAGAGAGTTTAGTTACTATTCCAGCTATGATGATTACTATTTTTGTTATTTTGAGTAATTTTGTAGTCACAAAACTTGGCAAAAAAAACACGGTCTTACTTGGTTTATGTTTAATCTTAATGTCTGGGTTTATCTCATTTTTTACAAGTAATTTTTCACTTGCGATGGCTAGTCGACTACTTTTGGGTATTGGTATTGGTCTCTATAATTCGCTATCAATTAGTATCATAACGGATTTATATGAGGCTGATGAGAGAGCCAGTATGATTGGTCTTAGAACAGCATCACTCAATATCGGTAAAGCCTTAACTACATTTATTGTTGGATTGGTTTTAGCTATTGGTGTGAATTATATTTATTTGGTTTACCTTCTGGTTATTCCTGTTTTCTTTTTCTTTTGGAAAAATGTTCCAGAGGTTGAAAATCAAACACATACCCTTAAAGCTAGTACAACATTTGATACTAAAGCGGCTTTGTTGATGCTCATCACGTTCTTAGTAGGTATTGCTTATATAGGAGCAACTGTCAAAATTCCAACCTTACTAGTGACAAAATATCACTACGCGACGAGCTTCTCTAGTAATATGTTAACTCTCCTTGCTTTTAGTGGTATTTTAGTTGGATCTGTATTTGGAAAATTAGTTAAAGTATTCCAAGAGAAGACGCTATTAATCATGATTCTAGCTATGGGAATAGGTAATGTGCTATTTGCTTTAGCTAATAATCAGATCATTTTTATCGTAGCTAGTATTTTAATAGGAGCTAGTTTTGTTGGCACCATGTCTTCTGTATTCTTTTATATTTCAAAAAACTATGCAAAAGAACATAATAACTTTATCACAAGCCTTGCCTTAACAGCTGGTAATATAGGAGTTATTTTGACACCGCTTATTTTAACGAAACTTCCAAGCCAGCTACATCTGGAACCTTTTATGACACCATTTTTAATAACAAGTGGGCTGATGGTGATTAATGTCTTTGTTTACCTAGTTTTAATGTCAAAAAATAAA

SEQ ID NO: 10406 - protein, 383 aa, Streptococcus agalactiae
MNSKLSLKLTILSISIFLMSHLAIAPAIPKLYAFYHTQNPHIGLASVESLVTIPAMMITIFVILSNFVVTKLGKKNTVLLGLCLILMSGFISFFTSNFSLAMASRLLLGIGIGLYNSLSISIITDLYEADERASMIGLRTASLNIGKALTTFIVGLVLAIGVNYIYLVYLLVIPVFFFFWKNVPEVENQTHTLKASTTFDTKAALLMLITFLVGIAYIGATVKIPTLLVTKYHYATSFSSNMLTLLAFSGILVGSVFGKLVKVFQEKTLLIMILAMGIGNVLFALANNQIIFIVASILIGASFVGTMSSVFFYISKNYAKEHNNFITSLALTAGNIGVILTPLILTKLPSQLHLEPFMTPFLITSGLMVINVFVYLVLMSKNK

SEQ ID NO: 10407 - protein, 945 aa, Streptococcus agalactiae
ATGTTAATTGCTAAAGACAAACAAGGAAATTTAATTAATCTACTCGAGTCTCATCCGGGAAAGGGACAGTATTTTTGTCCAACTTGTTGTTCAGCTGTAAGGTTAAAGGCAGGTCGAATCATGAGAAGACACTTTGCACATATTAGTCTAAAAAATTGTCAGTTTTATCATGAAAATGAGTCTAATGAGCACTTGCAATTAAAAGCAAAGTTATATATGAGTTTAAGTAGAGAGAATGAAACTATGCTCGAGCATCATTTGCCAGAAATTAATCAGATTGCAGATTTATTTGTGAATGAGACATTGGCTTTAGAAGTTCAGTGTAGCCGACTATCAGAGCAGCGACTCAGGGAGCGAACAAAAGCATATCTACAGGCAGACTTTCAAGTGAGATGGTTACTAGGGGAAAAACTCTGGTTAAAGCATCGTTTAACAAATCTACATAAACAATTTTTACAATTTTCTCAAAGTATCGGATTTCATATTTGGGAGTTAGATTTGAGGTTAGAAGTACTGAGACTAAAATATTTGATTTACGAAGATTTACGCGGACATGTCTATTACTTAAGTAAAACTTGCCCTCTTAGTGGAGACGTTCTAGCATTTTTGAAGTGGCCATACCAATCAAAAAATCTAAATTTTTATAAGGTTAAACAAGACAGAAATATCAGAGATTATGTGCGTCAGCAGTTACGCTATGGCAATCAATTTTGGTTACGAAAACAAGAAAAGGCCTACCTTTCTGGTCAGAATCTATTGACCCAAGAGCTAATGATGTTTTTTCCTCAAATACAGCCACCACGTGTAGATACTGATTTTTGTCAAATAACAAATTCTCTAACATCGTTTTATCAGAATTTTACAAATTATTATCAAAAAAATAAGAATAACTTAGACCAAACACTTTATCCCCCTGTATTTTATGATAAAATAGTCACTAAGAAT

SEQ ID NO: 10408 - protein, 315 aa, Streptococcus agalactiae
MLIAKDKQGNLINLLESHPGKGQYFCPTCCSAVRLKAGRIMRRHFAHISLKNCQFYHENESNEHLQLKAKLYMSLSRENETMLEHHLPEINQIADLFVNETLALEVQCSRLSEQRLRERTKAYLQADFQVRWLLGEKLWLKHRLTNLHKQFLQFSQSIGFHIWELDLRLEVLRLKYLIYEDLRGHVYYLSKTCPLSGDVLAFLKWPYQSKNLNFYKVKQDRNIRDYVRQQLRYGNQFWLRKQEKAYLSGQNLLTQELMMFFPQIQPPRVDTDFCQITNSLTSFYQNFTNYYQKNKNNLDQTLYPPVFYDKIVTKN

SEQ ID NO: 10409 - protein, 1803 aa, Streptococcus agalactiae
ATGTCAGACAATCGCTCACATATTGAAGAAAAATACCAATGGGATTTAACTACTGTCTTTGCGACTGATGAGTTATGGGAAACTGAAGTGGTAGAGCTTACTCAAGCCATCGATAATGCAAAGGGTTTTTCAGGTCATCTGTTGGACTCAAGCCAATCTTTATTGGAGATCACGGAGGTTGAATTAGATTTATCTCGCCGTTTAGAAAAAGTTTATGTCTATGCTTCAATGAAAAATGACCAAGACACCACTGTTGCGAAATATCAAGAATTTCAAGCGAAAGCGACAGCGCTCTATGCAAAATTTAGTGAAACATTTTCGTTTTACGAGCCAGAACTATTGCAACTTTCAGAGTCTGATTACCAGTCATTCCTTTTAGAAATGCCTGACTTGCAAAAATATGATCATTTCTTTGAGAAAATATTTGCAAATAAACCTCATGTCTTATCTCAAAACGAAGAAGAATTGTTAGCTGGTGCTAGTGAGATTTTTGGAGCAGCTGGTGAGACATTTGAAATCCTTGATAATGCAGATATGGTCTTCCCAGTTGTAAAAAATGCAAAAGGTGAGGAAGTTGAGCTTACACATGGTAATTTCATTTCCCTTATGGAATCTAGCGATAGGACGGTTCGAAAAGAAGCATATCAAGCTATGTATAGCACATATGAACAATTCCAGCATACTTACGCTAAAACATTACAAACAAATGTGAAATCTCAAAATTTTAAGGCTCGTGTGCATCATTATCAATCAGCACGCCAATCAGCTCTATCTGCCAATTTTATTCCAGAAGAGGTCTACGAAACTCTAATTAAGACAGTTAATCATCATTTACCGCTCTTACATCGTTATATGAAGTTGCGTCAAAAAGTTCTTGGGCTAGATGATTTGAAGATGTATGACGTATATACACCCCTTTCTCAAATGGATATGAGTTTTACTTATGATGAAGCTCTAAAAAAATCAGAGGAGGTTCTAGCTATTTTTGGCGAAGCATATTCTGAACGTGTTCATCGTGCTTTTACTGAACGTTGGATTGATGTCCATGTTAACAAAGGAAAGAGGTCAGGCGCTTATTCAGGTGGATCTTATGACACTAATGCTTTCATGCTTCTTAACTGGCAAGATACTTTAGATAATCTTTATACGCTGGTGCATGAAACTGGACATAGTCTACACTCGACGTTTACTCGTGAAAATCAACCCTATGTTTATGGTGATTATTCTATTTTCCTAGCTGAAATTGCATCAACAACAAATGAAAATATATTAACAGAAACCCTTTTGAAAGAAGTTAAAGATGATAAAAATCGCTTTGCAATTCTCAATCATTATTTGGACGGTTTCAAAGGAACAATTTTTAGGCAAACACAGTTCGCTGAATTCGAACATGCCATTCATGTAGCTGATCAGGAGGGGCAAGTACTAACTAGCGAATACTTAAACAATCTTTACGCTGAGCTTAATGAAAAATATTATGGTTTGACTAAAGAAGATAATCATTTTATTCAATATGAATGGGCAAGAATTCCACACTTTTACTACAATTATTATGTTTTCCAATATGCAACCGGCTTCGCAGCAGCAAATTATTTAGCAGAGCGTATTGTAAACGGTAATCCGGAGGATAAAGAGGCCTACCTAAATTACCTTAAAGCTGGGAATTCAGATTACCCTCTAAACGTCATTGCTAAAGCTGGTGTTGATATGACTAGTGCAGACTATCTGGATGCAGCTTTTAGAGTATTTGAAGAGCGTTTAGTGGAACTGGAAAATCTTGTAGCAAAAGGCGTCCATAATGAT

SEQ ID NO: 10410 - protein, 601 aa, Streptococcus agalactiae
MSDNRSHIEEKYQWDLTTVFATDELWETEVVELTQAIDNAKGFSGHLLDSSQSLLEITEVELDLSRRLEKVYVYASMKNDQDTTVAKYQEFQAKATALYAKFSETFSFYEPELLQLSESDYQSFLLEMPDLQKYDHFFEKIFANKPHVLSQNEEELLAGASEIFGAAGETFEILDNADMVFPVVKNAKGEEVELTHGNFISLMESSDRTVRKEAYQAMYSTYEQFQHTYAKTLQTNVKSQNFKARVHHYQSARQSALSANFIPEEVYETLIKTVNHHLPLLHRYMKLRQKVLGLDDLKMYDVYTPLSQMDMSFTYDEALKKSEEVLAIFGEAYSERVHRAFTERWIDVHVNKGKRSGAYSGGSYDTNAFMLLNWQDTLDNLYTLVHETGHSLHSTFTRENQPYVYGDYSIFLAEIASTTNENILTETLLKEVKDDKNRFAILNHYLDGFKGTIFRQTQFAEFEHAIHVADQEGQVLTSEYLNNLYAELNEKYYGLTKEDNHFIQYEWARIPHFYYNYYVFQYATGFAAANYLAERIVNGNPEDKEAYLNYLKAGNSDYPLNVIAKAGVDMTSADYLDAAFRVFEERLVELENLVAKGVHND

SEQ ID NO: 10411 - protein, 624 aa, Streptococcus agalactiae
ATGAAGAAGCTTACTTTTATTTGGGATTTAGATGGGACATTAATAGATTCGTATGTACCAATTATGGAAGCTCTTGAAGAAACCTATCGTCATTTTGGTTTAATATTTGATAAAGAATTAATCCATGAATATATTTTACAGGAATCAGTGGGGAAATTATTGGTAAACCTTTCAGAGGAAGAGCAAATACCTCATGAAAAACTGAAAGCATATTTTACAAAAGAACAAGAAAGTCGAGATTCTAAAATACATTTAATGCCATATGCAAAAGAGATTTTAGAATGGACCAAAGAACAAGATATCCCCAATTTTATGTATACACATAAAGGAGCAAGTACGCATTCAGTGTTGGAAACCTTGCAGATCTCTCATTATTTTGATGAAATTTTAACTGGTGTTTCGGGATTCGAGCGAAAACCACATCCACAAGGGATTAATTATTTAGTTAAACGATATTCTTTAGATAAATCAATGACTTATTACATAGGAGATCGTCCACTAGATTTGGAGGTTGCTCAAAATGCTGGTATAAAATCCATAAACTTAAGGTTAGAGAATTCCAAAGAAAACTATAATATTTCAAGTCTCAAAGATATAATATCACTTGATTTCACTCGTTTGGAT

SEQ ID NO: 10412 - protein, 208 aa, Streptococcus agalactiae
MKKLTFIWDLDGTLIDSYVPIMEALEETYRHFGLIFDKELIHEYILQESVGKLLVNLSEEEQIPHEKLKAYFTKEQESRDSKIHLMPYAKEILEWTKEQDIPNFMYTHKGASTHSVLETLQISHYFDEILTGVSGFERKPHPQGINYLVKRYSLDKSMTYYIGDRPLDLEVAQNAGIKSINLRLENSKENYNISSLKDIISLDFTRLD

SEQ ID NO: 10413 - protein, 669 aa, Streptococcus agalactiae
ATGCGTCGTCCAGTAGTTAAAGAAGAAATTGTTCAATATATGCGTCAGCACCAAAAACAAAATAATGGCTGTTTAGCAGAGTTAGAAGCATTTGCTAAACAGGAAAATATCCCTATTATACCTCATGAAACAGCGACTTATTTTCGTTTTTTGATGCAAACATTACAACCTAAGCACATTTTAGAAATTGGAACAGCTATTGGTTTTTCGGCCCTTTTGATGGCAGAAAACGCTCCTGAAGCAAAGATAACAACGATCGATCGTAATGAAGAGATGATTGCCTTGGCTAAGGAAAACTTTGCAAAATATGATAATCACAATCAGATAACCCTTTTGGAAGGCGATGCTGTGGATGTGTTACAAACATTGGATAAATCTTACGATTTTGTATTCATGGATTCTGCTAAGTCTAAATATATCGTTTTTTTACCTCAAGTATTAAAACATTTAGATGTTGGAGGAGTAGTTGTTTTAGATGATATTTTCCAAGGTGGAGATATTGCAAAACCTATCGATGAAGTGAGAAGAGGTCAGCGAACTATCTACCGAGGTCTGCAACGTTTATTTGACTCGACTTTGCAACATCCTGATTTAACTGCTACTTTGGTACCTTTGGGAGATGGTTTATTGATGATTCGTAAAAATGCAGATCATATTGTACTAGAAGAT

SEQ ID NO: 10414 - protein, 223 aa, Streptococcus agalactiae
MRRPVVKEEIVQYMRQHQKQNNGCLAELEAFAKQENIPIIPHETATYFRFLMQTLQPKHILEIGTAIGFSALLMAENAPEAKITTIDRNEEMIALAKENFAKYDNHNQITLLEGDAVDVLQTLDKSYDFVFMDSAKSKYIVFLPQVLKHLDVGGVVVLDDIFQGGDIAKPIDEVRRGQRTIYRGLQRLFDSTLQHPDLTATLVPLGDGLLMIRKNADHIVLED

SEQ ID NO: 10415 - protein, 534 aa, Streptococcus agalactiae
ATGAAAACAAGATCAAAACTTGCAGCAGGCTTTTTGACACTTATGTCAGTTGCCACATTAGCTGCCTGCTCAGGTAAAACATCAAATGGAACAAATGTTGTTACAATGAAGGGCGACACTATTACAGTCTCTGATTTTTATGATCAAGTAAAAACATCAAAAGCTGCACAACAATCAATGCTTACATTGATCCTCTCACGTGTTTTTGATACACAGTATGGTGATAAAGTTTCAGATAAAAAAGTATCAGAAGCTTATAATAAGACAGCTAAAGGCTATGGTAATTCATTTTCAAGCGCACTTTCACAAGCAGGTTTGACTCCGGAAGGTTACAAACAACAAATTCGCACAACTATGCTTGTGGAATATGCTGTAAAAGAAGCAGCTAAGAAAGAATTAACAGAAGCAAACTATAAAGAAGCATATAAAAACTATACTCCTGAAACTTCTGTACAAGTAATCAAATTGGATGCAGAAGATAAAGCTAAATCTGTCCTTAAAGATGTAAAGGCTGATGGAGCTATNNNNNTTAAT

SEQ ID NO: 10416 - protein, 178 aa, Streptococcus agalactiae
  VARIANT 175, 176, 177: Xaa = Any Amino Acid
MKTRSKLAAGFLTLMSVATLAACSGKTSNGTNVVTMKGDTITVSDFYDQVKTSKAAQQSMLTLILSRVFDTQYGDKVSDKKVSEAYNKTAKGYGNSFSSALSQAGLTPEGYKQQIRTTMLVEYAVKEAAKKELTEANYKEAYKNYTPETSVQVIKLDAEDKAKSVLKDVKADGAXXXN

SEQ ID NO: 10417 - protein, 183 aa, Streptococcus agalactiae
TTGGAAATCTACAAAAATCGCTTAAAAGAAGTTATTCTTAAGGATAAAACAAGCGATAGAGCCTTCCAAAATAAAGTGATTTCAAAAGCCTTAGAAAAAGCTAATGTTAAGATTAAAGATAAAGCATTTGCGGGCATCTTATCACAATATGCTACAACAAGTGGTTCATCATCACTTAAAAAA

SEQ ID NO: 10418 - protein, 61 aa, Streptococcus agalactiae
MEIYKNRLKEVILKDKTSDRAFQNKVISKALEKANVKIKDKAFAGILSQYATTSGSSSLKK

SEQ ID NO: 10419 - protein, 483 aa, Streptococcus agalactiae
ATGGCTACTTTTCAAATTAAAGAAAAAATGTTTTCTCTAGGCGGTAAATTTACTATTACAGACCAGACTGGGCTTCCCTGTTATCACGTTGAAGGAAGTTTGTTCCCTCTACCTAAGACTTTTAAAGTCTTTGACGAAGAGGGGCATCTCATTAGTCAGATTGAGAAGAAGGTTTTAAGTTTTTTACCAAAGTTTAATGTGACATTAGCCAATGGGAATCATTTCACGATTAAGAAAGATTTCTCATTTTTGAAACCTCACTACACCATTGAAGACCTTGATATGGAAGTTAAGGGAAATTTTTGGGATATGGATTTCCAACTCTTAAAAGACAATCAAGTTATAGCAAACATATCTCAACAGTGGTTTCGTATGACTTCAACTTATCAGGTAGAAGTTTACAATGAAACTTACAACGATTTGACAATTTCGCTTGTCATAGCGATCGACTATGTCAAAGAGTTAGAAAAAAATGCATCAAAC

SEQ ID NO: 10420 - protein, 161 aa, Streptococcus agalactiae; identical to SEQ ID NO: 5990

SEQ ID NO: 10421 - protein, 2616 aa, Streptococcus agalactiae
ATGAAAGAATTATCGTCTGCACAAATCCGCCAAATGTGGTTGGATTTCTGGAAATCCAAAGGACATTCCGTTGAGCCTTCAGCTAACTTGGTTCCTGTGAACGACCCAACGCTTCTTTGGATCAACTCAGGTGTTGCAACCTTGAAAAAATATTTTGATGGTTCAGTGATTCCAGAAAATCCACGTATTACCAATGCACAAAAATCAATTCGTACTAATGATATTGAAAATGTTGGTAAAACAGCACGTCACCATACTATGTTTGAAATGCTTGGTAACTTCTCAATTGGAGACTATTTCCGTGATGAAGCTATTGAGTGGGGATTTGAACTCTTGACAAGTCCTGAATGGTTTGACTTCCCTAAAGACAAGCTCTACATGACTTATTACCCAGATGACAAGGATTCATATAACCGTTGGATTGCTTGTGGCGTTGAACCAAGTCACTTGGTGCCAATCGAGGATAACTTCTGGGAAATCGGTGCTGGTCCTTCAGGTCCAGATACTGAGATTTTCTTCGACCGTGGTGAAGATTTTGATCCAGAAAATATCGGACTTCGCCTTTTGGCTGAAGATATCGAAAACGATCGTTACATCGAAATCTGGAACATCGTTCTCTCACAATTCAATGCTGATCCTGCTGTGCCACGTTCAGAATACAAAGAATTGCCAAACAAAAACATTGATACGGGTGCTGGTCTTGAACGTCTTGCAGCTGTTATGCAAGGGGCAAAAACAAACTTTGAAACTGACCTTTTCATGCCTATCATCCGTGAAGTAGAAAAATTGTCAGGTAAAACTTACGATCCAGATGGCGACAACATGAGTTTCAAGGTTATCGCTGACCACATCCGTGCGCTTTCATTTGCTATCGGTGATGGTGCGCTTCCTGGAAATGAAGGTCGTGGTTACGTTCTTCGTCGTCTTCTTCGTCGTGCGGTTATGCACGGTCGCCGTCTTGGCATCAACGAAACTTTCCTTTACAAATTGGTTCCGACTGTTGGACAAATCATGGAAAGCTACTACCCAGAAGTGCTTGAAAAACGTGATTTTATCGAGAAAATCGTTAAACGTGAGGAAGAAACATTTGCTCGTACTATCGATGCAGGTAGCGGTCACTTGGATTCATTGCTTACGCAGCTTAAAGCTGAAGGTAAAGATACACTTGAAGGTAAAGATATCTTCAAACTTTATGATACTTATGGATTCCCGGTTGAATTGACAGAGGAATTGGCAGAAGATGCAGGCTACAAGATTGACCACGAAGGATTCAAAGCAGCCATGAAAGAACAACAAGACCGTGCGCGTGCAGCTGTTGTTAAGGGGGGTTCAATGGGTATGCAAAATGAAACCCTAGCTGGTATTGTTGAAGAATCACGCTTCGACTACGGAGCTGACAGCCTTGAATCAAATCTTTCAGTCATCATCGCTGACAATGAACGTACTGAAGCAGTTTCAGAAGGTCAAGCTCTTCTTGTCTTTGCTCAAACACCATTCTATGCTGAAATGGGTGGACAGGTTGCTGACCACGGTGTCATCAAAAATGATAAGGGTGACACAGTTGCTGAGGTTGTTGATGTTCAAAAAGCACCAAATGGTCAACCTCTACACACTGTAAACGTTTTGGCATCACTTTCAGTTGGAACAAACTACACACTTGAAATCAACAAAGAGCGTCGTTTGGCTGTTGAGAAAAACCACACAGCAACTCACTTGCTCCATGCAGCTCTTCACAATGTTATCGGTGAACACGCAACTCAGGCTGGTTCATTGAACGAAGAAGAATTCTTGCGCTTTGATTTTACTCACTTTGAAGCAGTAAGCAATGAGGAACTTCGTCACATTGAACAAGAAGTTAATGAGCAAATTTGGAACGATCTTACGATCACAACGACTGAAACTGACGTTGAAACCGCAAAAGAGATGGGAGCAATGGCACTTTTTGGTGAGAAATATGGTAAAGTGGTTCGTGTGGTTCAAATTGGTAATTATTCTGTTGAACTTTGCGGTGGAACTCACTTAAATAATTCTTCAGAAATCGGTCTCTTCAAGATTGTCAAAGAAGAAGGTATTGGTTCAGGTACTCGTCGTATTATTGCAGTTACTGGTAGACAAGCTTTTGAAGCTTATCGTAACCAAGAGGATGCACTAAAAGAGATCGCTGCTACTGTAAAAGCTCCGCAATTGAAAGATGCAGCAGCTAAAGTACAAGCTCTTAGCGACTCACTTCGTGATCTTCAAAAAGAAAATGTAGAGCTTAAAGAAAAAGCAGCAGCTGCAGCAGCTGGTGATGTCTTTAAAGATATTCAAGAAGCTAAGGGCGTGCGCTTCATTGCTAGTCAAGTTGATGTTGCAGACGCAGGTGCACTTCGTACATTTGCTGATAACTGGAAACAAAAAGACTACTCTGATGTGCTTGTTCTCGTAGCAGCTATTGGTGAGAAGGTTAATGTCCTTGTTGCAAGCAAAACTAAAGATGTCCACGCTGGTAACATGATCAAAGGATTGGCACCAATTGTAGCAGGTCGTGGTGGTGGTAAACCAGACATGGCTATGGCAGGTGGTAGCGATGCAAGTAAAATTGCAGAGTTGCTAGCAGCAGTTGCAGAAAATTTA

SEQ ID NO: 10422 - protein, 872 aa, Streptococcus agalactiae
MKELSSAQIRQMWLDFWKSKGHSVEPSANLVPVNDPTLLWINSGVATLKKYFDGSVIPENPRITNAQKSIRTNDIENVGKTARHHTMFEMLGNFSIGDYFRDEAIEWGFELLTSPEWFDFPKDKLYMTYYPDDKDSYNRWIACGVEPSHLVPIEDNFWEIGAGPSGPDTEIFFDRGEDFDPENIGLRLLAEDIENDRYIEIWNIVLSQFNADPAVPRSEYKELPNKNIDTGAGLERLAAVMQGAKTNFETDLFMPIIREVEKLSGKTYDPDGDNMSFKVIADHIRALSFAIGDGALPGNEGRGYVLRRLLRRAVMHGRRLGINETFLYKLVPTVGQIMESYYPEVLEKRDFIEKIVKREEETFARTIDAGSGHLDSLLTQLKAEGKDTLEGKDIFKLYDTYGFPVELTEELAEDAGYKIDHEGFKAAMKEQQDRARAAVVKGGSMGMQNETLAGIVEESRFDYGADSLESNLSVIIADNERTEAVSEGQALLVFAQTPFYAEMGGQVADHGVIKNDKGDTVAEVVDVQKAPNGQPLHTVNVLASLSVGTNYTLEINKERRLAVEKNHTATHLLHAALHNVIGEHATQAGSLNEEEFLRFDFTHFEAVSNEELRHIEQEVNEQIWNDLTITTTETDVETAKEMGAMALFGEKYGKVVRVVQIGNYSVELCGGTHLNNSSEIGLFKIVKEEGIGSGTRRIIAVTGRQAFEAYRNQEDALKEIAATVKAPQLKDAAAKVQALSDSLRDLQKENVELKEKAAAAAAGDVFKDIQEAKGVRFIASQVDVADAGALRTFADNWKQKDYSDVLVLVAAIGEKVNVLVASKTKDVHAGNMIKGLAPIVAGRGGGKPDMAMAGGSDASKIAELLAAVAENL

SEQ ID NO: 10423 - protein, 714 aa, Streptococcus agalactiae
ATGGTTGGTTTAGGAACAGTTATCAATGTTATTCTTATTATAGTTGGAGGCTTTGTAGGTTTATTTTTGAAAAATTTTTTGAAAGAATCACTTCAAAAGAGCCTTATGCAAGCCATGGGAGTTGCAGTTTTATTTATTTCGATATCAGGTGTTTTGGAGAAAATGATGTTAGTCGAAAAGTCACATCTCATCTCTAATCATACAAATATGATGATTATTACTCTTGCTCTAGGTACGGTACTTGGAGAGTTGCTATCACTAGATTCGTATATTGATAAATTTGGGAACTATCTTAAGCAAAAAACAGGAAGTGGTAACGATATTAAATTTGTGGAGGCATTCGTCACCTCAACTTGTACCGTTTGTATTGGAGCAATGGCCGTTGTTGGTAGCATTCAAGATGGTATAGCAGCAGATCATTCGATTTTATTTGCTAAGGGAATGTTAGACATGATTATTATTGCAATTATGACAGTGTCTTTAGGGAAAGGAGCTCTATTTTCTGCACTTCCTGTCGCTTTACTACAAGGTAGCCTTACGATTGTTGCTTTTTTCATGGGGAGTCTACTTAATCCATCATCTTTAGATTACCTTAACTTAGTAGGAAATATGCTTATATTCTGTGTCGGTGTTAATTTACTCTTTAACCTAAATATTAAAGTTATCAATATGTTGCCAGCAATTATTTTAGCTATATTATGGGGAAGTTTTATA

SEQ ID NO: 10424 - protein, 238 aa, Streptococcus agalactiae; identical to SEQ ID NO: 1524

SEQ ID NO: 10425 - protein, 816 aa, Streptococcus agalactiae
ATGAATCTATTATTTTCTATTGATGATATGTACGTAGATCATTTTAAAGTGATGCTTTATTCGCTTGTCCGACAAACCAAGAATCGTAAGTTAGAGATATATGTCTTACAAAAAACATTACTCAAACGTCATACAGAACTTATTCAATATACTCAAAATTTAGAAGTTGGCTATCATCCAATAATTGTAGGTACCGAAGTATTTGCTCAGGCACCTACAACTGATCGCTATCCAGATACAATATATTATCGACTTTTGGCTCATAAATTTTTACCTGAGACCTTAGATAGGATACTTTATTTAGATGCAGATATGCTTTGCTTAAATGATTTCTCAAGTTTATATGATATGGAGTTAGGTGATCAACTATATGCAGCGGCAAGTCATAATACTGATGGTAAGTTTCTAGATTATGTCAATAAATTACGGTTAAAAAATGTAGAGCTAGAATCCTCTTATTTCAATACAGGGGTACTCTTGATGAACTTGCCTGCTATACGAAAAGTTGTTCATCAACAAACTATCTTAGATTACATAATGCAAAACCGTGGTCGTCTAATCTTACCAGATCAGGATATCTTAAATGGCTTATACGCTAATTTGGTTAAATCAATACCTGATGAAATTTATAATTATGATGCTAGGTATAGTCTTATTTATCAATTAAAAAGTCGCAATGAATGGGATTTAGAGTGGGTTATTAACCATACTGTTTTTTTACATTTTGCAGGACGAGATAAACCATGGAAAAAAGATTATAGAGGACGTTACTCGGGCCTTTATAAGTTTATGGCTAAAGAGGCTTTAACTAAAAAT

SEQ ID NO: 10426 - protein, 272 aa, Streptococcus agalactiae
MNLLFSIDDMYVDHFKVMLYSLVRQTKNRKLEIYVLQKTLLKRHTELIQYTQNLEVGYHPIIVGTEVFAQAPTTDRYPDTIYYRLLAHKFLPETLDRILYLDADMLCLNDFSSLYDMELGDQLYAAASHNTDGKFLDYVNKLRLKNVELESSYFNTGVLLMNLPAIRKVVHQQTILDYIMQNRGRLILPDQDILNGLYANLVKSIPDEIYNYDARYSLIYQLKSRNEWDLEWVINHTVFLHFAGRDKPWKKDYRGRYSGLYKFMAKEALTKN

SEQ ID NO: 10427 - protein, 291 aa, Streptococcus agalactiae
ATGGTCATGACGTATATTGGTGTACCTAAAGAGCAAAAGGCACTCAGTCGTAGGGGTAAACAATTAGAAAAAATAAATCAGGGAGGAAAAACACTTATGTCACAAATGATTCAAGATTTAGTAGGAAGCACATGTATGATTTATTTAGAGGATGGTTCTCAAACTCATCCTTATGAGATTTTAAAGGTAGATGAGGATTGGGTACAGATTCGTCGCAACTTGAAACGAAGTAAAGAGGAGGTGCGTATTGTCCGTATTCATGATATCAAGGAATTGCGTCCAGTCAATAAA

SEQ ID NO: 10428 - protein, 97 aa, Streptococcus agalactiae
MVMTYIGVPKEQKALSRRGKQLEKINQGGKTLMSQMIQDLVGSTCMIYLEDGSQTHPYEILKVDEDWVQIRRNLKRSKEEVRIVRIHDIKELRPVNK

SEQ ID NO: 10429 - protein, 213 aa, Streptococcus agalactiae
ATGGGATTAATTTTAAAAAATAGACTCAAAGAATTGCGTGCACGAGATGGTATCAATCAAACAGAACTCGCTAAATTAACAGGAGTCTCAAGACAAACAATTAGCCTAATTGAACGCGGAGAATATACGCCATCTGTTATTATTGCTATGAAGATTTCTCAAGTATTTAAAGAATCCCTAGAGAATGTTTTTAGTTTAGTGTCAATGGAGGAA

SEQ ID NO: 10430 - protein, 71 aa, Streptococcus agalactiae; identical to SEQ ID NO: 1530

SEQ ID NO: 10431 - protein, 756 aa, Streptococcus agalactiae
ATGAAAAATTTTATAAAACAAAGTGATACTACATTTGTTCGAATTATCAAAAGTCTTTTAATTGGTGGTTTTATAGGGGCCATACTTGGTTCCGTAGGAGCTCTTTTTATCATATTTGGTCAAGATAAGTACTTATCTGAAATTAATATTGTTCAATATTTCCTATGGGTTAGTCGTATTGTTGTAATTATAACAGCTCTCTTTAGTCTCATCTACCTCTATCAGATTCAAAAATATCAGAAAGTTTTTTTCAATGTTGATGAAAGTCAATCTGAAGAAATTTATCGCCAGATTAATTTAAGACATTCTTATGGGATGACTTTTGTGTCAATTTCAATAGTACTCAGTATAGTTAATACTTTATTTAACTATAAACTAAATATTTTTGATGATTCAGTTACTTTAGTTATTCCAATATATGATTTATCACTGCTATTTGTTTTATTGGGTTTACATATATATTTTTTAAAGGTATATCGGAATATCCGAGGTATAAAAATGACAGTCGCTCCAACTTTAAAAGAGTTGAAAAACAATGTCTTACAATTGGACGAAGCAGAGTTGGAATCAAATTATAAGATGTGTTTTGATATTGTCATGAATTTAAGTGGTTTTATTTTCCCTACGATCTATTTTGTATTATTCTTTATCTCATTTGTTTTTCAAAAAGTGGAGATTGTAGCAATTATTATAACAACATCTATTCATATCTACATTCTCATTAAGTCTTTAAAAGCAGCACGTCATTTTTATAGA

SEQ ID NO: 10432 - protein, 252 aa, Streptococcus agalactiae
MKNFIKQSDTTFVRIIKSLLIGGFIGAILGSVGALFIIFGQDKYLSEINIVQYFLWVSRIVVIITALFSLIYLYQIQKYQKVFFNVDESQSEEIYRQINLRHSYGMTFVSISIVLSIVNTLFNYKLNIFDDSVTLVIPIYDLSLLFVLLGLHIYFLKVYRNIRGIKMTVAPTLKELKNNVLQLDEAELESNYKMCFDIVMNLSGFIFPTIYFVLFFISFVFQKVEIVAIIITTSIHIYILIKSLKAARHFYR

SEQ ID NO: 10433 - protein, 561 aa, Streptococcus agalactiae
ATGTCAAAAAATAACAACACTACCTGTCTTATTGAAACTGCTATTTTTGCAGCGCTTGCTATGGCTTTATCAATGATTCCTGATTTTGCGTCATGGTTCACTCCCTCTTTTGGAGCAATTCCTCTGATACTTTTTGCATTACGTCGTGGTACAAAATACGGTCTATTTGCTGGCTTAATTTGGGGCTTATTGCACTTTGTTCTTTCCAAAGTATATTACCTTAGTTTATCCCAAGTTTTTATAGAATACATCTTAGCATTTATAAGTATGGGAGTTGCAGGCGTATTTTCTGCTAAATTTAAAGATGCACTTAGCAGCAGCTCTAAAACTAAAGCTTTATCATTAGCATTATCTGGAGCAATATTAGCAACATTTGTTCGTTATGTTTGGCATTATATCGCTGGTGTTATTTTTTGGGCTAGTTATGCACCAAAAGGTATGTCTGCTACATTATACTCATTAAGCGTCAATGGTACTGCTGGTTTGTTAACTCTATTTTTTGTAGTCATTAGTATTATTATTTTAGTTATCAGCTACCCTAGCTTCTTTTTACCTAAGAAA

SEQ ID NO: 10434 - protein, 187 aa, Streptococcus agalactiae
MSKNNNTTCLIETAIFAALAMALSMIPDFASWFTPSFGAIPLILFALRRGTKYGLFAGLIWGLLHFVLSKVYYLSLSQVFIEYILAFISMGVAGVFSAKFKDALSSSSKTKALSLALSGAILATFVRYVWHYIAGVIFWASYAPKGMSATLYSLSVNGTAGLLTLFFVVISIIILVISYPSFFLPKK

SEQ ID NO: 10435 - protein, 957 aa, Streptococcus agalactiae
ATGACAACTTACTACGAAGCTATAAACTGGAACGAAATTGAAGATGTTATTGATAAATCAACTTGGGAAAAACTAACCGAACAATTTTGGCTCGATACACGTATCCCTTTATCAAATGACTTAGACGATTGGCGCAAACTTTCTGCTCAAGAAAAAGATCTTGTTGGCAAGGTTTTTGGAGGCTTAACCCTACTTGATACCATGCAATCAGAAACTGGTATTGAAGCTATTCGTGCCGATGTTCGCACGCCTCACGAAGAAGCTGTCTTAAACAATATTCAATTCATGGAATCTGTTCACGCTAAATCTTATTCTTCAATTTTCTCAACTTTAAATACTAAATCAGAAATTGAAGAAATTTTCGAGTGGACTAATAATAATGAGTTCCTTCAAGAAAAAGCACGTATTATCAATGACATTTATGCTAATGGAAATGCCCTTCAAAAAAAGGTGGCTTCCACCTACCTCGAAACTTTCCTTTTTTATTCTGGCTTTTTCACACCTCTTTACTATTTGGGAAATAATAAGTTAGCAAATGTTGCTGAAATCATTAAATTAATTATTCGTGATGAATCTGTACATGGTACTTATATCGGTTACAAATTCCAGCTTGGTTTTAACGAATTACCAGAAGATGAGCAAGAGAATTTTCGTGATTGGATGTATGACCTCCTTTATCAGCTGTATGAAAACGAAGAAAAATACACCAAGACACTTTATGATGGCGTAGGATGGACTGAAGAAGTTATGACCTTTTTACGCTACAATGCTAATAAAGCTCTTATGAATTTAGGACAAGATCCTTTATTCCCAGATACAGCAAATGATGTCAACCCAATTGTTATGAATGGTATTTCAACAGGAACATCAAACCATGACTTCTTCTCTCAAGTAGGTAATGGTTACCTACTTGGTAGCGTTGAAGCTATGCATGATGATGACTATAACTATGGATTA

SEQ ID NO: 10436 - protein, 319 aa, Streptococcus agalactiae
MTTYYEAINWNEIEDVIDKSTWEKLTEQFWLDTRIPLSNDLDDWRKLSAQEKDLVGKVFGGLTLLDTMQSETGIEAIRADVRTPHEEAVLNNIQFMESVHAKSYSSIFSTLNTKSEIEEIFEWTNNNEFLQEKARIINDIYANGNALQKKVASTYLETFLFYSGFFTPLYYLGNNKLANVAEIIKLIIRDESVHGTYIGYKFQLGFNELPEDEQENFRDWMYDLLYQLYENEEKYTKTLYDGVGWTEEVMTFLRYNANKALMNLGQDPLFPDTANDVNPIVMNGISTGTSNHDFFSQVGNGYLLGSVEAMHDDDYNYGL

SEQ ID NO: 10437 - protein, 2157 aa, Streptococcus agalactiae
ATGAGTTTAAAAAATATTGGCGATGTATCTTACTTTCGCCTAAATAATGAAATTAACCGTCCTGTTAATGGACAAATCCCACTCCATAAAGATAAAGAAGCCTTAACTGCTTTTTTCAAAGAAAACGTACAGCCTAATTCAAAAGCTTTTGACTCAATCACTGATAAAATTGCTTACCTCCTTAAGTATGATTATCTTGAAGAAGCTTTCCTCAATAAATATCGTCCTGAATTTATTGAAGAATTATCTACCAAACTCTTCGATAAAAAGTTTCGTTTTAAATCCTTCATGGCAGCCTATAAGTTTTATCAGCAGTATGCATTAAAAACAAATGATGGAGAATACTATTTAGAAAGTATTGAAGATCGCGTTCTCTTTAACGCTCTTTATTTTGCAGACGGTGATGAAGAACTAGCAACTGACTTAGCTCTAGAAATGATTTCACAACGCTATCAACCTGCAACACCAAGTTTTTTAAATGCTGGTCGAAGTCGTCGCGGAGAATTAGTCTCATGTTTCTTAATCCAAGTAACTGATGATATGAATGCTATTGGTCGTTCGATTAATTCAGCTCTTCAATTATCTCGTATTGGTGGTGGGGTTGGAATATCACTTAGTAACCTTCGTGAGGCTGGAGCTCCTATCAAAGGTTTTGCTGGTGCTGCTTCTGGAGTCGTTCCAGTCATGAAATTATTTGAAGACAGTTTTTCTTACTCCAACCAACTTGGACAACGCCAAGGTGCTGGAGTTGTTTACCTTGACGTTTTCCATCCAGATATTATTTCATTCTTATCAACTAAAAAAGAAAATGCTGATGAAAAAGTACGTGTTAAAACATTGTCATTAGGGATTACTGTACCCGATAAATTCTATGAACTAGCACGTAACAATCAAGAAATGTACTTGTTTAGTCCTTATAGTATCGAACGTGAATATGGTGTTCCTTTCAGCTATATTGATATTACCGAAAAATACGATGAATTAGTCGCTAACCCTAATATCACTAAAACAAAAATCAATGCTCGTGATTTAGAAACAGAGATTTCTAAACTTCAACAAGAATCAGGTTATCCTTACATCATCAATATTGACACTGCTAATCGTACTAACCCTGTTGATGGAAAAATTATCATGTCAAATCTTTGCTCTGAGATTTTGCAAGTACAAAAACCAAGTCTTATCAATGATGCTCAAGAATACCTTGAAATGGGAACTGATATTTCTTGTAACCTTGGCTCAACTAATGTTTTAAATATGATGACATCTCCTGATTTTGGAAAATCAATTAAAACAATGACTCGTGCTTTAACTTTCGTTACTGACTCATCAAATATTGAAGCTGTTCCAACTATTAAAAACGGAAATGCTCAAGCACATACATTTGGACTTGGAGCAATGGGACTCCACTCCTATTTGGCAAAAAATCATATCGAATATGGTAGTCCAGAATCAATTGAATTTACTGATATTTATTTCATGCTAATGAACTACTGGACCTTAGTAGAATCAAACAATATTGCCCGCGAACGTCAAACAACATTTGTAGGTTTTGAAAAATCAAAATACGCTGACGGTACATACTTTGATAAATATGTATCTGGAAAATTTGTTCCACAATCTGACAAAGTAAAATCCCTATTTGCTAATCATTTTATCCCCGAAGCTAAAGATTGGGAAAACCTTAGATACGCAGTTATGAAAGACGGACTATATCATCAAAATCGGCTTGCAGTTGCTCCGAATGGTTCTATTTCGTATATCAACGATTGTTCAGCATCTATCCACCCTATTACACAACGTATTGAAGAGCGTCAAGAGAAAAAAATCGGGAAAATTTATTATCCAGCTAATGGCTTAGCTACAGATACTATCCCTTATTACACTTCTGCCTATGATATGGATATGCGTAAAGTAATAGACGTCTATGCCGCAGCAACTGAGCACGTAGACCAAGGTCTCTCAATGACACTCTTTTTACGAAGCGAATTACCAAAGGAGTTGTACGAGTGGAAAACAGAAAGTAAGCAGACTACTCGCGACCTTTCAATCCTACGCAACTATGCTTTCAACAAAGGTGTGAAATCAATCTACTATATCCGTACTTTTACAGATGATGGTAGCGAAGTCGGAGCTAATCAATGCGAAAGTTGTGTCATC

SEQ ID NO: 10438 - protein, 719 aa, Streptococcus agalactiae
MSLKNIGDVSYFRLNNEINRPVNGQIPLHKDKEALTAFFKENVQPNSKAFDSITDKIAYLLKYDYLEEAFLNKYRPEFIEELSTKLFDKKFRFKSFMAAYKFYQQYALKTNDGEYYLESIEDRVLFNALYFADGDEELATDLALEMISQRYQPATPSFLNAGRSRRGELVSCFLIQVTDDMNAIGRSINSALQLSRIGGGVGISLSNLREAGAPIKGFAGAASGVVPVMKLFEDSFSYSNQLGQRQGAGVVYLDVFHPDIISFLSTKKENADEKVRVKTLSLGITVPDKFYELARNNQEMYLFSPYSIEREYGVPFSYIDITEKYDELVANPNITKTKINARDLETEISKLQQESGYPYIINIDTANRTNPVDGKIIMSNLCSEILQVQKPSLINDAQEYLEMGTDISCNLGSTNVLNMMTSPDFGKSIKTMTRALTFVTDSSNIEAVPTIKNGNAQAHTFGLGAMGLHSYLAKNHIEYGSPESIEFTDIYFMLMNYWTLVESNNIARERQTTFVGFEKSKYADGTYFDKYVSGKFVPQSDKVKSLFANHFIPEAKDWENLRYAVMKDGLYHQNRLAVAPNGSISYINDCSASIHPITQRIEERQEKKIGKIYYPANGLATDTIPYYTSAYDMDMRKVIDVYAAATEHVDQGLSMTLFLRSELPKELYEWKTESKQTTRDLSILRNYAFNKGVKSIYYIRTFTDDGSEVGANQCESCVI

SEQ ID NO: 10439 - protein, 222 aa, Streptococcus agalactiae
ATGGCAGCTATTACTGTTTTTTCGAAAAACAACTGTATGCAATGTAAAATGACTAAGAAATTTCTTGACCAGCACGGCGCTGATTTTGAAGAAATTAATATTGATGAAAAACCAGAAAAAATTGAATATGTGAAAAATCTCGGCTTTTCTGCGGCTCCAGTGATTGAAGCTGGTAATGTTGTTTTTTCAGGTTTCCAACCAAGCAAACTAAAAGAACTTGTT

SEQ ID NO: 10440 - protein, 74 aa, Streptococcus agalactiae; identical to SEQ ID NO: 1538

SEQ ID NO: 10441 - protein, 261 aa, Streptococcus agalactiae
ATGGCTTCAAAAGATTTCCACATTGTTGCAGAAACAGGTATTCACGCACGTCCAGCTACTTTGCTTGTCCAAACAGCTAGCAAATTTGCTTCAGACATCACGCTTGATTACAAAGGTAAAGCAGTAAACCTTAAATCAATCATGGGTGTTATGAGTCTTGGTGTTGGTCAAGGTGCTGATGTTACTATTTCAGCAGAAGGTGCAGATGCAGATGATGCAATTGCAGCTATCGAAGAAACAATGACAAAAGAAGGATTGGCA

SEQ ID NO: 10442 - protein, 87 aa, Streptococcus agalactiae; identical to SEQ ID NO: 1540

SEQ ID NO: 10443 - protein, 1722 aa, Streptococcus agalactiae
ATGCTTAAAGGAATCGCAGCCTCTGATGGTGTTGCAGTTGCTAAAGCATATCTACTTGTCCAACCGGATTTGTCATTTGAGACTGTAACAGTCGAAGATACAAACGCAGAAGAAGCTCGCCTTGATGTTGCACTCCAAGCTTCACAAGACGAGCTTTCTGTTATCCGTGAGAAGGCAGTAGAAAGCTTAGGCGAAGAAGCCGCAGCTGTATTTGATGCTCATTTAATGGTTCTTTCTGACCCAGAAATGATTAATCAAATTAAAGAGACTATTCGTGCAAAACAAGTAAATGCAGAAACAGGTCTTAAAGAAGTGACTGATATGTTCATCACTATCTTTGAAGGTATGGAAGATAACCCATACATGCAAGAACGTGCAGCAGATATCCGTGATGTTGCCAAACGTGTCTTAGCACATCTTTTGGGTGTTAAATTACCAAACCCAGCAACTATCAATGAAGAATCAATCGTTATTGCACACGATTTGACACCTTCTGATACAGCTCAATTAAATAAACAATTTGTTAAAGCTTTTGTAACAAATATTGGAGGGCGTACAAGTCACTCAGCTATTATGGCACGTACACTCGAAATCGCAGCTGTTCTTGGTACAAATGATATTACTGAACGTGTTCAAGATGGTCAGTTGATTGCTGTTAATGGTATTACTGGTGAAGTTATCATTGAACCAACTGAAGCTCAAATTTCAGCCTTCAAGGCAGCAGGTGAAGCTTATGCCAAACAAAAAGCTGAATGGGCACTTCTTAAGGATGCACAAACAGTTACTGCTGATGGTAAACATTTTGAATTAGCTGCTAATATCGGTACACCTAAAGATGTTGAGGGTGTTAACGAAAATGGAGCAGAAGCAGTTGGTCTTTACCGTACAGAGTTCTTATATATGGATTCACAAGATTTCCCAACAGAAGATGAGCAATATGAAGCATATAAAGCAGTTCTTGAGGGTATGAATGGTAAACCAGTTGTTGTTCGTACAATGGATATCGGTGGAGATAAAGAGCTTCCTTACTTTGATCTTCCAAAAGAGATGAACCCATTCTTAGGATTCCGTGCATTGCGTATTTCAATTTCTGAAACTGGTGATGCAATGTTCCGCACACAAATCCGAGCACTTCTTCGTGCTTCAGTTCATGGACAGCTACGCATCATGTTCCCAATGGTTGCTTTGCTTAAAGAATTCCGTGCTGCTAAAGCTATATTTGAAGAAGAGAAAGCGAACTTGTTAGCTGACGGTGTAGCAGTAGCTGAAGGCATTGAAGTTGGTATTATGATTGAAATCCCAGCGGCAGCTATGCTTGCAGACCAATTTGCAAAAGAAGTTGATTTCTTCTCAATTGGTACTAATGATCTTATCCAATACACAATGGCTGCGGACCGTATGAATGAGCAAGTTTCATACCTCTATCAACCATACAATCCATCAATCCTTCGTTTGATTAACAACGTTATCAAAGCTGCTCATGCTGAAGGTAAATGGGCAGGTATGTGTGGTGAGATGGCCGGTGATCAAACTGCGGTTCCACTTCTTGTTGGTATGGGATTGGATGAATTCTCAATGTCAGCAACCTCAGTACTTCGTACACGTAGCTTAATGAAAAAATTGGACACAGCTAAAATGGAAGAATACGCTAATCGTGCTCTTTCAGAGTGTTCAACTATGGAAGAAGTTATCGAACTTCAAAAAGAATACGTTGACTTTGAC

SEQ ID NO: 10444 - protein, 574 aa, Streptococcus agalactiae; identical to SEQ ID NO: 1542

SEQ ID NO: 10445 - protein, 1425 aa, Streptococcus agalactiae
TTGACAAAAGAATATCAAAATTATGTCAATGGCGAATGGAAATCATCTGTTAATCAGATTGAGATTTTGTCACCAATTGATGATTCTTCATTGGGATTCGTGCCAGCGATGACTCGAGAAGAAGTTGATCATGCTATGAAAGCGGGTCGTGAGGCTTTACCAGCCTGGGCTGCTTTGACAGTATATGAACGTGCACAATACCTTCATAAAGCCGCAGACATTATTGAACGTGATAAAGAAGAAATTGCTACTGTTTTAGCAAAAGAAATTTCTAAAGCTTACAATGCTTCAGTAACTGAGGTTGTAAGGACAGCTGATCTTATTCGTTATGCAGCAGAAGAAGGAATTCGTTTATCAACTTCAGCTGACGAAGGTGGAAAAATGGATGCTTCAACAGGTCATAAGTTGGCTGTTATTCGTCGTCAACCAGTAGGTATCGTTTTAGCAATCGCACCTTATAATTACCCTGTTAACCTCTCAGGATCAAAAATTGCGCCAGCTCTAATTGGTGGAAACGTTGTGATGTTTAAACCACCAACACAAGGTTCAGTCTCAGGACTTGTTTTAGCAAAAGCTTTTGCAGAAGCAGGTCTTCCAGCAGGTGTCTTTAATACTATTACAGGACGCGGTTCTGAGATTGGAGATTACATTGTTGAGCATGAAGAAGTTAATTTTATTAACTTTACAGGATCAACGCCAGTTGGAAAACGTATTGGTAAGTTAGCAGGAATGCGTCCAATTATGCTTGAGTTGGGTGGTAAGGATGCAGGTGTCGTCTTAGCTGATGCTGACCTTGACAACGCTGCTAAACAAATCGTTGCAGGTGCTTATGATTACTCCGGACAACGCTGTACGGCAATTAAGCGTGTACTTGTCGTTGAAGAAGTTGCAGATGAATTGGCAGAAAAAATATCTGAAAATGTAGCAAAATTATCAGTAGGTGATCCATTTGATAATGCAACGGTGACACCGGTTATTGATGATAATTCAGCCGACTTTATTGAAAGCTTAGTAGTAGATGCACGTCAAAAAGGTGCGAAAGAATTGAATGAATTTAAACGTGATGGTCGTCTATTAACTCCAGGATTGTTTGATCATGTTACTTTAGATATGAAACTAGCTTGGGAAGAGCCTTTTGGACCAATTCTCCCAATTATTCGTGTCAAGGATGCAGAAGAAGCTGTTGCTATTGCCAACAAATCTGATTTTGGATTACAATCATCAGTCTTTACACGTGATTTCCAAAAAGCATTTGATATAGCAAATAAACTTGAAGTTGGTACAGTTCACATTAACAATAAGACTGGACGTGGTCCTGATAATTTCCCATTCTTAGGACTCAAAGGATCTGGTGCAGGTGTTCAAGGTATCAGATATTCAATTGAAGCAATGACAAATGTAAAATCGATAGTTTTTGATATGAAA

SEQ ID NO: 10446 - protein, 475 aa, Streptococcus agalactiae; identical to SEQ ID NO: 1546

SEQ ID NO: 10447 - protein, 1251 aa, Streptococcus agalactiae
ATGAAGAAATTAATTATAGGTATTTTTAGTCTAATTATTATAGCGATTCTTGCTTGGCAAGGTTTTTCGTTTTTGAAACATAAAGAAATAAAACTTCAACAAGCTGTTGTTGAAAAAGAAATTCGCATAGCCGAGAAAACGGTAGAAGTGGTGAAAAGACAGAAAACTGAACGTGTTCTTTTTCTTGAACCTAAAGGATATGACAAAAGTCTAAGCGCTGATATTTTAAAGTGGAATCAAAAAAGCTTTGAGCATAAAAAATTTTATGACAATCAATACATTATTCTACGTCCTCAATTAGCAGATTCTAACTTTGCAAATGTTAAAAAATTATCCATTTATCAAATCTTATATCAAAAAGAAAAAGGAAGTATGTTTCAAAAATCAAGTCGCCTTTTGAGAACCTACTTACTTGATCAAAATAAGAAACCTTTTGAATTAGATGAGCTTTTAGCTCATAATATATCTGGATTTAAGGCTATTTTAGAAAATATAGCTCCAGGAACTCAACTAAAGGAACATGATAGCAATAAAGAATTTTTAAAAACTGGAAGAGTAACAGATGGGCTAGATGTTAAAGATGGTAAGTTAATTATTAATGATTTAAAATTACCACTTGATAAATTATATAATGTGATCGATGAGTCATATTTAAAATCAAGTGATCTAGATTTAGTTTCTAATTTAAAAGCTAAAGCACCACGTGTTGCACTTACCTTTGATGATGGACCAAATGAAAAAACGACTCCTAAAGCCTTAGAAATCCTTAAAAGATATAATGCTAAAGCGACTTTCTTTGTAATGGGACAAAGTGCTGTAGGGCACACAGATATTTTACAAAGGATGCATGCTGAAGGTCATGAGATTGGTAATCATACATGGGATCATCCTAATTTAACCAAACTACCAGCGGAGAAAATCAAGGAAGAGATTCATAAGACTAATGATCTGATTATGAAAGCAACAGGACAAAAACCGGTGTACTTACGTCCCCCTTACGGAGCAACAAATGCTACTGTAAAAACAGTGACAGGATTGAAAGAAATGTTGTGGTCAGTTGATACAGAAGACTGGAAAAATCATAATACACAAGCAATGATGACCAATATCAAAAAACAATTACGTCCTGGAGGAGTGATTTTGATGCATGATATTCACCAGACAACCATAGATGCTCTGCCTACAATTATGGATTATCTGACAACCCAGGGCTATTATTTTGTTACTGTAGGTGAATTATATTCAACGCCT

SEQ ID NO: 10448 - protein, 417 aa, Streptococcus agalactiae
MKKLIIGIFSLIIIAILAWQGFSFLKHKEIKLQQAVVEKEIRIAEKTVEVVKRQKTERVLFLEPKGYDKSLSADILKWNQKSFEHKKFYDNQYIILRPQLADSNFANVKKLSIYQILYQKEKGSMFQKSSRLLRTYLLDQNKKPFELDELLAHNISGFKAILENIAPGTQLKEHDSNKEFLKTGRVTDGLDVKDGKLIINDLKLPLDKLYNVIDESYLKSSDLDLVSNLKAKAPRVALTFDDGPNEKTTPKALEILKRYNAKATFFVMGQSAVGHTDILQRMHAEGHEIGNHTWDHPNLTKLPAEKIKEEIHKTNDLIMKATGQKPVYLRPPYGATNATVKTVTGLKEMLWSVDTEDWKNHNTQAMMTNIKKQLRPGGVILMHDIHQTTIDALPTIMDYLTTQGYYFVTVGELYSTP

SEQ ID NO: 10449 - protein, 1080 aa, Streptococcus agalactiae
ATGATAACAAAATTTCCAGACCAATGGCAGGATAAATTAACCCAGCGTCAATTTGATGATCTAACAGATATTCAAAATAAACTTTTTCAACCTATTACTGATGGTGATAATATCCTTGGAATTAGCCCTACAGGTACTGGTAAAACTCTAGCATACCTTTTCCCAACGCTTCTTAAGTTGCAACCTAAAAAGAGCCAACAACTCTTAATTTTAGCTCCAAATTCAGAATTAGCTGGACAAATCTTCGACGTTACAAAAGAATGGGCTGAACCATTAGGACTGACCGCACAACTATTCCTTTCAGGTTCTAGTCAAAAACGCCAAATTGAGCGACTAAAAAAAGGACCAGAAATTCTTATAGGAACTGCTGGACGCGTATTTGAACTTGTGAAACTAAAAAAAATAAAAATGATGAACATTAATACTATCGTCCTTGATGAATTCGATGAATTACTCGGCGACTCACAATATCATTTTGTGGACAATATTATTAATCGCGTTCCTCGTGATCAGCAAATGATTTACATTAGTGCCACCAACAAACTGGACAATAGTAAACTTGCCGATAACACTATAACAATCGATCTATCTAATCAAAAACTTGATACTATAAAACATTATTATATTACAGTTGATAAAAGAGAGCGTACTGACCTACTTCGTAAATTTTCAAATATTCCTGATTTTAGAGGTCTTGTCTTTTTTAACAGCTTATCAGACTTAGGTGCATGTGAAGAACGTTTACAATTTAATAGGGCCTCGGCAGTTTCTTTAGCAAGCGATATTAATATTAAATTCCGTAAAGTTATCTTAGAGAAATTTAAAAACCATGATATTTCATTACTCCTAGGAACTGATTTGGTAGCTCGTGGCATTGATATCGACAACCTAGAATATGTGATTAATTTTGATATCGCACGCGACAAAGAAACATATACACATCGTTCTGGACGAACTGGTCGTATGGGGAAAGAGGGATGTGTTATTACATTTGTAACACATAAAGAAGAGCTCAAACAACTTAAAAAATACGCCACCGTTACAGAACTTGTACTTCACAATCAAAAATTACATTTAAAA

SEQ ID NO: 10450 - protein, 360 aa, Streptococcus agalactiae; identical to SEQ ID NO: 1552

SEQ ID NO: 10451 - protein, 627 aa, Streptococcus agalactiae
ATGCGTAAAAAACCTATTATTATTGGTGTTACAGGTGGATCTGGTGGTGGTAAAACCAGTGTTTCTCGGGCGATTTTATCAAATTTCCCAGATCAAAAAATTACCATGATTGAACATGATTCTTACTATAAAGATCAAAGTCATTTAACTTTTGAAGAACGTGTAAAAACCAATTATGATCATCCCCTTGCTTTTGATACCAATTTGATGATTGAGCAATTGAACGAATTGATTGAGGGACGTCCGGTCGATATTCCGGTTTATGATTACACAAAACATACCCGTAGTGATAGAACTATCCGCCAAGAACCCCAGGATGTCATTATTGTTGAGGGAATTTTGGTATTAGAAGATCAGCGTTTGCGTGATTTAATGGATATCAAATTATTTGTTGATACAGATGATGATATTCGTATTATTCGTCGTATTAAGCGTGATATGGAAGAGCGCGATAGAAGTTTAGATAGTATTATTGAACAGTATACAGAAGTTGTAAAACCTATGTATCATCAATTTATCGAACCAACAAAGCGTTATGCGGATATTGTAATTCCAGAAGGAGTAAGTAATATTGTCGCTATTGATTTAATCAATACCAAAGTGGCTAGCATCTTAAATGAAGCAAAA

SEQ ID NO: 10452 - protein, 209 aa, Streptococcus agalactiae; identical to SEQ ID NO: 6028

SEQ ID NO: 10453 - protein, 495 aa, Streptococcus agalactiae
ATGAACAAGTCTAAGAAAATCGAAAATTATCAATTATTATTACTACAAGCGCAAGCTCTATTCTCAGATGAAACAAATGCTCTTGCCAACTTATCAAATGCTTCAGCTATGCTAAATGCTATGCTTCCAAATTCTGTATTTACAGGCTTTTATTTATTTGATGGAGAAGAGTTAATTCTTGGCCCTTTCCAGGGTGGTGTATCATGTGTGCATATTACTTTAGGAAAAGGTGTTTGTGGTGAATCTGCACAAACTGCTAAGACGCTGATCGTTGATGATGTTACAAAGCATGCTAACTATATCTCCTGTGATTCAAAAGCTATGAGTGAAATCGTAGTACCTATGTTTAAAAATGGCAAACTTCTAGGAGTTCTAGATTTAGATTCTTCTTTAGTAGCAGATTATGATGAGATTGATCAAGAATACTTAGAAAAATTTGTAGGTATTCTAGTAGAACATACGATTTGGAATTTGGATATGTTTGGAGTTGAAAAG

SEQ ID NO: 10454 - protein, 165 aa, Streptococcus agalactiae; identical to SEQ ID NO: 1558

SEQ ID NO: 10455 - protein, 1662 aa, Streptococcus agalactiae
ATGTATCAGGCCCTTTATCGGAAATATCGTAGCCAAACATTTGATGAAATGGTTGGACAAAGTGTTATTTCAACTACTTTAAAGCAAGCTGTGTCCAGCAAAAAAATTAGCCATGCTTACCTTTTTTCAGGACCTAGGGGAACTGGAAAAACAAGTGCTGCTAAAATATTTGCAAAAGCGATGAATTGCCCAAATCAAATTAATGGCGAACCTTGTAATCATTGTGATATTTGTCGAGATATTACAAATGGTAGTTTAGAGGATGTCATTGAAATTGATGCTGCGTCAAATAATGGTGTCGATGAAATTCGTGATATCAGGGACAAATCAACTTATGCTCCAAGTAGGGCAACCTATAAAGTTTATATTATTGATGAGGTTCATATGTTGTCTACAGGTGCCTTCAATGCACTATTGAAAACACTTGAAGAGCCAACAGAAAATGTTGTTTTTATATTAGCAACAACAGAACTCCATAAAATCCCTGCAACAATCTTATCTCGTGTCCAGCGCTTTGAATTTAAAGCGATTAAATTATTAGCTATTCGAGATCATTTAGCACAGATTTTAGATAAAGAAGCTATTTCATATGATTTGGATGCTCTGACACTAGTCGCTAGACGAGCCGAAGGTGGTATGCGTGATGCTTTATCAATTCTCGATCAAGCCTTGAGTTTAGCGAAAGATAACCACATTTCTTTAGATGTAGCAGAAGAAATTACAGGGAGCATTTCCTTATCTGCTATAGATGATTATGTATCGAATATATTGGCTCACGATACAACTGAAGCACTCGCTAAACTTGAAGTAATCTTTGATAGTGGCAAAAGTATGAGTCGTTTTGCAACAGATTTATTGATGTACTTAAGAGATTTACTTGTTGTTCAAGCAGGTGGTGAAGATAGTCATTCAAGTGATACTTTTATAGCCAATCTTAATGTTAAACAAGATATTTTATTTGAAATGATTGATAAAGTGACATCTGTTCTTCCTGAGATAAAAAATGGTAGCCATCCTAAAGTTTATGCAGAGATGATGACCATCCAATTGTCTGAAATGGTAGAAAAAAATTCGTCAAACATACCCGCAGATGTGACAGCAGAATTAGATAGTCTTCGTCGAGAGTTAAAATCGTTAAAAAACGAAATGAGCCAACTCTCTCGAGCAGATCAAAGTTCATCAACTCAAAAAGTAAAGGTTAATAATAAGACATTCACATTTAAAGTTGACCGTACAAAGATTTTGACCATTATGGAAGAAACGGTTGTAGATAGTCAACGTTCACGTGAATACTTAGAAGCTTTAAAGAGCGCTTGGAACGAGATATTAGATAATATTACGGCTCAAGATAGAGCCTTATTAATGGGATCTGAACCTGTCTTAGCTAATAGCGAGAATGCTATTTTGGCATTTGATGCGGCCTTTAATGCTGAACAAGCTATGAAACGTACCGATCTCAATGATATATTTGGTAATATTATGAGTAAAGCAGCAGGTTTTTCACCTAATATTTTAGCTGTACCTAGAAATGATTTTAATCAAATTCGGAGCGATTTTGCAAAGAAAATGAAAGCTCAAAAGACGGAAACAGAACCTGAAGTTAATCATCAAATTCCAGAAGACTTTTCTTATCTAGCAGAACGAATAGCAATCGTTGAAGAT

SEQ ID NO: 10456 - protein, 554 aa, Streptococcus agalactiae; identical to SEQ ID NO: 1560

SEQ ID NO: 10457 - protein, 192 aa, Streptococcus agalactiae
ATGACAAAACGACAATTTATTTTTATGGCGCTTTTATGCTCTTTTGAAACTTATTTTTTTAATCAATCCGTTATGGATGGCTCCTGGATTTTTGCTATTTTTTGGGGAGTTTTATTACTTCGAGATCTTCAAAAGGTGTATGCGATTTCAAAATTCACAAAAGAGCTTATCAAATCTACCAAGAAGAAAGAC

SEQ ID NO: 10458 - protein, 64 aa, Streptococcus agalactiae; identical to SEQ ID NO: 1564

SEQ ID NO: 10459 - protein, 867 aa, Streptococcus agalactiae
ATGGCAAATCAACTTAATATTTCCCGCACAGCTATTTGGAAAGGTATAAAAACGTTAGAAGAATTAGGCCTAGAGATTGAGTCTGTCACTAACAAGGGCTACCGATTGGTATCAGGTGACATATTATTACCAGAACAACTCGAACAAGAAATTGGTATTAAGGTTAGTCTTAATAATAATAGTGCTTCAACCCAACTAGATGCTAAAATGGGGATAGAAAGTAAATTAAAGACTCCACACCTTTTTTTAGCTCCTAATCAAAAAAAAGCTAAAGGACGTTTTGATAGACCTTTCTTTACATCAAATCAAGGCGGCATCTATATGTCTCTTTTATTACAACCTAATGTACCGATTGAAGATATAAAACCTTATACTGTCATGGTAGCCTCTAGTGCTGTAAAAGCTATCTCACGGTTAACAGGAATTACTCCTGAAATTAAGTGGGTCAATGATATTTATTTAGATAATAAAAAAATAGCTGGTATTTTAACCGAGGCTATCGCTTCTGTTGAGAGTGGGTTGGTAACGAATGTTATTATAGGATTAGGTATCAATTTCTATATCAAAGAGTTCCCTAGGGCGTTAACTAAGCGCGCAGGTAGTCTCTTTACAGAGCAACCGACCATAACTAGAAATCAATTGATTACAGAAATCTGGAATCTCTTTTTCAATATTCCACTAGAGGATCACTTAAAGGTATATAGAGAAAAATCCCTAGTCTTAGATAGAACCGTTAGCTTTATGGATGGTCAAACAATGTATTCTGGGAAAGCTATTGATATTACAGATAAAGGATATTTAGTGGTTGAGTTAGATGATGGTCAGTTGAAAACACTTCGCAGTGGCGAAATCAGTCTTTCTTCTTGG

SEQ ID NO: 10460 - protein, 289 aa, Streptococcus agalactiae
MANQLNISRTAIWKGIKTLEELGLEIESVTNKGYRLVSGDILLPEQLEQEIGIKVSLNNNSASTQLDAKMGIESKLKTPHLFLAPNQKKAKGRFDRPFFTSNQGGIYMSLLLQPNVPIEDIKPYTVMVASSAVKAISRLTGITPEIKWVNDIYLDNKKIAGILTEAIASVESGLVTNVIIGLGINFYIKEFPRALTKRAGSLFTEQPTITRNQLITEIWNLFFNIPLEDHLKVYREKSLVLDRTVSFMDGQTMYSGKAIDITDKGYLVVELDDGQLKTLRSGEISLSSW

SEQ ID NO: 10461 - protein, 1194 aa, Streptococcus agalactiae
ATGTCAGAACGTAAACTTTTCACGTCTGAGTCAGTATCTGAGGGACATCCTGATAAGATTGCTGACCAAATTTCCGATGCGATTTTAGATGCAATTTTAGAGCAAGATCCAGATGCCCACGTAGCAGCCGAAACAGCTGTTTATACAGGGTCGGTTCATGTATTTGGCGAAATATCAACGACAGCCTATGTTGATATTAACCGAGTTGTCCGTAACACAATCGCTGAAATTGGCTATGATAAAGCTGAATATGGCTTCTCAGCTGAATCTGTTGGAGTGCATCCGTCACTCGTTGAACAGTCGCCAGACATTGCACAGGGAGTCAATGAAGCTCTTGAGGTACGTGGTTCTCTTGAACAAGATCCTTTAGATTTAATTGGTGCAGGTGACCAAGGTTTGATGTTTGGGTTTGCTGTTGATGAAACACCTGAGTTAATGCCATTGCCAATTTCTTTAGCTCATCAGTTAGTTAAGAAATTGACAGATCTACGTAAGTCTGGGGAACTCACTTATCTTCGACCAGATGCAAAATCTCAAGTAACGGTTGAATATGATGAAAATGATCAACCAATTCGTGTGGATGCAGTAGTTATTTCGACACAGCATGATCCTAATGTAACTAATGACCAACTCCATAAGGACGTGATTGAGAAAGTTATCAATGAAGTTATTCCAAGCCATTATTTAGATGACCAAACAAAATTCTTTATCAATCCTACAGGGCGCTTTGTTATTGGAGGCCCTCAAGGAGATTCAGGACTAACAGGTCGTAAGATTATTGTAGATAGTTATGGTGGTTATTCTCGTCATGGTGGTGGTGCATTTTCAGGTAAAGATGCTACTAAAGTAGATCGTTCAGCATCTTATGCAGCTCGTTATATTGCAAAAAATATTGTTGCAGCTGATTTAGCTAAAAAAGTAGAAGTACAACTTGCTTATGCAATTGGTGTTGCCCAGCCTGTCTCTGTGCGTGTAGATACATTTGGAACAGGTGTTATAGCAGAAGCAGACCTAGAGGCAGCTGTACGTCAAATATTTGATTTGCGACCAGCAGGCATTATTAATATGTTGGACCTCAAACGACCTATTTATCGACAAACAGCAGCCTATGGGCATATGGGACGTACTGATATCGATTTGCCATGGGAGCGAGTTGATAAAGTCCAGGCCTTAAAGGATTTTATTGCTAGCAAA

SEQ ID NO: 10462 - protein, 398 aa, Streptococcus agalactiae
MSERKLFTSESVSEGHPDKIADQISDAILDAILEQDPDAHVAAETAVYTGSVHVFGEISTTAYVDINRVVRNTIAEIGYDKAEYGFSAESVGVHPSLVEQSPDIAQGVNEALEVRGSLEQDPLDLIGAGDQGLMFGFAVDETPELMPLPISLAHQLVKKLTDLRKSGELTYLRPDAKSQVTVEYDENDQPIRVDAVVISTQHDPNVTNDQLHKDVIEKVINEVIPSHYLDDQTKFFINPTGRFVIGGPQGDSGLTGRKIIVDSYGGYSRHGGGAFSGKDATKVDRSASYAARYIAKNIVAADLAKKVEVQLAYAIGVAQPVSVRVDTFGTGVIAEADLEAAVRQIFDLRPAGIINMLDLKRPIYRQTAAYGHMGRTDIDLPWERVDKVQALKDFIASK

SEQ ID NO: 10463 - protein, 2259 aa, Streptococcus agalactiae
ATGAAAAAACAATTTTTAAAATCAGCAGCGATTCTATCGCTAGCAGTAACAGCAGTATCTACAAGTCAGCCGGTAGGGGCGATAGTGGGAAAAGATGAAACGAAATTAAGACAGCAACTTGGGTATATTGATTCAAAAAAATCTGGAAAGAAAATTGATGAGAGATGGGGTGAAAAAATTTATAACTATCTAAGTTATGAGCTCATTGAAGCAAACGAATGGATTAACCGAAGTGAGTTTCAGGAACCTGAGTATAGAACTATTTTATCAGAATTTAAAGATAAAATAGATAGTATTGAATACTACTTAATTAACTTAAGTAATATTGCTAAAGAAGATGCGCATCAAAGAAATATTCTTCAATCATTAGATAAATATGAAAAAAGTGGAATATATAATTTAGACCAAGGTGTTTATAATTATATATATCAAGAAATTAGTTCAGCGAAGCACAAGTTTTCGGATGGGGTAGATAAAATTTATCGTTTAGATAGTACTTTATTTCCTTTCTCTGTATGGTATGATAAACATTTAGATAATAATGATAACTACAAGGATAATAAAGATTTTAAAGAGTACATTGCTTTATTAAATGAAATTACACGAAAAGCAAGGTTAGGATATCAAATTGTAAATAACCATAAAGATGGGGAGCATAAAGATGAAGCAGAAATACTGGATATTTTAATCAGAGATATAACTTTTGTTTCAAAAGATGCTCCTGGATATAAATATATTCCAAATAAAAGAATTGCAGCGAAAATAATTGAAGATTTAGATGGAGTTATCAATGACTTTTTTAAGAATACAGGAAAAGATAAGCCTTCTCTTGAAAAGTTAAAGGACACAGAATTCCATAAAAAATATCTTAATTCAACTGAACCGTATAGTATTGAAACTAACTTACCTTCAAATTATAAAGAATTGAAGGAAAAGCAAATAAAAAAATTGGAATATGGATACAAAAAGTCTTCTAAAATTTATACGTCTGCTCATTATGCACTATATAGTGAAGAAATTGATGCTGCAAAAGAATTGCTTCAAAAAGTGAAGATTGCAAAAGATAATTATAATGAAATTAAGTCCATGAATCTAAGCCCTTCAATTTTTAATCAGTATTTACAACTTCTTCAAATAGTTATAAGTTCAGAGATAAATCTAAAAAAGGCACTCGATAACACTGTGGATTTACCCATAGAAAATAATTTTAATACATTGGACATTCAATATAATAAATTAGATACTGCTATTAAGTCACTTCGAAAATTTGTAACTAAGTATAAACAAGAAGTAAGAAAAGCTACTAAGAGTTATTCTAAAAAAGAATTAGTAAATGCAGAGTTAACAAAAGTAATTTCTAATGACAATATTTTATTAGACATGCAAGCAATTAGTTCCAATTATGGGTCTACTAAAAAGTTTGTTTATTCAGTCAAAAGATTACCTTACGTCCCGCAAGTAATTATGACAACAACGTCTAATGTACTTATGCCTCAAAAGCAAGTTGAAAAAGTGAAGCTACTCACCCCATTTACAATTTCTAATAAAGAAGTATTGAATCATGACTCACTAGTAGAAAATGATGCTCAAAAACAAAAAGTAGAACAGGAAAAAACTAAATCGCTAGCTCCTCAAAAAGGGGCTGTAAAAGAACAAACTGAGCAAAAAGTATCTGGAAATACTCAAGAGATAGAAAAGAAATCTGAAACTGTGGCAACTCCACAACAAAGTTCAGTTGCGCAAACTTCTGTCCAACAGCCGGCTCCGGTTCAATCAGTTGTTCAAGAATCCAAAGCTTCTCAAGAGGAGATTAATGCAGCACACGATGCTATTTCGGCGTATAAATCAACAGTCAATATTGCTAATACAGCCGGTGTAACAACTGCGGAAATGACCACGCTCATTAATACTCAAACTTCTAATCTTTCTGATGTTGAGAAAGCTTTAGGAAATAATAAGGTTAATAATGGTGCAGTCAATGTATTGAGAGAAGATACAGCTCGTCTTGAGAATATGATTTGGAATCGTGCTTACCAAGCTATTGAAGAATTCAACGTCGCTCGTAATACTTATAATAACCAAATCAAGACAGAAACAGTTCCAGTTGATAATGATATTGAAGCTATTTTAGCAGGTTCTCAAGCTAAAATTAGCCATTTGGACAATCGTATCGGAGCGCGCCACATGGATCAAGCTTTTGTAGCTAGTTTATTAGAAGTTACTGAGATGAGTAAATCAATCTCATCGCGTATAAAAGAG

SEQ ID NO: 10464 - protein, 753 aa, Streptococcus agalactiae
MKKQFLKSAAILSLAVTAVSTSQPVGAIVGKDETKLRQQLGYIDSKKSGKKIDERWGEKIYNYLSYELIEANEWINRSEFQEPEYRTILSEFKDKIDSIEYYLINLSNIAKEDAHQRNILQSLDKYEKSGIYNLDQGVYNYIYQEISSAKHKFSDGVDKIYRLDSTLFPFSVWYDKHLDNNDNYKDNKDFKEYIALLNEITRKARLGYQIVNNHKDGEHKDEAEILDILIRDITFVSKDAPGYKYIPNKRIAAKIIEDLDGVINDFFKNTGKDKPSLEKLKDTEFHKKYLNSTEPYSIETNLPSNYKELKEKQIKKLEYGYKKSSKIYTSAHYALYSEEIDAAKELLQKVKIAKDNYNEIKSMNLSPSIFNQYLQLLQIVISSEINLKKALDNTVDLPIENNFNTLDIQYNKLDTAIKSLRKFVTKYKQEVRKATKSYSKKELVNAELTKVISNDNILLDMQAISSNYGSTKKFVYSVKRLPYVPQVIMTTTSNVLMPQKQVEKVKLLTPFTISNKEVLNHDSLVENDAQKQKVEQEKTKSLAPQKGAVKEQTEQKVSGNTQEIEKKSETVATPQQSSVAQTSVQQPAPVQSVVQESKASQEEINAAHDAISAYKSTVNIANTAGVTTAEMTTLINTQTSNLSDVEKALGNNKVNNGAVNVLREDTARLENMIWNRAYQAIEEFNVARNTYNNQIKTETVPVDNDIEAILAGSQAKISHLDNRIGARHMDQAFVASLLEVTEMSKSISSRIKE

SEQ ID NO: 10465 - protein, 543 aa, Streptococcus agalactiae
ATGAAAAAAATAACAACTTTAATCTTAGCTAGTAGCTTATTACTAGTTGCAACGACATCGGTTAAAGCTGATGATAACTTTGAAATGCCAACGCGTTATGTTAAAATGAGTGAAAAATCAAAAGCATTTTATCAAAGACTACAAGAAAAACAACGTAAGGCACATACTACTGTGAAGACTTTTAATAATTCAGAAATAAGGCATCAACTACCTCTTAAACAAGAAAAGGCTAGAAATGATATCTACAATTTAGGCATTCTTATTTCTCAGGAGTCTAAAGGGTTCATCCAACGTATTGATAATGCCTATTCTTTGGAAAATGTCTCAGATATTGTTAATGAAGCTCAGGCTTTGTATAAACGTAACTATGATTTATTTGAAAAAATCAAATCTACACGTGATAAGGTTCAAGTCTTACTTGCATCGCATCAAGATAATACAGACTTAAAAAACTTTTATGCTGAGTTGGACGATATGTATGAACATGTTTATCTCAATGAAAGTAGAGTGGAGGCGATAAACAGAAATATCCAAAAATATAAT

SEQ ID NO: 10466 - protein, 181 aa, Streptococcus agalactiae; identical to SEQ ID NO: 1570

SEQ ID NO: 10467 - protein, 564 aa, Streptococcus agalactiae
ATGACTAATCATAAAACAAAAAAATTAACGGTTTTAGCAATTATGATTGCTTTAGATGTTTTTTTAACGCCCATTTTTAGAATAGAAGGCATGGCCTTTATGTCTAGTGTGGTTAATATTATCGCTGGAGTTATAATGGGACCAATCTATGCATTAGTTATGGCACTTGTAACGGCTTTTATTCGTATTTTAACTCAAGCAGGAGTAGCATCTGTTGCACCTTTAGCTATTCTAGGAGCTGGTCCAGGAGCTTTCTTAGCGGGTTGGTTTTATCGGTTTTATGCGAAAGACTGGATGTCTTGGGTGGGTGAGTTTATAGGAACAGGGATAATTGGAGCACTTTTATCAGCTCCAATTATGGTCTGGTTTTGGACTTGGACAGCGGATGGAAATCACGAAGTGTTAGCTAAAGCATCTGCAGCTCAATCCATTTTTCTTTTTATGCCAAGGTTTATAGGGGCGACTATAATTGGCGGTGTTATTGCTTTGTTGCTACTTCAGGGATTAAAGCGGGTTCCTGTATTTATGACAATACAAGCATTATTTAAAGGAGAAAAAGTAAAA

SEQ ID NO: 10468 - protein, 188 aa, Streptococcus agalactiae; identical to SEQ ID NO: 1572

SEQ ID NO: 10469 - protein, 552 aa, Streptococcus agalactiae
ATGAAATTGAGTTTAAAAGATGTATTATTGATTGCTCTATTAGCGGTTGTTCTGGGCGTTGTTTACTTTGGAGCAGGCTATATTTCAAATGCTTTTGTACCTTTTGTAGGCCCTATAGCGCATGAAGTTATTTATGGTATTTGGTTTGTGGCAGGTCCAATGGCTCTTTATATATTGAGGAAACCAGGAACCGCTATTGTAGCAGAATTGTTAGCTGCTTTGATAGAGGTTTTAATTGGATCAATTTATGGACCAAGTGTACTCGTTATTGGTACCCTTCAAGGTTTAGGGTCAGAATTAGGCTTTACACTATTTAGGTATCATAATTACAAGTTGCCAGCTTTTATATTGTCTGCTATTTTGACATCAATTTTTAGTTTTGCATGGAGTTTTTATGCCAATGGACTTAGTGCGTTTTCATTTTCATATAACATTCTGATGCTTATAGTAAGAACTGTTTCATCTATTATTTTCTTCTTATTAACAAAGAATATATGCGACCAATTGCATAGAAGTGGTGTACTGAATGCTTATGGGATTCATGAAAGGAAG

SEQ ID NO: 10470 - protein, 184 aa, Streptococcus agalactiae
MKLSLKDVLLIALLAVVLGVVYFGAGYISNAFVPFVGPIAHEVIYGIWFVAGPMALYILRKPGTAIVAELLAALIEVLIGSIYGPSVLVIGTLQGLGSELGFTLFRYHNYKLPAFILSAILTSIFSFAWSFYANGLSAFSFSYNILMLIVRTVSSIIFFLLTKNICDQLHRSGVLNAYGIHERK

SEQ ID NO: 10471 - protein, 1284 aa, Streptococcus agalactiae
ATGCTATCTGTTGAAAAATTAGCTTGCACCCATGGCGATAGTCATTATTTATTTGATGAAGTGACTTTTAGTCTTAACCCAGGAGAACGAATTTTAATCAGTGGCTATTCAGGGTGTGGTAAGAGTACATTGGCTCTTTTACTATCAGGGTTAAAAGAAAGTGGGAAAGGTCAAGTTTTATTAAACGGCTCATTAATAGAACCAAGCGATGTGGGGTTTCTTTTTCAAAATCCTGATTTGCAATTTTGTATGGATACTGTGGCGCATGAGTTGTATTTTATTTTAGAAAATTTACAAATAGAACCGGAGCAAATGCAAGATAGAAGTGAGTTTGTATTGGCACAAGTTGGTTTAAAAGGATTTCAGAATCGGTTGATTTATACTTTATCTCAAGGTGAAAAACAGCGATTAGCATTGGCGACCATTTTTTTAAAATCTCCTAAACTTATTATTTTAGATGAAGCTTTTGCGAATTTGGATCAAGAGAGTGCCAGTCAACTATTACAATTAGTTCTTAATTATCAAGCAAACAATCAATCAATGCTGATTGTAATCGATCATTTGATTACTTATTATCAAGATATAATGGATCACTATTTTTGGTTGGAAAAACGGTTGACAAGGGTCAATTTTGATTATATGCTCAATCGTTTGAATGTCTTCGAATTAGAAAAGAAAAGTCATAATACAGGTGACAAACTGTTATCAATTAAAGATTTCCAAGTTAAACTTTCAAAAAACAAATTCATCTCTTACCTTGATTTTGATTTAGCAAGTGGGGAGAGGTTGTGCTTAGATGGACCAAGTGGCGTGGGGAAGTCTAGTTTGTTTATGGGATTGTTAGGGCTTTATAGGACTAAAGGGAAAAAACAATTTACTCATAGAAAGCAAATTCCTATAAGCTTTTTATTTCAAAATCCCTTAGACCAATTTATTTTTTCAACAGTTTATGACGAAATTTTTCAGGTTTGCAAGGATAGTAACAAAGCGAGGGATATTTTGGAAACCATAAATCTTTGGGATAAGAAACAGTTTTCACCATTTCAACTAAGTCAAGGCCAACAGAGGCGATTAGCCATTGGCAGTATTTTAGCTAGTGATAGTAAACTTCTATTATTAGATGAACCAACTTATGGACAAGATGCCTATCACGCTAATATGATTACAACTCTTCTTTTGAGTTATTGTCACAAAAATCATTGTGGGGTTATTTTTACTAGCCATGATCCTCACTTAAAAGAGTGTTTTGCAACACGTTTCTTGGAGGTGTCATCTTGTTCAATT

SEQ ID NO: 10472 - protein, 428 aa, Streptococcus agalactiae
MLSVEKLACTHGDSHYLFDEVTFSLNPGERILISGYSGCGKSTLALLLSGLKESGKGQVLLNGSLIEPSDVGFLFQNPDLQFCMDTVAHELYFILENLQIEPEQMQDRSEFVLAQVGLKGFQNRLIYTLSQGEKQRLALATIFLKSPKLIILDEAFANLDQESASQLLQLVLNYQANNQSMLIVIDHLITYYQDIMDHYFWLEKRLTRVNFDYMLNRLNVFELEKKSHNTGDKLLSIKDFQVKLSKNKFISYLDFDLASGERLCLDGPSGVGKSSLFMGLLGLYRTKGKKQFTHRKQIPISFLFQNPLDQFIFSTVYDEIFQVCKDSNKARDILETINLWDKKQFSPFQLSQGQQRRLAIGSILASDSKLLLLDEPTYGQDAYHANMITTLLLSYCHKNHCGVIFTSHDPHLKECFATRFLEVSSCSI

SEQ ID NO: 10473 - protein, 664 aa, Streptococcus agalactiae
TTGTTCAATTTGAAAAACTATCATCCAGCTATTACCTTCCTATGTTTATTAATACCAACCTTTTCGTTTAGTTTCACATTGAGGTTAAGAACGTCTTTGTTATTTCTAATTATAGTAGTAACACTGCAATGCTTCGTAAAGGTTTCTTTAAAAACTTGGGCGAAGGTCAATCTGATATCATTTGTGATGGGACTCTCTTTATTTCTAGGGACGTATTTTTGGGGAAAATTACCCCATCAATTCGTCTTAGCTAGTCTAGTGGCCTGTCGTCCGCTTATTTTTATGAACGTGGGTTTGTTATTTCATGCATCACATTCTAATTATGATTTTATAGAATCTCTTTATCAAACTTTCAAAGTGCCTAGTCATTTTGCATATGGTATTTTTGCGGTCTTTAATCTTCTACCATTAATTAAATTACAATACCAACGTAATCGACTCGCATTCCGACTGAAGAATCAGGTAACTTGGGCATTATCGCCTAGACTAATATTGTCAGTTTTATTAAAGACGATATATTGGGTAGAACAGTTAGAGTTAGCAATGCTTTCTAAAGGTTTGAAGTGGTAAAGAGCGAACACATGCTTCAACTTATCCCGTTCGTTTTCGAGATTATAGTTTACTTGGTATGAGTATTTTATTGTCTATAGGAATGATTTTTAAA

SEQ ID NO: 10474 - protein, 222 aa, Streptococcus agalactiae; identical to SEQ ID NO: 1582

SEQ ID NO: 10475 - protein, 678 aa, Streptococcus agalactiae
ATGTTAAAAGATAAGATGATTGCTAAAGGAGCAAAATATATCCAATCCATCTATCAAGATCCATTTATTCAAGGAATTATAAAAGGGCGTTTAGACCATGACGTAATCTGCCATTATTTACAGGCAGATAATATCTACCTTGGGAAATTTGCTGATATTTATGCCCTGTGCTTGGCAAAATCTGATAATTTACGAGATAAACAATTTTTCCTTGAACAAATTGACTTTACATTAAATCGGGAGTTAGCAGATGGTGAAGGCCCACATCAAGCCTTGGCCGCTTATACTAATCGATCTTATCAGGATATTATCGAAAAGGGTGTATGGTACCCGTCAGCAGATCATTACATTAAACATATGTATTTTCATTTTTACGAAAATGGTATTGCTGGTGCTTTAGCTGCAATGAGCCCATGTCCATGGATTTACCATCAATTGGCTAAAAAAATAATTGAGGAGAACCAGTTTTTGAATGGTAACCCTTTTAATAATTGGATAACTTTTTATGCTAACGATACAGTTGAAGAGTTAATGGAAAACTATTTTCGTATGATGGATTATTATGCGCAGAATTTGTCAAAAGAGAAGCAAGCTGATTTGGTAGATGCTTTTGTGAAATCTTGTCAGCATGAGAGACGTTTTTTTCAAATGGCAATAAATCAAGAAAAATGGGAGGAT

SEQ ID NO: 10476 - protein, 226 aa, Streptococcus agalactiae; identical to SEQ ID NO: 1584

SEQ ID NO: 10477 - protein, 793 aa, Streptococcus agalactiae
ATGACTTATTTAGCACCAGTTTTAACTATTGCAGGAACTGATCCTAGCGGTGGAGCAGGGATTATGGCGGATTTAAAGACATTTCAAGCTCGTCGGACTTACGGGATGGCTGTTGTGACTAGTGTTGTTGCTCAGAACACTTGTGGGGTTAGAGGCGTTCAGCATATAGAAACAGCTATCATTGATCAACAACTAGCTTGTGTCTATGATGATATTAAGCCAAAGGCGGTTAAAACAGGAATGTTAGCGGAGAGGGAAACAATTAGTTTAGTCGCTTCATATTTAAAAAAATATCCGCAACCTTATGTATTAGATCCTGTTATGGTGGCAACTAGCGGACATCGTTTAATTGATTCAGATGCCGTAGAAGCATTAAAAGAAGACTTATTGCCATTAGCAACTATTATCACACCAAATTTACCAGAAGCTGAGGTTTTAGTGGGATATGACTTATCAGATGAAGTAAGTATTATTAAAGCAGGTTACGATATTCAAAAACAATATTCTGTTAGAAATGTTCTTATAAAGGGAGGACATCTAGATGGCTTGGCTAAAGATTATTTATTTTTGGAAAAAGAAGGGTTGATAACTCTTAGTAATCAACGTATCAATACTATTCATACTCATGGGACTGGGTGTACATTTGCAGCAGTCGTTGCAGCGGATAGCTAAAGGGCAATCAATTCTAAACGCGGTAAGTACCGCTAAATCATTTATTACTTCAGCTATCGAAACAGCGCCTGAGTTGGGCCTTGGAAACGGTCCTGTCAATCATACTAGCTATCAAGGAGAC

SEQ ID NO: 10478 - protein, 265 aa, Streptococcus agalactiae
  VARIANT 223: Xaa = Any Amino Acid
MTYLAPVLTIAGTDPSGGAGIMADLKTFQARRTYGMAVVTSVVAQNTCGVRGVQHIETAIIDQQLACVYDDIKPKAVKTGMLAERETISLVASYLKKYPQPYVLDPVMVATSGHRLIDSDAVEALKEDLLPLATIITPNLPEAEVLVGYDLSDEVSIIKAGYDIQKQYSVRNVLIKGGHLDGLAKDYLFLEKEGLITLSNQRINTIHTHGTGCTFAAVVAAEXAKGQSILNAVSTAKSFITSAIETAPELGLGNGPVNHTSYQGD

SEQ ID NO: 10479 - protein, 768 aa, Streptococcus agalactiae
ATGTATTTAGAACAATTAAAAGAGGTAAATCCTTTAACCATTTGTATCACTAATAATGTGGTCAAAAACTTTACAGCCAATGGTTTATTAGCTTTAGGAGCTTCTCCGGCTATGAGCGAGTGCATAGAGGACTTAGAAGACTTGTTAAAAGTTGCAGATGCATTATTAATTAATATAGGAACACTAACAAAAGAAAGTTGGCAACTTTACCAAGAAGCAATCAAAATAGCAAATAAAAACCAAGTTCCAGTTGTATTAGATCCTGTAGCGGCAGGAGCAAGTCGTTTTCGATTAGAAGTGTCACTTGATTTATTGAAGAATTATTCTATTAGTTTACTTAGAGGAAATGGTAGTGAAATCGCTGCTTTGATTGGTGAAAAACAAGCGTCTAAAGGGGCAGATGGCGGAAAAGTGGCTGATTTAGAATCAATTGCTGTAAAAGCCAATCAAGTTTTTGATGTGCCAGTGGTTGTCACAGGAGAAACTGATGCTATCGCTGTTAGAGGAGAAGTTCGCTTATTACAAAATGGTAGTCCTTTAATGCCACTTGTTACAGGAACTGGATGTCTATTAGGGGCAGTATTGGCTGCTTTTATTGGTAGTTCTGACAGAAGCGATGATCTTGCTTGTCTGACAGAGGCCATGACTGTTTATAATGTTGCTGGAGAAATTGCAGAGAAGGTGGCAAAAGGTAAGGGGGTGGGAAGTTTCCAAGTTGCATTTTTAGATGCCCTTTCCCAGATGAAATCAGAAATGATTATGGACAAA

SEQ ID NO: 10480 - protein, 256 aa, Streptococcus agalactiae; identical to SEQ ID NO: 1588

SEQ ID NO: 10481 - protein, 669 aa, Streptococcus agalactiae
ATGAAAGATACATTGAAATTATATTTTGTTTGTGGAACTGTGGATTGCTCTAGGAAGAATATATTGACTGTTGTTGAAGAAGCCTTACAAGCAGGTATAACTCTATTTCAATTTAGAGAAAAAGGTTTTACAGCATTACAAGGTAAGGAAAAAATTGCTATGGCTAAGCAACTCCAAATACTTTGTAAGCAATATCAAGTTCCTTTTATTATTGATGATGACATTGACTTAGTTGAGTTAATTGATGCTGATGGTCTTCATATTGGACAAAATGATTTACCTGTTGATGAGGCACGGAGACGTTTACCAGATAAAATCATCGGTTTATCTGTGAGTACAATGGATGAATATCAGAAATCACAATTATCTGTTGTTGATTACATCGGAATTGGTCCTTTTAATCCGACACAATCAAAAGCAGATGCTAAGCCTGCTGTTGGCAATAGGACAACAAAGGCAGTTAGAGAAATTAATCAAGATATTCCAATCGTTGCAATAGGCGGAATCACTAGTGATTTTGTTCATGATATTATAGAATCAGGTGCAGATGGGATTGCTGTTATATCGGCTATTTCAAAAGCAAATCATATTGTAGATGCAACCAGACAATTGCGTTATGAAGTTGAAAAAGCTCTGGTTAATAGGCAAAAACACAGTGATGTAATCAAA

SEQ ID NO: 10482 - protein, 223 aa, Streptococcus agalactiae; identical to SEQ ID NO: 1598

SEQ ID NO: 10483 - protein, 1255 aa, Streptococcus agalactiae
ATGCGTAAAATTATTATTAACGGTGCAAGCAACTGACGGGAGAAGTTGCTGTATCGGGTGCCAAAAATAGTGTAGTGCCTTGATTCCTGCCACTATTCTTGCTGATGATGTTGTGGTCTTAGATGGAGTTCCGGCTATTTCTGATGTTGACAGTTTAGTTGACATTATGGAAACTATGGGAGCTAAGATTAAGCGTTATGGTGAGACGCTTGAAATTGATCCATGTGGCGTTAAAGATATTCCAATGCCTTATGGCAAAATCAATAGTCTTCGTGCATCCTATTATTTCTATGGAAGCTTATTGGGGCGTTATGGTCAAGCAACATTAGGTTTACCTGGTGGTTGTGATTTAGGCCCCCGTCCGATTGATTTACATTTAAAAGCTTTTGAAGCGATGGGAGCTAGTGTTTCTTATGAAGGTGATTCAATGCGTCTAGCAACAAACGGAAAGCCTTTGCAAGGAGCAAATATTTATATGGATACTGTCAGTGTTGGTGCGACAATTAACACTATAATCGCAGCAGCTAAGGCAAATGGCCGTACGGTTATTGAAAATGCTGCACGTGAACCAGAAATTATTGACGTGGCTACTCTTTTAAATAATATGGGAGCTCATATTCGTGGTGCTGGGACTGATGTTATTACAATTGAAGGTGTGAAATCGCTCCATGGCACGCGTCATCAAGTAATTCCAGATCGTATTGAAGCAGGAACTTATATTGCTATGGCAGCAGCTATCGGACGAGGAATAAAAGTGACCAATGTGTTATATGAACACCTTGAGAGTTTCATTGCTAAGTTAGATGAGATGGGAGTTCGAATGACAGTTGAAGAGGATTCAATTTTTGTCGAAGAACAAGAAAGGTTAAAAGCTGTATCCATAAAAACCTCACCTTACCCAGGATTTGCTACAGATTTACAACAACCTCTAACTCCTTTATTACTAACAGCAGAAGGAAACGGGAGTTTATTAGATACTATCTATGAGAAACGTGTTAATCATGTTCCCGAATTAGCACGTATGGGAGCTAATATTTCTACCCTAGGGGGCAAAATAGTTTATAGTGGTCCTAATCAATTATCTGGTGCACCTGTAAAAGCGACAGATTTGCGTGCAGGCGCTGCTTTAGTTATCGCTGGCTTAATGGCAGAGGGACGAACTGAAATTACGAATATCGAGTTTATTTTACGTGGATATTCTAATATCATCGAGAAACTAACATCATTGGGTGCGGATATCCAATTGGTTGAGGAA

SEQ ID NO: 10484 - protein, 419 aa, Streptococcus agalactiae
  VARIANT 9: Xaa = Any Amino Acid
MRKIIINGXKQLTGEVAVSGAKNSVVALIPATILADDVVVLDGVPAISDVDSLVDIMETMGAKIKRYGETLEIDPCGVKDIPMPYGKINSLRASYYFYGSLLGRYGQATLGLPGGCDLGPRPIDLHLKAFEAMGASVSYEGDSMRLATNGKPLQGANIYMDTVSVGATINTIIAAAKANGRTVIENAAREPEIIDVATLLNNMGAHIRGAGTDVITIEGVKSLHGTRHQVIPDRIEAGTYIAMAAAIGRGIKVTNVLYEHLESFIAKLDEMGVRMTVEEDSIFVEEQERLKAVSIKTSPYPGFATDLQQPLTPLLLTAEGNGSLLDTIYEKRVNHVPELARMGANISTLGGKIVYSGPNQLSGAPVKATDLRAGAALVIAGLMAEGRTEITNIEFILRGYSNIIEKLTSLGADIQLVEE

SEQ ID NO: 10485 - protein, 569 aa, Streptococcus agalactiae
TTGTGGTATAATATTATCATGGATATATGGACAAATTTAGGACGGTTTGCATTCATTGAAACAGAACATGTTAACCTACGTCCTGTTGCCTACACTGATAGGGAAGCTTTTTGGCGAATAGCTTCAAAAAGGACAAATTTACAATTTATTTTTCCTGTTCAAACCAGTAAGAAGGAAAGTGATTTTCTTTTAGTTCATTCTTTTATGAAAGAGCCTTGGGAGTTTGGGCGATTGAAGATAAAGTTAGTCATAAAATGTTTGGAGTTATCCGTTTTGAAAACATTGATTTATCTAAAAAGACAGCTGAAATTGGCTATTTTTTGAAAGAAAGTTCTTGGGGTCAAGGCATTATGACTGAATGTCTAAAGACACTTTCTTTTTTTGCTTTTCGAGAGTTTGGGATGGACAAATTGATCATAGTAACACATAAAGAGAATATTGCTAGTCAGAAGGTTGCTTTGAAGGCGCATTTCAAACAATCTAGGAGTTTTAAAGGAAGCGACCGTTACACACGCCGTATAAGAGACTATATTGAGTTTCAATTAACTAGGGGTGATTATCGTTATGAG

SEQ ID NO: 10486 - protein, 190 aa, Streptococcus agalactiae; identical to SEQ ID NO: 1602

SEQ ID NO: 10487 - protein, 1281 aa, Streptococcus agalactiae
ATGAGTAAACATCAAGAAATTTTGGAGTACCTAGAAAATTTAGCTGTTGGTAAGAGGGTTAGTGTACGCAGTATTTCAAATCATTTAAAGGTGAGTGATGGCACTGCATACCGCGCTATAAAAGAGGCAGAAAATAGGGGTATTGTTGAGACTAGACCGCGTAGTGGGACAGTACGTGTTGCTCAAAAAGCAAAGGTTAATATTGAAAAACTGACTTATGCTGAAATTGCAAGGATTAGTGACTCACAAGTTGTTGCAGGAATAGAGGGACTCAGCAAGGAGTTTAGTAAATTTTCTATAGGTGCAATGACTCACAGAAATATTGAAAAATATTTGGTGCAAGGAGGGTTATTGATTGTTGGCGACCGTGATGAGATACAACATTTAGCCTTACAACATCAAAACGCTATCTTAGTTACAGGTGGCTTTAATGTTTCCCCATCTGTTTGTCGTTTAGCAGATAAACTTCAAATTCCCGTAATGGTAACACACTATGATACATTCACAGTATCAACGATGATTAATCACACTTTGTCAAATGCCAAAATTCGTACTGATTTAAAGACCGTTGAACAAGTCTATCAGTCGCAAATGGATTACGGTTTCTTAGCGCAGGATGATACCGTAAAAGAATTTAATCTTCTTGTTAAACAAACTAAAAATGTTCGTTTTCCAATAGTCAACCAAGCTAATGTTGTCGTTGGTGTTGTTAGTGTTCAAGATATTCTTGGAAAAGATAAAGAAGTAAAATTGGCAACAGTCATGTCAAAAAATATCATTGTTGCTAAACCTCGAATGAGTCTAGCTAATATCAGTCAAAAAATGATTTTTGAAGATTTGAATATGATGCCAGTAGTATCGGATGACTTTGAATTATTAGGCGTTATTACAAGACGACAAGCTGTAGAAAATTTATCGATGTCGCAAGGGACGGATTTATACACCTATAGTGATCAAATCTTGTCTAATTTACAAATTGAAGATGGTCACTTTTCGTTTTTAGTAGAACCCGCTATGATTGACCATACAGGTAGCTTAACACAAGGAGTTTTGACGGAGTTCTTAAAAGAAATTTGTATTCGTGTCTTAACTCGTAAGCATCAACGCAGTATTGTTGTTAAACAAATGACACTTTATTTCTTGCAACCTGTTCAAATTGATGAAATAATAATGGTAACGCCAACAATTATTTCAGAAAAACGGCGCGAAGCTACACTCGATTTAGAATTAAAATTAGAAAATAAAATTATTGCTAAAGCTATGATAGCGGTAAAAATTAAT

SEQ ID NO: 10488 - protein, 427 aa, Streptococcus agalactiae; identical to SEQ ID NO: 1604

SEQ ID NO: 10489 - protein, 750 aa, Streptococcus agalactiae
ATGTGGGAAGTTGAAGAATACGTTCGTAGACGTTGTAAAGAAGAAAACGTATTGCCATTGCAAATCGGGGTTGATGGTGCAGTTATGGATTACCCATATGCTACTTGTTGTGGGCTTAATGATGAAGTGGCTCATGCCTTTCCTCGTCATTATACCCTAAAACAAGGTGACCTTTTAAAAGTAGATATGGTTTTAAGCGAACCTTTAGATAAATCAATTGTTGACGTTTCATCGTTAAACTTTGACAACGTGGCTCAAATGAAAAAGTACACGGAAACATATAGTGGTGGTTTGGCAGACTCGTGTTGGGCTTATGCTGTAGGTGAAGTTTCACAAGAGGTGAAAGACTTAATGTCTGTGACAAGAGAAGCAATGTATATTGGGATTGAAAAAGCAGTTATCGGAAACCGCATTGGTGATATTGGAGCTGCTATTCAGGATTATGCAGAGAGTCGTGGTTATGGAGTTGTTCGTGATTTGGTTGGTCACGGTGTTGGTCCAACAATGCATGAAGAGCCTATGGTGCCTAACTATGGTACAGCAGGTCGAGGTCTCCGTCTTCGTGAGGGGATGGTTTTAACCATCGAACCAATGATTAATACTGGTACTTGGGAAATTGATACAGACATGAAAACTGGTTGGGCACATAAAACCTTAGATGGTGGTCTTTCTTGTCAATATGAACATCAATTTGTTATCACTAAAGATGGTCCTGTTATTTTAACGAGTCAAGGAGAAGAAAGAACTTAC

SEQ ID NO: 10490 - protein, 250 aa, Streptococcus agalactiae; identical to SEQ ID NO: 1606

SEQ ID NO: 10491 - protein, 918 aa, Streptococcus agalactiae
ATGAAATTAAAAAAATTCTTTGAGGATTTGCTGGCTAAACTAGAATATAGACCCATTCAAGTTTTTATGCGTCATTTTCAAAGTGCAGAGATGGACTTATCAGCCATAGCAGTTGCTTATTATCTATTAGTGACAGCTTTTCCATTACTAGTTATTGCTGCTAATATTTTTCCTTATTTTCATATTAATGTGTCGGATTTATTGTCATTTATGCAAAAAAATCTTCCGAAAAATATTTATGAACCTGCCTCACGCTTAGCAGTAGATGCTTTTTCGAAACCGTCTACCGGCATTTTGGGATTCGCGTCATTAACAGCTTTTTGGACAATGTCTAAAAGTTTGACCTCTCTTCAAAAAGCCATTAATAAAGCATACGGTGTTGACCAACACAGAGACTTTGTGATTAGTCGTTTAGTGGGTGTGGGGACTGGGCTGATCATCCTATTTTTACTGACTTTTGTTTTAATTTTTTCAACCTTTTCAAAACCAGTTTTACAGATAATTGTAAACATGTATGATTTGGGAGATACTCTAACGGCGTGGCTTTTAAATCTTGCACAACCAGTTACATTTTTGACTATATTTTTAGGTATTGGAATTTTATACTTTATTTTACCTAACGCACGAATTAGAAAAGTACGTTATGTCATTCCAGGGACATTATTTTCAACGTTTGTTATTGGTTTTTTTAGTAATTTAATTAGCCAATACGTCTTAAATAGGGTTGAGAAAATGGTAGATATTAAAACGTTTGGTTCGGTCGTTATCTTTATCTTAATGCTATGGTTTATTTTCTTAGCCCACATTATGATTTTAGGTGCAATACTGAATGCCAGCGTTCAAGAAATTGCGACAGGAAAAATTGAATCAAGGCGTGGAGATATTATGTCTCTTATCCAAAAATCCAAAGAAGAAAAA

SEQ ID NO: 10492 - protein, 306 aa, Streptococcus agalactiae
MKLKKFFEDLLAKLEYRPIQVFMRHFQSAEMDLSAIAVAYYLLVTAFPLLVIAANIFPYFHINVSDLLSFMQKNLPKNIYEPASRLAVDAFSKPSTGILGFASLTAFWTMSKSLTSLQKAINKAYGVDQHRDFVISRLVGVGTGLIILFLLTFVLIFSTFSKPVLQIIVNMYDLGDTLTAWLLNLAQPVTFLTIFLGIGILYFILPNARIRKVRYVIPGTLFSTFVIGFFSNLISQYVLNRVEKMVDIKTFGSVVIFILMLWFIFLAHIMILGAILNASVQEIATGKIESRRGDIMSLIQKSKEEK

SEQ ID NO: 10493 - protein, 453 aa, Streptococcus agalactiae
ATGGTTAAATTAAAATCGTTACTGAAAAAAAGTATTCAAAATGAAGTCAGCTTATATTTACTGTTCGGACTATTAACATCCCTTCTTTATTTAGTTATTCGACAAGGGATTTTTAATTTCTCGCAGGACGCTCCATTCTCTGCAATAGTTGCTAACATAATAGCTATACTTTTTGCTTTTTTTACAAATGATCGATTTGTTTTTAAACAAACTAAAATTGGACAGCTTCAACGCTTACAAACATTTGTCATCGCTAGATTAGGCACATTAGGATTAGATTTGATATTAGCTGTTATTTTTGTTGATCAATTTCCTTCTATTATCGGACAATTCGTTCAGCACAATTTAAATAAAATCAACACCATTGAAAGCCTTGTATCTCAAATATTAATTATTTTACTCAACTACATCTTGAGCAAATTTGTTATTTTTAAAGACAAAAAAAGACAACTC

SEQ ID NO: 10494 - protein, 151 aa, Streptococcus agalactiae; identical to SEQ ID NO: 1610

SEQ ID NO: 10495 - protein, 507 aa, Streptococcus agalactiae
ATGAACACATTTACAACTCGCGATTACGCTCACATGGCTATTGTAACAGCTATCTATATCGTTTTAACCATAACGCCACCTTTTAATGCTATTGCTTATGGTGCTTATCAATTCCGTGTTTCAGAAATGCTAAATTTCTTGGCCTTTTACCACCGAAAATACCTTTTTGCGGTAACGTTAGGATGTATGATTTCTAATCTTTATAGTTTTGGAATGATTGATGTCTTTGTAGGTGGTGGTTCAACCTTACTTTTTGTTTATCTTGGAACCATTTTATTCAAGCAATATCAAAAAGATTATCTATTTAATGGCCTTATTAACAAAGCATTCTTTTTCTTTTCTTTCTTCTTTGCTGCTTCAATGATTACGGTAGCAGTTGAATTGAAAATTGTAGCAGGATTACCTTTATTATTAACATGGTTAACGACAGCTGTTGGTGAATTGGCTTCACTTTTGGTTGGAGCAGTCCTTGTGGATAAGTTGAGTAGACACGTCGATTTTACAAAA

SEQ ID NO: 10496 - protein, 169 aa, Streptococcus agalactiae; identical to SEQ ID NO: 1612

SEQ ID NO: 10497 - protein, 1944 aa, Streptococcus agalactiae
ATGAATGAATTAGTATCTTTGTTGAATCAGTACGCAAAAGAGTATTATACACAAGATAATCCCACAGTTTCTGACAGTCAATATGACCAGTTATATCGAGAGTTAGTAGAATTAGAAAAGCAACATCCAGAAAACATTTTGCCAAATAGTCCCACACATCGAGTGGGTGGTTTAGTTTTAGAAGGCTTTGAAAAATACCAACATGAATATCCTTTGTATTCATTGCAGGATGCTTTCTCAAAAGAAGAATTGATAGCCTTTGATAAACGTGTTAAAGCAGAGTTTCCAACTGCTGCTTATATGGCAGAGCTGAAAATTGATGGTCTATCTGTCTCGTTGACTTATGTAAATGGTGTTTTACAGGTTGGGGCAACACGTGGTGATGGCAATATTGGAGAAAATATTACTGAAAATTTAAAGCGTGTTCATGATATTCCTCTACATTTAGACCAAAGTTTAGATATTACTGTTCGCGGAGAGTGCTACCTTCCCAAAGAATCTTTTGAAGCTATTAACATAGAAAAACGAGCAAATGGTGAGCAGGAATTTGCTAATCCTAGGAATGCAGCAGCAGGAACCTTGCGCCAATTAAACACAGGAATTGTTGCGAAACGTAAATTAGCAACTTTTCTTTATCAAGAAGCTAGCCCTACGCAAAAAGAAACACAAGATGATGTTTTAAAAGAGCTAGAAAGCTATGGCTTTTCAGTCAATCATCATCGTTTAATTAGCTCGTCTATGGAGAAAATTTGGGATTTTATCCAAACTATAGAAAAAGATAGAGTTTCCCTCCCTTATGATATCGATGGTATTGTTATTAAGGTTAATAGCTTAGCAATGCAAGAAGAGCTGGGCTTCACTGTAAAGGCACCTCGTTGGGCGATTGCATATAAATTTCCTGCTGAAGAAAAGGAAGCAGAAATATTATCTGTTGATTGGACAGTTGGGCGAACAGGAGTCGTAACACCAACAGCTAACCTAACTCCAGTTCAACTAGCAGGGACAACCGTTAGTAGGGCCACTCTGCATAATGTAGATTATATTGCCGAAAAAGATATCCGTATTGGAGATACTGTTGTTGTATACAAAGCAGGGGATATCATCCCTGCAGTCTTAAATGTCGTTATGAGTAAGCGAAACCAGCAAGAAGTCATGCTTATTCCTAAACTATGTCCTTCTTGTGGTAGTGAATTAGTTCATTTTGAAGGTGAGGTGGCTTTACGTTGTATTAATCCGCTGTGCCCCAACCAAATCAAAGAACGTTTAGCTCATTTTGCTAGCCGAGATGCTATGAATATTACAGGTTTTGGTCCATCCTTAGTCGAAAAATTATTTGATGCTCATTTAATAGCAGATGTTGCAGATATTTATCGTTTAAGTATAGAGAATTTATTAACTTTAGATGGTATTAAAGAGAAATCTGCAACTAAGATTTATCATGCAATCCAATCTTCAAAAGAAAATTCTGCTGAAAAACTTCTTTTTGGCCTAGGTATTCGTCATGTGGGAAGCAAGGCGAGCCGCCTTTTATTGGAGGAATTTGGTAATTTGAGGCAACTAAGTCAAGCAAGTCAAGAAAGTATTGCCTCAATTGATGGACTAGGAGGGGTTATTGCCAAATCACTTCATACCTTCTTTGAAAAAGAAGAGGTAGATAAACTACTAGAGGAATTAACTTCCTATAACGTTAATTTTAATTATCTAGGAAAACGAGTTAGTACAGATGCACAACTTTCAGGTTTAACAGTCGTTTTAACCGGTAAGCTTGAAAAAATGACTCGTAATGAAGCAAAAGAGAAATTACAAAACCTTGGTGCTAAGGTGACAGGTAGCGTTTCTAAAAAGACTGATTTAATTGTTGCAGGAAGCGATGCAGGAAGTAAACTAACCAAGGCTCAAGATTTAGGGATTACAATACAAGATGAAGACTGGTTACTCAACCTT

SEQ ID NO: 10498 - protein, 648 aa, Streptococcus agalactiae; identical to SEQ ID NO: 1614

SEQ ID NO: 10499 - protein, 1017 aa, Streptococcus agalactiae
ATGAAGAAACAAAAAAAAGCGCGTTTAATTTATAACCCAACTTCTGGTCAAGAAATTATGAAAAAAAATGTAGCGGAAGTTCTTGATATACTTGAAGGATTTGGGTATGAAACATCAGCCTTTCAAACAACACCAACTAAAAATTCTGCCAGAGATGAAGCTACTAGAGCTGCTCAAGCTGGTTTTGATTTGATTGTTGCAGCAGGTGGAGATGGTACTATTAATGAAGTTGTTAATGGTATTGCACCTTTGAAACGTCGTCCTAAGATGGCAATTATTCCAACTGGAACAACTAATGATTTTGCTCGTGCCTTAAAAATACCGCGAGGTAATCCTATTGAAGCAACTAAATTAATTGGTAAAAATCAAATCGTTAAGATGGACATTGGTCAAGCTCAAGAGGACAATTATTTTATTAATATTGCAGCTGCAGGTAGTTTGACAGAGTTAACTTATAGTGTACCAAGTCAATTGAAAACAACGTTTGGCTATCTTGCTTATCTAGCAAAGGGTGTTGAATTATTACCTCGAGTTCGAAAAGTACCAGTCAAAATTACTCACGATAAGGGTGAATTTATCGGTGATGCTTCAATGATTTTTGTTGCCATCACAAATTCTGTAGGAGGGTTTGAACAAATTGCACCTGATGCCAAATTGGATGATGGGAAATTTACCCTTATTTTAGTAAAAACTGCAAATCTTATTGAGATTATGCATCTCATTCGTTTGGTGCTAGCAGGTGGAAAACATATTAATGATAAACGAGTAGAGTATATTAAAACGTCTTATCTAACTATCGAACCCCTATCAGACGAGCGTATGATGATTAACTTAGATGGAGAATATGGAGGAGATGCTCCCATTACTCTAGCAAACCTTAAAAATCATATTAGGTTCTTTGCTAATACTGATGAAATTTCAGATGATGCTTTAGTTTTAGATAAAGATGAACTAGCGATAGAAGCTATTGCACAGAAGTTTGCTAATGAGGTAGATGATTTAGAAGGATTAGGAGAT

SEQ ID NO: 10500 - protein, 339 aa, Streptococcus agalactiae; identical to SEQ ID NO: 1616

SEQ ID NO: 10501 - protein, 2298 aa, Streptococcus agalactiae
ATGGATAATACTGTCATTGTACATTACCATAGCCGAAAGAAAAATTACTTTAATTTAAGTTTATGGCAGTGGCGCGATGGCTCAGAGGGTCAAGATGCTCATTTTTCACGGTTTGACAGTTTCGGTGCTGTTGCGATACTAAAATATCCCTTGCCATATTTTTTAAGCCATTATTATGTGATTGTTAAGGATAAAAATTGGCATCATAAAACAATAGATTATCGCATTGATTGTACTCAAGGTGGTGCACGTAAAGAAGTTTGGATTGTAGATGGGGATGACAATCTGTATTATTCTCGTCAAGCAGCAGTTAGTAGCCATCATTATAGTAGACGCCAACCTCATGCCTACGACATGGCAATCAATAGTAGAGCGTTTGACAAAAAATGGGGATTTGATGGTTGGTTAGGTTTTGAATATTCAGAAACTAAAACGGCTTTTAGATTATGGGCCCCTACTGCGGAACGTGTAGAACTGATTTTATATCATTCGACAGATGAAACAGCAAGTGTATCAAAAGTTCTTTCTATGAAAAGAGGGACAGCCGTCAATTATAAAAATCATAAAGAAAATACCCATGGAGTCTGGTTTACTGAACTTGAAGGAAACTATAATTACCAAGCATATACTTATCGAGTCTACTATAGACGACGTACCTTTAAAATTACGAGAGACCCTTATTCCATTGCAACGACTGCAAATGGTAAAAGGTCTATTGTTATTGCTCCAGAAGCATTAACTCCGGAAGGGTTTAAAATAAGTCATGGAAAAGAAGCTAAGTGGCGGCTCGAAAACCCCAATCAAGCAGTCATTTACGAAATGCATGTGCGTGATTTTTCGATATCTGAGACTTCAGGAGTTAAGACAGATTATCACGGAAAATTTAAGGGATTGCATCAAAAAGGTACGGTTAATCAGCATGGTGATAAAACGACCTTTGATTATGTACAAGACCTAGGAGTTAACTATATCCAACTTCAACCAATTTTCGATCATCATCAGACATTTGATGATGATGGTCACTATGCTTATAATTGGGGATATGATCCTGAAAACTACAATGTTCCAGAAGCAAGCTTCTCTAGTAATCCACATGAACCTGCAACGCGTATTTTAGAATTAAAATCTGCTATCCAAGCGTACCATGATGCAGGCATTGGTGTTATTATGGATGTTGTCTATAATCATACTTTTTCATCAACTGATTCTGCATTTCAACTAACGGTTCCAGATTATTATTATCGAATGAATCACAATGGAACATTTCAAAATGGGTCAGGCTGTGGTAATGAAACAGCTAGTGAAAAAGAAATGTGTCGTAAGTATATTCTTGATTCAGTTTTGTATTGGGTGAAAGAATATAATATTGATGGTTTTCGATTTGATTTGATGGGACTACATGATGTAGAAACGATGAACATTATAAGAAATGAGCTAAATAAAATCGACCCTCGTATTTTGGTTTATGGAGAAGGATGGGACATGGGAGCTGGTCTCACGCCTCAAAATAAAGCTAAAAAAGATAATGCTTATCAGATGCCTGGAATTGGCTTTTTCAATGATGATGTAAGAGACGCTGTCAAAGGTGCGGAAATTTACGGAGAATTTAAAAAAGGCTTAGTTTCTGGAAACAGTACAGAAGATATTGTTGCAAAAGGCATTTTAGGAAGTGATGAGTTAGTATCATACATTGATCCTAGTCAAGTTTTAAATTATGTTGAAGCACATGACAACTACAACTTAAATGATTTGCTATGGGAATTACATCCTAATGACAACGAGAAACAACATATTTACCGAGTTGAAGTAGCTAGTGCTATGAATCTATTGATGCAAGGGATGGCTTTCATGCAATTAGGTCAGGAGTTTCTTCGAACAAAGTGTTATCCTACAGGTGATAAAGGTCAACTTACTCAAGCAGATAAAGAAAGGGCTATGAATTCTTACAATGCCCCAGACCAAGTTAATCAGGTCAACTGGGATAATGTTACCTTTCATAAGAGTACTATTAATTTTATTAGGAAAATAATTACTTTGAAGACAAACTCTCCTTACTTTTCTTATTCTAGCTTTGAAGAGATTCGCAAACATGTTTTTGTAGAGTCTGCTCAATACCATTCAGGTTTCATAAGTTTTACAGTCGAAGAACATAAGAAAATAAAAATAATTTTCAATATTAAAGGAAAACGCTTGCAGAATTCTTTCATAGGTGATATAATAATATCAAATCATGAAGAAGGAAAAGCGATAGATTCATTAGATGATGAGCTTTCTGTAATGATCCTTGATATCACAAAA

SEQ ID NO: 10502 - protein, 766 aa, Streptococcus agalactiae; identical to SEQ ID NO: 1618

SEQ ID NO: 10503 - protein, 1866 aa, Streptococcus agalactiae
ATGTCCAATAAAGATGAGTTATATACTTTTGGAATAGGTGAAAATTTTCATCTCCAGAATTATTTAGGCGTACATAGCGAAAATGGAAGCTTTTGTTTCAGAGTTTGGGCTCCTAATGCTGAAAATGTTCAAGTTATTGGAGATTTTACAGATTGGCGAAATCGACCTCTCCAAATGAACAAAAATCAAGCAGGAGTTTGGGAAGCTAACAGTTTGGATGCGCGCGAAGGTGATTTATATAAATATTTGGTTACTCGTAAAGGTGGTCAAGTAGTTGAGAAAATCGATCCTATGGCAGTTTATATGGAAAGACGTCCTGGAACTGCAAGTGTTATTAAAGTTCTTAGAAATAAAAAGTGGGAAGATGGTCTTTGGATGGGAAGGCGCAAACGTCTGGGTTTTCAGAAGCGTCCAATTAATATTTACGAAGTTCATGCTGGTTCATGGAAAAAAGATGATTTTGGACATCCTATGACTTTTTCTCAGTTAAAAGATTACTTAATCCCCTACCTTGTTGAGATGAATTATACTCATGTTGAATTTATGCCCTTAATGGCACATCCGCTTGATATGAGTTGGGGATATCAATTAATGGGGTATTTTGCTTTTGAACATACCTATGGTACTCCAGAAGAATTTCAAGACTTTGTAGAAGCATGTCATAAAAATAATATAGGAGTTCTTGTAGATTGGGTTCCAGGACACTTTATTCAGAATGACGATGCTTTAGCCTATTTCGATGGAACTGCTACTTATGAGTATCAAAATCATGATCGTGCGCATAACTATCGATGGGGAGCTCTGAACTTTGATTTAGGAAAAAATCAAGTACAATCCTTTTTGATTTCGAGTGCCTTGTTCTGGATTGAACATTATCATATTGATGGTATTCGTGTTGATGCGGTTAGTAATATGTTATATCTCGATTATGATGAAGGACCATGGGAAGCTAACCAATTTGGGGATAATCGTAATTTGGAAGGATATCACTTTTTAAGGAAACTTAACAAAGTAATTAAAGAGCGTCATCCTAATGTTATGATGATTGCTGAAGAGTCAACAGCTTCTACCCCAATAACTAAAGACTTAGAGTCTGGAGGATTGGGTTTTGACTTTAAATGGAATATGGGCTGGATGAATGATATCCTGCGTTTTTATGAAGAAGATCCTCTCTATAGGCAATATGATTTTAATTTAGTGACTTTTAGTTTTATGTATATATTCAATGAGAACTTTGTACTAGCTTTTTCACATGATGAAGTAGTACATGGTAAAAAGAGTATGATGCATAAAATGTGGGGTGACCGTTATAATCAATTTGCTGGTTTACGTAATTTATATGCATATCAAATGTGTCATCCTGGGAAAAAACTTCTCTTTATGGGAAGTGAGTTTGGTCAATTTTTAGAATGGAAATATAATGATCAACTAGAATGGGAAAACTTAAATGATGATATGAACCAAAAGATGCAACGCTATACTAAACAATTGAATCAATTTTATAAAGATCATAAGTGCCTATGGCGTATTGATGATTCCTTTGACGGGCTAGAAATTATTGATGCGGATAATAAATCTGAAACTGTTTTATCTTTTATACGAAAAGATGATAAAGGCGATTTGTTACTTTGTGTCTTTAATATGACTCCTGTAGAACGCCCTAACTTTACTATTGGTGTTCCGCAAGCGGGTATTTATGAAGAAGTTTTAAATACTGAAATGGAAGAGTTTGGAGGTGTTTGGAAAAACCACAATCCTGTAACGAAAACACAAGTGGCTACATGGAAAGATTATGATCATACTTTAAGTTTTACATTACCAGCCCTTGGGGCAAGTGTTTGGAGAATAAAACGTCGGCTTCGTAAA

SEQ ID NO: 10504 - protein, 622 aa, Streptococcus agalactiae; identical to SEQ ID NO: 1620

SEQ ID NO: 10505 - protein, 1137 aa, Streptococcus agalactiae
ATGAAAAATGAAATGTTAGCACTCATTCTCGCCGGAGGACAAGGCACTCGACTCGGAAAATTGACTCAGAGCATTGCGAAACCTGCTGTTCAATTTGGAGGTCGTTACCGTATTATTGACTTTGCGCTTTCAAATTGTGCGAATTCAGGTATTAATAATGTTGGAGTTATTACTCAGTATCAACCGCTGGAACTCAATACTCATATTGGAAACGGATCTAGCTGGGGACTAGATGGTATCGATTCGGGAGTAACTGTATTACAGCCATATTCTGCAACAGAAGGTAATCGCTGGTTTCAAGGTACCAGCCACGCTATCTATCAAAATATTGACTACATTGATCGTATTAATCCAGAATATGTACTCATTCTCTCTGGGGACCACATCTATAAAATGAACTATGATGACATGCTACAGACGCATAAAGATAATTTAGCAAGCCTAACAGTCGCTGTTTTAGATGTTCCTTTAAAAGAAGCAAGCCGTTTTGGAATTATGAATACTGATTCAAACGACCGTATTGTCGAATTTGAAGAAAAACCTGAACATCCTAAGTCAACAAAGGCTTCAATGGGAATATACATTTTTGACTGGAAGAGATTACGGACAGTTTTAATTGATGGTGAAAAGAACGGCATAGACATGTCAGACTTTGGTAAAAATGTTATACCAGCATACCTTGAATCGGGTGAACGTGTTTATACCTATAATTTTGATGGGTATTGGAAAGATGTTGGTACTATTGAATCCCTTTGGGAAGCTAATATGGAATATATTGGAGAAGATAACAAATTACATAGTCGTGATCGTTCATGGAAAATCTATTCTAAAAATTTGATTGCACCACCTAATTTCATGACAGAAGATGCAAATGTTAAAGATTCTTTAGTTGTAGATGGATGCTTTGTTGCAGGAAATGTTGAGCACTCCATTTTATCAACTAATGTCCAGGTAAAACCAAATGCTATTATTAAAGACTCCTTTGTTATGAGTGGCGCGACTATCGGTGAAGGTGCAAAGATAAATCGAGCTATTATCGGTGAGGATGCTGTTATTGGTGATGGTGTTGTGATTGATGGAAGTAAAGAAGTAGAAGTTATTGGTTATAAAGAAGTAGCGGGGGTTCCAAATGAAGAT

SEQ ID NO: 10506 - protein, 379 aa, Streptococcus agalactiae; identical to SEQ ID NO: 1626

SEQ ID NO: 10507 - protein, 1131 aa, Streptococcus agalactiae
ATGAAGATTGATAAATATACTGCGATTTTAGGAAATACTGTTAGTTACCCAGATATGCACAGTTTGACGGATAATCGTCCGCTTGCTTCTCTACCTTTTGATGGTAAGTATCGTTTAATTGATTTTCAATTATCCTCTTTAGCTAATGCAGGCGTTAGAAGTATTTATGGTATTTTTCGTGGGAATAATGTTCGCTCTGTTTTTGACCATATTAGAAGTGGTCGTGAGTGGGGCTTAGGTACACTGTTGAGTCACTATTCTTTAGGATTCTATGATACAGACGATGATACTCGTACAGTCAATGGGGATTATTACGATCAAATTTTAACTTACTTGAGGCGTTCGGGTAGCGACCAGACGATATATATGAGTTGTGATATGCTTTGTAATATTGACTTAAGTCAAGTAATCCACTTGCATAATGCAAATGGTGCGCAAGCCACCGTGGTTTATAAAAAAATGCCGAGATCAGCTATTGCAGAGGCTAATCAAGTCTTGACCATTGATGAATCTGATCATGTAGTGAGTCTAGGTAAAGCTGTAGATAATGACGATAACCAAAAAATGTCTGCTGAGATTTATGTTATCGATACACCTTGGTTAATCGAAAAAATGGAAGAGGAAGCTCAAAATAATGAACCACGTAAACTCCGCTTCTTACTTCGTGATTTAATTGTTGAAAGTAATGCTTTGGCTTTTGAATACACTGGTTATTTGTCAAACATTTCTTCTATTAAATCCTATTATGATGCTAACATGGACATGTTAACACCAAATAAATTTTATTCGCTCTTCTTTTCAAACCAAAAAGTTTATACTAAGGTGAAAAATGAGGAAGCTACTTATTTTGATAAACAATCAAATGTCTCTAATTCGCAACTAGCCTCTGGAAGTATTATTAAAGGTTATTTAGACCATTCTATCGTTTCTAGAAATTGTCTCCTTGAAAAAGGGACTCGAGTAGTCAATAGTATTATCTTTCCAAAAGTAAAAATCGGAGAAGGGGCAACCATTGAAAATACTATTATTGACAAATGCGTTAAGGTTGCATCCGGAGTTACATTGAAAGGTAGTTTAGATAAACCGTTAGTGATTCCTAAATTTTCAGAGATTAATGAGGATATTATACAA

SEQ ID NO: 10508 - protein, 377 aa, Streptococcus agalactiae; identical to SEQ ID NO: 1628

SEQ ID NO: 10509 - protein, 1428 aa, Streptococcus agalactiae
ATGAAAATAATGTTTGTTGCGGCAGAGGGTGCTCCCTTTGCTAAAACAGGTGGTTTGGGAGATGTGATTGGCGCACTCCCAAAATCACTTAGTAAAAAAGGTCATGATGTCGCTGTTGTCATGCCATATTATGATATGGTAGACCAAAAATTTGGAGACCAAATAGAAAACCTCATGTATTTCTATACAGATGTTGGCTGGCGTCATCAATATGTAGGAGTTAAGAGACTTTCTCAAGATAATGTTACGTTCTACTTTATTGATAATCAATATTATTTTTATAGAGGTCATGTCTATGGTGATTGGGATGATGGGGAGCGTTTTGCTTATTTCCAATTAGCTGCTTTAGAGTTGATGGAGAAAATCGATTTTATTCCCGATGTCTTACACGTCCATGATTATCATACAGCAATGATTCCTTTCTTATTGAAAGAGAAGTACCACTGGATTCAGGCCTATAATAATATAAGAGCAGTTTTTACTATTCACAATATTGAATTTCAAGGGCAGTTTGGTCCAGAAATGTTAGGAGATTTATTTGGAGTTGGCGCTGAGAGATATGAAGATGGAACTCTTAGATGGAATAATTGTCTTAATTGGATGAAAGCAGCAATTCTTTACTCAGATAGAGTGACAACGGTATCACCAAGCTACGCAAATGAAATAAAAACTCCAGAATTTGGTAAAGGTTTAGATCAAATTATGCGTATGGAAGCAGGCAAATTATCTGGAATTGTAAATGGTATTGATAGCGATTTGTTAAATCCAGAAACAGATGCTTTTTTGCCATATCATTTTTCAAAAAGCAACTTAGAGGGCAAAATTAAAAATAAGTTGGCTTTACAGGAAAATTTGGGCTTACCTCAAGATAAAAATGTACCATTAATTGGTATTGTTTCACGACTTACCGATCAAAAAGGATTTGATATTATTGCTTCTGAATTGGACAATATGCTTCAACAAGATATTCAAATGGTTATTTTAGGAACAGGCTATCACCATTTTGAAGAAACGTTCTCTTATTTTGCTAGTCGTTACCCTGAAAAACTATCTGCTAATATTACTTTTGACTTAAGATTAGCGCAACAGATTTATGCGGCTTCAGATATCTTCATGATGCCAAGTGCTTTTGAACCTTGTGGTCTCTCGCAGATGATGGCTATGAGATATGGTAGCTTGCCCTTGGTACATGAAGTTGGAGGATTAAAAGATACTGTGGTAGCCTTCAATCAATTTGATGGTAGTGGTACAGGTTTTTCATTTAATCATTTTTCAGGCTATTGGTTAATGCAAACTCTAAAACTAGCATTAGAAGTTTATAATGATTATCCTGAAGCGTGGAAAAAGTTACAATGGCAAGCTATGTCAAAAGATTTTTCATGGGATACAGCATGTGTTGCTTACGAACAACTGTATCAGCAACTACAA

SEQ ID NO: 10510 - protein, 476 aa, Streptococcus agalactiae; identical to SEQ ID NO: 1630

SEQ ID NO: 10511 - protein, 198 aa, Streptococcus agalactiae; identical to SEQ ID NO: 6091

SEQ ID NO: 10512 - protein, 66 aa, Streptococcus agalactiae; identical to SEQ ID NO: 1632

SEQ ID NO: 10513 - protein, 714 aa, Streptococcus agalactiae
TTGGAATCTACAAGTAATCCAACCGTATCTTTTTTAGGCATTGATTTTGATTTAACCATCCTAGCTATGTCTCTCTTGACAATTACTATTATCTTTATCTTAGTCTTCTGGGCTAGTCGTAAGATGACAATAAAACCAAAAGGTAAGCAGAATGTCTTGGAATATGTCTATGAGCTTGTTAATAATACAATCTCACAAAATTTAGGACACTATACTAAAAATTATAGTTTATTGATGTTTATTTTATTCAGTTTTGTCTTCATTGCTAACAACTTAGGATTGATGACATCATTGAAAACACATGAGCATAATTTTTGGACATCTCCGACCGCTAATTTTGGTGTAGATATTACATTATCATTATTAGTAGCATTTATTTGTCATATTGAAGGTATTCGCAAAAAAGGAATTGGTGGTTATCTCAAAGGTTTCTTATCACCAACACCAGCAATGCTTCCGATGAATTTATTGGAAGAAGTTACTAATGTTGCTTCATTAGCATTGCGTCTTTTTGGTAATATCTTTTCTGGTGAAGTTGTCACTGGATTACTTTTACAACTTGCAGTTTTATCACCATTTACAGGTCCACTAGCTTTTGCATTGAATATCGTTTGGACAGCATTCTCAATGTTTATTGGTTTCATCCAAGCGTATGTGTTCATTATCTTGAGCTCAAGTTATATTGGACACAAAGTTCATGGTGACGAAGAAGAA

SEQ ID NO: 10514 - protein, 238 aa, Streptococcus agalactiae; identical to SEQ ID NO: 1634

SEQ ID NO: 10515 - protein, 495 aa, Streptococcus agalactiae
ATGTCAATACTTATTAATAGTACAACGATTGGTGATATCATTATCGTATCTGGCTCTGTGCTTCTCTTATTTATCTTAATTAAGACTTTTGCATGGAAACAAATCACAGGTATTTTTGAAGCCCGTGAACAAAAGATAGCTAATGATATTGATACTGCTGAACAGGCACGTCAACAAGCTGAAGCTTTTGCAACTAAGCGCGAGGAAGAACTATCTAACGCTAAAACTGAAGCTAATCAAATCATTGATAACGCTAAAGAGACAGGTCTTGCAAAAGGTGATCAAATTATTTCAGAAGCAAAAACTGAAGCTGATCGATTAAAAGAAAAAGCACATCAAGATATTGCCCAAAATAAGGCAGAAGCACTAGCAGATGTTAAGGGTGAAGTAGCAGATTTAACAGTTTTATTAGCTGAAAAAATTATGGTATCAAATCTTGATAAAGAAGCTCAGAGTAATCTCATTGATAGCTATATTAAAAAGCTAGGAGACGCC

SEQ ID NO: 10516 - protein, 165 aa, Streptococcus agalactiae; identical to SEQ ID NO: 1640

SEQ ID NO: 10517 - protein, 534 aa, Streptococcus agalactiae; identical to SEQ ID NO: 6097

SEQ ID NO: 10518 - protein, 178 aa, Streptococcus agalactiae; identical to SEQ ID NO: 1642

SEQ ID NO: 10519 - protein, 1503 aa, Streptococcus agalactiae; identical to SEQ ID NO: 6099

SEQ ID NO: 10520 - protein, 501 aa, Streptococcus agalactiae; identical to SEQ ID NO: 1644

SEQ ID NO: 10521 - protein, 879 aa, Streptococcus agalactiae
ATGGCAGGCTCTCTTAGTGAAATTAAAGACAAGATTCTCTCTACAGAAAAAACAAGTAAGATTACTAGTGCGATGCAGATGGTCTCATCTGCTAAGTTGGTTAAATCTGAACAAGCTGCTAGAGATTTTCAAGTGTATGCCTCTAAAATTCGTCAAATTACTACTAACCTCTTAAAGTCAGACTTAGTATCTGGATCAGATAACCCTATGTTATCTTCACGTCCGGTGAAGAAAACAGGTTATATTGTTATTACTTCTGATAAGGGTTTAGTTGGTGGTTACAATTCAAAAATCTTAAAAGCGATGATGGACACTATAACTGACTATCATACTGAGAATGATGATTATGCCATCATTTCAATTGGTAGTGTTGGTTCTGATTTTTTCAAAGCACGTGGAATGAATGTTTCTTTCGAATTACGTGGTTTAGAGGACCAACCAAGTTTTGATCAAGTTGGTAAAATTATTGCTCAAGCAGTTGAAATGTACAAAAATGAGTTGTTCGATGAATTATATGTTTGCTACAATCACCATGTTAACAGTTTAACTAGCCAAGTCAGAATGCAACAAATGCTTCCTATCAAAGAATTGGATGCAGAAGAGGCTTCTGAGGATAGAGTGATTACTGGTTTTGAACTTGAGCCAAACCGTGAAGTTATATTGGAGCAATTATTGCCTCAATATACTGAGAGTTTGATTTATGGAGCTATTATTGATGCTAAAACAGCAGAGCATGCGGCTGGTATGACAGCTATGCAGACTGCAACTGATAATGCTAAAAATGTTATCAATGATTTAACTATTCAATATAACCGCGCTCGTCAAGCAGCTATCACACAGGAAATTACAGAAATTGTTGCAGGTGCTAATGCACTTGAA

SEQ ID NO: 10522 - protein, 293 aa, Streptococcus agalactiae; identical to SEQ ID NO: 1646

SEQ ID NO: 10523 - protein, 1404 aa, Streptococcus agalactiae
ATGAGCTCAGGCAAAATTGCTCAGGTAGTTGGACCTGTCGTTGACGTTGTATTTGCAAGTGGCGACAAACTTCCTGAGATTAATAATGCATTGATTGTCTATAAAAATGGCGATAAGTCACAAAAAGTAGTACTTGAAGTTGCTCTTGAACTTGGTGACGGCCTCGTTCGTACAATCGCTATGGAATCAACTGATGGGCTTACACGTGGTTTGGAAGTATTAGATACTGGTCGCGCAATTAGTGTGCCGGTTGGTAAGGATACTTTGGGTCGTGTCTTCAACGTTCTTGGAGATGCTATTGACCTTGAAGAGCCTTTTGCAGAAGATGCAGAACGTCAACCAATCCATAAAAAAGCACCATCGTTTGATGAATTATCAACATCATCAGAAATCTTAGAAACTGGTATTAAAGTTATTGACTTATTAGCACCTTACTTAAAAGGTGGTAAAGTTGGACTTTTCGGTGGTGCAGGTGTTGGTAAAACCGTTCTTATTCAAGAATTAATCCACAACATCGCCCAAGAACATGGTGGTATTTCAGTATTTACTGGTGTAGGAGAACGTACTCGTGAAGGGAATGACCTTTATTGGGAAATGAAAGAATCTGGCGTTATTGAAAAAACGGCTATGGTCTTTGGTCAAATGAATGAACCACCAGGAGCACGTATGCGTGTGGCACTTACTGGTCTTACAATAGCTGAGTACTTCCGTGATGTAGAAGGACAAGATGTGCTTCTCTTCATTGATAATATCTTCCGTTTCACACAAGCTGGGTCAGAAGTGTCAGCGCTTTTAGGTCGTATGCCTTCAGCCGTTGGTTATCAACCAACACTTGCTACAGAAATGGGACAATTACAAGAGCGTATCACTTCAACTAAAAAAGGTTCTGTTACATCAATCCAAGCTATTTATGTGCCAGCAGATGACTATACTGACCCTGCGCCAGCTACAGCCTTTGCTCACTTAGATTCAACAACTAACCTTGAACGTAAATTGACACAAATGGGGATTTATCCAGCCGTTGACCCATTAGCTTCAAGTTCTCGTGCACTCACACCAGAAATCGTTGGAGATGAGCACTATGAAGTTGCAACAGAAGTACAGCGTGTTCTTCAACGTTACCGTGAGTTACAAGATATCATTGCGATTTTAGGTATGGATGAATTATCAGATGAGGAAAAAACGTTAGTTGGACGTGCACGTCGTATCCAATTCTTCCTTTCTCAAAACTTCAATGTTGCAGAAACATTTACTGGTCAACCAGGTTCATATGTTCCGGTTGAAGAAACTGTTCGCGGATTCAAAGAAATCCTAGATGGTAAACATGATCAAATTCCAGAAGATGCCTTCCGTATGGTTGGTGGTATTGAGGATGTTATCGCAAAAGCAGAAAAAATGAACTAT

SEQ ID NO: 10524 - protein, 468 aa, Streptococcus agalactiae; identical to SEQ ID NO: 1648

SEQ ID NO: 10525 - protein, 411 aa, Streptococcus agalactiae
ATGGCACAATTGACTGTTCAAGTAGTAACACCAGATGGTATTAGATATGACCATCACGCTAGTCTCATTACTGTTAGAACGCCAGATGGTGAAATGGGAATTTTACCAGGTCACATAAATTTGATTGCTCCCCTTAATGTTCATCAGATGAAGATTAATCGTTCTCATCAAGAAGGTGTAGACTGGGTAGCTGTTAATGGTGGTATAATTGAAGTTAATGAGGATCAGGTGACAATTGTTGCGGATTCAGCAGAACGAGCACGTGATATAGACCTTAACCGTGCAGAACGGGCTAAGGAACGCGCTGAGCGTGCATTAGAAAAAGCTCAAACAACTCAGAATATTGATGAGATGCGTAGAGCTGAGGTTGCTCTTCGTCGCGCAATTAACCGTATTAGCGTCGGTAAAAAG

SEQ ID NO: 10526 - protein, 137 aa, Streptococcus agalactiae; identical to SEQ ID NO: 1650

SEQ ID NO: 10527 - protein, 1269 aa, Streptococcus agalactiae
ATGGATAAAATTATTGTGGAAGGTGGGCAAACGCAGCTTCAAGGTCAAGTTGTTATTGAAGGAGCTAAAAATGCAGTTTTACCTCTTTTAGCAGCCACAATTTTACCAAGCCAAGGGAAAACATTGTTGACCAATGTTCCTATCTTGTCTGATGTATTTACAATGAACAATGTTGTTCGTGGTTTAGATATTCAAGTTGACTTTAATTGCGATAAAAAAGAAATCTTAGTGGATGCCTCAGGTGATATTTTAGATGTTGCACCTTATGAATTTGTTAGTCAAATGAGAGCTTCTATTGTTGTTTTGGGACCTATTTTAGCTAGAAATGGCCATGCTAAGGTTTCAATGCCAGGCGGTTGTACAATTGGTAGCCGACCAATTGACCTTCATCTTAAAGGTTTAGAAGCTATGGGAGCTACGATTACACAAAATGGTGGTGATATTACTGCCCAAGCTGAAAAGCTTAAGGGAGCTAATATATACATGGATTTTCCCTCAGTCGGTGCCACTCAAAACTTAATGATGGCTGCTACACTTGCTTCAGGCACAACAACGATAGAGAATGCTGCACGTGAACCAGAAATTGTAGACCTTGCGCAGTTACTAAATAAAATGGGAGCTAAAGTAAAGGGTGCTGGTACGGAAACATTAACGATCATTGGTGTTGATGCTTTACATGGTACAGAACATGATGTTGTCCAAGATCGTATTGAAGCTGGAACCTTTATGGTGGCAGCTGCTATGACTTCTGGAAATGTTCTAGTAAAGGATGCTATTTGGGAACATAACCGTCCTTTAATCTCTAAATTGATGGAGATGGGTGTTGAAGTGTCAGAGGAAGAAGATGGTATTCGTGTAAAAGCTGATACTAAAAAATTGAAGCCAGTGACTGTGAAAACACTCCCTCATCCAGGATTTCCTACTGATATGCAAGCTCAATTTACAGCTCTAATGGCAGTAGTTAATGGCGAATCAACTATGATTGAGACAGTTTTTGAAAATCGTTTTCAACATTTGGAAGAAATGCGTCGCATGGGATTACAAACGGAAATTTTACGAGATACTGCAATGATTCATGGTGGGAGAGCTTTACAAGGTGCACCGGTCATGTCTACTGACTTACGAGCTAGTGCAGCTTTAATCTTGGCAGGAATGGTTGCGCAAGGGCAAACAGTAGTTGGCCAATTAACCCATTTAGACCGTGGTTATTATCAATTCCATGAAAAATTAGCGGCTCTTGGTGCTAATATTAAACGTGTAAGTGAGGCG

SEQ ID NO: 10528 - protein, 423 aa, Streptococcus agalactiae
MDKIIVEGGQTQLQGQVVIEGAKNAVLPLLAATILPSQGKTLLTNVPILSDVFTMNNVVRGLDIQVDFNCDKKEILVDASGDILDVAPYEFVSQMRASIVVLGPILARNGHAKVSMPGGCTIGSRPIDLHLKGLEAMGATITQNGGDITAQAEKLKGANIYMDFPSVGATQNLMMAATLASGTTTIENAAREPEIVDLAQLLNKMGAKVKGAGTETLTIIGVDALHGTEHDVVQDRIEAGTFMVAAAMTSGNVLVKDAIWEHNRPLISKLMEMGVEVSEEEDGIRVKADTKKLKPVTVKTLPHPGFPTDMQAQFTALMAVVNGESTMIETVFENRFQHLEEMRRMGLQTEILRDTAMIHGGRALQGAPVMSTDLRASAALILAGMVAQGQTVVGQLTHLDRGYYQFHEKLAALGANIKRVSEA

SEQ ID NO: 10529 - protein, 201 aa, Streptococcus agalactiae; identical to SEQ ID NO: 6111

SEQ ID NO: 10530 - protein, 67 aa, Streptococcus agalactiae; identical to SEQ ID NO: 1658

SEQ ID NO: 10531 - protein, 855 aa, Streptococcus agalactiae
ATGACAAAAAAACAAAAACAAATAACAGCTTCGATTGTAACTTTGCTTTTTTCATTACTGGCAATAGGGTTAGGTGAAAGCAAATCTTTGCCTAATGATCACATTTTAAAACAGGTGACAGATTTAATTATTAGTAATGAATCTGGCAAAAATACTTCCCTTAAAAATGTATCAGGAACTCCTAGTAGAGAGTTATCTGAATCTGTTTTGACTAGCAATGTTAAAAAACAATTGGGAACAAATATAGCTTGGAACCAGTCAGGTGCTTTTATCATTAATCAAAATAAAACAGATTTGAATGCTAAAGTGTCAAGTGCACCATATGCTATTAATGAAATAAAGAAGGTTAATAACCAAATTGTTCCGACTAAAGCAAATGCCTTATTAACAAAAGCAACTCGTCAATATCGAAATCGAGAAGAAACAGGGAATGGTAGAACTTATTGGAAACCCGCTGGATGGCATCAGATAAATGGATTAAAAGGGAGCTATAACCACGCTGTGGACAGAGGCCATTTAATTGGTTATGCTTTAGTAGGGAGTTTAAGAGGATTTGATGCCTCCACAAGTAATCCTAAAAATATTGCCACACAAGCAGCTTGGGCAAACCAAGCTAATAGCAACCAATCAACAGGGCAAAATTATTATGAAACTTTAGTTCGTAAAGCATTGGATCGTCATAAAACTGTTAGGTATCGTGTGACTTTAATTTATGACAGAGATAATCTTTTATCTTCGGGATCACATATTGAGGCTAAATCTTCAGATGGAAGTTTAGAATTTAACGTTTTTATTCCTAATGTACAATCGGGATTATTATTTGATTATGCAACAGGAAAAGTGAAGCAGACAAAG

SEQ ID NO: 10532 - protein, 285 aa, Streptococcus agalactiae; identical to SEQ ID NO: 1660

SEQ ID NO: 10533 - protein, 1038 aa, Streptococcus agalactiae
ATGGATTTACAAAAACAATTAGAAGAGTTGAAAATATCAACTCAAGAAAAGCTTAAAGAAATGACTGGGAACCACACTAAAGAATTACAAGACTTACGTGTACAAGTTTTAGGAAAAAAAGGTTCTCTAACAGAATTACTAAAAGGTCTGAAAGATTTATCTAATGATTTACGACCAGTTGTTGGAAAACAAGTCAATGAAGTACGTGATATTTTAACAAAAGCGTTTGAGGAACAAGCTAAAGTAGTGGAAGCTGCGAAGATTCAAGCACAGTTAGAGTCTGAGAGTGTCGACGTTACCTTGCCTGGTCGTCAAATGACATTAGGTCACCGTCATGTCTTAACACAAACTAGCGAAGAGATTGAAGATATCTTTTTAGGTATGGGATTCCAAGTGGTTGATGGTTTTGAAGTTGAGAAAGACTACTATAATTTTGAACGAATGAATTTACCAAAAGATCATCCAGCCCGTGATATGCAAGATACTTTTTATATTACAGAAGAAATCTTGCTACGTACTCATACTTCGCCTGTTCAAGCACGAACAATGGACCAACATGATTTTTCTAAAGGGCCTTTAAAAATGATTTCTCCTGGACGTGTTTTCCGTCGTGATACTGATGATGCTACTCATAGCCATCAATTCCATCAAATTGAAGGCTTAGTTGTTGGAGAAAATATTTCAATGGGCGATCTCAAAGGAACACTTCAACTGATTTCTCAAAAAATGTTTGGAGCAGAGCGTAAAATCCGACTTCGTCCTTCATATTTCCCATTCACAGAACCTTCAGTTGAAGTTGATGTCTCTTGCTTCAAGTGCGGAGGTAAGGGATGTAATGTCTGCAAACAGACAGGTTGGATTGAGATATTGGGTGCTGGTATGGTTCACCCAAGTGTTTTGGAAATGTCTGGTATTGATTCTGAGAAATACTCCGGTTTTGCCTTTGGTTTAGGTCAAGAACGTATTGCAATGTTACGCTACGGTATCAATGACATTCGTGGCTTCTATCAAGGTGATGTTCGCTTCACAGATCAATTT

SEQ ID NO: 10534 - protein, 346 aa, Streptococcus agalactiae; identical to SEQ ID NO: 1662

SEQ ID NO: 10535 - protein, 519 aa, Streptococcus agalactiae
ATGTCTCAAATTACTTTTAAAAAGGTTGGCCTTGATAATGTGAATATTTTACAGAATATTGCTATAGAAACCTTTCGGCAGACGTTTTCTCATGATAATAGTGAGGAACAACTTCAAGCATTTTTCAATGAGTCTTACACTTTACCAGTATTAAAATCGGAAATTACCCATGCTGAATCTGATACTTATTTTGTTTATCTTGATACAGATTTAGTGGGTTATTTAAAAGTAAACTGGGGAAGTCAGCAAACTGAAAAAGATCTTGATAAAGCATTTGAAATTCAAAGGATTTATCTTCTAGATGCCTACCAAGGGCAAGGTATAGGTAAGGCTACTTTCGAATTTGCTTTGGATTTAGCTTATAAATCAGGCTTAGATTGGGCTTGGTTAGGTGTTTGGGAGTTTAATCATAAAGCTCAGGCATTTTACGCTAAATACGGATTTGAAAAATTTTCTGAGCACCAATTTTCAGTAGGTGATAAAGTGGATACGGATTGGTTATTAAGAAAAAGTTTACAC

SEQ ID NO: 10536 - protein, 173 aa, Streptococcus agalactiae
MSQITFKKVGLDNVNILQNIAIETFRQTFSHDNSEEQLQAFFNESYTLPVLKSEITHAESDTYFVYLDTDLVGYLKVNWGSQQTEKDLDKAFEIQRIYLLDAYQGQGIGKATFEFALDLAYKSGLDWAWLGVWEFNHKAQAFYAKYGFEKFSEHQFSVGDKVDTDWLLRKSLH

SEQ ID NO: 10537 - protein, 2403 aa, Streptococcus agalactiae
ATGTTAGTATCGTATAAATGGTTAAAAGAGTTAGTGGATGTTGATGTTACAACAGCAGAACTAGCTGAGAAAATGTCAACCACTGGTATTGAGGTTGAAGGTGTGGAGACACCAGCGGAAGGTTTATCAAAATTAGTTGTAGGTCATATTGTTTCGTGTGAAGATGTTCCAGATACCCACTTACATTTGTGTCAAGTTGATACAGGGGATGATGAACTTCGTCAAGTTGTCTGTGGTGCTCCAAATGTCAAGACTGGTATTAATGTTATCGTAGCGGTTCCTGGTGCTCGTATTGCAGATAACTATAAGATTAAAAAAGGTAAAATCCGTGGTATGGAGTCACTTGGAATGATTTGTTCACTTCAAGAGTTGGGCTTATCGGAAAGTATCATTCCAAAAGAGTTTTCTGATGGTATCCAAATTTTACCTGAGGGAGCTATACCTGGTGATAGTATTTTCTCTTATCTTGACTTAGATGATGAAATTATTGAATTATCAATTACACCAAACCGTGCAGATGCTCTTTCAATGCGTGGTGTTGCCCATGAGGTAGCAGCAATTTATGGGAAAAAAGTTCATTTTGAAGAAAAAAATCTCATTGAAGAAGCAGAAAGAGCAGCTGATAAGATTTCTGTTGTCATTGAATCAGATAAAGTTTTATCTTACTCGGCTCGTATTGTTAAGAATGTAACAGTTGCACCAAGTCCACAATGGCTTCAAAATAAACTGATGAATGCTGGTATACGTCCAATTAATAATGTTGTTGATGTGACAAACTATGTTCTTTTGACTTATGGTCAACCAATGCATGCTTTTGATTTTGATAAATTTGATGGGACAACTATAGTAGCACGTAATGCTGAGAATGGGGAAAAGTTAATTACTCTTGATGGTGAAGAGCGTGACTTAATAGCTGATGACTTGGTCATTGCGGTAAATGATCAACCAGTTGCTTTGGCAGGCGTTATGGGAGGACAATCAACTGAAATTGGTAGTTCTTCTAAGACAGTGGTCCTTGAAGCGGCAGTATTTAATGGAACAAGTATCCGCAAAACAAGTGGAAGACTCAACCTTCGTTCAGAATCATCTTCTCGCTTTGAAAAAGGTATCAATTATGATACAGTTTCAGAGGCTATGGATTTTGCGGCTGCAATGTTACAAGAATTGGCAGGTGGTCAAGTTCTTTCTGGTCAAGTTACAGAAGGAGTTCTTCCAACTGAGCCGGTAGAGGTATCAACGACTCTTGGTTACGTTAATACTCGTTTGGGAACAGAACTTACCTATACTGATATTGAAGAAGTATTTGAAAAACTCGGCTTTGCTATTTCTGGTTCAGAAGTGAAATTTACTGTGTTGGTACCGCGTCGTAGATGGGATATTGCCATTCAAGCTGACTTAGTTGAAGAGATTGCCCGTATTTATGGTTACGAAAAATTACCAACAACATTGCCAGAAGCCGGAGCGACTGCAGGAGAATTAACGAGTATGCAACGCTTACGTCGTAGAGTCCGTACGGTTGCTGAAGGAGCAGGATTATCTGAAATTATCACCTATGCTTTAACAACTCCAGAAAAAGCAGTGCAGTTCTCAACTCAAGCAACTAATATAACTGAACTTATGTGGCCGATGACTGTTGATCGCTCAGCACTTCGCCAAAATGTTGTTTCAGGAATGCTTGATACAATTGCTTATAACGTTGCTCGCAAAAACAGTAACCTTGCAGTTTATGAGATAGGAAAAGTTTTTGAACAAACTGGTAATCCAAAAGAAGATTTACCAACTGAAGTAGAGACGTTTACTTTTGCCTTAACAGGTCTAGTAGAGGAAAAAGATTTCCAAACAAAAGCCAAGCCAGTTGATTTCTTCTACGCCAAAGGTATTGTAGAGGCGCTCTTTATTAAATTAAAATTAGATGTTACTTTTGTAGCACAAAAAGGTTTAGCAAGTATGCACCCAGGTCGTACAGCAACTATCTTATTAGATGGGAAAGAGATTGGTTTTGTTGGTCAAGTACACCCACAAACTGCAAAACAATATGATATTCCTGAAACTTATGTTGCTGAAATCAATCTATCAACTATTGAAAGTCAAATGAACCAAGCGTTGATTTTTGAAGATATTACGAAGTATCCGTCTGTATCTCGCGATATTGCATTATTACTTGCAGAATCTGTTAGTCATCATGATATTGTGTCAGCAATTGAGACATCAGGGGTAAAACGTCTAACAGCGATTAAACTGTTTGATGTCTACGCTGGAAATAATATTGCAGAAGGGTATAAATCAATGGCTTATAGCTTAACTTTCCAAAACCCTAATGACAATCTAACGGACGAAGAAGTGGCTAAATATATGGAAAAAATCACTAAATCACTCGTTGAGAAAGTTAATGCAGAAATAAGA

SEQ ID NO: 10538 - protein, 801 aa, Streptococcus agalactiae
MLVSYKWLKELVDVDVTTAELAEKMSTTGIEVEGVETPAEGLSKLVVGHIVSCEDVPDTHLHLCQVDTGDDELRQVVCGAPNVKTGINVIVAVPGARIADNYKIKKGKIRGMESLGMICSLQELGLSESIIPKEFSDGIQILPEGAIPGDSIFSYLDLDDEIIELSITPNRADALSMRGVAHEVAAIYGKKVHFEEKNLIEEAERAADKISVVIESDKVLSYSARIVKNVTVAPSPQWLQNKLMNAGIRPINNVVDVTNYVLLTYGQPMHAFDFDKFDGTTIVARNAENGEKLITLDGEERDLIADDLVIAVNDQPVALAGVMGGQSTEIGSSSKTVVLEAAVFNGTSIRKTSGRLNLRSESSSRFEKGINYDTVSEAMDFAAAMLQELAGGQVLSGQVTEGVLPTEPVEVSTTLGYVNTRLGTELTYTDIEEVFEKLGFAISGSEVKFTVLVPRRRWDIAIQADLVEEIARIYGYEKLPTTLPEAGATAGELTSMQRLRRRVRTVAEGAGLSEIITYALTTPEKAVQFSTQATNITELMWPMTVDRSALRQNVVSGMLDTIAYNVARKNSNLAVYEIGKVFEQTGNPKEDLPTEVETFTFALTGLVEEKDFQTKAKPVDFFYAKGIVEALFIKLKLDVTFVAQKGLASMHPGRTATILLDGKEIGFVGQVHPQTAKQYDIPETYVAEINLSTIESQMNQALIFEDITKYPSVSRDIALLLAESVSHHDIVSAIETSGVKRLTAIKLFDVYAGNNIAEGYKSMAYSLTFQNPNDNLTDEEVAKYMEKITKSLVEKVNAEIR

SEQ ID NO: 10539 - protein, 900 aa, Streptococcus agalactiae
ATGAAAATAGATGACCTAAGAAAAAGCGACAATGTTGAAGATCGTCGCTCCAGTAGCGGAGGTTCATTCTCTAGCGGAGGAAGTGGATTACCGATTCTTCAACTTTTATTGCTGCGAGGGAGTTGGAAAACCAAGCTTGTGGTTTTAATCATCTTACTGCTACTTGGCGGAGGGGGACTAACCAGCATTTTTAATGACTCATCCTCACCTTCTAGTTACCAATCTCAGAATGTCTCACGTTCTGTTGATAATAGCGCAACGAGAGAACAAATCGATTTCGTTAATAAAGTCCTTGGCTCAACTGAGGATTTCTGGTCACAAGAATTCCAAACCCAAGGTTTTGGAAATTATAAGGAACCAAAACTTGTTCTTTACACCAATTCAATTCAAACAGGTTGTGGTATAGGTGAATCTGCTTCAGGACCATTTTATTGTTCAGCAGATAAAAAAATCTATCTTGATATTTCTTTTTACAATGAATTATCACATAAATATGGTGCTACTGGTGATTTTGCTATGGCCTACGTCATCGCCCACGAAGTTGGTCACCACATTCAAACAGAGTTAGGCATTATGGATAAGTATAATAGAATGCGACACGGACTTACTAAGAAAGAAGCAAATGCTTTAAATGTTCGGCTAGAACTTCAAGCAGATTATTATGCAGGGGTATGGGCTCACTACATCAGGGGAAAAAATCTCTTAGAACAAGGAGACTTTGAAGAGGCCATGAATGCTGCCCACGCCGTCGGAGACGATACCCTTCAGAAAGAAACCTACGGAAAATTAGTGCCTGATAGCTTTACCCATGGAACAGCTGAACAACGCCAACGTTGGTTTAACAAAGGCTTTCAATATGGTGACATCCAACACGGTGATACTTTCTCCGTAGAACATCTA

SEQ ID NO: 10540 - protein, 300 aa, Streptococcus agalactiae; identical to SEQ ID NO: 1670

SEQ ID NO: 10541 - protein, 806 aa, Streptococcus agalactiae
ATGAAATTACTTTATACTGATATTAATCATGATATGACAGAAATCTTAGTCAATCAGGCCGCGCATGCTGCTGAAGCTGGATGGCGTATTTTTTATATTGCTCCAAACTCTTTATCTTTTGAAAAAGAGCGTGCAGTATTAGAGAACCTTCCTCAAGAAGCCTCTTTTGCTATTACAATTACTCGCTTTGCTCAATTGGCACGTTATTTTACTTTAAACCAGCCTAATCAAAAAGAAAGTTTAAACGATATTGGATTAGCAATGATCTTTTATCGTGCTTTAGCAAGTTTTGAAGATGGACAATTAAAAGTTTTTGGACGATTGAAGCAAGATGCTTCCTTTATCAGTCAATTGGTAGACCTATACAAAGAATTGCAGACAGCAAATCTGAGTATTTTAGAGTTAAAATATTTACATTCTCCTGAAAAATTTGAAGATTTATTAGCTATTTTTCTAGTGGTTTCAGATCTTTTAAGAGAAGGAGAATACGACAATCAATCTAAAATTGCCTTTTTTACAGAACAAGTAAGGTCAGGCCAGCTAGATGTGGATTTAAAGAACACTATCCTTATAGTCGATGGTTTTACCCGTTTCTCAGCTGAAGAAGAAGCTTTAATTAAAAGTCTGAGTTCACGTTGTCAAGAGATTATCATCGGAGCTTATGCTAGCCAAAAAGCGTATAAGGCTAACTTTACTAATGGAAATATTTATTCTGCAGGGGTTGATTTTTTAAGATATCTAGCAACGACATTTCAAACAAAACCAGAATTTATCTTGCAAGTGGGAAAGTAAATCTGGTTTTGAAA

SEQ ID NO: 10542 - protein, 269 aa, Streptococcus agalactiae
MKLLYTDINHDMTEILVNQAAHAAEAGWRIFYIAPNSLSFEKERAVLENLPQEASFAITITRFAQLARYFTLNQPNQKESLNDIGLAMIFYRALASFEDGQLKVFGRLKQDASFISQLVDLYKELQTANLSILELKYLHSPEKFEDLLAIFLVVSDLLREGEYDNQSKIAFFTEQVRSGQLDVDLKNTILIVDGFTRFSAEEEALIKSLSSRCQEIIIGAYASQKAYKANFTNGNIYSAGVDFLRYLATTFQTKPEFILSSGKVNLVLK

SEQ ID NO: 10543 - protein, 2422 aa, Streptococcus agalactiae
ATGATTTCGAAAAATATCGAAGGTAACATGATTTTACAATAGTAGTCACATTTTAGACGACACTGCTAAAGATTGTATAACAATTTGGGAGTGCATTAATCAAAAAGATGAAGTGGAACATGTGGCTAGAGCTATACGTCAGAAACTTTATCAAGGATATCGCTACAAAGATATTTTAGTTTTACTAGGAGATGTAGATAGTTATAAACTACAATTAAGTAAGATTTTTGAGCAGTATGATATTCCTTATTATTTCGGTAAAGCTGAAACAATGGCTGCGCACCCTTTAGTTCATTTTATGGATTCCTTGTCTCGAATAAAACGTTATCGATTTAGAGCTGAAGATGTTTTAAATCTTTTTAAGACAGGTATTTATGGAGAGATTAGCCAAGATGATTTAGATTATTTTGAGGCTTATATCTCATATGCAGACATTAAAGGTCCTAAGAAGTTCTTTACAGATTTTGTTGTGGGGGCTAAAAAATTTGATTTAGGGCGTCTTAACACTATTCGTCAGTCCCTCCTTACTCCACTGGAAAGTTTTGTGAAAACGAAAAAACAAGACGGTATAAAAACACTCAACCAATTCATGTTTTTCCTTACTCAGGTAGGTTTGAGTGACAATTTATCGCGATTAGTTGGTCAAATGTCTGAAAATGAACAAGAAAAACATCAAGAAGTTTGGAAAACATTTACAGATATTTTAGAGCAGTTTCAAACAATATTTGGTCAAGAAAAATTAAATTTAGACGAATTTTTATCGTTATTAAATTCAGGTATGATGCAAGCCGAGTATCGTATGGTCCCTGCTACTGTTGATGTGGTTACTGTTAAGTCTTACGATTTGGTAGAACCACATAGTAATCAATTTGTCTATGCCCTAGGCATGACACAATCACATTTTCCAAAGATTGCTCAAAACAAATCTTTAATATCTGATATTGAACGTCAGCTTATAAATGATGCCAATGACACTGATGGTCATTTTGACATTATGACGCAAGAAAATTTGAAGAAAAACCATTTTGCTGCCCTCTCTCTTTTTAATGCTGCTAAACAAGAATTAGTGTTGACTATACCACAATTATTGAATGAGTCTGAAGATCAGATGTCACCATATCTTGTCGAACTAAGAGATATAGGTGTTCCTTTTAATCATAAAGGACGCCAATCGTTAAAAGAAGAAGCTGATAATATTGGGAATTACAAAGCTTTATTATCGCGTGTTGTTGACTTGTATCGCTCTGCTATTGACAAAGAGATGACTAAAGAAGAACAAACTTTTTGGTCAGTTGCTGTTCGTTATTTGCGTCGTCAATTAACTTCTAAAGGGATTGAGATACCAATAATTACAGATAGTCTTGATACTGTGACAGTTTCATCAGATGTGATGACCAGACGCTTCCCAGAAGATGACCCACTTAAATTATCCTCATCTGCTTTGACAACTTTTTATAATAATCAATATAAGTATTTTTTACAATATGTGTTAGGTTTGGAAGAACAAGACTCAATTCATCCAGATATGCGGCACCATGGAACGTACCTTCATCGTGTTTTTGAAATTCTGATGAAAAACCAAGGGATAGAATCTTTTGAAGAGAAACTCAACTCTGCAATTAATAAAACCAATCAAGAAGATGTTTTCAAATCCTTGTATTCAGAAGATGCAGAAAGTCGTTATTCTTTAGAAATTTTAGAAGATATCGCGCGTGCAACTGCAACCATATTACGACAAGATAGTCAGATGACTGTTGAAAGTGAAGAAGAACGATTTGAACTAATGATTGATAATACTATAAAAATTAACGGTATTATTGACCGTATCGATCGTTTATCTGATGGTTCTTTGGGTGTCGTGGACTATAAATCAAGCGCTCAAAAATTCGATATCCAAAAATTTTATAACGGTCTAAGTCCACAATTAGTCACCTACATTGATGCTATCAGTCGTGACAAGGAAGTTGAACAAAAACCACCGATTTTTGGAGCTATGTACTTACATATGCAGGAACCTAGACAAGACTTGTCTAAAATTAAAAATTTAGATGATTTAGTAACAAAAAATCATCAAGCTTTAACTTATAAAGGATTATTTTCAGAAGCCGAAAAAGAATTCTTAGCAAATGGGAAATACCATCTCAAAGATTCCCTTTATTCAGAGACTGAAATTGCTATTTTACAAGCACATAACCAATCGCTTTACAAAAAAGCATCTGAGACTATTAAGTCAGGTAAGTTTTTGATCAATCCATATACAGAAGATGCTAAAACAGTTGACGGAGATCAGTTTAAGAGTATTACGGGATTCGAGGCGGATAGGCATATGGCACGTGCCAGAGCGCTTTATAAATTACCTGCTAAGGAAAAACGTCAAGGTTTCTTAACATTAATGCAGCAAGAGGAGGAAAATGATGACCTT

SEQ ID NO: 10544 - protein, 808 aa, Streptococcus agalactiae
MISKNIEGKHDFTNSSHILDDTAKDCITIWECINQKDEVEHVARAIRQKLYQGYRYKDILVLLGDVDSYKLQLSKIFEQYDIPYYFGKAETMAAHPLVHFMDSLSRIKRYRFRAEDVLNLFKTGIYGEISQDDLDYFEAYISYADIKGPKKFFTDFVVGAKKFDLGRLNTIRQSLLTPLESFVKTKKQDGIKTLNQFMFFLTQVGLSDNLSRLVGQMSENEQEKHQEVWKTFTDILEQFQTIFGQEKLNLDEFLSLLNSGMMQAEYRMVPATVDVVTVKSYDLVEPHSNQFVYALGMTQSHFPKIAQNKSLISDIERQLINDANDTDGHFDIMTQENLKKNHFAALSLFNAAKQELVLTIPQLLNESEDQMSPYLVELRDIGVPFNHKGRQSLKEEADNIGNYKALLSRVVDLYRSAIDKEMTKEEQTFWSVAVRYLRRQLTSKGIEIPIITDSLDTVTVSSDVMTRRFPEDDPLKLSSSALTTFYNNQYKYFLQYVLGLEEQDSIHPDMRHHGTYLHRVFEILMKNQGIESFEEKLNSAINKTNQEDVFKSLYSEDAESRYSLEILEDIARATATILRQDSQMTVESEEERFELMIDNTIKINGIIDRIDRLSDGSLGVVDYKSSAQKFDIQKFYNGLSPQLVTYIDAISRDKEVEQKPPIFGAMYLHMQEPRQDLSKIKNLDDLVTKNHQALTYKGLFSEAEKEFLANGKYHLKDSLYSETEIAILQAHNQSLYKKASETIKSGKFLINPYTEDAKTVDGDQFKSITGFEADRHMARARALYKLPAKEKRQGFLTLMQQEEENDDL

SEQ ID NO: 10545 - protein, 3621 aa, Streptococcus agalactiae
ATGACCTTTAAGCCTTTCTTAAATCCAGAAGATATTGCTGTTATTCAGACAGAAGAAAAAAATTCTGATAAAAAACAAAAGCGAACGCCTGAACAAATTGAAGCCATTTATACTTTTGGTAACAATGTCCTGGTATCAGCTTCGGCTGGTTCTGGAAAGACTTTTGTAATGGTTGAGCGGATTTTAGATAAACTTTTAAGAGGGGTTCCGATTGACTCTTTGTTTATCTCAACATTTACAGTAAAAGCGGCAGGTGAGCTCAAAGAACGTTTAGAAAAGAAAATAAACGAGTCTTTGAAATCCGCAGAATCAGATGATTTAAAACAGTTTCTCACCCAGCAACTTGTCGGCATTCAAACAGCTGATATTGGTACTATGGATGCTTTTACGCAAAAAATAGTTAACCAATATGGTTATACTTTGGGCATATCACCTATATTTAGGATTTTACAAGATAAAAATGAGCAAGACGTCATAAAGAATGAGGTCTATGCTGATTTATTTTCTGACTACATGACTGGGAAGAATGCAGCTTCATTCATAAAATTAGTCAAAAATTTCTCAGGTAATCGTAAAGATAGCAAAGCTTTTCGAGAAATGGTTTATAAAGTTTATGCTTTTAGCCAGTCCACCGATAACCCCAAGCGCTGGATGCAAACAGTTTTTCTAAAAGGTGCACAAACTTACACTGATTTTGAAGCTATTCCAGATCAAGAAGTTTCAAGCCTTTTAAATGTAATGCAAACAACTGCTAATCAATTACGTGATTTAACGGATCAAGAAGATTATAAGCAATTAACTGCTAAAGGGGTTCCGACAGCAAATTACAAAAAACACCTTAAAATAATTGAAAATTTAGTCCATTGGTCTCAAGACTTTAATTTGCTGTATGGAAAAAAAGGATTGACTAATTTGGCACGTGATATCACTAATGTGATTCCTTCAGGCAATGATGTTACAGTTGCTGGCGTTAAATATCCTATCTTTAAACAATTGCATAATCGTATCGTTGGACTTAAGCACTTAGAAGTTATTTTTAAGTATCAAGGAGAATCTCTTTTCTTGTTAGAATTATTGCAATCCTTTGTTTTAGATTTCTCAGAACAATATTTACAGGAGAAGATTCAAGAAAATGCTTTTGAATTTTCTGATATTGCCCATTTTGCAATTCAAATATTGGAAGAAAATCATGATATTAGGCAACTTTATCAAGATAAGTATCATGAAGTAATGGTTGATGAGTATCAGGACAATAACCATACCCAAGAGAGAATGTTAGAATTATTGTCTAATGGACATAATCGTTTCATGGTTGGAGACATAAAACAATCAATTTACCGTTTTCGTCAGGCTGATCCACAAATTTTTAATGATAAATACAAAGCTTACCAAGACAATCCAAGTCAAGGGAAATTAATTATTCTGAAAGAGAATTTTCGGAGTCAATCAGAGGTTTTAGACAGTACAAATAGTGTGTTTACACATCTTATGGATGAAGAAGTAGGAGACATTCTTTATGATGAAAGTCACCAATTAAAAGCTGGTAGTCCAAGACAGCAAGAAAGACATCCGAATAATAAAACACAAGTTTTACTATTAGATACTGATGAAGATGATATAGATGACAGTGATAGTCAACAATATGATATTAGCCCAGCTGAAGCAAAGTTAGTCGCAAAAGAAATTATTCGATTGCATAAAGAAGAGAATGTTCCCTTTCAAGATATCACCCTCTTAGTTTCTTCAAGGACAAGGAATGATGGTATCTTACAAACTTTTGACCGTTATGGTATTCCTTTGGTAACTGACGGTGGGGAGCAAAATTACTTAAAATCAGTCGAAGTGATGGTAATGCTTGATACTTTGCGGTCAATTGATAATCCCTTAAATGATTATGCTCTAGTTGCTCTTTTGAGATCTCCCATGTTTGGCTTTAATGAAGATGATTTAACAAGAATTGCTATTCAGGATGTCAAAATGGCTTTTTATCATAAAGTGAAATTGTCTTATCATAAAGAAGGTCATCATAGTGATTTAATTACTCCAGAATTATCTTCTAAAATAGATCACTTTATGAAAACATTCCAGACTTGGCGTGATTTTGCTAAATGGCATTCGCTTTATGATTTAATATGGAAAATATATAATGACCGTTTTTATTATGATTATGTAGGAGCTCTGCCTAAAGCTGAGCAACGTCAAGCCAATCTATATGCCTTGGCACTTCGAGCAAATCAGTTTGAAAAAACAGGTTTCAAGGGTTTATCACGCTTTATTCGAATGATTGATAAAGTTTTAGAAAATGAAAATGATTTGGCAGATGTTGAGGTGGCATTACCGCAAAATGCTGTTAACCTAATGACTATACACAAATCAAAGGGGCTTGAGTTTAAGTATGTATTTATTTTAAATATTGATAAGAAATTTTCAATGGTAGACATAACTTCCCCTCTTATTTTAAGCCGAAATCAAGGAATTGGTATTAAATATGTTGCTGATATGCGACATGAACTCGAAGAAGAGATACTGCCTGCAGTAAAGGTTAGCATGGAAACACTTCCTTACCAACTTAATAAAAGAGAGTTACGCTTAGCTACTTTATCAGAGCAAATGCGTTTACTTTACGTAGCTATGACACGTGCAGAGAAAAAATTATATCTGGTTGGTAAGGCTAGTCAAACCAAATGGGCTGATCATTATGACTTAGTATCTGAAAATAATCATCTCCCATTAGCTAGTCGTGAAACTTTTGTGACCTTTCAAGATTGGTTACTGGCTGTTCATGAAACCTATAAGAAACAAGAGTTGTTTTATGACATCAACTTCGTATCATTAGAGGAATTAACAGATCACCACATAGGGATGGTTAACCCTAGTCTACCTTTCAATCCCGATAATAAGGTAGAGAATCGTCAGTCTGAAGATATCGTGCGTGCGATTAGCGTGTTAGAATCTGTTGAGCAGATTAATCAAACTTATAAAGCGGCTATTGAGTTACCGACAGTGAGAACACCAAGTCAAGTCAAAAAATTCTATGAGCCTATTCTAGATATAGAAGGTGTTGATGTGATGGAAACTATTACTAAAACATCAGTAGATTTTAAGTTACCTGATTTTTCTACAAGTAAAAAGCAAGACCCAGCAGCTTTAGGATCTGCTGTACATGAATTAATGCAACGCATAGAGATGTCATCTCATGTCAAAATGGAAGATATTCAAAAAGCTTTGACAGAAGTGAATGCTGAAACAAGTGTCAAAGCGGCTATTCAGATTGAAAAAATCAACTATTTTTTCCAAGAAACCTCACTCGGTAAGTATATACAAGAAGAAGTAGAACATCTGCATCGAGAGGCACCTTTTGCCATGTTAAAAGAAGATCCGGAGAGTGGTGAGAAATTCGTTGTACGTGGTATTATTGATGGGTATCTACTATTAGAAAATCGGATAATTCTATTTGATTATAAGACTGATAAATTTGTCAATCCTCTAGAATTAAAAGAACGCTATCAGGGACAAATGGCTTTATATGCAGAAGCTTTAAAAAAATCTTACGAGATAGAAAAGATAGACAAATACTTAATTCTTTTAGGTGGTAAACAGCTAGAAGTGGTAAAAATGGAT

SEQ ID NO: 10546 - protein, 1207 aa, Streptococcus agalactiae
MTFKPFLNPEDIAVIQTEEKNSDKKQKRTPEQIEAIYTFGNNVLVSASAGSGKTFVMVERILDKLLRGVPIDSLFISTFTVKAAGELKERLEKKINESLKSAESDDLKQFLTQQLVGIQTADIGTMDAFTQKIVNQYGYTLGISPIFRILQDKNEQDVIKNEVYADLFSDYMTGKNAASFIKLVKNFSGNRKDSKAFREMVYKVYAFSQSTDNPKRWMQTVFLKGAQTYTDFEAIPDQEVSSLLNVMQTTANQLRDLTDQEDYKQLTAKGVPTANYKKHLKIIENLVHWSQDFNLLYGKKGLTNLARDITNVIPSGNDVTVAGVKYPIFKQLHNRIVGLKHLEVIFKYQGESLFLLELLQSFVLDFSEQYLQEKIQENAFEFSDIAHFAIQILEENHDIRQLYQDKYHEVMVDEYQDNNHTQERMLELLSNGHNRFMVGDIKQSIYRFRQADPQIFNDKYKAYQDNPSQGKLIILKENFRSQSEVLDSTNSVFTHLMDEEVGDILYDESHQLKAGSPRQQERHPNNKTQVLLLDTDEDDIDDSDSQQYDISPAEAKLVAKEIIRLHKEENVPFQDITLLVSSRTRNDGILQTFDRYGIPLVTDGGEQNYLKSVEVMVMLDTLRSIDNPLNDYALVALLRSPMFGFNEDDLTRIAIQDVKMAFYHKVKLSYHKEGHHSDLITPELSSKIDHFMKTFQTWRDFAKWHSLYDLIWKIYNDRFYYDYVGALPKAEQRQANLYALALRANQFEKTGFKGLSRFIRMIDKVLENENDLADVEVALPQNAVNLMTIHKSKGLEFKYVFILNIDKKFSMVDITSPLILSRNQGIGIKYVADMRHELEEEILPAVKVSMETLPYQLNKRELRLATLSEQMRLLYVAMTRAEKKLYLVGKASQTKWADHYDLVSENNHLPLASRETFVTFQDWLLAVHETYKKQELFYDINFVSLEELTDHHIGMVNPSLPFNPDNKVENRQSEDIVRAISVLESVEQINQTYKAAIELPTVRTPSQVKKFYEPILDIEGVDVMETITKTSVDFKLPDFSTSKKQDPAALGSAVHELMQRIEMSSHVKMEDIQKALTEVNAETSVKAAIQIEKINYFFQETSLGKYIQEEVEHLHREAPFAMLKEDPESGEKFVVRGIIDGYLLLENRIILFDYKTDKFVNPLELKERYQGQMALYAEALKKSYEIEKIDKYLILLGGKQLEVVKMD

SEQ ID NO: 10547 - protein, 915 aa, Streptococcus agalactiae
ATGATAGTCGAACAAAAATTTGGAAATGGTTTTACTTGGATTAACATTGAAGCAGAGCAATTGCGAACAGAAACATCGGAAATTCAAGCAAAATATTTGGATAGTGAGATTATTACATATGCTCTGGATGATTATGAACGAGCCTTTATGGAATGTTCTCATATTAAAGGAAAAGAAGTCTTGACGATTATTTTTAATACTATTGATCTAAAGCAGAAAGAAAGTTATTATGAGACCGTTCCGATGACCTTTTGCTTATCACACGACCGTTTGATAACGGTGACACGGTCTCGAAATAGTTATATGCTAGAACTATTGCAAAAATATCTAGACCGTAATCCAGATGTCTCTCCTAAAAAATTTTTATTTGCAGCTTTAACTTTGATTACAAAACAATATTTTAATGTTGTATCGAAAATTGATAGAGAAAAGGATATTCTCAACCGTCAATTGAGAGAACAAACAACCAATAAGCGCTTATTAGCCATGAGTGACCTAGAGACAGGATCCGTTTATCTTTTGACAGCTGCCAATCAAAATGCATTGGTATTAGAGCAATTAGATGTTCATCCTAGTCAGCGATTTAATTCTGAAGTGGAAAAAGAACAGTTATCAGATGCTCTCATTGAAGCGCATCAGTTAGTCAGTATGACACAATTAAACAGTCAGGTACTTTCACAATTATCATCTACTTTTAATAATGTCTTAAATAATAACTTGAACGAAAACTTAACAGGTTTGAATATCATTTCGATTAATTTAGCGATTATTGCAGCAATTACTGGCTTTTTTGGGATGAATATTCCATTACCTCTTACAGAATCACGGAGTTCATGGTTAATTGTTATTGCTACTTCGGTCTTACTTTGGGTTATTATTGCTCAAATTTTAAAACGAGTTTTTAACTTAAGAAAA

SEQ ID NO: 10548 - protein, 305 aa, Streptococcus agalactiae; identical to SEQ ID NO: 6134

SEQ ID NO: 10549 - protein, 1374 aa, Streptococcus agalactiae
ATGTCTATTACAAAAGAATTTGATACCATCGCAGCTATTTCAACTCCTCTCGGTGAGGGAGCTATTGGTATTGTCCGTATATCTGGTACAGATGCCTTAAAGATAGCATCAAAAATTTATCGTGGAAAAGATCTATCCGCGATCCAATCCCATACCTTAAACTATGGTCATATTGTGGACCCAGATAAAAATGAAATCTTGGATGAAGTTATGTTAGGCGTTATGCTTGCTCCAAAAACATTCACAAGAGAAGATGTTATTGAAATTAATACGCATGGAGGAATTGCAGTTACTAACGAAATTCTTCAGTTAATTTTACGACATGGAGCACGAATGGCTGAACCAGGAGAATTTACTAAACGTGCTTTTTTAAATGGTCGAGTTGACTTGACTCAGGCTGAAGCTGTTATGGATCTTATTAGAGCTAAAACAGATAAAGCAATGGATATTGCCGTTAAGCAATTAGATGGTTCTTTAAAGACACTAATCAATAACACTCGACAAGAAATTTTAAATACTCTAGCCCAAGTTGAAGTTAATATCGATTACCCTGAATATGATGACGTTGAAGAGATGACTACAACACTGATGCGTGAAAAAACACAAGAGTTTCAAGCACTTATGGAAAATTTACTTCGAACTGCCAGACGTGGAAAAATTCTTCGAGAAGGACTTTCAACAGCAATCATTGGTCGTCCAAATGTCGGTAAATCCAGCTTACTAAATAACCTCTTACGTGAAGAAAAGGCGATTGTGACAGATATTGAAGGAACAACTCGTGATGTTATTGAAGAATACGTCAATATTAAAGGAGTTCCTTTAAAACTAGTTGACACTGCTGGTATCCGTGATACAGATGATATCGTTGAAAAAATTGGTGTTGAACGTTCAAAGAAGGCTTTAGAAGAAGCCGACCTTGTGTTGTTGGTTCTCAATAGTTCCGAACCACTAACATTACAAGACCGCTCCCTTCTAGAACTAAGTAAAGAAAGTAATCGTATCGTATTACTCAATAAAACGGATCTTCCTCAAAAAATAGAAGTTAACGAATTACCTAAAAATGTTATTCCAATTTCGGTTTTAGAAAATGAAAACATCGATAAAATCGAAGAACGTATTAACGATATTTTCTTTGACAACGCTGGTATGGTAGAACATGACGCTACTTATCTATCAAATGCTCGCCATATCTCACTAATTGAAAAAGCCGTTGATAGTTTAAAAGCTGTCAATGAGGGCTTGGAATTAGGAATGCCTGTTGATCTCTTACAAGTCGATATGACTAGAACTTGGGAAATACTTGGAGAAATCACTGGGGATGCAGCTCCAGATGAACTAATAACTCAGCTCTTCAGCCAATTCTGCTTAGGTAAA

SEQ ID NO: 10550 - protein, 458 aa, Streptococcus agalactiae
MSITKEFDTIAAISTPLGEGAIGIVRISGTDALKIASKIYRGKDLSAIQSHTLNYGHIVDPDKNEILDEVMLGVMLAPKTFTREDVIEINTHGGIAVTNEILQLILRHGARMAEPGEFTKRAFLNGRVDLTQAEAVMDLIRAKTDKAMDIAVKQLDGSLKTLINNTRQEILNTLAQVEVNIDYPEYDDVEEMTTTLMREKTQEFQALMENLLRTARRGKILREGLSTAIIGRPNVGKSSLLNNLLREEKAIVTDIEGTTRDVIEEYVNIKGVPLKLVDTAGIRDTDDIVEKIGVERSKKALEEADLVLLVLNSSEPLTLQDRSLLELSKESNRIVLLNKTDLPQKIEVNELPKNVIPISVLENENIDKIEERINDIFFDNAGMVEHDATYLSNARHISLIEKAVDSLKAVNEGLELGMPVDLLQVDMTRTWEILGEITGDAAPDELITQLFSQFCLGK

SEQ ID NO: 10551 - protein, 1908 aa, Streptococcus agalactiae
ATGATTATACTACAAGGAAACAAAATTGAGCGCTCATTTTCAGGTGATGTGCTTTTTGATAATATTAATATTCAAGTTGATCAACGTGATCGTATTGCTCTTGTTGGACGTAATGGTGCTGGCAAATCAACGCTTCTTAAAATTTTAGTTGGTGAAGAGGCTCCGACAAAAGGAGAAATAAATAAAAAGCGTGATTTGAGTTTGTCCTACTTGGCACAAGATAGTCGTTTTCAATCTGAAAATACAATTTTCCAAGAAATGTTACAAGTTTTTGACTCATTAAGAGAAGTAGAGAAGCGCTTACGTGAATTGGAATTACAAATGGGGCAAGTTTCAGGAAGTGACCTGGAACAATTGATGAAAACATACGATATTTTGTCAGAAGAGTTTCGTGAAAAAGGTGGCTTTACCTATGAATCAGATATAAAGGCTATTTTAAATGGTTTTAAGTTTAACAGTGATATGTGGGAAATGCCTATTAGTGAATTGTCTGGCGGGCAAAATACACGATTAGCGCTTGCAAAAATGCTACTTGAAAAGCCAGAATTACTTGTTTTAGATGAACCAACGAACCATTTAGACATTGATACGATTGCTTGGTTAGAAAATTATCTTGTAAATTATCAAGGAGCCCTTATTATTGTCAGCCATGACCGCTATTTTTTAGACAAGGTAGCTACAGTAACTTATGATTTAACGACACATTCTCTAGACCGCTATGTAGGCAATTATTCGAAATTTATGGATCTTAAGGCAGAGAAAATAGCGACTGAAGAAAAGAATTTTGAAAAACAACAAAAAGAAATTGCTAAGTTAGAAGATTTTGTACAACGTAACATTGTTAGGGCTTCAACCACTAAACGAGCACAAGCTCGTCGTAAACAATTAGAAAAGATGGAACGACTCGACAAACCGAATGTAGAGCAAAAATCAGCTAATATGACTTTTCATGCTGGGAAAGTCTCAGGGAATGTTGTTTTAACACTTGAGAATGCAGCTATTGGTTATGAAGGTGTTTCTTTATCGGAGCCAATCGATTTGGACGTGAAGAAATTTGATGCTATTGCAATTGTAGGTCCAAATGGTATCGGGAAATCAACTTTAATCAAATCGCTTGTTGGGCAAATTCCTTTTATCAAAGGAGAAGCAAAATTAGGAGCAAATGTCGAAACTGGGTATTACGATCAAAGTCAAAGTAATTTAACAAAAACGAATACTGTTTTAGATGAGTTATGGGATGCTTTTTCAACAACGCCAGAAGTTGAAATTAGAAACCGTTTAGGAGCTTTTCTTTTTTCAGGTGATGATGTTAAAAAATCAGTTTCAATGCTATCAGGTGGTGAACGAGCGCGTTTGCTATTGGCAAAATTATCTATGGAAAATAATAATTTTCTCATATTAGATGAGCCAACAAACCACTTGGATATTGATAGTAAAGAAGTCTTAGAAAATGCACTCATCGAATTTGATGGCACATTACTTTTTGTTAGTCATGATCGCTATTTTATTAATCGTGTGGCAACTAAGGTTCTCGAAATTTCTGATAAGGGAAGTACTCTCTATCTAGGAGATTATGATTATTACCTCACTAAGAAAGCCGAACTAGAGGAATTAGCACGTTTAAATGAAGAAGAAGTGAGTGCTTCAAAAACAGAAATCGACGTTACATCAGATTATGAGACACAAAAAGCAAATCAAAAGGAATTTAGGAAAATTACCCGTCGCGTTGTAGAAATTGAGGCGCGTTTGGAAGTTCTTGAAAATGATGAAAACAATATCAATGGTTTAATGTTAGAAACCAATGACATCGGAAAACTCTCTGATTTGCAAAAAGAGCTGGAATCAATCCAAGAAGAACAATTGCTATTAATGGAAGAGTGGGAAAATCTAAATATGAGACTAGATTTG

SEQ ID NO: 10552 - protein, 636 aa, Streptococcus agalactiae; identical to SEQ ID NO: 1688

SEQ ID NO: 10553 - protein, 966 aa, Streptococcus agalactiae
ATGGTAACTCTATCTAAAGAACAACACTTGGATATGTTTCTAAAAATGCAACGTATTCGTGATGTTGATATGAAATTTAACAAATTGGTTCGTCGTGGTTTCGTCCAAGGGATGACTCACTTCTCTGTTGGTGAAGAAGCTGCTTCAGTAGGTGCTATCCAAGATTTAACAGATTCAGATATCATTTTCTCAAACCACCGTGGACACGGACAAACTATTGCAAAAGGTATTGATATTGGTGGAATGTTTGCTGAACTTGCTGGTAAAGCAACAGGAACATCAAAAGGTCGTGGAGGCTCAATGCACTTAGCAAACCTTGAAAAAGGTAACTATGGAACAAACGGTATCGTCGGTGGAGGATATGCGCTTGCAGTAGGTGCTGCCCTTACACAGCAATATGAAGGAACTGATAACATTGTTATCGCCTTTTCGGGTGACTCAGCGACTAACGAGGGCTCATTCCATGAGTCAGTTAACTTAGCTGCTGTTTGGAACTTACCAGTTATCTTCTTTATCATCAACAACCGTTATGGTATCTCAACAGACATCACATACTCAACTAAAATTCCTCACCTTTACATGCGTGCTGATGCGTACGGTATTCCAGGGCATTATGTTGAAGATGGTAATGACCTTATGGCTGTTTACGAGAAAATGCATGAAGTTATCAATTACGTGCGTTCAGGAAATGGACCAGCTATTGTAGAGGTTGAATCATACCGTTGGTTTGGTCATTCAACTGCTGATGCTGGGGTATACCGTACTAAAGAAGAAGTTGATTCATGGAAAGCTAAAGATCCAGTAAAACGCTACCGTGCATACTTAATTGAAAATGAAATCGCTACTGAAGAAGAGCTTGCAGCTATTGAAGCACAAGTGATTAAAGAAGTTGAAGAAGGGGTTAAATTCGCTGAAGAAAGTCCATTCCCTGATATGTCTGTTGCATTTGAAGACGTTTTTGTGGAC

SEQ ID NO: 10554 - protein, 322 aa, Streptococcus agalactiae; identical to SEQ ID NO: 1690

SEQ ID NO: 10555 - protein, 858 aa, Streptococcus agalactiae
ATGTTAGAAGAGTTTGGTGCTAAGCGCGTTCGCGACACACCAATCTCAGAGGCTGCGATTGCAGGTTCAGCTATCGGTGCTGCACAAACAGGTTTGCGTCCTATCGTTGATTTGACATTCATGGATTTTGTAACAATCGCAATGGATGCTATCGTTAACCAAGGTGCTAAAACGAATTATATGTTTGGTGGAGGTCTATCAACTCCAGTTACTTTCCGTGTGGCATCAGGGTCAGGTATTGGTTCGGCTGCACAACACTCACAATCATTAGAAGCTTGGTTAACACACATTCCAGGTCTAAAAGTTGTTGCACCTGGTACTGTTAATGAGTCAAAAGCACTTTTGAAATCTTCTATTCTTGACAATAACCCAGTTATCTTCTTAGAGCCAAAAGCTCTCTATGGTAAGAAAGAAGAAGTTAATATGGACCCTGATTTCTATATTCCACTTGGTAAAGGGGATATTAAGCGTGAGGGGACTGACTTAACAATTGTTTCTTATGGCCGTATGCTTGAGCGTGTTATGCAAGCTGCTGAAGAAGTTGCTGAGGAAGGTATTAACGTTGAGGTTGTTGATCCACGTACACTTATTCCGCTTGATAAAGAATTAATTATCGATTCTGTTAAGAAAACTGGTAAATTGATCTTGGTTAACGATGCTTATAAAACTGGTGGTTTCACTGGTGAAATTGCAACTATGGTTGCTGAAAGTGAAGCATTTGATTACCTTGATCATCCTATCGTGCGTCTTGCAAGTGAAGATGTTCCAGTACCGTATTCACGTGTACTTGAACAAGGAATCTTACCTGATGTAGCAAAAATTAAAGATGCTATCTATAAAGTAGTTAACAAAGGTAAA

SEQ ID NO: 10556 - protein, 286 aa, Streptococcus agalactiae; identical to SEQ ID NO: 1692

SEQ ID NO: 10557 - protein, 1386 aa, Streptococcus agalactiae
ATGGCTGTCGAAATTATTATGCCTAAACTCGGGGTTGATATGCAAGAAGGCGAAATCCTTGAGTGGAAAAAACAGGTAGGTGATGTTGTTAATGAAGGTGACGTCCTACTTGAAATTATGTCAGATAAAACAAATATGGAGATTGAAGCAGAAGACTCAGGTGTTTTACTAAAAATCACACATGGGAATGGAGATGTTGTTCCTGTAACTGAGACAATTGGTTATATTGGTGCTGAAGGTGAAGAAGTAACAGAAGCATCTTCTTCTGAAAATACATCAGTTGAAGAAAACGCGACACAAGTAACTTCAGAACCAGAAAAAGTTGAAGAAACATCAGAACCAAGTGTGCCAGCAGCTACAAGTGGTGAAAAAGTACGTGCCACTCCTGCAGCTCGTAAATTAGCAAGAGAGATGTCTATTGACCTTGCACTAGTATCTGGAACAGGGGCAAATGGTCGCGTTCACAGAGAAGATGTTGAAAACTTCAAGGGTGCTCAACCACGTATTACACCATTGGCACGTCGAATTGCTGAAGATCAAGGAGTTGATATAGCAGAAATCACTGGCAGTGGTATTCGTGGTAAAATTGTTAAAAATGATGTTTTGGCTGCTATGTCACCGCAAGCAGCAGAGGCTCCTGTAGAAACTAAAGCTACACCAACAACAGAAGAAAAACAATTACCAGAAGGTGTTGAAGTCATTAAGATGTCTGCAATGCGTAAGGCTATTTCTAAAGGTATGACTAACTCTTACCTCACTGCTCCAAGCTTTACACTTAACTATGACATTGATATGACTGAAATGATGGCTCTTCGCAAGAAATTAATTGATCCAATCATGGCTAAAACAGGCTTGAAAGTCAGCTTTACTGATTTGATTGGAATGGCCGTTGTTAAGACATTGATGAAACCAGAGCATCGATACCTAAATGCTTCATTAATTAACGATGCACAAGAAATTGAGCTTCATAATTTTGTTAATATTGGAATCGCAGTTGGTCTTGATGATGGTTTGATTGTTCCTGTTGTTCACAATGCTGATCAAATGTCACTTTCTGACTTTGTTATAGCATCTAAAGATGTTATTAAGAAAACTCAAGAAGGTAAATTAAAATCAGCTGAAATGTCAGGTTCAACATTCTCAATTACTAACTTAGGTATGTTTGGTACTAAGACGTTTAACCCAATTATCAATCAACCGAACTCAGCAATCCTTGGAGTAGGAGCTACTATTCCGACTCCAACAGTGGTTGATGGTGAAATTGTAGCTCGACCAATTATGGCAATGTGTTTAACAATTGACCACCGTATTGTTGATGGAATGAATGGTGCTAAGTTTATGGTTGATCTTAAGAACTTAATGGAAAACCCATTTGGTTTACTTATT

SEQ ID NO: 10558 - protein, 462 aa, Streptococcus agalactiae
MAVEIIMPKLGVDMQEGEILEWKKQVGDVVNEGDVLLEIMSDKTNMEIEAEDSGVLLKITHGNGDVVPVTETIGYIGAEGEEVTEASSSENTSVEENATQVTSEPEKVEETSEPSVPAATSGEKVRATPAARKLAREMSIDLALVSGTGANGRVHREDVENFKGAQPRITPLARRIAEDQGVDIAEITGSGIRGKIVKNDVLAAMSPQAAEAPVETKATPTTEEKQLPEGVEVIKMSAMRKAISKGMTNSYLTAPSFTLNYDIDMTEMMALRKKLIDPIMAKTGLKVSFTDLIGMAVVKTLMKPEHRYLNASLINDAQEIELHNFVNIGIAVGLDDGLIVPVVHNADQMSLSDFVIASKDVIKKTQEGKLKSAEMSGSTFSITNLGMFGTKTFNPIINQPNSAILGVGATIPTPTVVDGEIVARPIMAMCLTIDHRIVDGMNGAKFMVDLKNLMENPFGLLI

SEQ ID NO: 10559 - protein, 1755 aa, Streptococcus agalactiae
ATGGCTTTTGATGTAATTATGCCAAAACTTGGGGTTGACATGCAAGAAGGCGAAATCCTTGAGTGGAAAAAAAATGAAGGTGACACCGTTAATGAAGGTGATGTCCTTCTTGAAATCATGTCTGATAAAACCAATATGGAAATCGAAGCAGAAGACACTGGTGTACTTTTAAAAATTGTACATCAGGCAGGAGATGTTGTTCCCGTCACTGAAGTGATTGCCTATATCGGAGAAGAAGGTGAAGAAGTAGGTACGTCATCACCTTCAGCTGATGCAACTATCACAGCTGAAGATGGTCAATCAGTTTCTGGACCTGCTGCTCCTTCACAAGAGACAGTTGCAGCAGCAACTCCTAAAGAAGAACTTGCAGCTGATGAGTACGATATCGTAGTCGTAGGTGGTGGGCCTGCAGGTTATTACGCAGCAATCCGCGGTGCTCAACTTGGAGGAAAAATTGCCATTGTTGAGAAAACTGAATTTGGCGGTACGTGTTTGAATGTTGGTTGTATCCCTACAAAAACATATCTTAAAAATGCTGAAATCCTAGATGGTTTGAAAGTAGCAGCTGGACGTGGTATCAACCTTGCTTCAACTAACTATGCAATTGATATGGATAAGACTGTTGCCTTTAAAAATTCTGTAGTTAAGACACTGACTGGTGGTGTACGTGGTCTCTTGAAAGCGAACAAAGTTGAAATTTTCAATGGACTTGGACAAGTAAACCCTGATAAGTCTGTTGTTATTGGCGATAAAGTTATCAAAGGTCGTAACGTCGTCCTTGCGACTGGTTCTAAGGTATCTCGTATTAATATTCCAGGTATTGAATCACCATTAGTATTAACATCAGATGATATTCTTGATTTACGTGAAATTCCTAAGTCACTTGCTGTTATGGGTGGTGGTGTCGTAGGTATTGAGCTTGGTCTTGTATGGGCTTCATATGGTGTTGACGTAACTGTTATTGAAATGGCTGATCGCATCATTCCAGCAATGGATAAAGAAGTATCGCTAGAACTTCAAAAAATCCTTGCTAAGAAGGGAATGAAGATTAAAACATCAGTTGGTGTTTCTGAAATTGTTGAAGCCAATAATCAATTAACGCTTAAATTAAACAACGGTGAAGAAGTTGTTGCTGATAAAGCTCTTCTTTCAATTGGACGTGTTCCACAAATGAATGGTCTTGAAAATCTTGAGCCTGAACTTGAGATGGAACGTGGACGTATTAAAGTTAATGCTTATCAAGAAACTTCAATTCCAGGTATCTATGCACCAGGTGATGTTAATGGAACTCGTATGTTAGCTCATGCTGCATACCGTATGGGTGAAGTAGCTGCTGAAAACGCACTCGGCGGTAATAAGCGTAAAGCACATCTAGATTTCACTCCAGCAGCTGTTTATACTCATCCTGAAGTAGCAATGGTGGGGATGACAGAAGAGCAAGCACGTGAACAATATGGTGACATATTAGTTGGTAAAAATAGCTTTACAGGCAATGGTCGTGCTATCGCTTCAAACGAAGCACATGGTTTTGTAAAAGTAATTGCTGAACCTAAGTATAAAGAGATTCTTGGTGTTCACATTATTGGTCCAGCTGCAGCGGAATTGATTAATGAAGCTTCTACGATTATGGAAAATGAGTTGACTGTCTACGATGTAGCACAATCTATCCATGGTCACCCAACATTCTCTGAAGTTATGTACGAAGCTTTCTTAGATGTTCTCGGTGAAGCTATTCACAACCCTCCAAAACGCAAA

SEQ ID NO: 10560 - protein, 585 aa, Streptococcus agalactiae; identical to SEQ ID NO: 1698

SEQ ID NO: 10561 - protein, 987 aa, Streptococcus agalactiae
ATGAAATATATCGTTAACACGTCTAATGATCCGGCTTACAATGTTGCTTTAGAAGCTTACGCCTTTCAAAAGTTGACAGATATCGATGAAATCTTTATTCTTTGGATTAATGAACCGGCTATCATTATTGGACGCCATCAAAATACAATTCAAGAAATTAACAAAGAGTTCATTGATAAAAATGGCATCCATGTTGTCCGTCGTTTGTCAGGAGGCGGAGCAGTTTATCATGACTTGAATAATTTAAACTACACTATTATTTCTAATAATACACAAGAAGGTGCCTTTGATTTCCAAACTTTTTCAAAACCAGTTATTGATACTCTTGCTAAATTAGGTGTTAAAGCAGAATTTACTGGTCGTAATGATTTAGAAATCAATGGACAAAAATTTGCAGGAAATGCTCAAGCTTATTACAAAGGTCGTATGATGCATCATGGTTGTCTTTTATTTGATGTTGATATGTCAGTCTTAGGGCAAGCACTCAAAGTATCTAAAGACAAAATTGAATCTAAAGGGATAAAATCTGTACGCGCACGTGTTACAAATATTGTTGACCATCTTTCAGATAAAATTACAGTACAAGAATTTAGCGATGCCATTTTAGCTCAAATGAAGGAAGAATATCCAGAGATGGATGAATATGTTTTGAGTGATGCCGAGTTATCAGAAATCCAAGCTATGCGCGATAATCAATTTGCTACATGGGATTGGACGTATGGTAAAGCACCTGAATACACCATTGAACGTGGTGTCCGCTATCCAGCTGGAAAAATTACGACTTATGCTAATGTTGAAAATTCAACGATAAAATCTGTCAAAATCTTTGGTGACTTCTTTGGAGTGAAACCTGTGGATGATATTGAAAAAATGTTGGAGGGTGTCCGCTACGATTACAAAGATGTTTTAGCAGCGCTTAAAACAGTTGATACAAGTCAATACTTCTCACGTATGACACCCGAAGAGATTACAAAAGCTATTGTAGAC

SEQ ID NO: 10562 - protein, 329 aa, Streptococcus agalactiae; identical to SEQ ID NO: 1700

SEQ ID NO: 10563 - protein, 783 aa, Streptococcus agalactiae
ATGACTTATACCTCACTAAAATCTCCTACTACCAAAGATTATAAATACACTCTTAATGTAGCTCATCTTTATGGTAACCTATTAAATACTTATGGCGATAACGGAAATATCTTAATGATGAAATATGTGGGAGAAAAACTAGGATGTCAAATGACATTTGATATCGTTTCATTAGAAGATAGATTTGATCCCAACTATTATCAGATGGCATTTTTTGGTGGTGGACAAGACTACGAACAAGCCATTGTTGCACGCGATCTTCCCAGTAAGAAAGAAGACATTAACAAATTCATTCAAAATAATGGTGTAGTACTTGCTATTTGTGGAGGTTTCCAACTTTTAGGACAATACTATATTCAAGCTAATGGAGAACGAATAGAGGGCATTGGCGTTATGGGACACTATACGCTAAACCAAAATAATAATCGCTATATTGGTGATATCAAGATTCACAACGATGAATTCAATGAAACATATTATGGCTTTGAGAATCATCAAGGACGTACCTTTTTATCAGAAGACGAAAAACCTTTAGGAACCGTCATTTATGGAAATGGGAATAACAAAGAAGATGGTACTGAAGGGGTTCATTATAAGAATGTTTTTGGGTCATACTTTCACGGTCCAATCCTTTCTCGTAATGCTAATCTAGCTTACCGTCTTGTGGCAACTGCCCTCCGTAACAAATACGGTAAAGAGATTGTCCTCCCTAGTTATGAAGAAATTTTATCTTTAGAGATTCCTGAAGAATACGGAGACGTTAAATCAAAAGCAGATTTTGAA

SEQ ID NO: 10564 - protein, 261 aa, Streptococcus agalactiae
MTYTSLKSPTTKDYKYTLNVAHLYGNLLNTYGDNGNILMMKYVGEKLGCQMTFDIVSLEDRFDPNYYQMAFFGGGQDYEQAIVARDLPSKKEDINKFIQNNGVVLAICGGFQLLGQYYIQANGERIEGIGVMGHYTLNQNNNRYIGDIKIHNDEFNETYYGFENHQGRTFLSEDEKPLGTVIYGNGNNKEDGTEGVHYKNVFGSYFHGPILSRNANLAYRLVATALRNKYGKEIVLPSYEEILSLEIPEEYGDVKSKADFE

SEQ ID NO: 10565 - protein, 1278 aa, Streptococcus agalactiae
ATGGGACGTGGCTCTACTTATCCGGGTAGTTTAGCACTCAAATTCGATAAAGATATACTAGATACAATTGCCAAAGATTATGAAATTGTAGTTGTGACTGGTACTAACGGTAAAACCTTAACAACAGCTTTAACAGTTGGTATTTTAAAGGAAGCCTTCGGTCAGGTGGTAACCAACCCAAGTGGAGCAAATATGATTACAGGTATTGTTTCGACCTTCCTAACAGCTAAGAAAAGTAAATCTGGTAAAAAAATAGCTGTCCTTGAAATAGACGAAGCGAGTTTACCCCGTATTACACAGTATATAAAGCCTAGTTTGTTCGTCTTTACCAATATTTTCCGTGATCAAATGGACCGTTATGGCGAAATCTACACAACTTATCAAATGATTTTAGATGGAGCTGCTAACGCTCCGCAAGCTACTATCTTAGCTAACGGTGACAGTCCACTTTTTAATTCTAAAAGCGTGACTAACCCTGTGCAATTCTATGGATTTAATACCGACAAACATGAGCCACGATTAGCACACTATAATACTGAGGGTATTCTCTGTCCAAAGTGTCAAGCAATTTTAACTTATCGATTGAACACATATGCCAACCTTGGTGACTACACTTGTCCTAATTGTGATTTTGAACGTCCAAACCTTGATTATGCCTTAACAAGGCTAACACATCTGACAAATACTTCATCAGGTTTCGTTATTGATGGCCAACAATATAATATCAACGTGGGTGGCCTTTATAATATTTACAATGCTTTGGCGGCAGTATCTGTTGCTGAATATTTTGGTGTAGAACCAAGTCAAATTAAGGATGGATTTGATAAAAGCCGTGCCGTTTTTGGTCGTCAAGAAACCTTTACAATTGGAAATAAAAAATGTACTTTAGTTCTGATTAAAAATCCGGTAGGAGCTAGTCAAGCTCTTGATATGATTAAACTTGCTCCATACCCGTTCTCTCTCTCAGTACTACTGAATGCCAATTATGCTGACGGTATTGATACTTCTTGGATTTGGGACGCTAATTTTGAAACTATTCTCACGATGAATATCCCAGAAATATTTGCTGGTGGTGTTCGCCACTCTGAAATTGCTCGTCGCTTACGTGTAACTGGTTATGATGAGAAACGCATAAAACAAGCTGATAAACTGCAAGATATTATGACAATGATTGAGCAGCAAGAGACTGAGCATGCTTATATTTTAGCAACATATACAGCTATGCTGGAGTTTCGTGAAATTCTTGCTAACCACAACGCTATCAGAAAGGAGATGAAT

SEQ ID NO: 10566 - protein, 426 aa, Streptococcus agalactiae
MGRGSTYPGSLALKFDKDILDTIAKDYEIVVVTGTNGKTLTTALTVGILKEAFGQVVTNPSGANMITGIVSTFLTAKKSKSGKKIAVLEIDEASLPRITQYIKPSLFVFTNIFRDQMDRYGEIYTTYQMILDGAANAPQATILANGDSPLFNSKSVTNPVQFYGFNTDKHEPRLAHYNTEGILCPKCQAILTYRLNTYANLGDYTCPNCDFERPNLDYALTRLTHLTNTSSGFVIDGQQYNINVGGLYNIYNALAAVSVAEYFGVEPSQIKDGFDKSRAVFGRQETFTIGNKKCTLVLIKNPVGASQALDMIKLAPYPFSLSVLLNANYADGIDTSWIWDANFETILTMNIPEIFAGGVRHSEIARRLRVTGYDEKRIKQADKLQDIMTMIEQQETEHAYILATYTAMLEFREILANHNAIRKEMN

SEQ ID NO: 10567 - protein, 848 aa, Streptococcus agalactiae
ATGGATATTTTTTCAGCTATTGATTCAAAGTTTTGGGCGAGCATTATGGAAAATCATGGATGATCCTTATTCATCTCATGGATATTATCATAGTAGCTGTTCTGATTTATAAATTTATCAAAGCGCTAGCAGGCACAAAAATTATGTCCTTAATTCAGGGCGTTATTTTGTTTATCATCATTAGATTTGTGTCAGAATGGATAGGGCTAACAACGATTACATTTTTGATGAATCAGATTGTTACTTATGGTGTAATTGCAGGTGTTGTCATCTTTGCTCCAGAGATTAGAACAGGTCTCGAAAAATTTGGGCGAACACCACAACTATTTACGCAACGTTCTCAATTAAGCAGTGATGAAAAGCTAGTAGATGCCCTTGTTAAGGCAGTTGCTTATATGAGTCCGCGTAAAATAGGAGCCTTGATTTCAATTGAACGTACCCAAACTTTGCAAGAGTATATAGCTACAGGTATCCCATTAGATGCAGATATTTCCAGTGAATTGTTAATTAATATTTTCATTCCTAATACACCACTGCATGATGGTGCTGTTATTGTAAAAGATAAAAAAATTGCTACAGCATGCTCGTACTTACCTCTATCAGAATCATCTTCGATTTCAAAAGAATTTGGAACACGCCACAGAGCAGCGATTGGTCTATCAGAGAATTCAGATGCACTAACAGTTATTGTTTCTGAAGAGACTGGTGGTATTTCTGTTGCTTTGAAAGGTGAATTTTTACATGATCTTTCTAAAGATAGCTTTGAAGCAATTCTGAGAACTCAGTTGATTCAAAATCAAGAGGAAAACTCAAAATTAGCTTGGTATAATCAACTATTGAGGAGGAAG

SEQ ID NO: 10568 - protein, 283 aa, Streptococcus agalactiae; identical to SEQ ID NO: 6154

SEQ ID NO: 10569 - protein, 658 aa, Streptococcus agalactiae
ATGAAAAAATTTTTTACAAATAAATTTTGGTTAGGCGTTGTCTCACTCTTTCTGGCTATTTTATTATTTTTAACGGCAACTGCAACAAGTATGAACCATCAAGACAATAGTAAGATTGCAGGAGCGTCTGAGACATATACACATACCCTAACAGATGTGCCAATAGACATCAAATACGATAGTGATGATTACTTTATTAGTGGATATTCTTATGGGGCAGATGTCTATATGTCATCGGTTAATCGTGTTAAGTTAGATTCTGAAATAAATGAGGATACACGAAAATTTAAAGTAGTCGCCGATTTGACAAATATGAAACCAGGGACTCACAAAGTCCCACTAAAGGTAGTAAATTTGCCATCTGGTGTAAATGCTACGGTTTCTCCAACAACAATTACAGTAACTATGGGTAAAAAGAAAACAAAAGAGTTTCCGGTTTATGGACATGTTAATGATAAGCAAATTAAAGCTGGTTATGCAGTCGATAAGATGTCAGTTGATGTGTCAAAAGTTAAAGTTACTAGTGATGAATCTATTATAGATCGTATTGACCATGTCGCTGCCTATCCCTGATGAAAGTTCGATGATGATTTACGACAGGTACTTTACAGCTGTTACAGCAGATGGTACAGTATTTAGCAGTATTATNNNNNTTAAT

SEQ ID NO: 10570 - protein, 221 aa, Streptococcus agalactiae
  VARIANT 218, 219, 220: Xaa = Any Amino Acid
MKKFFTNKFWLGVVSLFLAILLFLTATATSMNHQDNSKIAGASETYTHTLTDVPIDIKYDSDDYFISGYSYGADVYMSSVNRVKLDSEINEDTRKFKVVADLTNMKPGTHKVPLKVVNLPSGVNATVSPTTITVTMGKKKTKEFPVYGHVNDKQIKAGYAVDKMSVDVSKVKVTSDESIIDRIDHVAAISLMISSDDDFTDRYFTAVTADGTVFSSIXXXN

SEQ ID NO: 10571 - protein, 372 aa, Streptococcus agalactiae
ATGGTTAAAAGAGAAGATGTGATTTTAAATGCAACTGAAAATATGGTTCACCATAAATTAAAAAATGATCCAAGTGGCCATGACTGGTTTCATATTGTTAGAGTAAGAAATCTTGCGGTAGAATTAGCACACAAAGAAGGGGCTAATACCTTTATTTGTCAAATGGCTGCACTTTTGCATGATATTATTGATGACAAAATCTGCCAAGATAGTAAGCAAGCGTCGTATGAATTGACTCAATGGTTATATAGTCAAGATCTTGCCATAGCAGAAGTAGAACATATCCTTGATATTCTTGAAAATATTTCATTCAAAGCAGGAACTGGATTGACTATGAAAACATTGGAAGGTCAAATTGTTCANNNNNTTAAT

SEQ ID NO: 10572 - protein, 124 aa, Streptococcus agalactiae
  VARIANT 121, 122, 123: Xaa = Any Amino Acid
MVKREDVILNATENMVHHKLKNDPSGHDWFHIVRVRNLAVELAHKEGANTFICQMAALLHDIIDDKICQDSKQASYELTQWLYSQDLAIAEVEHILDILENISFKAGTGLTMKTLEGQIVXXXN

SEQ ID NO: 10573 - protein, 955 aa, Streptococcus agalactiae
ATGAAAAAATTTTTAAAATAAATTTTGGTTAGGCGTTGTCTCACTCTTTCTGGCTATTTTATTATTTTTAACGGCAACTGCAACAAGTATGAACCATCAAGACAATAGTAAGATTGCAGGAGCGTCTGAGACATATACACATACCCTAACAGATGTGCCAATAGACATCAAATACGATAGTGATGATTACTTTATTAGTGGATATTCTTATGGGGCAGATGTCTATATGTCATCGGTTAATCGTGTTAAGTTAGATTCTGAAATAAATGAGGATACACGAAAATTTAAAGTAGTCGCCGATTTGACAAATATGAAACCAGGGACTCACAAAGTCCCACTAAAGGTAGTAAATTTGCCATCTGGTGTAAATGCTACGGTTTCTCCAACAACAATTACAGTAACTATGGGTAAAAAGAAAACAAAAGAGTTTCCGGTTTATGGACATGTTAATGATAAGCAAATTAAAGCTGGTTATGCAGTCGATAAGATGTCAGTTGATGTGTCAAAAGTTAAAGTTACTAGTGATGAATCTATTATAGATCGTATTGACCATGTCGCTGCCAATATCCCTGATGATAAAGTTCTTGATGATGATTTTAACAAGACAGTTACTTTACAAGCTGTAACAGCAGATGGTACAGTATTAGCAAGTATTATTCACCCTTCTAAAGCAACTTTATCTGTCAAAGTAAAAAAATTGACCAAGACAGTACCGATTAATTTGATACCAGTAGGACAATTCAGCGATAGTATTTCAAAAATTAACTACAAGTTGAGTCAAGAAAAAGCAGTAATTTCAGGAACAAAAGAGGCTTTAGAAGCTATTTCTGTTATTAATGCTGAGGTAGATATTTCAGACGTAACTAAAAATACAGAAAAGAAAATTAATCTTTCTGCAAACAATGTTTCAGTTGATCCTGCTCAAGTAACAGTTCAATTGACAACTACTAAAAAA

SEQ ID NO: 10574 - protein, 319 aa, Streptococcus agalactiae; identical to SEQ ID NO: 6156

SEQ ID NO: 10575 - protein, 1350 aa, Streptococcus agalactiae
ATGGGAAAATATTTTGGTACAGATGGTGTTCGCGGTGAAGCTAATGTTGAACTGACGCCAGAATTGGCTTTTAAATTAGGACGTTTTGGAGGATATGTTCTAAGTCAACACGAAACTGATCGTCCGAGAGTTTTTGTAGCTCGTGATACTCGTATTTCTGGTGAAATGCTGGAATCTGCTTTGATTGCTGGTCTACTTTCAGTAGGTATTGAGGTTTATAAACTTGGTGTTTTAGCCACTCCTGGAGTGTCTTACCTTGTCCGTACAGAAAAAGCTAGTGCAGGGGTTATGATTTCAGCAAGCCACAATCCAGCACTTGATAATGGTATTAAGTTCTTTGGTAGTGATGGTTTTAAACTTGATGATGATCGTGAATTAGAAATTGAAGCTTTACTTGATGCGAAGGAAGACACTTTACCACGTCCATCAGCACAAGGTTTAGGTACTTTAGTAGATTATCCTGAAGGACTTCGGAAATATGAGAAGTTTATGGAATCAACTGGTATTGATTTAGAAGGTATGAAGGTTGCGTTGGATACAGCAAATGGAGCAGCAACAGCCTCAGCTCGGAATATCTTTTTAGACTTGAATGCTGATATAAGTGTTATTGGTGATCAACCAGATGGTTTGAATATCAATGATGGTGTTGGTTCGACACATCCTGAGCAATTACAAAGTTTAGTTAGAGAAAATGGTTCCGACATCGGTCTAGCTTTTGATGGTGATAGTGATCGTTTGATCGCTGTTGATGAAAATGGAGAGATTGTAGATGGTGATAAAATTATGTTTATCATTGGGAAATATCTCTCTGATAAAGGGCAGCTTGCTCAGAATACAATCGTAACAACGGTTATGTCAAATCTCGGCTTTCATAAAGCGCTCGACCGTGAAGGAATTCATAAAGCGATTACCGCTGTAGGAGACCGCTACGTGGTTGAAGAAATGCGTAAATCAGGATATAATCTTGGCGGAGAGCAATCAGGCCACGTTATTATCATGGATTACAATACTACAGGGGATGGACAATTAACAGCCATCCAATTGACTAAGGTCATGAAAGAAACTGGTAAGAAATTATCAGAGTTAGCTAGTGAAGTGACGATTTATCCTCAAAAATTAGTAAATATTCGTGTTGAAAATAACATGAAAGATAAAGCGATGGAAGTTCCTGCAATTGCGGAAATTATTGCTAAAATGGAAGAAGAGATGGATGGCAATGGTCGTATTCTAGTACGTCCTAGTGGTACTGAGCCTCTTCTTAGAGTTATGGCAGAAGCGCCAACAAATGAAGCGGTTGATTATTATGTTGATACTATCGCAGATGTCGTTCGTACAGAAATTGGTTTAGAT

SEQ ID NO: 10576 - protein, 450 aa, Streptococcus agalactiae; identical to SEQ ID NO: 6158

SEQ ID NO: 10577 - protein, 369 aa, Streptococcus agalactiae
ATGACTAAAGAAGCAGAATTATTATGGGCTAAACACAAGTATTTAGTCTTAAGTAAATCTCAGAAAATTTATTTGGATATTAGACAAACTTTGAAATCACCAAATTGTACCGTTTTAGACGTTCAGTCACTCATTGACCAAGCAGTGCTTTTAGAAGAATCACCATCACAAGTGACTAATGCTTATATGCATATATGGGGCTATTTTAAAAATAAGGCAGAGCGTCAAGAAAAAGAAGAATTTTTAACCTTGCTGGAAAAATACAGGAAAACAGGTTATCAACGAAGAAAACTGTTAGCTTTTCTAAAACAGCTATTAGCTAAATACCCAAATTCTTATTTACAAAACTCTTCTATTTTCGAAGAAGAG

SEQ ID NO: 10578 - protein, 123 aa, Streptococcus agalactiae
MTKEAELLWAKHKYLVLSKSQKIYLDIRQTLKSPNCTVLDVQSLIDQAVLLEESPSQVTNAYMHIWGYFKNKAERQEKEEFLTLLEKYRKTGYQRRKLLAFLKQLLAKYPNSYLQNSSIFEEE

SEQ ID NO: 10579 - protein, 378 aa, Streptococcus agalactiae
ATGAGATTATGGCATCAAGATATTATTGAGTTATTGCCTAGGCAGCAACTTTTAGGACAGCATAGAGAGTGTTGTGCATTGAGAGGGAATGGGTGGGGGAGAAAACATGAGACTGTTGATTATGTTTTTCGATATTCACCTTATAGGTTATTTGCATATCATCAATTAGTTATGGAAGAAATGATGGAGCGTGGGTATCGTGTATCTAAAGAATGGCTAATTGCAGAATATAGGGGAATGAAGTGCCCAAGATATGATACACTTAATCCTGTTGACTTGGAGACACCTATCTATCCCGAGCACAATCAAGACTATCTACAAGAATGTCTATGGAATTTAAAAGCAAAAGGAATTGACCTTCCTATAAATAAGATAAAA

SEQ ID NO: 10580 - protein, 126 aa, Streptococcus agalactiae; identical to SEQ ID NO: 6162

SEQ ID NO: 10581 - protein, 1128 aa, Streptococcus agalactiae
ATGTTAAAGAAACCAACCTCAGCATATGTACACATTCCATTTTGTACCCAAATATGTTATTATTGTGATTTTTCAAAAGTTTTTATTAAAAATCAGCCTGTAGACGCTTATCTTCAGGCTCTTATCCGTGAATTTCGGTCTTATGATATTACAGAATTGCGCACCTTATATATTGGAGGAGGGACACCTACATCTATAAGCGCTGTGCAACTGGACTATTTATTGACGGAGTTAAGTAGAGATTTAAACTTAAATACTTTAGAGGAGTTCACTATCGAAGCTAATCCAGGAGATTTAACCGTTGATAAAATAGAGGTGCTTCAAAAGTCAGCTGTCAATAGAGTTTCTCTAGGAGTTCAGACCTTTAATGATAAACATTTAAAGCGTATTGGACGCAGTCACAATGAGGCACAAATTTATTCTACAATTGATGCTCTTAAAACAGCTGGTTTTCAAAATATCTCTATTGACCTAATTTATGCCTTACCTGGACAAACGATGGATGATGTTAGAAGTAATGTAGCCAAAGCTCTCTCTCTAAATATTCCTCATTTGAGTTTATATAGTTTAATTTTAGAACACCATACTGTATTTATGAATAAAATGCGTCGTGGGAAATTACATTTGCCAACAGAAGATTTAGAAGCCGAGATGTTTGAATATATCATTTCTGAAATGGAAAGAAATGGTTTTGAGCATTATGAAATTTCTAATTTTACAAAGCCGGGTTTTGAAAGTCGTCATAATTTGATGTACTGGGATAATGTAGAATATTATGGTGTTGGTGCAGGCGCTTCTGGTTATCTTGATGGTATTCGTTATCGTAATAGAGGGCCAATACAACATTATCTAAAGGGGGTTTCAGAAGGTAATGCAAGGTTATCTGAAGAAGTATTATCAAAAAATGAAATGATGGAAGAGGAGCTTTTCCTCGGTCTTCGTAAAAAAGAGGGTGTTTCCATCGGAAAATTTGAACAAAAATTTGGAACGTCCTTTGAGAAACGTTACGGTCAGATTGTTCAAGAACTCCAAAGTGATGGGCTTTTGAAAGAAAATAATGGTTTTATCCAGATGACTAAAAAAGGTCTCTTCTTAGGAGATACGGTTGCCGAGAAATTTATTGTGGAG

SEQ ID NO: 10582 - protein, 376 aa, Streptococcus agalactiae
MLKKPTSAYVHIPFCTQICYYCDFSKVFIKNQPVDAYLQALIREFRSYDITELRTLYIGGGTPTSISAVQLDYLLTELSRDLNLNTLEEFTIEANPGDLTVDKIEVLQKSAVNRVSLGVQTFNDKHLKRIGRSHNEAQIYSTIDALKTAGFQNISIDLIYALPGQTMDDVRSNVAKALSLNIPHLSLYSLILEHHTVFMNKMRRGKLHLPTEDLEAEMFEYIISEMERNGFEHYEISNFTKPGFESRHNLMYWDNVEYYGVGAGASGYLDGIRYRNRGPIQHYLKGVSEGNARLSEEVLSKNEMMEEELFLGLRKKEGVSIGKFEQKFGTSFEKRYGQIVQELQSDGLLKENNGFIQMTKKGLFLGDTVAEKFIVE

SEQ ID NO: 10583 - protein, 735 aa, Streptococcus agalactiae
ATGGGTTTATTATATCGAGAAACTTACGAAGTGCCTTTTTATGAATCAGACACTAATCATTATATGAAATTACCGCAGTTGTTGGCTTTAGCGTTACAAATTTCAGCCAAACAATCTTTAAAATTAGGAATAGGCGATGACATCGTTTTTAAAAGATACGGATTGGTTTGGGTCGTTACAGATTATATTATTGATATTGAGCGTTTACCCAAGCATGCTGAAAAGATAGTCATTGAGACTGAAGCCAAAGCTCATAATAAATTATTGTGTTACCGCTATTTTTATATTTATGGTGAAGACGGGCAAAAAATAATAACGATTTCATCTGCTTTTGTCTTAATGGATTTTAAAACACGGAAGATTCATCCTGTTCTTGATGATATTACTTCAATTTACCAATCCCAAAGAATCAAAAAAGTTATTCGAGGGCCGAAATATCATCCCATTGGAGATAGTAAAGTTAAACAATACCATGTTCGTTATTTTGATTTAGATATGAATGGACATGTTAATAATAGTAAGTATCTAGAATGGATGTATGATGTGTTGGACTTAGATTTTCTAAGTAGCCACATTCCTAAAAAAATTGATTTAAAATATATTAAGGAAATTCAATATGGAACGGATATTAAGTCTCATTGGTATCAAGATGGTCTTGTGACACGTCATGATATTATTGGTGGCGATGCTATTCATGCTCAAGCTAGGATTGAATGGCAGGAAAAAAAGGAGGAT

SEQ ID NO: 10584 - protein, 245 aa, Streptococcus agalactiae; identical to SEQ ID NO: 1716

SEQ ID NO: 10585 - protein, 768 aa, Streptococcus agalactiae
ATGGCTTATAAAGGATATCTTATTGATTTAGATGGTACTATTTACAAAGGGAAAAGTCGTATCCCAGCAGGAGAGCGTTTTATCGAACGTTTGCAAGAAAAAGGCATTCCTTATATGTTAGTAACTAATAATACGACTCGTACACCAGAAAGCGTTCAGGAAATGCTTCGAGGCTTCAATGTTGAAACACCACTTGAAACAATCTATACCGCAACTATGGCTACGGTTGACTATATGAATGATATGAACCGTGGAAAAACAGCTTACGTTATTGGTGAAGAAGGGCTTAAAAAAGCTATTGCAGATGCAGGTTATGTGGAGGATACAAAAAATCCAGCCTATGTGGTTGTTGGTTTAGATTGGAATGTTACTTATGATAAATTGGCAACTGCTACGTTAGCAATTCAAAATGGTGCTTTATTTATTGGAACCAATCCAGATTTGAATATTCCTACTGAACGTGGTTTATTACCCGGTGCTGGCTCCTTAAATGCTTTATTAGAAGCCGCAACGCGTATAAAACCAGTCTTTATTGGAAAGCCAAATGCCATCATTATGAATAAGGCACTTGAAATTTTAAATATTCCTAGAAATCAAGCAGTCATGGTCGGTGATAATTATTTGACAGATATCATGGCTGGTATTAATAATGATATTGATACTTTGTTAGTAACAACGGGTTTTACAACAGTTGAAGAAGTACCAGATTTACCAATTCAACCAAGTTATGTTTTAGCAAGTTTAGATGAATGGACATTTAATGAAGGA

SEQ ID NO: 10586 - protein, 256 aa, Streptococcus agalactiae; identical to SEQ ID NO: 1718

SEQ ID NO: 10587 - protein, 669 aa, Streptococcus agalactiae
ATGAATGGACATTTAATGAAGGATAAGTTATTAGTAGTTTTAACTTGGATTTGGATTATATCGTTAGCAACTCTAGCTACAATTTATATTGCTTGGTTGATCTATCCTATAGAAATTCAGTTTTTAAAATTAGAAAAGGTTGTGTATTTAAAGGCTGAAACAATTTATTATAATTTTAATAAGTTGATGATATATCTGACTCATCCTTTTATCTCTGATTTAAATATGCCCAGCTTTCCTTCTTCAGAGGATGGTTTAAAGCATTTTGCGGATGTAAAATATCTTTTTACTCTAGCGCATGGGCTTTTTGTTATACTAACTTTTCCAGTTATTTATTTTTTAAGACGTGGATGGAAGCAAAAAAGTATCTTTCTATATGAAGGCTTTTTCAAGATAGCTATTATGTTGCCTATTTTTATTGTAGTATGTGCCTTTCTGTTGGGTTTTGACCAGTTTTTCACTCTATTTCATGAGGTGCTTTTTCCAGGAGATTCTACTTGGCAATTTAATCCTCTAACGGATCCAGTAATTTGGATACTTCCTGAAACTTTTTTCCTCCATTGTTTCATCATTTTTTTGTTAATCTATGAAACAATAACTATAATTCTTTTGATAATAGGTAGAAAACATTTAAAATTAAGAAAATATAAAAACAAAATGCAAGCCTTA

SEQ ID NO: 10588 - protein, 223 aa, Streptococcus agalactiae; identical to SEQ ID NO: 1720

SEQ ID NO: 10589 - protein, 4108 aa, Streptococcus agalactiae
ATGAATAAGCCATATTCAATAGGCCTTGACATCGGTACTAATTCCGTCGGATGGAGCATTATTACAGATGATTATAAAGTACCTGCTAAGAAGATGAGAGTTTTAGGGAACACTGATAAAGAATATATTAAGAAGAATCTCATAGGTGCTCTGCTTTTTGATGGCGGGAATACTGCTGCAGATAGACGCTTGAAGCGAACTGCTCGTCGTCGTTATACACGTCGTAGAAATCGTATTCTATATTTACAAGAAATTTTTGCAGAGGAAATGAGTAAAGTTGATGATAGTTTCTTTCATCGATTAGAGGATTCTTTTCTAGTTGAGGAAGATAAGAGAGGGAGCAAGTATCTATCTTTGCAACATTGCAGGAAGAGAAAGATTATCATGAAAAATTTTCGACAATCTATCATTTGAGAAAAGAATTAGCTGACAAGAAAGAAAAAGCAGACCTTCGTCTTATTTATATTGCTCTAGCTCATATCATTAAATTTAGAGGGCATTTCCTAATTGAGGATGATAGCTTTGATGTCAGGAATACAGACATTTCAAAACAATATCAAGATTTTTTAGAAATCTTTAATACAACTTTTGAAAATAATGATTTGTTATCTCAAAACGTTGACGTAGAGGCAATACTAACAGATAAGATTAGCAAGTCTGCGAAGAAAGATCGTATTTTAGCGCAGTATCCTAACCAAAAATCTACTGGCATTTTTGCAGAATTTTTGAAATTGATTGTCGGAAATCAAGCTGACTTCAAGAAATATTTCAATTTGGAGGATAAAACGCCGCTTCAATTCGCTAAGGATAGCTACGATGAAGATTTAGAAAATCTTCTTGGACAGATTGGTGATGAATTTGCAGACTTATTCTCAGCAGCGAAAAAGTTATATGATAGTGTCCTTTTGTCTGGCATTCTTACAGTAATCGACCTCAGTACCAAGGCGCCACTTTCAGCTTCTATGATTCAGCGTTATGATGAACATAGAGAGGACTTGAAACAGTTAAAACAATTCGTAAAAGCTTCATTGCCGGAAAAATATCAAGAAATATTTGCTGATTCATCAAAAGATGGCTACGCTGGTTATATTGAAGGTAAAACTAATCAAGAAGCTTTTTATAAATACCTGTCAAAATTGTTGACCAAGCAAGAAGATAGCGAGAATTTTCTTGAAAAAATCAAGAATGAAGATTTCTTGAGAAAACAAAGGACCTTTGATAATGGCTCAATTCCACACCAAGTCCATTTGACAGAGCTGAAAGCTATTATCCGCCGTCAATCAGAATACTATCCCTTCTTGAAAGAGAATCAAGATAGGATTGAAAAAATCCTTACCTTTAGAATTCCTTATTATATCGGGCCACTAGCACGTGAGAAGAGTGATTTTGCATGGATGACTCGCAAAACAGATGACAGTATTCGACCTTGGAATTTTGAAGACTTGGTTGATAAAGAAAAATCTGCGGAAGCTTTTATCCATCGTATGACCAACAATGATTTTTATCTTCCTGAAGAAAAAGTTTTACCAAAGCATAGTCTTATTTATGAAAAATTTACGGTCTATAATGAGTTGACTAAGGTTAGATATAAAAATGAGCAAGGTGAGACTTATTTTTTTGATAGCAATATTAAACAAGAAATCTTTGATGGAGTATTCAAGGAACATCGTAAGGTATCCAAGAAGAAGTTGCTAGATTTTCTGGCTAAAGAATATGAGGAGTTTAGGATAGTAGATGTTATTGGTCTAGATAAAGAAAATAAAGCTTTCAACGCCTCATTGGGAACTTACCACGATCTCGAAAAAATACTAGACAAAGATTTTCTAGATAATCCAGATAATGAGTCTATTCTGGAAGATATCGTCCAAACTCTAACATTATTTGAAGACAGAGAAATGATTAAGAAGCGTCTTGAAAACTATAAAGATCTTTTTACAGAGTCACAACTAAAAAAACTCTATCGTCGTCACTATACTGGCTGGGGACGATTGTCTGCTAAGTTAATCAATGGTATTCGAGATAAAGAGAGTCAAAAAACAATCTTGGACTATCTTATTGATGATGGTAGATCTAATCGCAACTTTATGCAGTTGATAAATGATGATGGTCTATCTTTCAAATCAATTATCAGTAAGGCACAGGCTGGTAGTCATTCAGATAATCTAAAAGAAGTTGTAGGTGAGCTTGCAGGTAGCCCTGCTATTAAAAAGGGAATTCTACAAAGTTTGAAAATTGTTGATGAGCTTGTTAAAGTCATGGGATACGAACCTGAACAAATTGTGGTTGAGATGGCGCGTGAGAATCAAACAACAAATCAAGGTCGTCGTAACTCTCGACAACGCTATAAACTTCTTGATGATGGCGTTAGAATCTAGCTAGTGACTTGAATGGCAATATTTTGAAAGAATATCCTACGGATAATCAAGCGTTGCAAAATGAAAGACTTTTCCTTTACTACTTACAAAACGGAAGAGATATGTATACAGGGGAAGCTCTAGATATTGACAATTTAAGTCAATATGATATTGACCACATTATTCCTCAAGCTTTCATAAAAGATGATTCTATTGATAATCGTGTTTTGGTATCATCTGCTAAAAATCGTGGAAAGTCAGATGATGTTCCTAGCCTTGAAATTGTAAAAGATTGTAAAGTTTTCTGGAAAAAATTACTTGATGCTAAGTTAATGAGTCAGCGTAAGTATGATAATTTGACTAAGGCAGAGCGCGGAGGCCTAACTTCCGATGATAAGGCAAGATTTATCCAACGTCAGTTGGTTGAGACACGACAAATTACCAAGCATGTTGCCCGTATCTTGGATGAACGCTTTAATAATGAGCTTGATAGTAAAGGTAGAAGGATCCGCAAAGTTAAAATTGTAACCTTGAAGTCAAATTTGGTTTCAAATTTCCGAAAAGAATTTGGATTCTATAAAATTCGTGAAGTTAACAATTATCACCATGCACATGATGCCTATCTTAATGCAGTAGTTGCTAAAGCTATTCTAACCAAATATCCTCAGTTAGAGCCAGAATTTGTCTACGGCGACTATCCAAAATATAATAGTTACAAAACGCGTAAATCCGCTACAGAAAAGCTATTTTTCTATTCAAATATTATGAACTTCTTTAAAACTAAGGTAACTTTAGCGGATGGAACCGTTGTTGTAAAAGATGATATTGAAGTTAATAATGATACGGGTGAAATTGTTTGGGATAAAAAGAAACACTTTGCGACAGTTAGAAAAGTCTTGTCATACCCTCAGAACAATATCGTGAAGAAGACAGAGATTCAGACAGGTGGTTTCTCTAAGGAATCAATCTTGGCGCATGGTAACTCAGATAAGTTGATTCCAAGAAAAACGAAGGATATTTATTTAGATCCTAAGAAATATGGAGGTTTTGATAGTCCGATAGTAGCTTACTCTGTTTTAGTTGTAGCTGATATCAAAAAGGGTAAAGCACAAAAACTAAAAACAGTTACGGAACTTTTAGGAATTACCATCATGGAGAGGTCCAGATTTGAGAAAAATCCATCAGCTTTCCTTGAATCAAAAGGCTATTTAAATATTAGGGCTGATAAACTAATTATTTTGCCCAAGTATAGTCTGTTCGAATTAGAAAATGGGCGTCGTCGATTACTTGCTAGTGCTGGTGAATTACAAAAAGGTAATGAGCTAGCCTTACCAACACAATTTATGAAGTTCTTATACCTTGCAAGTCGTTATAATGAGTCAAAAGGTAAACCAGAGGAGATTGAGAAGAAACAAGAATTTGTAAATCAACATGTCTCTTATTTTGATGACATCCTTCAATTAATTAATGATTTTTCAAAACGAGTTATTCTAGCAGATGCTAATTTAGAGAAAATCAATAAGCTTTACCAAGATAATAAGGAAAATATATCAGTAGATGAACTTGCTAATAATATTATCAATCTATTTACTTTTACCAGTCTAGGAGCTCCAGCAGCTTTTAAATTTTTTGATAAAATAGTTGATAGAAAACGCTATACATCAACTAAAGAAGTACTTAATTCTACCCTAATTCATCAATCTATTACTGGACTTTATGAAACACGTATTGATTTGGGTAAGTTAGGAGAAGAT

SEQ ID NO: 10590 - protein, 1370 aa, Streptococcus agalactiae
  VARIANT 117: Xaa = Any Amino Acid
MNKPYSIGLDIGTNSVGWSIITDDYKVPAKKMRVLGNTDKEYIKKNLIGALLFDGGNTAADRRLKRTARRRYTRRRNRILYLQEIFAEEMSKVDDSFFHRLEDSFLVEEDKRGSKYXIFATLQEEKDYHEKFSTIYHLRKELADKKEKADLRLIYIALAHIIKFRGHFLIEDDSFDVRNTDISKQYQDFLEIFNTTFENNDLLSQNVDVEAILTDKISKSAKKDRILAQYPNQKSTGIFAEFLKLIVGNQADFKKYFNLEDKTPLQFAKDSYDEDLENLLGQIGDEFADLFSAAKKLYDSVLLSGILTVIDLSTKAPLSASMIQRYDEHREDLKQLKQFVKASLPEKYQEIFADSSKDGYAGYIEGKTNQEAFYKYLSKLLTKQEDSENFLEKIKNEDFLRKQRTFDNGSIPHQVHLTELKAIIRRQSEYYPFLKENQDRIEKILTFRIPYYIGPLAREKSDFAWMTRKTDDSIRPWNFEDLVDKEKSAEAFIHRMTNNDFYLPEEKVLPKHSLIYEKFTVYNELTKVRYKNEQGETYFFDSNIKQEIFDGVFKEHRKVSKKKLLDFLAKEYEEFRIVDVIGLDKENKAFNASLGTYHDLEKILDKDFLDNPDNESILEDIVQTLTLFEDREMIKKRLENYKDLFTESQLKKLYRRHYTGWGRLSAKLINGIRDKESQKTILDYLIDDGRSNRNFMQLINDDGLSFKSIISKAQAGSHSDNLKEVVGELAGSPAIKKGILQSLKIVDELVKVMGYEPEQIVVEMARENQTTNQGRRNSRQRYKLLDDGVKNLASDLNGNILKEYPTDNQALQNERLFLYYLQNGRDMYTGEALDIDNLSQYDIDHIIPQAFIKDDSIDNRVLVSSAKNRGKSDDVPSLEIVKDCKVFWKKLLDAKLMSQRKYDNLTKAERGGLTSDDKARFIQRQLVETRQITKHVARILDERFNNELDSKGRRIRKVKIVTLKSNLVSNFRKEFGFYKIREVNNYHHAHDAYLNAVVAKAILTKYPQLEPEFVYGDYPKYNSYKTRKSATEKLFFYSNIMNFFKTKVTLADGTVVVKDDIEVNNDTGEIVWDKKKHFATVRKVLSYPQNNIVKKTEIQTGGFSKESILAHGNSDKLIPRKTKDIYLDPKKYGGFDSPIVAYSVLVVADIKKGKAQKLKTVTELLGITIMERSRFEKNPSAFLESKGYLNIRADKLIILPKYSLFELENGRRRLLASAGELQKGNELALPTQFMKFLYLASRYNESKGKPEEIEKKQEFVNQHVSYFDDILQLINDFSKRVILADANLEKINKLYQDNKENISVDELANNIINLFTFTSLGAPAAFKFFDKIVDRKRYTSTKEVLNSTLIHQSITGLYETRIDLGKLGED

SEQ ID NO: 10591 - protein, 867 aa, Streptococcus agalactiae
ATGGCAGGTTGGCGAACCGTTGTTGTAAATACACATTCTAAGCTCTCTTATAAAAATAATCATCTGATTTTTAAAGATTCTTATCAGACGGAAATGATTCATCTATCAGAGATTGACATTCTAATCATGGAAACAACAGATATCGTTTTGTCGACCATGCTGATTAAACGTTTGGTTGATGAAAATATTTTAGTTATATTTTGTGACGATAAACGCTTGCCAACAGCTATGTTAATGCCGTACTATGCCAGACATGATTCGAGTTTACAATTATCTAGGCAGATGTCATGGATTGAAGATGTCAAAGCAGATGTTTGGACATCAATTATTGCACAAAAAATTTTGAATCAGTCTTTTTATCTCGGTGAGTGTTCTTTCTTTGAAAAATCCCAGTCTATTATGAATCTCTACCATGACTTAGAACCTTTTGATCCTTCTAATCGTGAGGGGCATGCTGCTAGGATTTATTTCAATACACTTTTTGGAAATGATTTTTCAAGAGAGCAGGATAATCCAATAAATGCTGGTTTAGACTACGGATATTCATTGCTTTTGAGTATGTTTGCGCGTGAAGTTGTTAAGTGTGGTTGCATGACACAATTTGGCTTGAAGCATGCTAATCAATTTAATCAGTTCAACCTAGCAAGCGATATTATGGAACCATTTCGCCCAATCGTTGATAGGATTATTTATGAAAATAGGCAGAGTGATTTTGTCAAAATGAAAAGAGAACTCTTTTCTATGTTTTCAGAGACATACAGCTACAATGGTAAAGAAATGTATCTCTCAAATATTGTCAGCGACTATACCAAAAAAGTTATTAAGTCGCTAAATAGTGATGGGAATGGAATTCCGGAGTTTAGGATA

SEQ ID NO: 10592 - protein, 289 aa, Streptococcus agalactiae
MAGWRTVVVNTHSKLSYKNNHLIFKDSYQTEMIHLSEIDILIMETTDIVLSTMLIKRLVDENILVIFCDDKRLPTAMLMPYYARHDSSLQLSRQMSWIEDVKADVWTSIIAQKILNQSFYLGECSFFEKSQSIMNLYHDLEPFDPSNREGHAARIYFNTLFGNDFSREQDNPINAGLDYGYSLLLSMFAREVVKCGCMTQFGLKHANQFNQFNLASDIMEPFRPIVDRIIYENRQSDFVKMKRELFSMFSETYSYNGKEMYLSNIVSDYTKKVIKSLNSDGNGIPEFRI

SEQ ID NO: 10593 - protein, 324 aa, Streptococcus agalactiae
ATGCGAATGATTTTAATGTTTGATATGCCTACTGAAACAGCAGAAGAACGGAAGGCGTATCGTAAGTTTAGAAAGTTTCTCTTGAGCGAAGGCTTTATCATGCATCAGTTTTCTGTTTATAGTAAATTATTACTCAATAATACAGCTAATAATGCTATGATAGGTCGGCTTAAAGTGAATAATCCTAAAAAGGGTAATATCACACTCTTAACAGTTACGGAAAAACAATTTGCGAGAATGGTTTACCTCCATGGAGAACGCAACACAAGTGTTGCCAACTCTGATAGTCGCTTGGTTTTCCTAGGAGATTCTTATGATCAAGAT

SEQ ID NO: 10594 - protein, 108 aa, Streptococcus agalactiae; identical to SEQ ID NO: 1728

SEQ ID NO: 10595 - protein, 663 aa, Streptococcus agalactiae
ATGATCAAGATTAATTTTCCAATTTTAGATGAACCATTAGTGTTAAGTAATGCTACGATTTTAACGATAGAAGATGTTTCAGTTTATTCTTCATTGGTGAAACATTTTTATCAATATGACGTAGATGAACATTTGAAATTATTTGATGATAAGCAGAAAAGTCTGAAGGCAACAGAGTTAATGCTGGTTACAGATATCTTAGGATACGATGTCAACTCAGCACCTATTCTAAAGTTGATACATGGTGACTTAGAAAATCAATTCAACGAAAAGCCAGAAGTGAAATCAATGGTAGAAAAATTAGCAGCTACTATTACAGAACTTATCGCATTTGAGTGTCTAGAGAATGAGCTTGATTTAGAATACGATGAAATTACGATTTTAGAACTCATTAAGGCACTGGGAGTCAAAATTGAGACACAGAGCGACACTATCTTTGAAAAATGTTTTGAAATTATACAAGTTTACCATTATTTAACGAAAAAGAATCTCTTGGTTTTTGTTAATAGCGGAGCTTATCTTACCAAAGATGAAGTTATAAAATTATGTGAATACATCAATTTAATGCAAAAGTCAGTACTCTTTCTAGAACCTAGAAGACTCTATGATTTACCGCAATATGTTATTGATAAGGATTATTTCTTGATAGGCGAAAATATGGTA

SEQ ID NO: 10596 - protein, 221 aa, Streptococcus agalactiae; identical to SEQ ID NO: 1730

SEQ ID NO: 10597 - protein, 450 aa, Streptococcus agalactiae
TTGGAGTTTTGGAACCATTCGAAACAGCACAGCTCTAAAACATTTCCAGTAAGTTCAAATTTAACAAATGTGTTTTGGAACCATTCGAAACAGCACAGCTCTAAAACTGCCCCGTTTTCTAGCACTCGTGTAAAAATGTTTTGGAACCATTCGAAACAGCACAGCTCTAAAACTATCAGTCCACTTATAATCAAGATAGTTTGGTTTTGGAACCATTCGAAACAGCACAGCTCTAAAACAGTTTTAACATTAAATCACGTCTTAAATAAGTTTTGGAACCATTCGAAACAGCACAGCTCTAAAACTACCGCAATAAGATCACCAATGTTGTTTGAGTTTTGGAACCATTCGAAACAGCACAGCTCTAAAACGCTATTAGTGGAAACTTTTGAACGTTATGTGTTTTGGAACCATTCGAAACAGCACAGCTCTAAAACACAGCTGAAGAGT

SEQ ID NO: 10598 - protein, 150 aa, Streptococcus agalactiae
MEFWNHSKQHSSKTFPVSSNLTNVFWNHSKQHSSKTAPFSSTRVKMFWNHSKQHSSKTISPLIIKIVWFWNHSKQHSSKTVLTLNHVLNKFWNHSKQHSSKTTAIRSPMLFEFWNHSKQHSSKTLLVETFERYVFWNHSKQHSSKTQLKS

SEQ ID NO: 10599 - protein, 414 aa, Streptococcus agalactiae
ATGGAACAAACCTTTTTTATGATAAAACCTGATGGTGTAAAACGTGGTTTTATTGGAGAAGTTATTAGTCGTATTGAGCGTCGAGGCTTCTCTATTGATCGCTTAGAGGTTAGATATGCAGATGCAGATATTTTGAAAAGACATTATGCAGAACTGACGGATAGACCATTCTTTCCAACATTAGTAGATTATATGACTAGTGGTCCAGTAATCATTGGAGTTATTTCGGGAGAAGAGGTCATTTCAACTTGGCGCACCATGATGGGGAGTACTAACCCCAAAGATGCCCTTCCAGGAACTATTCGAGGAGATTTTGCACAAGCTCCCTCTCCAAACCAAGCGACATGTAATATTGTTCATGGGTCAGACTCACCTGAATCTGCAACTCGCGAGATAGCCATTTGGTTCAATAAC

SEQ ID NO: 10600 - protein, 138 aa, Streptococcus agalactiae; identical to SEQ ID NO: 1734

SEQ ID NO: 10601 - protein, 1830 aa, Streptococcus agalactiae
ATGAATATTGAAGATTTGAAGAAACGTCAAGAAAAGATTAGAAACTTTTCGATTATCGCTCATATTGACCATGGAAAATCAACCTTAGCAGACCGTATTTTAGAGAAAACAGAAACGGTTTCTAGTCGTGAAATGCAGGCGCAACTGTTGGACTCTATGGATCTAGAACGTGAGCGTGGAATTACTATAAAGTTAAATGCTATTGAGCTTAATTATACTGCTAAAGATGGTGAAACTTACATTTTTCACTTGATTGACACGCCAGGGCATGTTGACTTCACATATGAAGTATCACGTTCATTGGCAGCTTGTGAGGGTGCTATACTGGTTGTTGATGCAGCCCAAGGAATTGAAGCTCAAACTCTGGCAAATGTTTATTTGGCTCTAGACAATGATTTAGAGATACTACCAGTTATTAATAAAATTGATTTACCAGCAGCAGATCCAGAACGTGTACGTGCAGAAGTAGAGGATGTTATTGGTCTAGATGCTTCAGAAGCTGTGCTTGCCTCAGCTAAGGCAGGGATTGGTATTGAAGAAATTTTAGAGCAGATCGTTGAAAAAGTTCCTGCACCGACTGGGGAAGTAGATGCTCCTCTTCAAGCTCTAATTTTTGATTCTGTTTATGATGCTTATCGTGGAGTAATTCTTCAAGTAAGGATTGTAAATGGTATGGTTAAGCCAGGAGATAAGATTCAAATGATGTCTAATGGTAAAACCTTCGACGTTACTGAGGTTGGTATTTTCACTCCCAAAGCAGTTGGACGTGATTTTTTAGCAACTGGAGATGTAGGGTATATTGCTGCCTCAATTAAAACGGTTGCTGATACACGTGTTGGTGATACCATTACCCTTGCTAATAACCCAGCAATAGAACCCTTGCATGGCTATAAGCAAATGAACCCAATGGTTTTTGCCGGTCTTTATCCAATTGAATCAAATAAGTATAACGATCTGCGTGAAGCCCTTGAAAAATTACAATTGAATGATGCTAGTCTACAGTTTGAACCGGAAACATCACAAGCATTAGGGTTTGGTTTCCGTTGTGGTTTCTTAGGACTTTTACATATGGACGTTATCCAAGAGCGCTTGGAACGAGAGTTCAATATTGATCTTATTATGACTGCACCATCAGTAGTTTATCATGTTAATACAACTGACGGTGAAATGCTTGAAGTTTCGAATCCATCTGAATTTCCTGATCCTACTCGTGTTGACAGCATTGAAGAACCATATGTTAAGGCGCAAATTATGGTTCCTCAAGAATTTGTCGGTGCTGTAATGGAGTTAGCACAACGTAAACGTGGTGACTTTGTAACAATGGATTATATTGATGATAATCGTGTTAATGTTATTTACCAAATTCCTTTAGCTGAAATTGTGTTTGACTTCTTTGATAAGCTTAAATCATCAACACGTGGCTATGCTAGTTTTGATTATGAAATTTCCGAATATCGTCGCTCACAATTAGTTAAAATGGATATTCTTTTAAATGGTGATAAAGTGGATGCTTTAAGCTTTATTGTTCACAAAGAATTTGCCTATGAACGTGGTAAATTGATCGTTGATAAGTTGAAAAAAATCATTCCTCGTCAGCAGTTTGAAGTTCCTATCCAAGCAGCTATTGGACAAAAAATTGTGGCCCGTTCTGATATAAAAGCACTACGTAAAAATGTCTTAGCAAAATGTTATGGTGGTGACGTTTCACGTAAACGTAAGTTGCTTGAAAAACAAAAAGCTGGTAAAAAGCGCATGAAAGCAATTGGTTCCGTCGAAGTTCCTCAGGAAGCTTTCTTAAGTGTTTTATCAATGGACGATGATGACAAAAAA

SEQ ID NO: 10602 - protein, 610 aa, Streptococcus agalactiae; identical to SEQ ID NO: 1736

SEQ ID NO: 10603 - protein, 2151 aa, Streptococcus agalactiae
ATGAAAGGTCAAAAAATTATTGCTCTAGCTGGTCTTGTCCTGTCATGCCATTTTGCTCTTACGGCATGTCATACTCAAGAACACAAAAATTCTCATCATATTAAAACAAAGCAGGTTGCTAAGAAAAAAGCTAATAAAAAGAAAGTCTCTGTTAAGGAAAGTCATAAAAAACGCAAGGGTGTTGCAGGGGTTGACTTTCCAACTGATGATGGCTTTTTACTGACTAAAGATTCGAAGATTTTATCTCATACAGATTCTGGAATCGTTGTAGCACATGGAAATCATTCTCATTTTATTTTTTACTCTGATTTAAAAGGTTCAAAATTTAGCTATTTAATCCCTAATGCTAATACAAAAACTAATAAAAATCAAGCGGTAAGAAACTTTAAAGCAGGGGCGGTAGCTGTTAATACATTAAATGATGGCTATGTTTTTAATCCCGCAGATATTGTTTCAGAAGATGCTAATGGCTACGTGGTCAGACATGGTGATCATTTCCACTATATTCCAAAAGCAAGTTTATCTCAGCAAAAGCAAGTACAAGCAAGTAGAGCTGTTTCACGTTTAGGAAATCAAAGTAATAGCCATTACAGGGTTAATAGTTCTAAAATTGCAGGGCTTCACTACCCAACAAGTAATGGTTTCTTATTTAATGGACGAGGAATAAAAGGCACTACCCCAACAGGTATTTTAGTAGAACATCATAATCATCTGCATTTTATTAGTTTTGCTGATTTAAGAAAAGGGGGGTGGGGATCAATTGCTGACCGTTACCAACCACAAAAGAAAGCTGATTCTAAAAAACAGTCACCATCAAGTAAAAAGCCAAGAACTGAAAATACTTTACCTAAGGACATCAAAGATAAGCTAGCTTACCTTGCTCGTGAATTACATTTAGATATTTCACGTATCAGAGTCCTTAAAACACTAAATGGTGAAATTGGATTTGAATACCCACATGATGATCATACACATGTTATTATGGCCAAAGATATTGATCTAAGTAAGCCAATTCCAAATCCACATCATGATGATGAAGATCATCACAAAGGTCATCACCATGATGAGTCCGACCATAAGCATGAAGAACACGAGCACACTAAGTCAAATAAATTATCTGATGAAGATCAAAAGAAATTAATTTATTTAGCAGAGAAGCTTGGTTTAAATCCTAATCAAATTGAAGTATTAACGTCAGAGGATGGAAGTATCATCTTTAAGTATCCACATGATGACCACTCACACACCATAGCAAGTAAGGATATTGAAATTGGGAAGCCTATCCCAGATGGACACCACGATCACTCTCATGCAAAAGATAAAGTTGGTATGGCAACTCTAAAACAAATTGGTTTTGATGATGAGATTATTCAGGATATTCTGCATGCAGATGCTCCAACACCATTCCCATCAAATGAAACTAATCCTGAAAAAATGCGTCAGTGGCTTGCAACTGTTACTAAGATTAACATTGGACAAAGAACCAATCCATTCCAGCGTTTTGGTCTATCATTGATGCCTAATATTGAAGTTCTAGGAATTGGGTTTACTCCGATTAATGATATGACGCCAGTTTTGCAATTCAAAAAACTTAAACAGCTTTGGATGACAAATACTGGTATTACAGATTATTCTTTCCTTGATAAGATGCCACTATTAGAAGGATTGGATATTTCACAAAACGGTATTAAGGATTTATCTTTCCTTACAAAATATAAACAATTAAGTCTTATTGCTGCAGCTAATAATGGCATTACTTCGCTAAAACCATTGGCTGAATTACCAAACCTTCAATTCTTAGTTTTGAGTCATAACAATATCTCTGACTTGACACCGTTATCAAACTTGACAAAACTCCAAGAATTGCACCTTGATCATAATAATGTGAAGAATTTAAGTGCACTTTCTGGTAAAAAAGATTTGAAAGTTCTAGATTTATCAAACAATAAATCCGCAGACTTATCGACTCTAAAAACAACTAGTCTTGAGACGCTTCTTTTAAATGAGACGAATACAAGCAATCTAAGTTTCTTAAAGCAAAATCCTAAGGTATCTAATTTAACAATTAATAATGCGAAATTAGCATCATTAGATGGTATTGAAGAGAGCGATGAAATTGTTAAAGTAGAAGCTGAAGGGAACCAAATTAAG

SEQ ID NO: 10604 - protein, 717 aa, Streptococcus agalactiae
MKGQKIIALAGLVLSCHFALTACHTQEHKNSHHIKTKQVAKKKANKKKVSVKESHKKRKGVAGVDFPTDDGFLLTKDSKILSHTDSGIVVAHGNHSHFIFYSDLKGSKFSYLIPNANTKTNKNQAVRNFKAGAVAVNTLNDGYVFNPADIVSEDANGYVVRHGDHFHYIPKASLSQQKQVQASRAVSRLGNQSNSHYRVNSSKIAGLHYPTSNGFLFNGRGIKGTTPTGILVEHHNHLHFISFADLRKGGWGSIADRYQPQKKADSKKQSPSSKKPRTENTLPKDIKDKLAYLARELHLDISRIRVLKTLNGEIGFEYPHDDHTHVIMAKDIDLSKPIPNPHHDDEDHHKGHHHDESDHKHEEHEHTKSNKLSDEDQKKLIYLAEKLGLNPNQIEVLTSEDGSIIFKYPHDDHSHTIASKDIEIGKPIPDGHHDHSHAKDKVGMATLKQIGFDDEIIQDILHADAPTPFPSNETNPEKMRQWLATVTKINIGQRTNPFQRFGLSLMPNIEVLGIGFTPINDMTPVLQFKKLKQLWMTNTGITDYSFLDKMPLLEGLDISQNGIKDLSFLTKYKQLSLIAAANNGITSLKPLAELPNLQFLVLSHNNISDLTPLSNLTKLQELHLDHNNVKNLSALSGKKDLKVLDLSNNKSADLSTLKTTSLETLLLNETNTSNLSFLKQNPKVSNLTINNAKLASLDGIEESDEIVKVEAEGNQIK

SEQ ID NO: 10605 - protein, 471 aa, Streptococcus agalactiae
TTGAAAAATAAACAAGGTTCGTTAAAATTCTTGAATGTGACTAATAATCAGTTAACATCACTTGAAGGTGTTAATAATTATACTTCACTTGAGACCTTAAGTGTTTCTAAAAATAAACTTGAATCTTTAGATATTAAAACACCTAACAAAACAGTTACAAATCTTGATTTTAGCCATAACAATGTTCCAACATCACAATTGAAATTGAATGAAAAAAATATTCCTGAAGCAGTAGCTAAGAATTTTCCAGCAGTTGTAGAAGGTTCAATGGTTGGAAATGGTAGTCTTGCTGAAAAAGCAGCTATGGCTTCTAAAGAGGACAAACAAGTTTCAGATAATACTAATCACCAAAAAAACACTGAAAAATCTGCTCAAGCGAATGCTGATAGTAAAAAAGAAAACCCTAAAACACATGATGAACATCATGACCATGAAGAAACAGATCATGCACATGTAGGTCATCATCACCAT

SEQ ID NO: 10606 - protein, 157 aa, Streptococcus agalactiae
MKNKQGSLKFLNVTNNQLTSLEGVNNYTSLETLSVSKNKLESLDIKTPNKTVTNLDFSHNNVPTSQLKLNEKNIPEAVAKNFPAVVEGSMVGNGSLAEKAAMASKEDKQVSDNTNHQKNTEKSAQANADSKKENPKTHDEHHDHEETDHAHVGHHHH

SEQ ID NO: 10607 - protein, 657 aa, Streptococcus agalactiae
ATGACTATGGTTAAAAGAGAAGATGTGATTTTAAATGCAACTGAAAATATGGTTCACCATAAATTAAAAAATGATCCAAGTGGCCATGACTGGTTTCATATTGTTAGAGTAAGAAATCTTGCGGTAGAATTAGCACACAAAGAAGGGGCTAATACCTTTATTTGTCAAATGGCTGCACTTTTGCATGATATTATTGATGACAAAATCTGCCAAGATAGTAAGCAAGCGTCGTATGAATTGACTCAATGGTTATATAGTCAAGATCTTGCCATAGCAGAAGTAGAACATATCCTTGATATTCTTGAAAATATTTCATTCAAAGCAGGAACTGGATTGACTATGAAAACATTGGAAGGTCAAATTGTTCAAGATGCAGATCGCCTAGATGCTATGGGGGCTATTGGTATTGCAAGAACGATGGCTTATTCAGGGAGTAAAGGACGTTTAATTCATGACCCTAACTTAAAACCACGAGAAAACCTCACTTTAGAAGAGTATCGTAATGGTCAGGATACAGCTATCATGCATTTTTACGAAAAATTATTAAAGTTAAAAGACCTTATGAATACAAAACAAGGGAAAATGCTTGCTCAAAAACGTCATGATTTTTTAGAACTATATTTAGCCGAATTTTATGCTGAATGGAATGGTAAACGT

SEQ ID NO: 10608 - protein, 219 aa, Streptococcus agalactiae
MTMVKREDVILNATENMVHHKLKNDPSGHDWFHIVRVRNLAVELAHKEGANTFICQMAALLHDIIDDKICQDSKQASYELTQWLYSQDLAIAEVEHILDILENISFKAGTGLTMKTLEGQIVQDADRLDAMGAIGIARTMAYSGSKGRLIHDPNLKPRENLTLEEYRNGQDTAIMHFYEKLLKLKDLMNTKQGKMLAQKRHDFLELYLAEFYAEWNGKR

SEQ ID NO: 10609 - protein, 462 aa, Streptococcus agalactiae
ATGATTCGTAGAGCGAAAGAAAAAGATTTGCCTGATATTGCAGAGCTATTGAAACAAATTTTAATGTTACATCATGAGGTTCGCCCAGATATTTTTCATACAAGAGGAAGTAAGTTTTCTAAAGAACAATTGAAAGAAATGCTGATAGACGAATCAAAGCCTATCTTTGTTTATGAATCAGACGAGGGTAAAGTTGTTGCCCACTTGTTTCTTCAATTACAAGAAAAACGTGACTTACCTCGAAAGTCATTTAAAACTCTCTATATAGATGATTTGTGCATTGATGAGGAAGTAAGAGGTCAGCAAATTGGACAAAAGTTGATGGATTTTGCAAGACAATATGCTAAGAAACATGGGTGTTATAATATAACTTTAAATGTTTGGAATGATAATCAGAGAGCGGTCTCTTTTTATGAAAAATTAGGTTTTAAACCTCAACAAACTCAAATGGAGGAGATACTA

SEQ ID NO: 10610 - protein, 154 aa, Streptococcus agalactiae
MIRRAKEKDLPDIAELLKQILMLHHEVRPDIFHTRGSKFSKEQLKEMLIDESKPIFVYESDEGKVVAHLFLQLQEKRDLPRKSFKTLYIDDLCIDEEVRGQQIGQKLMDFARQYAKKHGCYNITLNVWNDNQRAVSFYEKLGFKPQQTQMEEIL

SEQ ID NO: 10611 - protein, 432 aa, Streptococcus agalactiae
ATGAAAGAAACACAAGAAGAATTACGTCAGCGTATTGGACATACAGCTTATCAAGTAACCCAAAATTCAGCTACGGAACATGCTTTTACTGGGAAGTATGATGATTTTTTTGAAGAGGGGATATATGTAGATATCGTCAGTGGAGAGGTTTTATTCTCTTCTTTAGATAAATTTCAATCTGGTTGTGGTTGGCCAGCATTTTCAAAACCAATTGAGAATCGAATGGTGACAAATCATCAAGATCACTCTCATGGAATGCATCGTATTGAGGTTAGGAGTCGTCAAGCTGACTCTCATTTAGGGCATGTATTTAATGATGGACCGGTTGATGCAGGTGGTTTACGCTATTGTATCAATTCAGCTGCCTTAGATTTTATTCCTTATGACCAGATGGCAAAGAGAGGCTATGGGGACTACCTATCACTTTTTGAT

SEQ ID NO: 10612 - protein, 144 aa, Streptococcus agalactiae; identical to SEQ ID NO: 1742

SEQ ID NO: 10613 - protein, 1056 aa, Streptococcus agalactiae
ATGGCTTCTACAAATAATGTTTCAGATACAAACACACGTTTTGCTAAAGAGGAGTTAGAAGAGGTTTTCGAAGAATTAGGGACAACTCAAGGTGGTTTATCAGATGAAGAGGTTGCTGTACGTCAGAAAAAATATGGTTTAAACCTGTTATCTGAAGTAAAGCAAGAATCGATTATTTTATTGTTTCTGAAAAATTTTACTAGTCTTATGGCAATACTATTATGGGTTGGAGGATTTGTGGCTATTGTTTCTAATAGCTTAGAGCTAGGTCTTGCCATTTGGATGGTTAATGTGATTAATGGTATTTTTAGTTTCATTCAGGAATACCGTGCAAGCCAAGCAACACAAGCTCTCGAGAAAATGTTACCATCTTATTCACGTGTTCTTAGAAAAGGCTCAGAAGAAAAGATATTATCAGAGCAACTAGTCCCAGGCGATATTGTTCTTATTGAAGAAGGAGACCGTATTTCAGCAGATGGTCGCTTGATTAAAACAACAGATTTGCAAGTAAACCAATCAGCCTTGACAGGGGAATCAAATCCTATTTATAAAGATAGCAATGTTGAAAACGACCAGTCTAAAACATTGATTGAATGTGATAATATGGTTTTCGCAGGAACGACGGTCTCCAGTGGTAGCGCAACAATGGTTGTTACGGCAATTGGAATGCAAACTCAATTTGGTCAAATCGCTGATTTAACACAAGGGATGAAATCAGAAAAAAGCCCTCTTCAAAGAGAACTTGATCGGTTGACCAAACAGATTTCTATCATTTCAATTACGGTAGGAATTATCTTTTTCTTAGCAGCGACTTTTTTTGTTAAGGAGCCAGTGTCAAAATCATTTATCTTTGCCTTGGGGATGATCGTTGCATTTATCCCAGAAGGTTTACTACCTACCGTTACACCTTCTCTAGCTATGGCAGTCCAACGAATGGCTAAAGAACACGCACTTGTCAAAAAACTTTCTTCAGTTGAGACTCTTGGAGCAACCTCAGTTATCTGTTCTGATAAGACTGGTACATTAACGCAAAATGAAATGACCGTCAATCATTTG

SEQ ID NO: 10614 - protein, 352 aa, Streptococcus agalactiae
MASTNNVSDTNTRFAKEELEEVFEELGTTQGGLSDEEVAVRQKKYGLNLLSEVKQESIILLFLKNFTSLMAILLWVGGFVAIVSNSLELGLAIWMVNVINGIFSFIQEYRASQATQALEKMLPSYSRVLRKGSEEKILSEQLVPGDIVLIEEGDRISADGRLIKTTDLQVNQSALTGESNPIYKDSNVENDQSKTLIECDNMVFAGTTVSSGSATMVVTAIGMQTQFGQIADLTQGMKSEKSPLQRELDRLTKQISIISITVGIIFFLAATFFVKEPVSKSFIFALGMIVAFIPEGLLPTVTPSLAMAVQRMAKEHALVKKLSSVETLGATSVICSDKTGTLTQNEMTVNHL

SEQ ID NO: 10615 - protein, 1710 aa, Streptococcus agalactiae
GTGACAGGACTGGGTTATGCTCCAGAAGGACAGATTCTTTTTGAAGGTGACAATATTTGCTTTGGTAATAGTGATAGAGGAGACTTAGAAAAACTTATTCGTTTTGCTCATCTCTGTAGCAACGCTCAAGTATTACCACCAAATGATGATCGTTCAACTTATACTGTACTTGGAGATCCGACAGAAGCTTGTTTGAATGTTTTATTGGAAAAATCAGGGATAAACATACAAGAAAATCGTAAGTTTGCACCACGTTTGAAAGAATTACCTTTTGATTCGGTTAGAAAACGCATGACAACTATTCATAGCTTAGGAGGCGATGAAAAGGATAAAAAAATTTCAATTACAAAAGGTGCGCCGAAAGAAATACTTGATTTATCAGATTATGTCTTATCTGATGGCAAAGTTATCCCCTTAAACAAGGAAGAACGTAATAAAATACAGTTGGCTAACGATACATTTGCTAAAGATGGACTTCGCGTCTTAGCTGTTTCATACTGCGATATTGAAGGCTTTTCAAAAGAACAATGGACGCAAGAAAATTTGGAACAACACATGGTGTTTATAGGGTTGATAGCAATGAGTGATCCACCTCGTGAAGGCGTTCGCGAAGCTATTGATAAATGTCATGCAGCAAGCATTCGTATTATTATGGTGACTGGAGATTACGGATTAACGGCACTAAGTATCGCTAAAAATATTGGTATTATTCGTAACGATGATGCTAAAGTAATTTCAGGTTTAGAGTTATCAGAAATGACGGATAGCCAATTGAAAAAAGAATTGTCAGGTGAAGTCGTTTTTGCTCGTGTAGCACCAGAACAAAAATATCGAGTAGTAACGATATTACAGGAGATGGGTGAAGTAGTAGCAGTTACAGGAGACGGGGTCAATGATGCGCCTGCGCTAAAAAAATCCGATATTGGTGTAGCCATGGGTGTTACCGGTACTGATGTTGCTAAAGAATCAGCTGATATGATTCTGACAGATGATCATTTTGCTTCTATTGTACATGCTGTGGAAGAAGGACGGGCTGTTTATCAAAACATTAAGAAATTCTTGACGTATATTTTTAATAGTAATACTCCTGAGGCTGTTCCGTCGGCATTCTTCCTTTTTTCTAAAGGTTTTATTCCTTTACCATTGACTGTAATGCAAATACTTGCTGTTGATTTGGGAACCGATATGCTTCCCGCTTTAGGTCTGGGCGTGGAACCACCAGAAACAGACGTTATGAATCGTCCTCCAAGACGGCTAACAGATCGCTTATTGGACAAAGGGCTACTTATAAAATCTTTCCTTTGGTACGGCACTATTGAATCCGTATTAGCTATGGGTGGTTTTTTCTGGGCTCATTACTTACGTTATGGTAATTTTACTTTTTTCGTCGCAAACGGCATACCGTACAGAGAAGCGACAACTATGACACTTGGAGCTATTATCTTTAGCCAGATAGGTATGGTTATGAATAGCAGAACGAGCTATCAATCTATTAAAGCACTATCTATTTTTGGTAATAAATTAATTAATTTTGGTATAATAATGGAGATTTTAGCATTTTTAGTCTTAGTATACGTGCCACTATTCCATAACTTATTCAACACAGCAAGCCTAGGTTTATCACATTGGCTCTATTTAATAAGCTGCCCATTTATCATGATAGGTTTAGATGAAGTTCGGAAATTATTCAGCAGTAGAAAGAATAAACGG

SEQ ID NO: 10616 - protein, 570 aa, Streptococcus agalactiae
MTGLGYAPEGQILFEGDNICFGNSDRGDLEKLIRFAHLCSNAQVLPPNDDRSTYTVLGDPTEACLNVLLEKSGINIQENRKFAPRLKELPFDSVRKRMTTIHSLGGDEKDKKISITKGAPKEILDLSDYVLSDGKVIPLNKEERNKIQLANDTFAKDGLRVLAVSYCDIEGFSKEQWTQENLEQHMVFIGLIAMSDPPREGVREAIDKCHAASIRIIMVTGDYGLTALSIAKNIGIIRNDDAKVISGLELSEMTDSQLKKELSGEVVFARVAPEQKYRVVTILQEMGEVVAVTGDGVNDAPALKKSDIGVAMGVTGTDVAKESADMILTDDHFASIVHAVEEGRAVYQNIKKFLTYIFNSNTPEAVPSAFFLFSKGFIPLPLTVMQILAVDLGTDMLPALGLGVEPPETDVMNRPPRRLTDRLLDKGLLIKSFLWYGTIESVLAMGGFFWAHYLRYGNFTFFVANGIPYREATTMTLGAIIFSQIGMVMNSRTSYQSIKALSIFGNKLINFGIIMEILAFLVLVYVPLFHNLFNTASLGLSHWLYLISCPFIMIGLDEVRKLFSSRKNKR

SEQ ID NO: 10617 - protein, 1101 aa, Streptococcus agalactiae
ATGTCAAATATAATAACTTATTTAAAAAATAATTCAAACTTAACTTTTGATGAATTAGCATTAAACGATGTTGACATTCTTTGTTTAAATGAATTTGGCTATATTTCTTTTGAAAAACTTATAAACACTACAGAAATGAAGTCAGTTTTAGTCTGTGAGTTATATCATGAGTACCTTCAAACTATGGCTAAATCATATAGCTTTATGTTCACATCACAACGACATGATTTATGTCAGTTAATGATGACCTCGAAACGTTTTAAAAACTTAACTTTATCTTATTATCGAGCTGAGATTAGTTTAGAATTTGAAAAACAATTTGCAGCTATGGTTTTTACTATTCCTAACATTAATTATCATCAGGTTGTATTTCGTGGTACTGATGCCAACCTTATTGGTTGGAAAGAAGATTTTAAATTGACTTATATGAGAGAAATATCGGCTCATCGTTCAGCGATTAAATACTTAAATACAATACTGCCTTATTTTGATAAAGTAGTTCTCTCAGGTCATTCTAAGGGGGGTAATTTAGCCTTGTACGCTGCAATGTTTACAAAGCCAGATTTAAAAGCAAAAATTGATTTGATTTGGCTTATTGACTCCCCAGGACTACAAAAAACTTTGTTACCTACTACAGAGTATAAAACTACTAAACAAAAGTGCATTCGCTTACTACCAGAAGAATCTATTGTTGGTATGATGCTTTATAGTGATATAGAGCCGCTAATTATTAGTAGCAATGCGCGTGGAATTCTGCAACACGATGTTACAACTTGGGAAATTCAAGAACCAGCTATTTTAAAGACTGGAACAGGACTATCGCTAAAAAGTATTTGTTTTGAAAAGACATTTCAACAGTGGATGGCTGAATTAAAAAGTCAAGAAAGAAAATTATTTTTTGATTTATTATTTGATAGCTTCCTATCAAGTGGCGTATCTAGTTTGGATGACTTCAACTTGGCTTCCAGAGCAAAAATGATGAAAGCTTTTCATAGCTTTAGAGAACTAGATGATGATAAAAAAAGGTTATTTAACAAATCTTTAAAATTATTAGTAACCATATTTTGGGGAGCTTATCATGATAATAGCAGAGAGACTAAG

SEQ ID NO: 10618 - protein, 367 aa, Streptococcus agalactiae; identical to SEQ ID NO: 1746

SEQ ID NO: 10619 - protein, 567 aa, Streptococcus agalactiae
ATGAGTACTGGTGCCAGTTACCCTAAATATGGATTCTCGGTAGGAAAGTACACATATGGATATCAACAATTCTTTTACGAAGGCGTTAACTTAAAAGAAATTGGAGCATTTTGCTCAATAGCCCAGAACGTTACTATTACTGGTCTGAATCATCCAACCGATCACATTACCACTAACCCTTTTATTTACTATAAGTCAAGGGGATTTATAAATGAGGATAGGGCGGACTTAATAGATGAAAAGAAAAATGGAAAAGTTATTATTGGCAACGATGTCTGGATAGGAACTAATGTCACTATACTTCCATCTGTTACAATAGGTAATGGAGCAATTATTGGAGCAGGTTCAGTTATTACCAAAGACATTCCTGACTATGCTGTTGTCGCTGGAACACCTGCTAAAATTATCAAATATCGCTTTTCAGAGGAAGAAATAACATTATTAAATGCATCTCAGTGGTGGAATTGGTCAGATGAAGCTATTAAGGAACATATTAGCGAATTTTCAGATAAGAAGGAATTCTTCAATACTCTAAAAAGTATTTCCGAAAACAAAAATCATAAACTC

SEQ ID NO: 10620 - protein, 189 aa, Streptococcus agalactiae
MSTGASYPKYGFSVGKYTYGYQQFFYEGVNLKEIGAFCSIAQNVTITGLNHPTDHITTNPFIYYKSRGFINEDRADLIDEKKNGKVIIGNDVWIGTNVTILPSVTIGNGAIIGAGSVITKDIPDYAVVAGTPAKIIKYRFSEEEITLLNASQWWNWSDEAIKEHISEFSDKKEFFNTLKSISENKNHKL

SEQ ID NO: 10621 - protein, 609 aa, Streptococcus agalactiae
ATGAATATGAAATTATCAAAACGTTACCGCTTTTGGCAGAAGGTTATTAAGGCTTTGGGTGTCTTAGCGTTAATAGCGACTCTTGTCTTAGTTGTTTATTTGTACAAACTTGGTATTTTGAATGATAGCAATGAATTAAAAGACCTAGTACACAAGTATGAATTTTGGGGTCCAATGATTTTTATTGTGGCTCAAATTGTACAGATTGTTTTTCCAGTAATTCCTGGAGGTGTTACAACAGTAGCAGGTTTCTTAATTTTTGGTCCTACCTTAGGCTTTATTTATAACTATATTGGGATTATCATCGGAAGTGTCATCCTTTTTTGGTTAGTCAAATTTTATGGACGAAAATTCGTTTTGCTATTTATGGATCAGAAGACATTTGATAAATATGAGTCTAAGCTAGAAACATCCGGATATGAAAAGTTTTTTATCTTTTGTATGGCATCTCCCATTTCACCAGCGGACATCATGGTGATGATTACCGGTCTATCTAATATGTCTATTAAGCGCTTTGTGACAATCATTATGATAACGAAACCTATTTCTATCATCGGTTATAGCTATTTGTGGATTTATGGCGGTGATATTTTGAAAAATTTTTTGAAT

SEQ ID NO: 10622 - protein, 203 aa, Streptococcus agalactiae; identical to SEQ ID NO: 6240

SEQ ID NO: 10623 - protein, 780 aa, Streptococcus agalactiae
ATGTTTGGAAAATTATTAAAATATGAATTAAAATCAGTTGGTAAGTGGTATCTAACACTCAACGCTGCGGTTTTATTAGTATCTATTATTTTAGGACTGGTATTAAAGGCACTTGGCGGCAATTTTTCTACTGATACTAATAGTACTAGCGCCCAAATATTCACTATAATACTCGTTTTATTGTTAGCGATGGTTATTTCAGGATCTCTGTTATCCACCCTTGCTATTATTATCAAACGTTTTTATAGCAATATCTTCGGCCGTCAAGGATATCTAACCTTAACGCTCCCAGTAACTACGAATCAGATTATTTGTTCAAAGCTACTAGCTTCTCTTCTTTGGAGTATTTTTAATATTTTTATTGTCATTATTGGAATCATATTGGTCATATTACCTTTAGTAGGTATTGGTCAGTTCGTTGTCGCTTTTCCAGAAATCTATAAAATTATTTCATCTTCGAACGCTCCACTTTTTATCGCCTATTTCTTTCTATCGTACGTTGCAGGGACATTACTGATTTATCTCTCTATCGCTGTAGGGCAATTATTTACAAACAAACGTGTATTGATGGGAATTGTTTCTTATTTTGGAATATCACTCTTAATTACTTTCTTAACATTAATAATAGATAGTATTTTTCATATTGATTTATTCAACTCTCATGCAAATGCAACATTCTCTCAACCTGTATTGCTCTACAATATACTTGTTAGCATTGTTGAAATTGCTATATTCTATATGTTGACACACTCTATTATTAAGTACAAACTTAATATACAA

SEQ ID NO: 10624 - protein, 260 aa, Streptococcus agalactiae; identical to SEQ ID NO: 1752

SEQ ID NO: 10625 - protein, 696 aa, Streptococcus agalactiae
ATGACACAGTTATTACAACTTCATCATGTTACAAAGAAATATCACAAACATACTGCTGTTAATGATGTGACTGTAAGTATTCCAACAGGAAAGATTATAGGTTTATTAGGTCCAAATGGTAGCGGAAAAACAACAATCATCAAAATGATAAATGGATTACTTCAGCCAGATAAGGGAGATATCGTTATTGATGGTTACAGACCGTCTGTTGAAACCAAAAAAATTATTTCATATCTCCCTGATACTTCATATTTACAAGAAAATATGAAAATCAAAGACGTCGTTACATTATTTGAAGATTTCTATAACGATTTTGATTCAAAGGTAGCATATCAACTATTTGAGGATCTTAACCTAAATCCTAGGGAACGTCTAAAAAACCTATCAAAAGGGAACAAGGAAAAAGTTCAATTAATACTTGTTATGAGTCGTAAAGCTAGGCTCTACATCCTTGATGAACCTATTGGTGGTGTAGACCCTGCAGCGCGTGACTACATTTTAAAAACAATCATTAGCAACTACTCTAATGATGCTTCTGTTTTAATTTCGACTCACTTAATTTCTGACATTGAACCTATCCTTGATGAAGTTATCTTCCTTAAAGAAGGAGAAATTGACCTACAAGGCAATGCTGATGACTTAAGAGAAGAGCACAACTGTTCGATTGATGCTCTCTTTCGTGAAAGATTCAAGAAA

SEQ ID NO: 10626 - protein, 232 aa, Streptococcus agalactiae; identical to SEQ ID NO: 1754

SEQ ID NO: 10627 - protein, 366 aa, Streptococcus agalactiae; identical to SEQ ID NO: 6245

SEQ ID NO: 10628 - protein, 122 aa, Streptococcus agalactiae; identical to SEQ ID NO: 6246

SEQ ID NO: 10629 - protein, 3102 aa, Streptococcus agalactiae
ATGTTTGCACAACTTGATACAAGAACCGTTTATTCTTTTATGGATAGCTTGGTTGATTTAAAGACATATGTCTCTAAATCGAAATCATTAGGATATCAAACTATTGGTATCTTGGACCACAGTAATCTTTATGCAGCATATCATTTTATTCAAGAGGCGCAAAAGGCAAACCTAAGACCAATAGTTGGATTTAGCTTTGATATAGTGGTTGAAAATAGATCAATAGAAGTTTACTGTATTGCGATAAATACAGTTGGTTATAAGAATCTCTTGAAGTTGTCAACGGCTCAAATGTCTGAGAAGATGTCTCTAAATTTATTGACAGAACATCTTGAAGGGGTGCAATTGATTCTTCCCTATCAAGATGTTCTTGATCAGCTCAATTTACCCTTTGATTATGTTATTGGTGTTAATTTGACCTCTCCGCAGATTCCATATACCAAACCCATTATAGCCATAGATACTGTTCGATATTTTCAAAAAAATGATATTGAGACATTACAGATGCTTCATGCTATAAGAGATAATGTCCTGTTAAAAGACGCACAATATGCGAGCAAAAATCAAGAATTAAAACCTTGTCAAGAAATGACTCTAGCATTCAAGGAACGTTTTCCTGAAGCTTTAGCTAACCTAGAATCTTTGGTAGAGAATGTTGCTTATCACTTTGATTCTGACTTTAAGTTACCTATTTTTAATAGAGAAATTCCTGCTGGAGAAGAATTAAGAACCTTAACTCAAAATAACTTAAAAAGTAAAGGTTTATGGAGCGATGCTTATCAAGAGCGTCTCGAAAAAGAATTAACAATCATTCACAAAATGGGCTTTGATGACTATTTCCTTATTGTGTGGGATTTATTAAGATTTGGTCGTAGTAAGGGCTACTATATGGGAATGGGACGTGGTTCAGCAGCGGGAAGTTTAGTCTCATATGCTTTAAATATTACCGGTATCGATCCTGTCAAACATAATTTAATTTTTGAACGTTTTTTAAATGAAGAGCGTTATTCGATGCCAGATATTGATATTGATCTTCCGGATATTTATCGTGGAGAATTCTTGCGCTATGTACGTAATCGATATGGTTCAATGCATTCTGCACAGATTGTAACCTTCTCAACTTTTGGTGCGAAACAGGCTATTCGAGATGTTTTTAAACGCTTTGGTGCATCAGAGTATGAGTTAACAAACATAACTAAAAAAATTCATTTCAGAGATAATTTGACCAGTGTTTATAACCGCAACTTAGCTTTCAGACAAATAATAGATAGTAAAATTGAATACCAAAAAGCCTATGATATTGCTAAGCGTATTGAAGGAAATCCTAGACAGACTTCTATTCATGCCGCTGGGGTAGTAATGAGTGACGATTTGTTAACAGATCATATTCCTTTAAAAAACGGTGAGGATATGATGATAACGCAATATGATGCTAGTTCTGTTGAGGATAATGGTCTTCTAAAAATGGACTTTCTAGGTCTTCGAAATTTGACATTTGTTCAGAAAATGAAGGAGAAAGTCGATAAGGACTACGGTATCTCTATACAATTAGAAACTATTGATTTAGAAGATAAAGAGACTCTAAAACTATTTGCAGCTGGTCAAACAAAGGGGATTTTTCAATTTGAGCAAAGTGGAGCTATTAATTTGTTGCGACGTATTAGGCCAGAGTGTTTTGAAGATGTGGTAGCTACCACCAGCTTGAATAGGCCTGGTGCAAGTGATTATACTGAGAATTTTATAAACCGTCGTTTTGGTAAAGAAAAAATCGATTTAGTAGATCCTGTCATAGCTCCAATTTTACAACCTACCTATGGCATAATGCTCTATCAAGAACAGGTTATGCAGATTGCCCAGACCTACGCAGGTTTTACGCTAGGCAAGTCTGATTTGCTCAGACGTGCTATGTCTAAGAAAAATTCTAAGGAGATGCAAAAGATGTCTCAATCCTTCTTAGAGGGTGCAGTATCTAAGGGACATCGTCAAGAAGATGCTCGACTTATATTTGAACGCATGGCTAAATTTGCAGGTTATGGGTTTAATCGCAGCCATGCGTTTGCTTATTCGGCTTTAGCTTTTCAATTAGCCTATTTCAAAGCCCATTATTCCGATGTCTTTTATGACATCATGATAAATTATTCAAATAGTGATTATCTAATCGATGCTATTGATTTTGGTTTTGTTATTGAAAAACCTTCAATTAATACTATTTCATACAGAGACCGCATCTATAAAAAGAAAATTTATTTAGGTTTAAAAAATATTAAGGGTGTTCCTAACGATTTGGCTTATTGGATTTCTAAAAATCAACCGTTTCAGAGTATTGAAGATTTTCTAATGAGGCTGCCACAGCAGTTTCAAAAAAGTGGTTTTATTTCTCCGCTAATTGCTATTGGAGCATTTGACGAATTTGATAATAATAGACGGAAAATCACCTCTAATCTTGATTCTTTATTTACATTTGTAAATGAACTAGGTAGTTTATTTGCAGATACCTCATATCATTGGCTAGAAGTAGAAGATTTCTCTAATTCTGAGAAATATGAAATGGAACAAGATATCTTAGGAGTAGGAATCAGCCCGCACCCTTTAGTGGGGATTTCACAAAAAGCTAGCCGTCCGTTTATACCAATTAGTCAAGTTCAAGAAAATAGCGAAGCTACTATTTTAGTTCAGCTAAAGCAGGTCAAAGTTATTAGGACAAAAAGTTCTGGGCAACAAATGGCTTTCTTGACTGTTATGGATATTAATTCAAAAATGGATATTACTGTTTTTCCTGAAACTTTCAATATTGTAAGAGATGATTTACAAGAAGGGAAATATTATTACTTGCATGGAAAAATTCAGAAGCGAGATGAGCGATTACAGATGGTTTTAAACGGTGTTCAAGAAGCAACGGAGGAACGTTTTTGGATACTTCTAAAAAATCATGATAACGACAAAAAAATATCGGAAATATTGTCCAAATACAAAGGGCATATTCCTGTCTATTTGCATTATGAAACAACTAAAGAAACTATCCAAAGCAAAGTACATTTGGTTAGAAAAGATAGTGGCTTAGCCCTTGATTTATCTGAATTTGTTGTGAAAACGGTTTATCAA

SEQ ID NO: 10630 - protein, 1034 aa, Streptococcus agalactiae; identical to SEQ ID NO: 6248

SEQ ID NO: 10631 - protein, 1020 aa, Streptococcus agalactiae
ATGAAACGTATTGCTGTTTTAACTAGTGGTGGTGACGCCCCTGGTATGAACGCTGCTATCCGTGCAGTTGTTCGTAAAGCAATTTCTGAAGGTATGGAAGTTTACGGCATCAACCAAGGTTACTATGGTATGGTGACAGGGGATATTTTCCCTTTGGATGCTAATTCTGTTGGGGATACTATCAACCGTGGAGGAACGTTTTTACGTTCAGCACGTTATCCTGAATTTGCTGAACTTGAAGGTCAGCTTAAAGGGATTGAACAGCTTAAAAAACACGGTATTGAAGGTGTAGTAGTTATCGGTGGTGATGGTTCTTATCATGGTGCTATGCGTCTAACTGAGCACGGTTTCCCAGCTGTTGGTTTGCCGGGTACAATTGATAACGATATCGTTGGCACTGACTATACTATTGGTTTTGACACAGCAGTTGCGACAGCAGTTGAGAATCTTGACCGTCTTCGTGATACATCAGCAAGTCATAACCGTACTTTTGTTGTTGAGGTTATGGGAAGAAATGCAGGAGATATCGCTCTTTGGTCAGGTATCGCTGCAGGTGCAGATCAAATTATTGTTCCTGAAGAAGAGTTCAATATTGATGAAGTTGTCTCAAATGTTAGAGCTGGCTATGCAGCTGGTAAACATCACCAAATCATCGTCCTTGCAGAAGGTGTTATGAGTGGTGATGAGTTTGCAAAAACAATGAAAGCAGCAGGAGACGATAGCGATCTTCGTGTGACGAATTTAGGACATCTGCTCCGTGGTGGTAGTCCGACGGCTCGTGATCGTGTCTTAGCATCTCGTATGGGAGCGTACGCTGTTCAATTGTTGAAAGAAGGTCGTGGTGGTTTAGCCGTTGGTGTCCACAACGAAGAAATGGTTGAAAGTCCAATTTTAGGTTTAGCAGAAGAAGGTGCTTTGTTCAGCTTGACTGATGAAGGAAAAATCGTTGTTAATAATCCGCATAAAGCGGACCTTCGCTTGGCAGCACTTAATCGTGACCTTGCCAACCAAAGTAGTAAA

SEQ ID NO: 10632 - protein, 340 aa, Streptococcus agalactiae; identical to SEQ ID NO: 1760

SEQ ID NO: 10633 - protein, 1296 aa, Streptococcus agalactiae
ATGGCTACTGTTCGTAAAGCAGAAGAGATTGCAGGACAAAAAGTTGGCTTCCTCCTTGATACTAAAGGACCTGAAATTCGTACAGAACTTTTTGAAGATGGTGCAGATTTCCATTCATATACAACAGGTACAAAATTACGTGTTGCTACTAAGCAAGGTATCAAATCAACTCCAGAAGTGATTGCATTGAATGTTGCTGGTGGACTTGACATCTTTGATGACGTTGAAGTTGGTAAGCAAATCCTTGTTGATGATGGTAAACTAGGTCTTACTGTGTTTGCAAAAGATAAAGACACTCGTGAATTTGAAGTAGTTGTTGAGAATGATGGCCTTATTGGTAAACAAAAAGGTGTAAACATCCCTTATACTAAAATTCCTTTCCCAGCACTTGCAGAACGCGATAATGCTGATATCCGTTTTGGACTTGAGCAAGGACTTAACTTTATTGCTATCTCATTTGTACGTACTGCTAAAGATGTTAATGAAGTTCGTGCTATTTGTGAAGAAACTGGCAATGGACACGTTAAGTTGTTTGCTAAAATTGAAAATCAACAAGGTATCGATAATATTGATGAGATTATCGAAGCAGCAGATGGTATTATGATTGCTCGTGGTGATATGGGTATCGAAGTTCCATTTGAAATGGTTCCAGTTTACCAAAAAATGATCATTACTAAAGTTAATGCAGCTGGTAAAGCAGTTATTACAGCAACAAATATGCTTGAAACAATGACTGATAAACCACGTGCGACTCGTTCAGAAGTATCTGATGTCTTCAATGCTGTTATTGATGGTACTGATGCTACAATGCTTTCAGGTGAGTCAGCTAATGGTAAATACCCAGTTGAGTCAGTTCGTACAATGGCTACTATTGATAAAAATGCTCAAACATTACTCAATGAGTATGGTCGCTTAGACTCATCTGCATTCCCACGTAATAACAAAACTGATGTTATTGCATCTGCGGTTAAAGATGCAACACACTCAATGGATATCAAACTTGTTGTAACAATTACTGAAACAGGTAATACAGCTCGTGCCATTTCTAAATTCCGTCCAGATGCAGACATTTTGGCTGTTACATTTGATGAAAAAGTACAACGTTCATTGATGATTAACTGGGGTGTTATCCCTGTCCTTGCAGACAAACCAGCATCTACAGATGATATGTTTGAGGTTGCAGAACGTGTAGCACTTGAAGCAGGATTTGTTGAATCAGGCGATAATATCGTTATCGTTGCAGGTGTTCCTGTAGGTACAGGTGGAACTAACACAATGCGTGTTCGTACTGTTAAA

SEQ ID NO: 10634 - protein, 432 aa, Streptococcus agalactiae; identical to SEQ ID NO: 1762

SEQ ID NO: 10635 - protein, 555 aa, Streptococcus agalactiae
ATGGTTAAACGCGATTTTATTAGAAATATTATTTTAGCATTGATTGCTGTATTGATTTTGATTCTCTTGAGATATTTTGTTTTTGCAACCTTTAAAGTACATAAGGATGCTACAAATTCTTATTTTAGCAACGGAGATGTTGTTGTTGTTAATCGTAATAGGACGCCTAAGTACAAAGACTTTATTGTCTATAAGGTTGGAAAGATTTTCTATATTAGTCGTGTTATTGGTGAGCCAAATCAAAAAGTGAGAGTAATGGATGATATTTTATATTTGAATGATGTTTTCAAGGATGAGCCTTACATTGAAAAAATGAAAAATGCTTATTCTGAAAAGAAAGACGGTCAAATGCCCTTTACTTCCGACTTCTCAGTTGAAACATTAACACGAAATAAAGAAAGCAGAGTTCCTAAGGGTTCTTATCTTGTGTTAAATGATAATCGACAAAATAAAAATGATAGTCGAAAATTTGGATTAATCAAAGAGAAAGATATTCGTGGTGTTATTACCTTTAAAGTATACCCTCTAAGTGAATTTGGTTTTACAGCTTCAGAG

SEQ ID NO: 10636 - protein, 185 aa, Streptococcus agalactiae; identical to SEQ ID NO: 1764

SEQ ID NO: 10637 - protein, 141 aa, Streptococcus agalactiae
ATGTTTTTGTTTGTCAATAAAAAAATTGGTATAGTCTTTTTGATTTTCTGTGATAACGAGATAAACGCTATCAAAAATTCTATCTATCTTAAAAAAATATATTTCTTAGCCATTTTATTACATAAAAAGAATGGTATCAAA

SEQ ID NO: 10638 - protein, 47 aa, Streptococcus agalactiae; identical to SEQ ID NO: 1766

SEQ ID NO: 10639 - protein, 1812 aa, Streptococcus agalactiae
ATGTGTGGTATCGTAGGTGTAGTTGGAAATACAAATGCAACGGATATTTTAATTCAAGGCTTAGAAAAGCTAGAGTACCGAGGATATGACTCAGCAGGTATTTTTGTAGTAGGTGATAACAAAAGTCAACTTGTGAAGTCAGTCGGTCGAATCGCGGAGCTTCAGGCAAAAGTAGGAGATTCTGTTAGTGGTACGACAGGTATCGGTCATACACGTTGGGCAACCCATGGTAAACCTACTGAAGGAAATGCACATCCTCACACTTCAGGATCTGGTCGTTTTGTATTGGTACACAATGGTGTTATTGAAAATTACCTTCAAATTAAAGAAACTTACTTAACAAAACATAACCTCAAGGGTGAAACTGATACAGAAATAGCTATTCATTTAGTTGAACACTTTGTTGAAGAAGATAACTTATCAGTGCTTGAAGCCTTTAAAAAAGCCTTACATATTATAGAAGGATCATACGCATTTGCTCTTATTGATTCTCAAGATGCTGATACGATTTACGTAGCTAAAAATAAATCACCTCTTCTAATAGGTTTGGGAAATGGTTATAATATGGTGTGTTCAGATGCCATGGCTATGATACGTGAGACAAGTGAATATATGGAAATCCACGATAAAGAACTCGTTATTGTTAAAAAAGATAGCGTTGAAGTTCAAGATTATGATGGTAATGTCATTGAACGTGGTAGCTACACAGCAGAGCTTGACTTATCAGATATTGGTAAGGGGACTTATCCATTCTACATGCTTAAAGAAATTGATGAGCAACCAACTGTGATGCGTAAGTTGATTTCAACTTATGCGAACGAATCTGGAGATATGAATGTGGATTCTGATATTATAAAATCAGTCCAAGAAGCAGATCGTCTTTACATATTGGCTGCAGGAACGTCATATCATGCTGGTTTTGCTGCTAAGACCATGATCGAAAAATTAACTGATACACCTGTTGAACTTGGAGTTTCTTCAGAATGGGGTTACAACATGCCACTTTTGAGTAAGAAGCCAATGTTTATTTTACTTAGTCAATCGGGAGAAACAGCAGATAGTAGACAAGTTTTAGTTAAAGCAAACGAAATGGGAATCCCTAGTTTAACTATAACAAATGTGCCTGGCTCAACACTTTCTCGTGAAGCAACCTATACGATGCTCATTCATGCAGGACCTGAAATCGCTGTTGCTTCTACAAAAGCATATACTGCTCAAGTTGCAACGTTAGCTTTCTTAGCAAAAGCGGTAGGAGAAGCAAATGGTAAGGCAGAAGCAAAAGATTTTGATTTGGTTCATGAATTGTCAATTGTAGCACAATCAATTGAAGCGACCTTATCAGAAAAAGATGTTATCTCTGAGAAGGTAGAGCAGTTGTTAATCTCGACACGTAATGCCTTCTACATTGGTCGTGGTAACGACTATTATGTTACAATGGAGGCTGCACTGAAGCTAAAAGAGATTTCTTATATTCAGACAGAAGGTTTTGCTGCAGGTGAATTAAAACATGGTACAATTTCGTTGATTGAAGACAATACTCCTGTTATTGCTTTAATATCTGCTGATTCAACTATTGCAGCGCATACTCGTGGAAATATCCAAGAAGTTGTTTCTCGCGGAGCAAATGCTTTGATTATTGTAGAAGAAGGGTTGGAACGTGAAGGTGATGATATTATTGTTAATAAAGTTCACCCATTCTTATCAGCCATTTCAATGGTTATTCCGACTCAATTAATTGCTTACTATGCTTCATTACAACGTGGCTTAGATGTTGATAAACCACGTAATTTGGCAAAAGCTGTAACTGTTGAA

SEQ ID NO: 10640 - protein, 604 aa, Streptococcus agalactiae; identical to SEQ ID NO: 6258

SEQ ID NO: 10641 - protein, 326 aa, Streptococcus agalactiae
ATGTCATTACCAAATTGCCCTAAGTGTAACTCTGAATATGTCTATGAAGACGGTATTTTACTGGTTTGTCAGAATGTGCTTACGAGTGGAATCCAGAAGAAATCGAAGAAGAAGTAGGTTTAATTGTATTGGATAGCAATGGAACGCGCTTATCAGATGGAGATACTGTGACAGTTATTAAGGATTTAAAAGTAAAAGGAGCGCCTAAGGATATTAAGCAAGGCACTCGTGTTAAAAATATTCGTTTAGTTGATGGCGATCATAATATCGATTGTAAAATTGATGGTTTTGGAGCTATGAAACTAAAATCTGAGTTTGTAAAAAAA

SEQ ID NO: 10642 - protein, 109 aa, Streptococcus agalactiae; identical to SEQ ID NO: 1770

SEQ ID NO: 10643 - protein, 639 aa, Streptococcus agalactiae
ATGTCTTATATTTTAGAAATCTTACCTAGCTTATTAGTAGGTGCGCAAGTGACATTGCAAGTTTTCTTTATTGTTATTTGTTTATCAATTCCACTTGGTATTGTTGTAGCCTTCCTAATGAAAGTTCATTTTAAGCCGCTTCAATGGCTACTGACAACTTATATTTGGATTATGCGAGGCACGCCTCTGTTATTACAGCTTATCTTTTTTTATTACTTTTTACCAAGTGTAGGGATTTCTTTTGATCGTATGCCAGCTGCGATTATTGCTTTTACGATGAATTATGCAGCTTATTTTGCAGAGATTTTTCGAGGAGGTATTGAGTCTATTCCTAAAGGGCAATATGAAGCTGCAAAGGTATTAAAGTTTTCTAAGTTTCAAACGGTTTGGTACATAGTATTACCTCAAGTCTTCAAAATAGTCTTACCGAGTGTTTTCAATGAAACGATTACTTTAGTGAAAGATTCCTCATTGGTTTACATACTTGGTGTGGGCGACTTACTTCTAGAAAGTAAGACAGCCGCAAATAGGGATGCAACACTTGCACCAATGTTTATAGCAGGTGGTATTTACCTATTATTAATTGGTCTTTTAACTATTTTATCTAAACAAGTTGAAAAGCGTTTTAACTACTATAAA

SEQ ID NO: 10644 - protein, 213 aa, Streptococcus agalactiae; identical to SEQ ID NO: 1772

SEQ ID NO: 10645 - protein, 627 aa, Streptococcus agalactiae
ATGTTAGAATTAAAAAATATTTCTAAATGCTATGGGCAAAAAGAAATCTTTAAAGATTTCAATCTGACTGTAGAAGAAGGTAAAATTCTCTCTTTAGTAGGACCTTCTGGAGGTGGAAAAACAACACTATTACGTATGTTAGCTGGATTGGAAAAGATTGATTCAGGGACTATTGTTCACGATGGTAAAGAAGTATCTGTTGATCATTTGGAAACACTAAATCTTTTAGGATTCGTCTTCCAAGACTTTCAATTATTCCCACATTTAACAGTATTAGATAATTTGATCCTCTCTCCTGTTAAAACGATGGGATTATCAAAAGAACTTGCTAAAGAAAAAGCCTTAGTATTACTTGAACGCTTGGGACTTAAAGACCATGCTTTAGTCTATCCATTTTCATTATCTGGGGGGCAAAAGCAACGTGTCGCACTAGCTCGTGCGATGATGATTGATCCACAGATTATTGGTTATGATGAGCCAACTAGCGCTCTTGATCCAGAGTTGCGTCAAGAAGTAGAAAAACTAATTTTACAAAATAGAGAAACAGGTATGACACAAATTGTAGTAACACATGATCTTCAATTTGCTGAAAGTATATCTGATACGATTCTCAAAATTAATCCTAAG

SEQ ID NO: 10646 - protein, 209 aa, Streptococcus agalactiae; identical to SEQ ID NO: 1774

SEQ ID NO: 10647 - protein, 903 aa, Streptococcus agalactiae
ATGATCTTCAATTTGCTGAAAGTATATCTGATACGATTCTCAAAATTAATCCTAAGTAGACTTGGGGGTAGATTGTTGACTCACAAAAATATATTATTAACCATTATATTTGGATTATTTATGATTATATTATCAGCATGTGGTATGTCTAATAAGGAAATGGCTGGTATTGATAATTGGGAACATTATCAAAAGGAAAAGAAAATTACTATTGGATTTGATAATACTTTTGTTCCTATGGGATTTGAAAGTCGTTCTGGTGACTATATCGGCTTTGATATTGATTTAGCTAATGCTGTTTTTAAAGAATACGGTATTTCAGTGAAATGGCAGCCTATTAACTGGGATATGAAAGAAACTGAACTTAATAATGGTAATATAGACCTTATTTGGAATGGTTATTCAAAAACGGCAGAACGTGCTAAAAAAGTCGCTTTTACAAACCCATATATGAATAATCATCAAGTAATTGTTACTAAAACTTCATCACATATTAATAGTATTAAGGATATGAAGGGGAAAAAACTAGGAGCCCAGTCGGGTTCATCTGGTTTTGATGCTTTTAACGCTAAACCTGATATTTTAAAAAAGTTTGTAAAAGGAAAAGAAGCAGTTCAATACGATACTTTCACTCAGGCTTTGATTGATTTAAAAAATAACCGTATTGATGGTCTTTTGATTGATGAAGTTTATGCTAACTATTATTTAAAGCAAGAAGGAAATATAAAAGCTTATTATTTTGTTAAAACTGCTTATCAAGGAGAAAATTTTGTAGTAGGAGCTCGTAAAGTTGATCGTAGACTAATTGAAAAGATTAACAAAGCTTTCAAACAGCTTCATAATAAGGGGAGATTTCAAAAAATCTCTTACAAATGGTTTGGTGAAGATGTTTATAGTAAAGAA

SEQ ID NO: 10648 - protein, 301 aa, Streptococcus agalactiae
MIFNLLKVYLIRFSKLILSRLGGRLLTHKNILLTIIFGLFMIILSACGMSNKEMAGIDNWEHYQKEKKITIGFDNTFVPMGFESRSGDYIGFDIDLANAVFKEYGISVKWQPINWDMKETELNNGNIDLIWNGYSKTAERAKKVAFTNPYMNNHQVIVTKTSSHINSIKDMKGKKLGAQSGSSGFDAFNAKPDILKKFVKGKEAVQYDTFTQALIDLKNNRIDGLLIDEVYANYYLKQEGNIKAYYFVKTAYQGENFVVGARKVDRRLIEKINKAFKQLHNKGRFQKISYKWFGEDVYSKE

SEQ ID NO: 10649 - protein, 240 aa, Streptococcus agalactiae; identical to SEQ ID NO: 6267

SEQ ID NO: 10650 - protein, 80 aa, Streptococcus agalactiae; identical to SEQ ID NO: 1778

SEQ ID NO: 10651 - protein, 917 aa, Streptococcus agalactiae
ATGAATAATGAATTTATTAATTTCGACCGTATTTCCAGAGAAAATTGGAAGGACTTACATCAGCAATCCCAAGCTTTACTAACTGAAAAAGAGCTTGAATCTATCAAAAGCTTAAACGATAATATTAATATTCAAGATGTTATTGACATCTACCTTCCTTTAATTAACCTTATTCAAATCTATAAACGTAGTCAAGAAAATTATCTTTTTCTAAAGCAATATTTCTTAAAAAGGAAAATTATCAACGTCCTTTTATTATCGGCATATCAGGGTCAGTTGCTGTTGGAAAATCAACTACCAGTCGCTTACTACAATTACTAATTTCACGAACTTTTAAAGATAGTCACGTCGAATTAGTCACTACTGATGGCTTTTTATATCCTAACGAGAAACTCATACAAAATGGAATTTTAAACCGTAAAGGTTTCCCGGAATCCTATGATATGGAGTCACTTCTAAATTTCTTAGATACTATAAAGAACGGTATAACCGCGAAAATCCCAATTTATTCTCATGAAATCTACGATATCGTTCCAAATCAATTGCAAACTATTGAAACACCAGATTTTTTAATTTTAGAAGGAATAAATGTCTTTCAAAACCAACAAAACCATCGACTTTACATGAATGATTATTTTGATTTTTCAATATACATTGATGCTGAAAATAAACAAATTGAAGAATGGTATTTACAACGATTTAACAGTCTTCTACAATTAGCCGAAGCAGACCCTAGTAATTACTATCATAAATTCACACAAATACCGCCACATAAAGCTATGGAACTAGCTAAAGATATTTGGAAAACTATTAATTTAGTCAACCTTGAAAAATATATAGAACCAACCAGAAATAGGGCTGATTTTATTATTCATAAAGGGAAACATCATAAAATTGATGAAATTTATCTCAAAAAG

SEQ ID NO: 10652 - protein, 306 aa, Streptococcus agalactiae; identical to SEQ ID NO: 6270

SEQ ID NO: 10653 - protein, 588 aa, Streptococcus agalactiae
ATGGCTAATATGTATTATACAGAGAATCCTAATGTTGAACATGATATTCATGAGCTAAATGTCAAATTATTAGGAGAATCATTCAGTTTTTTAACTGATGCAGGAGTTTTCTCTAAAAGAATGATAGATTATGGTAGTCAAGTCCTTCTAAATAGTTTACATTTTGAAAAAAATAAATCCTTGTTAGACCTTGGGTGTGGATACGGTCCGCTGGGAATTTCTCTAGCCAAAGTGCAAGGAGTTAAAGCAACTATGGTTGACATTAATACGAGAGCATTGGAATTAGCTAAGAAAAATGCAACACGCAATGGAGTAGTAGTTGAAGTCTTTCAGTCAAACATTTATGAAAATATTTCTAAAACTTTCGACTATATTATAAGCAACCCACCTATTCGTGCTGGAAAGCAAGTTGTTCATTCTATTATCGAAGAAAGTATCTGTTACCTTAATACAGGCGGTAGCCTTACCATTGTCATTCAAAAGAAACAAGGCGCTCCAAGTGCAAAAGCTAAAATGCTAGATACTTTTGGTAATTGCGATATTTTAAAAAAAGATAAGGGATATTATATATTGAGAAGTGAAAAAGTC

SEQ ID NO: 10654 - protein, 196 aa, Streptococcus agalactiae; identical to SEQ ID NO: 6272

SEQ ID NO: 10655 - protein, 414 aa, Streptococcus agalactiae; identical to SEQ ID NO: 6273

SEQ ID NO: 10656 - protein, 138 aa, Streptococcus agalactiae; identical to SEQ ID NO: 6274

SEQ ID NO: 10657 - protein, 1047 aa, Streptococcus agalactiae
ATGAACAAAAAAATTGCCGGGATCGGCTTGGCTTCGATTGCAGTACTTAGTTTAGCTGCATGTGGACATCGTGGTGCTTCTAAATCTGGTGGTAAATCAGATAGCTTGAAGGTTGCAATGGTAACAGATACCGGTGGTGTTGATGATAAATCATTTAACCAATCTGGTTGGGAAGGTATGCAAGCTTGGGGCAAGAAGAATGGCCTTAAAAAAGGAGCTGGTTTTGACTATTTCCAATCGGCAAGTGAATCTGATTATGCAACTAACTTAGATACAGCTGTGTCTAGTGGTTATAAATTGATTTTCGGTATTGGATTTTCTCTTCATGATGCTATTGATAAAGCAGCAGACAATAACAAAGATGTTAATTACGTCATCGTTGATGATGTTATTAAAGGGAAAGATAATGTTGCAAGTGTTGTCTTTGCGGATAATGAATCAGCTTACTTAGCAGGTATTGCAGCCGCTAAAACTACCAAAACAAAAACAGTTGGCTTTGTAGGTGGTATGGAATCTGAGGTTATTACCCGTTTTGAAAAAGGTTTTGAAGCAGGTGTCAAATCAGTTGATAAATCAATTAAAATTAAAGTTGACTATGCTGGTTCATTCGGTGATGCTGCTAAGGGTAAGACAATTGCAGCCGCACAATATGCTTCTGGCGCAGATATTGTTTATCAAGTAGCTGGTGGAACTGGTGCAGGTGTATTCAGTGAAGCAAAATCACGCAATGAATCTTTAAAAGAAGCTGACAAAGTTTGGGTATTAGGTGTAGACCGTGACCAAGCAGCAGAAGGTAAGTATACTTCTAAAGATGGTAAGGCTTCTAACTTTGTTTTGGCTTCATCAATTAAAGAAGTTGGAAAATCAGTTGAATTGATTGCTACTAAAACAAGTAAAGGTAAATTCCCAGGTGGTAATGTAACAACTTATGGTTTGAAGGATGGTGGAGTTGATATAGCAACTACAAACCTTTCAGATGACGCCGTTAAAGCGATTAAAGAGGCTAAAGCTAAAATTATTTCAGGAGATATCAAAGTTCCTAGCAAA

SEQ ID NO: 10658 - protein, 349 aa, Streptococcus agalactiae; identical to SEQ ID NO: 6276

SEQ ID NO: 10659 - protein, 1533 aa, Streptococcus agalactiae
ATGACACAGAATGTCATTGAAATGAAAGAAATCACTAAGAAATTCGGTGATTTTGTGGCAAATGATCATATCAATTTGACGGTTGAAAAAGGTGAGATACATGCTCTGCTTGGCGAAAACGGTGCAGGGAAATCAACTTTAATGAACATGTTAGCAGGTTTACTAGAACCAACAGACGGTCAAATTTTTATTAATGGTCAGCCTGTAACTATTGATTCACCTTCCAAATCGTCACAATTGGGGATTGGTATGGTACATCAGCATTTCATGCTTGTTGAAGCATTTACTGTAGCTGAAAATATTGTTCTAGGAAATGAAACCACCCAAAATGGTGTTTTAGACATTAAGACAGCAGCTAAAGAAATAAAGGAACTATCAGAGAAATATGGTTTGTCAGTAAATCCAAATGCTAAAATATCTGATATTTCTGTAGGAGCACAGCAGCGTGTTGAAATTTTGAAGACACTTTATCGCGGTGCAGATATTTTAATTTTTGATGAGCCGACGGCGGTGCTTACACCATCAGAAATAAAAGAATTGATGACAATTATGAAGAGCCTTGTTAAAGAAGGCAAATCCATTATACTAATTACCCATAAATTGGATGAAATTCGGGCAGTTGCTGATAAAGTTACTGTGATTCGCCGTGGTAAAAGTATTGAAACAGTCCCTGTTGCAGGCGCAAGTTCTCAACAACTGGCGGAAATGATGGTTGGACGATCTGTTTCCTTCAGAACTGAAAAAAAGGAAGCTAATCCGACTGACATAATCCTTTCTGTAAAGGATTTAGTTGTAGAAGAAAATAGAGGCGGCGTTCTAGCTGTTAAAAATCTGTCGTTAGATGTTCGAGCAGGTGAAATTGTAGGTATAGCTGGTATTGATGGTAATGGACAAAGTGAATTAATTCAAGCTATTACAGGTTTAAGAAAGGTAACTTCTGGTCAAATTGTAATTAAAGGTAAAGATGTCACAAAATTTTCAAGTCGACAAATTACAGAATTAAGTGTAGGTCATGTTCCAGAAGATCGTCATAGAGATGGTTTGGTTCTAGATATGACGATGGCAGAAAATTTAGCTTTACAAACTTATTATAAAGAGCCATTGAGTCATAAAGGTATCCTTAATTTTGCTAAAATTAAAGAGTATGCTCGTCAATTAATGACAGAATTTGATGTGCGTGGTGCTGGTGAACATGTTTTAGCAAGAGGATTTTCTGGTGGTAACCAACAAAAAGCAATTATTGCTCGTGAAGTGGATCGCGATCCAGACCTACTCATTGTTAGCCAACCGACTCGTGGTCTAGATGTTGGTGCTATCGAGTATATTCATAAACGTTTGATTGAAGAGCGCGATAAAGGGAAAGCGGTCTTAGTAGTTAGCTTTGAGTTAGATGAAATCTTAAACTTATCAGATCGTATTGCAGTTATTCATGATGGTAAAATTCAAGGAATTGTTAAACCCGACCAAACCAACAAGCAAGAATTGGGTATTTTGATGGCTGGTGGAAAAATTGAAAAGGAGGAGAGAGATGTC

SEQ ID NO: 10660 - protein, 511 aa, Streptococcus agalactiae; identical to SEQ ID NO: 1786

SEQ ID NO: 10661 - protein, 1059 aa, Streptococcus agalactiae
ATGTCTAAGAAGGCGCAAAAAATTGCAGTTCCTCTGATTTCAGTTGTACTAGGAATCATTCTAGGAGCTATTATTATGCTGATATTTGGTTATGATCCACTTTGGGGTTATGAGGGATTGTTCCAAACAGCATTCGGTAGTATAAAAAATATTGGTGAAATTTTCCGTGCAATGGGACCATTAATTTTAATTGCTCTAGGTTTCTCAGTTGCCAGTCGTGCAGGTTTCTTTAATATTGGACTTCCAGGGCAAGCCTTATCAGGATGGATTGCCGCAGGTTGGTTCGCTCTTTCACACCCAGATATGCCACGTCCAGCAATGATTCTTTGTACTATTATTATTGGTATCGTTGCTGGGGGAATCACTGGAGCTATTCCAGGTATTCTCAGAGCATACCTTGGAACAAGTGAAGTTATTGTAACTATTATGATGAACTATATTGTTCTTTATTCAGGAAATGCTATTGTACAACGTGTTTTCCCAAAAAGCATTATGCGTACAAGTGACTCGAGTGTATATGTTTCTGCCAATGCATCATACCAGACAGATTGGTTATCTAGTTTAACGAATAATTCACGTATCAATATTGGTATCTTCATTGCTATTATTGCAGTTGTGTTAGTTTGGTTCCTATTAAATAAAACAACGCTTGGATTTGAAATTCGTTCAGTTGGTTTAAATCCAAATGCTAGTGAGTACGCTGGTATGTCTGCAAAGCGTACAATTATTCTATCAATGATTATTTCTGGAGCTTTTGCAGGACTTGGTGGTGTTGTTGAAGGACTAGGTACATTTGAGAATGTATTTGTACAGCCATCCTCGTTAGCTATTGGCTTTGACGGTATGGCAGTAAGTCTACTCGCAGCGAATAGTCCAATAGGTATTTTATTTGCAGCATTTCTATTTGGTGTTCTAAGTGTTGGTGCGCCTGGTATGAACATTGCAGGTATTCCACCTGAGTTAATTAAAGTTGTAACAGCTTCAATCATCTTCTTCGTAGGTGTCCATTACATTATTGAGTATGTTATTAAACCTAAAAAACAAATGAAAGGTGGTAAG

SEQ ID NO: 10662 - protein, 353 aa, Streptococcus agalactiae; identical to SEQ ID NO: 1788

SEQ ID NO: 10663 - protein, 954 aa, Streptococcus agalactiae
TTGAGTTTAACAACGATTTTTGCATTGCTATTTTCATCAATGCTAATTTACGCAACACCTCTTATCTTTACAAGTATTGGGGGAACCTTCTCTGAACGTGGTGGTATCGTCAACGTTGGTTTAGAAGGAATTATGGTAATTGGAGCTTTCTCAGGCGTTGTATTTAATTTAGAGTTTGCTTCTGTTTTTGGTGATGCGACTCCATGGATTTCTGTACTAGTTGGTGGTTTAGTTGGTTTAATTTTTTCTGTTATCCATGCAGTTGCGACAGTTAATTTTCGTGCAGATCATATTATCAGCGGAACCGTTCTTAATTTAATGGCACCTTCATTAGCTGTTTTCTTGATTAAGGTTCTTTATAATAAAGGTCAAACTGATAATATTCAAGAATCATTTGGAAAATTTAATTTCCCTATACTATCAGATATTCCTTTTGTTGGTGATATCTTCTTTAAAGGAACAAGCTTAGTCGGTTATATTGCTATTCTTTTCTCATTCCTTGCTTGGTTTATTCTATATAAAACTCGCTTTGGATTAAGATTACGCTCAGTTGGAGAACATCCTCAAGCAGCAGACACCTTAGGTATTAATGTTTATCTTATGCGTTACTCTGGTGTCTTGATTTCAGGTTTCCTTGGTGGAATAGGAGGAGCTGTATATGCTCAATCTATTTCTGTTAACTTTGCAGCGACAACTATATTAGGACCGGGCTTTATCTCCTTAGCGGCGATGATTTTTGGTAAGTGGAATCCAATTGGTGCAATGCTTGCTAGTCTATTCTTTGGTTTATCGCAAAGTTTAGCAGTTATCGGTAGCCATTTACCACTTTTGAGCAATATTCCAACAGTTTATCTACAAATTGCTCCATATGTCCTCACTATCATTGTATTAGCAGCTTTCTTTGGACAAGCAGTAGCTCCTAAGGCGGATGGTATTAATTATATTAAAACGAAA

SEQ ID NO: 10664 - protein, 318 aa, Streptococcus agalactiae; identical to SEQ ID NO: 1790

SEQ ID NO: 10665 - protein, 1368 aa, Streptococcus agalactiae
ATGAGTAAAATCGTTGTCGTAGGGACAAACCACGCTGGTACAGCAGCAATTAAAACAATGCTTAGTAATTATGGTGAAGCCAATGAAATTGTAACATTTGATCAAAATTCCAATATCTCTTTCTTAGGATGTGGTATGGCTCTTTGGATTGGTGAACAGATTGATGGTCCAGAAGGATTGTTCTACTCTGATAAAGAGCAGTTGGAAAGTATGGGAGCTAAGGTTTACATGAACTCTCCAGTACTTAATATTGACTACGATAAAAAAGAAGTTACAGCTTTAGTAGATGGAAAAGAACATGTTGAAAGTTATGAAAAACTTATTTTAGCAACTGGTTCACAACCTATCATTCCACCAATTAAAGGTGTTGAAATTCAAGAAGGATCTCGTGAATTTAAAGCTACTCTTGAAAACCTTCAATTTGTGAAACTTTATCAAAATTCAGAAGAAGTTATTGAAAAGTTAGCTAAACCTGGTATCAATCGTGTTGCTGTTGTTGGGGCTGGGTATATTGGTGTAGAATTAGCAGAAGCTTTCCAACGTATTGGAAAAGAAGTAACACTTGTTGATGTTGCTGATACTTGTATGGGTGGTTACTATGATCGTGACTTTACTGATATGATGAGTAAAAACCTTGAAGACCATGGTATTCGTCTTGCTTTCGGACAAGCTGTTCAAGCAGTTGAAGGTGATGGTAAAGTAGAACGTCTTGTTACTGATAAAGAAACATTTGATGTTGATATGGTGATCTTAGCTGTTGGATTCCGTCCAAATACAGAACTCGGTGCAGGTAAATTAGATACATTCCGTAATGGCGCTTGGGTAGTTGATAAGAAGCAAGAAACAAGCGTGAAAGATGTTTATGCTATAGGTGATTGTGCGACAATTTGGGATAATTCTCGTGATGATATCAATTATATTGCTCTTGCTTCAAACGCCGTTCGTACTGGTATTGTAGCAGCTCACAATGCATGTGGTACAGAGCTTGAAGGTGCTGGTGTCCAAGGGTCAAATGGTATCTCAATCTATGGCCTTAACATGGTGTCAACTGGTTTGACTTTAGAAAAAGCAAAACAAGCTGGGTACAATGCAGTTGAAACAGGCTTTAATGACCTTCAAAAACCAGAATTTATCAAACACAATAATCATGAAGTAGCTATTAAGATTGTCTATGATAAAGATAGCCGAGTTATCCTTGGTTGCCAAATGGTCTCACACGAAGATGTATCTATGGGAATTCATATGTTCTCACTTGCTATTCAAGAAAAAGTTACTATTGAAAAGCTTGCTTTGACCGATATCTTCTTCTTACCACATTTTAATAAGCCATATAACTATATTACAATGGCTGCATTAGGCGCTAAAGAT

SEQ ID NO: 10666 - protein, 456 aa, Streptococcus agalactiae; identical to SEQ ID NO: 1792

SEQ ID NO: 10667 - protein, 987 aa, Streptococcus agalactiae
ATGACTGCAACTAAACAACATAAAAAAGTTATTCTCGTTGGTGATGGTGCCGTAGGTTCTTCTTACGCTTTTGCACTTGTTAACCAAGGTATTGCGCAAGAGTTAGGTATCATTGAAATCCCAGCTTTATTTGATAAAGCTGTTGGTGATGCTGAAGATCTTTCACATGCCCTTGCATTTACATCACCTAAAAAAATCTACGCAGCTACTTATGCAGACTGCGCAGATGCTGACCTTGTTGTCATTACTGCTGGCGCACCTCAAAAACCAGGTGAAACTCGACTTGACCTTGTTGGTAAAAACTTAGCAATTAACAAATCAATCGTAACTCAAGTTGTTGAATCAGGTTTCAACGGTATCTTCTTAGTAGCGGCTAACCCTGTAGATGTACTTACATATTCAACTTGGAAATTCTCAGGTTTCCCTAAGGAACGCGTTATTGGTTCAGGTACTTCACTTGACTCTGCACGTTTCCGTCAAGCTTTAGCAGATAAAATTGGTGTTGATGCTCGTTCAGTTCACGCATACATCATGGGTGAACACGGTGACTCAGAATTTGCCGTTTGGTCACATGCTAACGTTGCTGGTGTCCAACTTGAACAATGGTTACAAGAAAATCGCGATATTGATGAACAAGGACTTGTTGATTTGTTTATTTCAGTTCGTGACGCTGCATACTCAATCATCAACAAAAAAGGTGCTACATATTACGGTATTGCTGTCGCACTTGCTCGTATTACTAAAGCTATCCTTGATGATGAAAATGCAGTTCTTCCATTATCTGTATATCAAGAAGGCCAATACGGTGATGTTAAAGATGTCTTTATCGGTCAGCCTGCAATCGTAGGTGCACATGGTATCGTTCGTCCAGTTAATATCCCATTAAATGATGCTGAACTTCAAAAAATGCAAGCCTCAGCTGAACAATTAAAAGATATTATTGACGAAGCTTGGAAAAACCCAGAATTCCAAGAAGCATCAAAAAAC

SEQ ID NO: 10668 - protein, 329 aa, Streptococcus agalactiae; identical to SEQ ID NO: 1794

SEQ ID NO: 10669 - protein, 2457 aa, Streptococcus agalactiae
ATGCAAGATAAAAATTTAGTAGATGTTAATCTAACTAGTGAAATGAAAACGAGTTTTATCGATTACGCCATGAGTGTCATTGTTGCTCGTGCACTTCCAGATGTTAGAGATGGTTTAAAACCTGTTCATCGTCGTATTTTATATGGTATGAATGAACTAGGTGTGACACCTGATAAACCTCATAAGAAATCAGCACGTATTACTGGTGATGTTATGGGTAAATACCATCCACATGGTGATTCATCTATTTACGAAGCAATGGTGCGTATGGCACAATGGTGGTCATATCGTCATATGCTCGTTGATGGTCATGGAAACTTTGGTTCAATGGATGGGGATGGTGCTGCCGCACAGCGTTATACAGAAGCACGTATGAGTAAAATTGCTCTTGAGATGCTTCGTGATATCAATAAAAATACAGTTGATTTTCAAGATAACTATGATGGCAGTGAACGTGAACCTCTTGTTTTACCAGCGCGTTTCCCTAATTTATTAGTCAATGGTGCAACTGGTATTGCTGTAGGTATGGCAACAAATATTCCACCACATAATCTAGGTGAGTCTATAGATGCTGTCAAATTGGTTATGGATAACCCTGATGTTACTACACGGGAGTTAATGGAAGTTATTCCTGGTCCAGATTTTCCTACTGGTGCCTTGGTGATGGGACGTTCAGGTATTCACCGTGCCTATGAAACTGGGAAGGGATCAATTGTCTTACGTTCACGGACTGAAATTGAAACAACTTCAAATGGGAAAGAGCGTATTGTTGTCACAGAGTTTCCATATGGCGTTAATAAAACAAAAGTACACGAGCATATTGTACGTTTAGCACAAGAAAAGCGCATTGAAGGTATTACTGCTGTTCGTGATGAATCAAGTCGTGAAGGCGTTCGTTTTGTTATTGAAGTTCGTCGTGCTGCTTCAGCAAATGTGATTTTAAATAATCTTTTCAAATTAACTAGCTTGCAGACAAATTTTAGCTTCAATATGCTTGCTATTGAAAAAGGTGTTCCAAAAATTTTGTCATTACGACAAATCATTGATAACTATATTGAACACCAAAAGGAAGTTATTGTTCGTCGTACTCAGTTTGACAAAGCTAAAGCAGGAGCCCGTGCTCATATCTTAGAAGGTTTACTTGTGGCGCTTGATCACTTGGATGAAGTTATCACAATTATTCGTAATAGTGAGACAGACACCATTGCTCAAGCAGAGTTGATGTCACGTTTTGAATTATCGGAGCGTCAGAGTCAAGCTATTTTAGATATGCGTCTTCGTCGTTTAACTGGATTAGAACGCGATAAAATCCAATCAGAATACAATGACTTACTAGCTTTAATTGCTGATTTAGCAGATATCTTAGCTAAGCCTGAACGTGTTGTTACCATTATAAAAGAAGAGATGGATGAGGTTAAGCGTAAGTATGCTGATGCCCGTCGTACAGAATTAATGATTGGTGAAGTTTTATCACTTGAAGATGAAGACCTTATTGAGGAAGAAGATGTTCTTATTACTCTCTCAAACAAGGGATATATCAAGCGTCTCGCTCAAGATGAGTTTAGAGCACAAAAACGTGGAGGACGCGGTATTCAAGGGACTGGAGTTAATAACGATGATTTTGTTCGTGAATTGGTTTCAACAAGTACTCACGATACTGTGCTTTTCTTTACAAATTTAGGGCGTGTGTATCGTTTGAAAGCATATGAAATTCCAGAATATGGACGTACAGCTAAAGGCCTCCCTATCGTTAACCTTTTAAAACTTGACGAAGGTGAGACAATTCAAACAATTATTAACGCTAGAAAAGAAGATGTCGCTAATAAATATTTCTTTTTCACAACTCAGCAAGGTATAGTGAAACGTACAAGTGTTTCTGAATTTAGTAACATTCGTCAAAATGGACTTCGTGCTATTAATTTGAAAGAGAATGACGAGTTGATTAACGTCCTCTTGATTGACGAAAATGAAGATGTTATTATCGGGACACGTACAGGCTACTCTGTTCGCTTCAAAGTGAACGCTGTACGTAATATGGGACGCACAGCGACTGGGGTACGAGGCGTTAATCTTCGTGAAGGTGATAAAGTTGTGGGAGCTTCTCGTATCGTTAATGGACAAGAAGTACTAATCATCACTGAAAAAGGTTATGGCAAGAGAACAGAAGCTTCGGAATATCCTACAAAAGGCCGTGGTGGTAAAGGAATAAAAACCGCTAATATTACTGCTAAAAATGGGCCATTAGCACGCTTAGTGACGATTAATGGAAATGAGGACATCATGGTCATTACAGATACAGGTGTTATTATTCGAACCAATGTTGCTAATATTTCTCAAACTGGTCGTTCTACCATGGGTGTTAAAGTGATGAGACTTGATCAAGAAGCTAAAATCGTCACTGTTGCGCTAGTGGAACAAGAAATTGAAGATAAGTCTAATATAGAGGATACAAAAGAA

SEQ ID NO: 10670 - protein, 819 aa, Streptococcus agalactiae; identical to SEQ ID NO: 1796

SEQ ID NO: 10671 - protein, 741 aa, Streptococcus agalactiae
ATGCGTAATAAAAAAAAATCACATGGTTTCTTTAACTTTGTTAGATGGTTATTGGTTGTATTGCTAATTATTGTTGGGTTGGCTTTGGTGTTCAATAAACCAATTCGCAATGCTTTCATAGCTCATCAATCAAATCATTATCAAATTTCACGAGTTAGTAAAAAAACAATTGAAAAAAATAAGAAATCTAAAACAAGTTATGACTTTTCATCAGTCAAATCTATTAGTACAGAATCGATTTTATCTGCTCAAACGAAATCACATAATTTGCCTGTAATAGGAGGGATTGCTATACCAGATGTCGAAATCAATCTCCCAATTTTCAAAGGACTGGGCAATACAGAGTTGAGTTATGGTGCAGGAACGATGAAAGAAAACCAGATTATGGGAGGCCCAAATAACTATGCCTTAGCTAGTCACCATGTCTTTGGTTTGACAGGTTCTTCTAAGATGCTCTTTTCACCTTTAGAACATGCTAAGAAAGGTATGAAAGTTTACCTCACTGATAAAAGCAAAGTATACACTTACACTATTACTGAAATTTCAAAGGTAACACCAGAACATGTTGAGGTTATTGATGATACACCTGGCAAGAGCCAACTCACTTTAGTGACCTGTACGGATCCAGAAGCCACAGAACGTATTATTGTGCATGCTGAATTAGAAAAAACAGGTGAATTTTCAACAGCAGATGAGTCGATATTAAAAGCATTTTCGAAAAAATATAATCAAATTAATCTC

SEQ ID NO: 10672 - protein, 247 aa, Streptococcus agalactiae; identical to SEQ ID NO: 1798

SEQ ID NO: 10673 - protein, 411 aa, Streptococcus agalactiae
ATGAAATTAAAGACTGTTCATCATATTGCGATAATTGTTTCTGACTATGAAAAGTCAAAAGACTTCTATGTTAATAAGCTAGGATTTGAAATTATTCGTGAAAACCATCGTCCGGAGCGTCATGATTATAAATTAGATTTACGGTGCGGTGATATTGAGCTTGAAATATTTGGAAATCGTCTTGATGATCCAGAATATGAAACTCCTCCTCAGAGAATAGGTAGGCCGAATTGGCCACGTGAAGCATGTGGTTTACGACACCTTGCCTTTTACGTTCCAGATGTGGAAGCGTACAAGGTAGAACTGGAGAATTTAGGAATTTTTGTAGAGCCTATTCGTTACGATGACTATACTGGCAAAAAGATGACCTTTTTCTTTGATCCAGATGGTTTACCTTTAGAATTACATGAA

SEQ ID NO: 10674 - protein, 137 aa, Streptococcus agalactiae
MKLKTVHHIAIIVSDYEKSKDFYVNKLGFEIIRENHRPERHDYKLDLRCGDIELEIFGNRLDDPEYETPPQRIGRPNWPREACGLRHLAFYVPDVEAYKVELENLGIFVEPIRYDDYTGKKMTFFFDPDGLPLELHE

SEQ ID NO: 10675 - protein, 686 aa, Streptococcus agalactiae
ATGAGTATTAAAAAGCTATTGTTTGCAGGCCTTGCTTTTATTTTATTTACCCTAGCGAGTCCAGCATATGCTGCATCAGATGTTCAGAAAGTTATTGATGAAACTTATGTTCAACCTGATTATGTCTTAGGTTATTCGCTAAATCAAGAACAGCGTGCACAGACATTACAACTTCTGAATTATGATGAATCTAGAGACACGAAAGTTAAAACGCTAAATACTAGCTCATATGCTAAAATAATGAATATAGCTGATGATGCAAGCATCCAATTATATTCATCTGTTAAAATAAAAAAATTAGGGTCTAACGATACCTTAGCAGTAAACATTGTTACACCTGAGAATATTACTAAAGTTACAGAAGATATGTATCGCAATGCTGCAGTTACATTAGGTATTGAGCATGCAACGATATCAGTGGCTGCTCCAATAAAAGTAACTGGGGAGAGTGCTCTTGCAGGTATCTATTATTCATTAGAGAAAAATGGAGCAAGTGTATCATCAGAAAATAAACAACTAGCACAAGAAGAGTTAAGTACTTTATCTGGTATTAATGCTGAGAATAAGGGTAAGGAAGGTATGACGCCGACAAGCTTAATGTAGCTTTAACGGATATTAAGTCAGCCGTAGCTAAAGGAGGATCTGATCTTTCAAAAGATGATATTCGAAAAANNNNNTTAATTAAT

SEQ ID NO: 10676 - protein, 229 aa, Streptococcus agalactiae
  VARIANT 194, 225, 226: Xaa = Any Amino Acid
MSIKKLLFAGLAFILFTLASPAYAASDVQKVIDETYVQPDYVLGYSLNQEQRAQTLQLLNYDESRDTKVKTLNTSSYAKIMNIADDASIQLYSSVKIKKLGSNDTLAVNIVTPENITKVTEDMYRNAAVTLGIEHATISVAAPIKVTGESALAGIYYSLEKNGASVSSENKQLAQEELSTLSGINAENKGKEGXDADKLNVALTDIKSAVAKGGSDLSKDDIRKXXLIN

SEQ ID NO: 10677 - protein, 156 aa, Streptococcus agalactiae
TTGAATAATTTGAAAGACAACATTGTTTCGAAAGCAGGATCTAAATTTAAAAATATCAATGTCAATTTTAATGCTAATAAAGCTGTTGAATCAGGTAAGGGATTTTTAGCTAATATTTGGCAACAAATTGTTAATTTTTTCCAGCAGTTTGGTAGT

SEQ ID NO: 10678 - protein, 52 aa, Streptococcus agalactiae
MNNLKDNIVSKAGSKFKNINVNFNANKAVESGKGFLANIWQQIVNFFQQFGS

SEQ ID NO: 10679 - protein, 999 aa, Streptococcus agalactiae
ATGCTAGGACTTGTTCATCAAAATCAGGTATTACATGTCTTGTCAGAAATTGGTGTTATCTTACTCATGTTTTTAGCGGGTCTTGAAGCTAATTTTGATCTTTTAAAGAAGTATCTTAAGCCCAGTCTACTGGTCGCAATTACTGGTGTTATTGTTCCTATGGCTCTCTTCTACTTCTTGACACGCTTGTTTGGGTTCCAAATCAATACTGCTATCTTTTACGGGCTCGTATTTGCTGCAACTAGTATTTCTATCACAGTTGAAGTTTTACAAGAATACAATCGTGTAAAAACAGATACTGGTGCTATTATTTTAGGTGCTGCTGTTGCTGATGATGTCTTAGCTGTTTTGCTTCTGAGTGTCTTTATTGCAACAAATGGAAGCTCTTCTAATATCGGATTACAAATTATCATTCAATTGTTATTCTTTGTTTTCTTATTTATTTGTATGAAATACCTTGTACCTGCTCTTTTCAAATTAATCGAAAAGGTTCATTTCTTTGAGAAATATACTATTCTTGCTATCCTTATCTGTTTTTCTCTATCAATTTTAGCCGATAAAGTTGGAATGAGTTCTATCATTGGTTCGTTTTTTGCAGGATTAGCTATTGGACAAACTTCTTTTGTTGATAAGGTAGAACATAAAATTTCACTTCTTAGTTACACCTTCTTTATCCCAATTTTCTTCGCTTCAATTGCACTACCTCTTAAATTCGATGGAATGATGTCTCACCTTCACACGATATTAATCTTTACTGCTTTGGCTGTTTTATCAAAATTAATTCCAGGGTACTTTGTCGGTCGAGGCTTTAATTTTTCAAAATTAGAATCTTTAACAATTGGTGGTGGAATGGTCAGTCGTGGCGAGATGGCTCTCATTATAGTTCAAGTTGGATTAGCTGCTAAAATTATTTCAAGCACTACTTATTCCGAGCTTGTTATTGTTGTTATACTATCAACTATTATTGCGCCATTTATTCTTAAATATTCATTTAAAGAT

SEQ ID NO: 10680 - protein, 333 aa, Streptococcus agalactiae
MLGLVHQNQVLHVLSEIGVILLMFLAGLEANFDLLKKYLKPSLLVAITGVIVPMALFYFLTRLFGFQINTAIFYGLVFAATSISITVEVLQEYNRVKTDTGAIILGAAVADDVLAVLLLSVFIATNGSSSNIGLQIIIQLLFFVFLFICMKYLVPALFKLIEKVHFFEKYTILAILICFSLSILADKVGMSSIIGSFFAGLAIGQTSFVDKVEHKISLLSYTFFIPIFFASIALPLKFDGMMSHLHTILIFTALAVLSKLIPGYFVGRGFNFSKLESLTIGGGMVSRGEMALIIVQVGLAAKIISSTTYSELVIVVILSTIIAPFILKYSFKD

SEQ ID NO: 10681 - protein, 1468 aa, Streptococcus agalactiae
ATGTATTCAATTGGAAATACACCTATTTTCCCTGGAAATTTTAAAAAAGATGATTATTATTTTTATTCAATGATTAATTGTGCTGGAGTTGATTATGAATTCTTACGAAAGAAAAATACATTTTTAGTTAGATATCTTCAAGAATTTCATATCTTTGAAACTCTTTCTGAGTTGAAGTATTTTTTAAAGCAACAAAATATTTTCGATATTCCAGTGATTGAAAAAAACGGTAGGGAAAAAGTAGCCGATTTAGAACTTTTTTATGAGTTGTTTTTCGTTGGACAAGATAGTAGAAATCCTTCAAATATTGTTAATAAAGGATATTATAATAAAAGTGATTTTTTCAGTATGATAATCGCATTGAAAGGATATTCTAATATTAGTCATAGCAAAGAATTAGATGAAATAAAAGAAGAAATTAAGGTAGTTCAGAACGAAATCAAAGCCAATAAAGAATATCTAAAATTACTCAAAACAGACAAAAATGTTTCTAGCTATTTAGATAAATTTACTAGTAATGAAGAATTTGAAAAATTTCAAAGTCGCTCAAAGCAACTAAATGACAAAATTAGCGAAATACAACGAGAACGAAATAGAGAACAAGTTAGACAGGATAAATTAAATCAACTATTAAAGGAGTTAAACTCGCTTAACAGAGAAATAAAAAGTGGGAATGTATATTGTACAGATTGTGGCAGTTCTAACATCAGCTTTAAAAATCGTGATGTTAATTTTGATTTAAGTAACGTAGAAGTAAGAAAACAAGTTTTAAATTCGATTGATTTCAAATTTTATGAGTAAAATGAAATTACTGAGTGACGAAGAACTCAATGAAGTTCAAGATGAATTTAAAACACTTTTAAAAGATACTCCAAAGGATTTTAAAAAAAGTTTATTGTATTCTGAGATTATCAATACAGATATAGATTATGATGATAAGTTGTTAGAGCTAAATAAAAAATTACACAGTTTACAATTTGATAAATCAATTTTAGAACAAAGAGGTTTAAACAATAAGGAAGCGATAAAATTAATTAAAGAGGATATCGTTACAAAAATGAATACTCTTTATAAAGAAATTGACCCTAGTGGGAAATTGATTTTTGATGATTTATTTACCAAAAAAGATGCTACTTATTCTGGAAGTGATGGTCAAGTATATTATTTTTGCAGATTAATTTCTCTAAATAACTTATTAAAACATTCGTATCCAATTATTAATGATTCTTTCAGAGAAGGTGAAATCTCTACTGGAAAAGAAGAGTTAATGATTAAACATTTTAAAACATTAAATAAACAAGTCCTTCTTTCTGCTACACTAAAAAATCAAGAATATATTGATAATAAATATGAAAACCTCCCTGATATAAATGCAATTGATTATAGTATAAATAATGATAGTAAAATCCTTGATTCGAAATATATTGATGAATTTATTATTTTACTTAAAAAGTTTAATATTGAATTA

SEQ ID NO: 10682 - protein, 491 aa, Streptococcus agalactiae
MYSIGNTPIFPGNFKKDDYYFYSMINCAGVDYEFLRKKNTFLVRYLQEFHIFETLSELKYFLKQQNIFDIPVIEKNGREKVADLELFYELFFVGQDSRNPSNIVNKGYYNKSDFFSMIIALKGYSNISHSKELDEIKEEIKVVQNEIKANKEYLKLLKTDKNVSSYLDKFTSNEEFEKFQSRSKQLNDKISEIQRERNREQVRQDKLNQLLKELNSLNREIKSGNVYCTDCGSSNISFKNRDVNFDLSNVEVRKQVLNSIDFQILMSKNEITELTEELNEVQDEFKTLLKDTPKDFKKSLLYSEIINTDIDYDDKLLELNKKLHSLQFDKSILEQRGLNNKEAIKLIKEDIVTKMNTLYKEIDPSGKLIFDDLFTKKDATYSGSDGQVYYFCRLISLNNLLKHSYPIINDSFREGEISTGKEELMIKHFKTLNKQVLLSATLKNQEYIDNKYENLPDINAIDYSINNDSKILDSKYIDEFIILLKKFNIEL

SEQ ID NO: 10683 - protein, 1560 aa, Streptococcus agalactiae
ATGACTGATATTTCTATATTGAATGATATCCAAAAAATTATCGTTCTAGATTACGGTAGTCAATATAACCAGCTTATCGCACGTCGTATCCGTGAATTTGGTGTATTTTCTGAGTTAAAATCACATAAAATTACGGCTGATGAAATTCGCGATATTAATCCTATTGGTATCGTACTTTCAGGTGGTCCAAATTCCGTATACGCTGATGGCGCTTTTGGAATCGATGAAGAAATTTTTGAATTAGGAATTCCAATCTTAGGAATTTGTTATGGCATGCAACTGATTACCCATAAACTCGGTGGTAAGGTTCTTCCTGCGGGAGAAGCTGGTCATCGTGAGTATGGTCAATCAGCACTTCGCCTACGCTCAGAATCAGCACTCTTTGCTGGCACTCCTCAAGAACAACTTGTTTTGATGAGCCATGGTGATGCTGTCACTGAAATTCCTGAGGGTTTCCATCTCGTTGGTGACTCTGTTGACTGTCCATTTGCTGCAATGGAAAATACTGAAAAACAATTTTATGGTATCCAATTCCACCCCGAAGTTCGTCACTCAGTATATGGCAATGATATCCTTAAAAATTTTGCTGTTAATATCTGTGGCGCACGTGGTGATTGGTCAATGGATAACTTCATTGATATGGAAATTGCAAAAATACGTGAAACTGTAGGCGATCGTAAAGTACTTCTTGGACTATCTGGCGGTGTTGATTCATCTGTTGTCGGAGTACTCCTACAACGTGCTATCGGTGATCAATTAACATGTATTTTTGTAGATCATGGTTTATTACGTAAAAATGAAGGTGACCAAGTTATGGATATGCTTGGTGGTAAATTTGGACTTAATATTATCCGTGTTGATGCTTCAAAACGCTTCCTAGATCTTCTTTCTGGTGTTGAAGATCCCGAGAGAAAACGAAAAATCATCGGAAATGAGTTCGTGTACGTTTTTGATGATGAGGCAAGTAAACTTAAAGGCGTTGATTTCCTTGCTCAAGGTACCCTCTACACAGATATTATTGAATCTGGGACAGAAACAGCCCAAACAATCAAGTCACACCATAATGTTGGTGGATTGCCAGAAGATATGCAATTTGAATTGATTGAGCCACTTAACACATTATTCAAAGATGAGGTTCGCGCTCTTGGTACTGCACTTGGAATGCCTGATGAAGTTGTATGGCGTCAACCATTCCCTGGGCCTGGTCTTGCTATTCGCGTTATGGGTGAAATTACCGAAGAAAAACTTGAAACAGTCCGCGAATCAGATGCTATTCTTCGTGAAGAAATCGCTAAAGCTGGTCTAGATCGTGACGTATGGCAGTATTTCACAGTTAATACTGGCGTACGTTCTGTCGGTGTTATGGGAGATGGTCGTACTTATGACTATACAATTGCTATCCGTGCAATTACTTCAATTGATGGCATGACAGCTGACTTTGCGCAACTTCCTTGGGATGTACTTAAGAAAATTTCGACACGTATTGTTAACGAAGTTGATCACGTTAACCGTATTGTTTATGATATTACAAGTAAACCACCTGCAACTGTTGAGTGGGAA

SEQ ID NO: 10684 - protein, 520 aa, Streptococcus agalactiae; identical to SEQ ID NO: 1812

SEQ ID NO: 10685 - protein, 696 aa, Streptococcus agalactiae
TTGTTACCAGCATATATTAAAATTCACGACGCTATTAAAAAGGAAATCGATAAAGGGACTTGGAAGATTGGGCAGCGGTTACCTAGCGAAAGAGATTTAGCGGATGATTATAGTGTAAGTCGTATGACACTTCGCCAATCAATTACATTGTTAGTTGAAGAAGGTATTTTGGAGAGACGAGTTGGTAGTGGCACCTATGTTGCTAGTCATCGTGTTCAAGAAAAAATGCGGGGAACAACTAGTTTTACAGAAATTGTCAATTCTCAAGGGCGTAAGCCATCCAGTAAACTAATCTCATTTCAAAGAAAACTAGCAAATGAAACCGAAATTCAAAAATTAAATTTATCACAGTCAGATTATGTGGTTCGTATGGAAAGGGTACGTTATGCTGATAAGGTACCGTTGGTTTATGAGGTAGCCTCTATACCAGAGAATTTAATTAAAGGTTTTGAACAATCAGAGGTTACAGAACATTTCTTTAAAACCTTAACAGAGAATGGCTACGAAATTGGGAAAAGCCAACAAACTATATATGCTAGAAATGCTAGTGAACGTGTTGCTTCGCATTTAGAAGTTAACGCAGGCCATGCTATTTTGGCATTGACACAAGTTTCATACTTTACTGATGGTAAGCCTTTTGAATATGTTCATGGGCAATATGTTGGAGATCGTTTTGAGTTTTATTTAGAGAATAAC

SEQ ID NO: 10686 - protein, 232 aa, Streptococcus agalactiae; identical to SEQ ID NO: 1814

SEQ ID NO: 10687 - protein, 1332 aa, Streptococcus agalactiae
ATGTCTCAATCTTACATTAATGTTATCGGCGCTGGTTTGGCTGGTTCTGAAGCAGCTTATCAAATTGCTAAACGTGGAATACCAGTTAAGCTTTATGAAATGCGTGGGGTTAAATCAACCCCTCAACATAAAACAGATAATTTTGCAGAATTAGTATGTTCCAATTCATTCCGCGGTGATTCTCTAACAAATGCAGTTGGTCTTTTAAAAGAAGAAATGCGTCGTTTGGATTCTATCATTATGAGAAATGGGGAGGCACATCGAGTTCCAGCAGGTGGAGCCATGGCCGTTGATAGAGAAGGTTATTCTGAAGCTGTTACTGAGGAAATCCATAAACATCCATTAATCGAAGTAATTCGTGATGAAATCACAGATATCCCTGGAGATGCTATTACAGTTATCGCTACAGGACCATTAACAAGTGATAGTCTGGCAGCTAAAATCCATGAACTTAATGGTGGTGATGGTTTTTATTTTTACGATGCCGCCGCTCCAATTGTCGATAAAAATACGATTGACATAAATAAAGTTTACCTTAAGTCTAGGTATGACAAAGGTGAAGCAGCTTATCTAAATTGTCCAATGACCAAAGAAGAATTTATGGCTTTTCATGAAGCTTTAACTACAGCTGAGGAAGCACCACTAAATTCTTTTGAGAAAGAAAAATACTTCGAAGGTTGTATGCCTATCGAAGTGATGGCTAAGCGTGGTATTAAAACGATGCTTTATGGTCCAATGAAACCAGTTGGTTTGGAGTATCCTGAGGACTACAAAGGACCGCGAGATGGTGAATTTAAAACACCATATGCTGTTGTTCAATTACGTCAAGATAATGCTGCAGGCTCTCTTTATAACATAGTTGGTTTCCAAACTCATCTTAAGTGGGGAGAACAAAAACGTGTATTTCAAATGATTCCTGGTCTTGAAAATGCTGAATTTGTCCGGTATGGTGTTATGCATCGCAATTCTTATATGGATTCACCAAATCTTTTAAACCAAACCTTTGCTACACGTAAGAACCCAAATCTTTTCTTTGCTGGACAAATGACCGGTGTTGAAGGTTATGTAGAATCGGCAGCAAGTGGTCTTGTAGCGGGAATCAATGCTGTCCGTCGCTTCAATGGGGAGAGTGAAGTAGTTTTCCCACAAACTACTGCTATTGGTGCACTGCCACATTATATTACACATACAGACAGCAAACATTTCCAACCAATGAATGTTAACTTTGGTATCATCAAAGAATTAGAAGGTCCACGAATTCGTGATAAGAAAGAGCGTTATGAAGCTATTGCTACACGAGCTTTGAAAGATTTAGAAAAATTTCTCAACTAT

SEQ ID NO: 10688 - protein, 444 aa, Streptococcus agalactiae; identical to SEQ ID NO: 1816

SEQ ID NO: 10689 - protein, 741 aa, Streptococcus agalactiae
ATGCACTATAAAGAATTACTTGAGTCATCCGAAAAAGCTTATTTGGAAACTAATCGGTATAAACATTTTAAGAATATAATCATTTCAGAGCGTTATTTTTCAAACTATATTAGCTACAAAATAATGCCTACAGTAAGTGAGTTTTTACAGGATATGATCTATTTAGCAGATGAACAAAAAGATTATCAGTCTGATTTTGCTTTTGTATTTTTTGAGGAAAATGCTGAATTGAGCAGTGAATTACAGAGAACTTTATCACAACAAGGCTTTGAATCAGAGAAACATATCATATTTACAAATTCATTAAATCATCTTAAACTTTTTGAAAAAGAATTTGATGACATCACATTTACTAAACTTAATGAAAATTACCTAGAAAAATACCTAAAGTTCAAATATAAACAAAGTATAGTTTACGGAGAAATTTACGCTAAGCAAATGTATAATGATAATCGTGTTAATCTTTTAAATAATAATGCTAAAGTTTACCTAGCTATTAAAGATAATCAAATTATTGGAGATGTAACAGCTTGGGACTATGGTGAATACGTGGAAATAGATGATTTTTATGTCCAAGAGTCCTACAGAGGACAAGGAATTGGTACGCGCCTACAATTTGATGCAAGTAGGGGGTTTAAGAAAGTTATCTTAATTTCAGAAGAAGAAAACAGAAAAATGTATGAGCACCAAGGTTATGAGGAAGTCGCCTATTATTGGACCGCTTTACGGAGCCCTCGAAAG

SEQ ID NO: 10690 - protein, 247 aa, Streptococcus agalactiae; identical to SEQ ID NO: 1818

SEQ ID NO: 10691 - protein, 846 aa, Streptococcus agalactiae
ATGAAAATCAAAAAGCTATTAGGGTTAACGACAACAGTAGTAATTTCAGCACTTATTTTAGGAGCCTGTGGTCAGTCTAAAAATGAAGACGCCAAAGTCGTTAGAGTTGGAACAATGGTAAAGAGTAAAACTGAAAAAGCTCGTTGGGATAAAATCGAAGAATTAGTTAAGAAAAAAGGCGTTAAGCTAAAATTTACGGAATTCACAGATTATACACAACCTAATAAAGCTTTAGAAAGTGATGAGATTGATATTAATGCTTTCCAGCATTATAATTACTTAAACAATTGGAATAAAGCAAATAAGACCAATCTTGTTTCCGTTGCTGAGACATACTTTACTTCCTTTAGATTATACTCTGGTACTAAGAACGGTAAAGGTAAATACCAAACAGTTTCTGAAATTCCAAATAAAGCAACTATTACTATCCCAAACGATGCAGTTAACGAAAGTCGCTCTCTCTACTTGTTACAATCAGCAGGCTTGCTAAAATTGAAAGTATCAGGTGATGCATTAGCAACAATGTCAGATGTTGTTTCCAATCCTAAATCTTTAGATTTAAAAGAAGTAGATGCAGCACAGACCGCACGTTCTTTGGATTCCACAGATGCAGCAGTTATTAATAATGATTTTGTGACAGAAGCAGGAATAAATCCTAAATCAGCTATTTTTATTGAACCAAAAAGTAAAAATGCAAAACAATGGTACAACCTTTTAGTTGCTCAAAAAGGTTGGCAAGACAAATCAAAAGCTAAAGCCATTAAAGAAGTTGTGAAAGCTTACCATACAGATGCGGTTAAAAAAGTTATCGAAAAAACATCTCAAGGTTTAGATCAACCTGTTTGG

SEQ ID NO: 10692 - protein, 282 aa, Streptococcus agalactiae; identical to SEQ ID NO: 1820

SEQ ID NO: 10693 - protein, 486 aa, Streptococcus agalactiae
ATGGCCAAGACAAGTAAAAAATTGACAAAATCTTTAGGGCCTATTGGTAAATTAATTTCAATAATCCCTGACACAACTGAACTTATTGGAAAAGCAATTGATAATTCTCGTCCAATTATTGAAAAAGAACTTGACCGTCGTCATGAAAAAAAACAGACTTATACTCAGCTTGATAATGTAGTACACCTTGATATCAATGATGCGCAAGTTTACTTAGAGCAACGCCATTTTAATGTATCAAGGATTGTTGCTGAACCAAATTCAAAGTGGGCAACCCTACATCCTAATCAAGTTGTGAATATGTCGCCTAAAGCTGGTAGGGTCAGAATCGGTTCATTAGTGAAGTTGTACTATATTACAGAGGATATCCTTGAAGAAAGTAAGACACTACTTTTATCTAAATCCGAAAAAAGTAAAGCACGACAACAACGGTTAACAGAAGTATTGAGTACCCCTAGTCAATTACTCAAAAAAAATCGAAATAAA

SEQ ID NO: 10694 - protein, 162 aa, Streptococcus agalactiae; identical to SEQ ID NO: 1822

SEQ ID NO: 10695 - protein, 537 aa, Streptococcus agalactiae
ATGCGGCGAAAAATAGTTTTACTTTTTGTAGTTCCAATGCTTATAGTTTTAGGAATTTTAGGAGTGGTAGTTCATTATTATGGTTCAGCATTAAATATTTATCTATTACCTCCTAGTAGCGAACGTTATGGACGTGTTATTTTAGATCGTGTTGAACAGCGTGGTTTGTATTCGCAAGGTCGTCAATGGCAAATTATAAGACAACGATCAGAAAAAAAGTTGAAAACGTCAAAATCTTACCAAGAGAGTCGCAACATTGTACAGGAAGCAGTACGGTATGGAGGCGGTAAACATAGTCAAATATTATCCAAAGAGACTGTACGAAGAGATACCCTAGATAGTCGATATCCAGAATATCGAAGATTAAACGAAGACATTCTCTTAATTACTATTCCTTCTATAAGTAAGTTAGATAAACGATCTATTAGCCATTATAGTGGTAAATTACAAAATATATTGATGGAAAAAAGTTATAAGGGACTCATTTTAGACTTATCGAATAATACTGGCGGCAATATGATCCCTATGATTGGGGGG

SEQ ID NO: 10696 - protein, 179 aa, Streptococcus agalactiae
MRRKIVLLFVVPMLIVLGILGVVVHYYGSALNIYLLPPSSERYGRVILDRVEQRGLYSQGRQWQIIRQRSEKKLKTSKSYQESRNIVQEAVRYGGGKHSQILSKETVRRDTLDSRYPEYRRLNEDILLITIPSISKLDKRSISHYSGKLQNILMEKSYKGLILDLSNNTGGNMIPMIGG

SEQ ID NO: 10697 - protein, 351 aa, Streptococcus agalactiae
ATGAAAAATATACCGCTAGAAGCATTAAAAATATCTAGGAAAACAATCAATACTAAGCATGTTCCAATCGCTATTATAACTAATCATAAAACTGCTAGTTCGGCAGAAATGACTTTTTTATCATTTAAAGGATTACCTAATGTTAAAAGCTTTGGTCAAGCTACAGCAGGATATACGACTGTTAATGAAACTTTCATGCTTTACGACGGTGCTAGATTAGCTTTAACTACAGGAATAGTTAGTGATCGACAAGGATATAAATACGAGAACACCCCTATCTTACCAGATCAAGTAACCAGCCTTCCTTTACAAGAGTCACAGTCTTGGTTAAAGAGTAGAATCAATCAAAAT

SEQ ID NO: 10698 - protein, 117 aa, Streptococcus agalactiae
MKNIPLEALKISRKTINTKHVPIAIITNHKTASSAEMTFLSFKGLPNVKSFGQATAGYTTVNETFMLYDGARLALTTGIVSDRQGYKYENTPILPDQVTSLPLQESQSWLKSRINQN

SEQ ID NO: 10699 - protein, 750 aa, Streptococcus agalactiae
ATGTTATTAGAAATCAATCACTTAGAAAAAGTTTTTCGTACACGTTTTTCAAAAGAAGAGACAAGGGCTCTACAAGACGTCGATTTTAAAGTTGAACAAGGGGAATTCATTGCTATTATGGGAGAGTCTGGTTCGGGAAAAACAACTCTGCTAAATATTTTAGCTACTTTAGAAAAACCGACAAATGGACAAGTGATTTTAAATGGGGAAGATATTACGAAAATTAAAGAGGCAAAATTAGCGAGTTTTCGTTTGAAAAATCTTGGTTTCGTCTTTCAGGACTTCAACCTTTTGGATACTCTCTCTGTAAGAGATAATATCTATCTTCCTTTAGTTCTTGATCGTAAACGTTACAAAGAAATGGATCATCGTTTGTCAGAATTATCTTCTCATCTGAGAATTGATGACTTATTAGATAAGAGACCTTTCGAGCTCTCTGGTGGGCAAAAGCAACGTGTAGCGATTGCTCGTAGTTTGATAACCAACCCTCAAATTTTATTAGCAGATGAACCAACAGCAGCGTTAGATTACCGTAATTCAGAAGACTTGCTGAATTTATTTGAAACTATTAACTTGGATGGACAAACTATTTTGATGGTAACCCATTCAGCAAATGCTGCTAGTCATGCCAAACGCGTTTTATTTATCAAAGATGGACGTATTTTTCACCAACTTTATCGTGGTAATAAGAATAATAGCGAATTCAATAAAGATATTTCTTTAACAATGTCTGCCATATTAGGGGGTGAA

SEQ ID NO: 10700 - protein, 250 aa, Streptococcus agalactiae; identical to SEQ ID NO: 1826

SEQ ID NO: 10701 - protein, 1217 aa, Streptococcus agalactiae
ATGAATAAACGTCAAGTTGCGCGGTAGCTAGTCTAGAGCTGTTTATTATTTATATATTTCTTATTTCTATAGGAAGTCTGTTTAGTGCTTTTTTTGCTAAATTTATTTATTTAATTTTTGTCAACATTATTAACTATCATGCACTAAATCTTAGTTTAAGTTTATGGCCATTTATTATTTGTATCGTTATATTTACAGGTATTTTTCTGACTTTAGAAGTTCCAGTTATTCGACATGTTCATTTATCATCCCCATTAAGTCTTTTTAGAAAGAAACAACAGGGAGAAAAAGAACCAAAAGGTAATCTTATACTTGCAATTTTAGCGTTAGTAGCTATCCCATCCTTATACAATGGCTCTTACTTCAGTAAAGCACCTGCATTAGCTGTTATCTATCGTTTCTTCTTTGCAGTACTTTTAGTTATTGCTGGTACTTATCTTTTTTATATTAGTTTTATGACATGGTACTTAAAAAGGTTGCGTCAAAACAAGCATTATTATTATAAATCTGAGCATTTTGTATCAACTTCGCAAATGATTTTTCGAATGAAGCAAAATGCAGTAGGGTTAGCAAGTATCACTTTATTAGCTGTTATGGCTCTAGTTACTATTGCTACAACAGTCTCACTTTATTCAAATACACAAAATGTTGTTACCGGACTATTTCCAAAATCAGTAAGTTTATCAATAGATAATTCAAAAGGTGACGCGAAAAATATATTTGAAGAAAAGATTTTGAAGAAACTAGGTAAGTCATCTAAGGAAGCTATCACTTATAATCAGACAATGATTTCGATGCCAGTTAGTCAATCAAGTGAACTTAATATCACATCTAAAAACGTCAAACATGTTGATATCACAAAAACGGGTTTTATGTACCTAATTACTCAGAATGATTTCCGTCGTTTAGGTCACCAATTACCAAAATTAAAAGATAACCAAGTGGCTTACTTTGTTCAAAAAGGTGATAGCCGTTTGAAAAAAATAAATCTATTGGGAAATAAATTTGACGTTGTAAAAAATTTAAAAGAGGCTTATGTCCCAGAGACTACAAATACTTACAACCCGGGTTTGATTATATTTGCAAACAACAAACAAATTGACAATATTAGAAAAGCATATTTACCTTATACTAAGAACATCAATACTTTTCCAAAAACCTTTAAGGCATATTTGGATTTGAATAGTCAAGAGATAAATTCAATTTCTAAAACGACA

SEQ ID NO: 10702 - protein, 407 aa, Streptococcus agalactiae
  VARIANT 114, 116, 124: Xaa = Any Amino Acid
MNKRQVARVASLELFIIYIFLISIGSLFSAFFAKFIYLIFVNIINYHALNLSLSLWPFIICIVIFTGIFLTLEVPVIRHVHLSSPLSLFRKKQQGEKEPKGNLILAILALVAIXIXYTMALTSXKAPALAVIYRFFFAVLLVIAGTYLFYISFMTWYLKRLRQNKHYYYKSEHFVSTSQMIFRMKQNAVGLASITLLAVMALVTIATTVSLYSNTQNVVTGLFPKSVSLSIDNSKGDAKNIFEEKILKKLGKSSKEAITYNQTMISMPVSQSSELNITSKNVKHVDITKTGFMYLITQNDFRRLGHQLPKLKDNQVAYFVQKGDSRLKKINLLGNKFDVVKNLKEAYVPETTNTYNPGLIIFANNKQIDNIRKAYLPYTKNINTFPKTFKAYLDLNSQEINSISKTT

SEQ ID NO: 10703 - protein, 666 aa, Streptococcus agalactiae
ATGTCACAAGAGCAAGGAAAAATTTATATTGTAGAAGATGATATGACGATTGTGTCACTTTTAAAAGATCATTTATCAGCTAGCTATCATGTCTCTAGTGTCAGCAATTTTCGTGATGTGAAACAAGAAATTATCGCATTTCAACCCGATTTGATACTAATGGATATTACGTTACCCTATTTTAATGGTTTTTACTGGACTGCAGAATTGCGTAAGTTTTTAACAATTCCTATTATTTTCATTTCATCTAGTAATGATGAAATGGATATGGTTATGGCATTAAATATGGGGGGTGATGACTTTATTTCAAAACCATTCTCTCTAGCTGTATTAGATGCTAAGCTAACTGCTATTTTAAGGAGAAGTCAACAATTTATCCAACAGGAATTAACTTTTGGGGGATTTACGTTGACAAGAGAAGGGTTATTGTCTAGCCAAGATAAAGAGGTTATTTTATCGCCAACAGAAAATAAAATCCTATCTATCTTGCTCATGCATCCTAAACAAGTAGTCTCAAAAGAGTCTCTATTAGAGAAACTTTGGGAAAATGATAGTTTTATTGATCAAAATACACTTAATGTTAATATGACACGCTTACGTAAAAAAATTGTCCCAATAGGTTTTGATTACATTCATACAGTGAGAGGAGTTGGGTATTTACTACAA

SEQ ID NO: 10704 - protein, 222 aa, Streptococcus agalactiae; identical to SEQ ID NO: 1830

SEQ ID NO: 10705 - protein, 936 aa, Streptococcus agalactiae
ATGATACGCCAGTTTTTAAGAGAACACTTGATTTGGTATATTTTATATATCATGATGTTTGTCCTATTTTTTATTAGTTTCTATCTATATCATTTACCAATGCCCTATTTGTTTAATTCCTTAGGTTTAAATGTTATTGTTTTACTAGGAATTAGTATTTGGCAATACAGTCGTTACAGGAAAAAAATGTTACATCTCAAATATTTTAATAGTAGTCAGGACCCCTCTTTCGAACTTCAACCGAGTGATTACGCTTATTTTAATATTATTACACAATTAGAAGCTAGAGAAGCGCAAAAAGTTTCTGAAACAATTGAACAAACCAATCATGTTGCACTTATGATAAAGATGTGGTCGCACCAAATGAAAGTTCCATTGGCAGCTATTTCATTAATGGCCCAGACAAATCATCTCGATCCTAAGGAAGTTGAACAACAATTATTGAAATTGCAACATTATCTTGAAACGTTGTTAGCATTTTTGAAATTTAGACAATATCGTGACGATTTTCGTTTTGAAGCTGTTAGCCTTAGAGAAGTAGTAGTAGAAATTATAAAATCGTATAAGGTTATTTGTCTATCCAAAAGCTTATCTATCATAATTGAAGGCGATAATATCTGGAAAACAGACAAAAAGTGGTTAACTTTTGCTCTTTCACAGGTGCTAGATAATGCCATAAAATATTCTAATCCTGAGTCAAAGATAATAATAAGCATAGGAGAAGAGAGTATTAGAATACAAGACTACGGTATCGGCATACTCGAAGAAGATATCCCTAGACTTTTTGAAGATGGCTTTACGGGTTACAACGGTCATGAGCACCAAAAGGCAACAGGCATGGGGTTATATATGACAAAAGAAGTCTTATCTAGTCTGAATTTGTCCATTTCGGTGGATAGCAAAATTAATTATGGGACTGCTGTTTCTATACATAAA

SEQ ID NO: 10706 - protein, 312 aa, Streptococcus agalactiae; identical to SEQ ID NO: 1832

SEQ ID NO: 10707 - protein, 1068 aa, Streptococcus agalactiae
ATGAAACGTGAATTACTACTCGAAAAAATCGATGAACTAAAAGAAATTATGCCTTGGTATGTTCTAGAATATTATCAATCAAAGCTTTCTGTTCCTTATAGTTTCACAACACTCTACGAATATTTAAAAGAATATAGACGTTTTCTTGAATGGTTATTGGATTCTGGTGTTGCTAATTGTCATCACATTGCAGAAATTGAGCTTTCAGTTTTAGAAAACCTTACTAAAAAAGATATGGAAGCTTTTATACTATATTTACGAGAACGCCCTTTATTAAATGCTAACACAAGGCAAAATGGGGTGTCTCAAACCACCATTAACAGAACTCTATCTGCCTTATCTAGTCTTTTCAAATACCTTACTGAAGAGGTTGAGAATGCTGACGGGGAGCCTTACTTTTATCGCAATGTCATGAAAAAAGTCTCAACCAAAAAGAAAAAGGAAACTTTAGCTTCTCGGGCAGAAAATATTAAACAAAAGTTATTTTTGGGCAATGAAACGATAGAATTCTTAGAGTATATAAATTGTGAATATCAAAACAAACTTTCCAAACGTGCTTTAGCTTTTTTCAACAAAAATAAAGAGAGAGATTTAGCTATTATTGCTTTGCTACTAGCTTCAGGAGTGCGTCTATCTGAGGCAGTAAACTTAGATTTAAAGGATATTAACCTTAATGTAATGGTTATTGATGTCACACGAAAAGGGGGGAAAAGGGACTCTGTCAATGTCGCTAGCTTTGCGAAGCCCTACCTTGCTAATTATTTAGACATCCGTAAAAATAGATACAAAGCAGAAAATCAGGACATTGCTCTATTTTTATCAGAATACCGTGGGGTGCCAAATCGTATTGATGCTTCAAGTGTAGAGAAAATGGTTGCTAAGTATTCCCAGGATTTTAAGGTTCGTGTAACACCTCATAAACTAAGGCATACTCTTGCTACTAGGCTATATGATGCTACAAAATCTCAAGTATTAGTTAGCCACCAACTAGGTCATGCTTCCACTCAAGTTACTGACCTATATACCCATATTGTTAACGATGAACAAAAGAACGCTTTAGATAAACTA

SEQ ID NO: 10708 - protein, 356 aa, Streptococcus agalactiae
MKRELLLEKIDELKEIMPWYVLEYYQSKLSVPYSFTTLYEYLKEYRRFLEWLLDSGVANCHHIAEIELSVLENLTKKDMEAFILYLRERPLLNANTRQNGVSQTTINRTLSALSSLFKYLTEEVENADGEPYFYRNVMKKVSTKKKKETLASRAENIKQKLFLGNETIEFLEYINCEYQNKLSKRALAFFNKNKERDLAIIALLLASGVRLSEAVNLDLKDINLNVMVIDVTRKGGKRDSVNVASFAKPYLANYLDIRKNRYKAENQDIALFLSEYRGVPNRIDASSVEKMVAKYSQDFKVRVTPHKLRHTLATRLYDATKSQVLVSHQLGHASTQVTDLYTHIVNDEQKNALDKL

SEQ ID NO: 10709 - protein, 1659 aa, Streptococcus agalactiae
ATGTCTAGTTTTAATAGAAAAAAACTTAAGTTTTTGGGTATATCTTTGGCGACTCTAACAGCCACCACAGTTACCCTGGTTGCCTGTGGTAATGAGTCAAAGAACTCTGGAGATAATAAAGTTATTAATTGGTATATTCCTACTGAAATCAGTACATTGGACATTTCAAAGAATACAGATGCTTATTCAAACTTAGCTATAGGTAATTCAGGCAGCAATTTACTTAGAATTGATAAAGAGGGCAAACCAAAACCCGATTTAGCTAAAAAAGTATCCGTTTCTTCTGATGGTCTTACTTATACTGCTACACTTCGTGATAATTTAAAATGGTCAGATGGAAGCAAACTAAGCGCTGAAGATTTTGTTTACACATGGCGGAGAATAGTTGATCCTAAAACTGCATCTGAATATGCTTACTTGGCGACAGAATCGCACCTTTTAAATGCTGATAAGATTAATTCTGGAGATATTAAAGATTTAAATAAACTTGGTGTAACAGCTAAAGGCAATCAAGTGACCTTTAAATTGACAAGTCCATGCCCTCAATTTAAATATTATTTAGCCTTCTCTAATTTTATGCCTCAAAAACAATCGTATGTTGAAAAAGTTGGTAAAGATTATGGTACAACATCAAAAAATCAAATTTACTCAGGTCCTTACCTTGTTAAGGATTGGAATGGTTCAAATGGTAAATTTAAATTAGTCAAAAATAAATATTATTGGGATTCTAAACATGTTAAAACAAATAGTGTCATAGTTCAAACTATCAAAAAACCAGATACTGCAGTTCAAATGTACAAGCAAGGTCAGATTGATTTTGCTGAAATATCAGGAACTTCTGCTATTTATCAAGCTAATAAAAATAATAAAGATGTAGTAGATGCGTCTGATGCACGTACTACATATATTATTTATAACCAAACTGGTTCGGTTAAAGCATTGACAAATCAGAAAATTAGGCAAGCTTTGAATTTAGCGACTGATCGTAAAGGTGTTGTTAAAGCGGCAGTTGATACAGGTTCAACTCCTGCTGAATCTCTGGTCCCTAAAAAATTAGCCAAATTACCTAATGGTGAGGATCTTTCCAAGTATACTGCCCCAGGTTATACGTATAATACAAGTAAAGCTCAAAAACTTTTTAAAGAAGGTCTTGCTGAGGTTGGTCAGTCATCTCTCAAGTTAACAATCACAGCTGATTCGGACTCTCCAGCAGCTAAAAATGCTGTTGACTATGTGAAATCTACATGGGAGAGTGCTTTGCCTGGTCTAACTGTTGAAGAAAAATTTGTTACTTTCAAGCAACGCCTTGAAGATGCAAAAAATGAAAATTTTGATGTCGTGCTCTTCTCATGGGGAGGAGATTATCCAGAAGGATCAACTTTCTATGGGTTATTCACGACTAATTCTGCGTATAATTATGGTAAATTTTCTTCTAAAGAGTATGACAATGCCTATCAAAAGGCAATTACTACTGACGCCTTGAAACCAGGAGATGCCGCTAATGATTACAAAACTGCTGAAAAAGCTTTATTTGATCAATCATATTATAACCCAGTTTATTACCTAGGGAAAAAAGGACTCCAAAATTCTAAATTAAAGGGGTTGGTAAGAAATTCAACTGGTTTGAATGTTGATTTTACTTATGCTTATAAGACAGAA

SEQ ID NO: 10710 - protein, 553 aa, Streptococcus agalactiae
MSSFNRKKLKFLGISLATLTATTVTLVACGNESKNSGDNKVINWYIPTEISTLDISKNTDAYSNLAIGNSGSNLLRIDKEGKPKPDLAKKVSVSSDGLTYTATLRDNLKWSDGSKLSAEDFVYTWRRIVDPKTASEYAYLATESHLLNADKINSGDIKDLNKLGVTAKGNQVTFKLTSPCPQFKYYLAFSNFMPQKQSYVEKVGKDYGTTSKNQIYSGPYLVKDWNGSNGKFKLVKNKYYWDSKHVKTNSVIVQTIKKPDTAVQMYKQGQIDFAEISGTSAIYQANKNNKDVVDASDARTTYIIYNQTGSVKALTNQKIRQALNLATDRKGVVKAAVDTGSTPAESLVPKKLAKLPNGEDLSKYTAPGYTYNTSKAQKLFKEGLAEVGQSSLKLTITADSDSPAAKNAVDYVKSTWESALPGLTVEEKFVTFKQRLEDAKNENFDVVLFSWGGDYPEGSTFYGLFTTNSAYNYGKFSSKEYDNAYQKAITTDALKPGDAANDYKTAEKALFDQSYYNPVYYLGKKGLQNSKLKGLVRNSTGLNVDFTYAYKTE

SEQ ID NO: 10711 - protein, 771 aa, Streptococcus agalactiae; identical to SEQ ID NO: 6357

SEQ ID NO: 10712 - protein, 257 aa, Streptococcus agalactiae; identical to SEQ ID NO: 1838

SEQ ID NO: 10713 - protein, 684 aa, Streptococcus agalactiae
ATGTATTTAGCATTAATCGGTGATATCATTAATTCAAAACAGATACTTGAACGTGAAACTTTCCAACAGTCTTTTCAGCAACTAATGACCGAACTATCTGATGTATATGGTGAAGAGCTGATTTCTCCATTCACTATTACAGCTGGTGATGAATTTCAAGCTTTATTGAAACCATCAAAAAAGGTATTTCAAATTATTGACCATATTCAACTAGCTCTAAAACCTGTTAATGTAAGGTTCGGCCTCGGTACAGGAAACATTATAACATCCATCAATTCAAATGAAAGTATCGGTGCTGATGGTCCTGCCTACTGGCATGCTCGCTCAGCTATTAATCATATACATGATAAAAATGATTATGGAACAGTTCAAGTAGCTATTTGCCTTGATGATGAAGACCAAAACCTTGAATTAACACTAAATAGTCTCATTTCAGCTGGTGATTTTATCAAGTCAAAATGGACTACAAACCATTTTCAAATGCTTGAGCACTTAATACTTCAAGATAATTATCAAGAACAATTTCAACATCAAAAGTTAGCCCAACTGGAAAATATTGAACCTAGTGCGCTGACTAAACGCCTTAAAGCAAGCGGTCTGAAGATTTACTTAAGAACGAGAACACAGGCAGCCGATCTATTAGTTAAAAGTTGCACTCAAACTAAAGGGGGAAGCTATGATTTC

SEQ ID NO: 10714 - protein, 228 aa, Streptococcus agalactiae; identical to SEQ ID NO: 1840

SEQ ID NO: 10715 - protein, 1563 aa, Streptococcus agalactiae; identical to SEQ ID NO: 6361

SEQ ID NO: 10716 - protein, 521 aa, Streptococcus agalactiae; identical to SEQ ID NO: 1842

SEQ ID NO: 10717 - protein, 330 aa, Streptococcus agalactiae
ATGGAAATTGAAAAAACAAATCGTATGAATGCCCTTTTTGAGTTTTATGCGGCATTATTAACAGATAAACAAATGAATTATATCGAGTTATACTACGCCGATGACTACAGCCTTGCTGAAATAGCTGAAGAATCCGGTGTTAGCCGACAAGCTGTCTATGATAATATCAAACGAACTGAAAAAATTCTTGAGGCGTACGAAATGAAACTACATATGTATTCAGATTATATTGTCCGTAGTCAGATTTTTGATGACATTCTAGAAAAATATACCGATGATGCCTTTTTACAAGAAAAAATTTCCATTCTAAGTAGCATTGATAATAGAGAT

SEQ ID NO: 10718 - protein, 110 aa, Streptococcus agalactiae; identical to SEQ ID NO: 1844

SEQ ID NO: 10719 - protein, 1311 aa, Streptococcus agalactiae; identical to SEQ ID NO: 6365

SEQ ID NO: 10720 - protein, 437 aa, Streptococcus agalactiae; identical to SEQ ID NO: 6366

SEQ ID NO: 10721 - protein, 678 aa, Streptococcus agalactiae; identical to SEQ ID NO: 6367

SEQ ID NO: 10722 - protein, 226 aa, Streptococcus agalactiae; identical to SEQ ID NO: 1848

SEQ ID NO: 10723 - protein, 2547 aa, Streptococcus agalactiae
ATGAAAACTGTAGAACATTTTGTTACCAAATTTGTCCCTGAAAACTATAACCTTTTCTTGGATATTAATCGTCAAACTAAAACCTTTTCAGGTAACGTTGCTGTGTCTGGCGAAGCCTTAGATAACAATATCTCTTTTCACCAAAAAGGGTTAACCATTAAATCTGTCTTATTAGATAATCAACCATTAGATTTCCAACTAGATGAAGACAATGAAGCTATGCATATTCAATTGCATGAAACTGGTAGCATGGTATTAGTCTTTGAATTCAGCGGTCACATTACCGATAATATGACAGGTATGTATCCATCTTACTATACAGTTAATGGCATCAAAAAAGAGGTTATCTCCACACAATTTGAAAGTCATTTTGCTCGTGAAGTATTCCCAAGTATTGACGAACCAGAAGCAAAAGCAACCTTTGATTTGAGCCTAAAATTCGATCAAAAAGAAGGAGAGATTGCTCTTTCAAATATGCCGGAAATCAATGCTGAACAACGTCAAGAAACAGGTTTATGGACATTTGACACCACACCTAAAATGTCCTCATATTTATTAGCTTTTGCCTTGGGGGAATTGCATGGTAAAACAACACATACCAAAAACGGCACTCTTGTTGGCTCATATGCCACAAAAGCCCATCAGTTAAATGAATTAGATTTTTCTTTAGATATCGTTGTGCGTGTTATTGAGTTTTATGAGGACTACTTTGGTGTACGTTATCCTATTCCTCAGTCACTCCACGTTGCTCTACCTGATTTTTCTGCTGGAGCTATGGAAAATTGGGGATTAGTAACATATCGTGAAGTCTATCTTTTAGTAGATGAGAACTCTAGTGTTTCCAGCCGTCAGCAAGTAGCATTAGTTGTAGCACATGAAATAGCTCACCAGTGGTTTGGTAACCTCGTTACTATGAAATGGTGGGATGATTTATGGTTAAATGAATCATTTGCTAATATGATGGAATATGTATCAATTGATTATATTGAACCAAAACTTAATATATTTGAAGACTTTCAAACAGGTGGTCTACCATTAGCTCTTAAGCGTGATGCCACAGATGGCGTCCAATCTGTTCACGTTGAGGTCAATCATCCTGATGAAATTAACACACTTTTTGATCCAGCTATCGTTTATGCAAAAGGTAGCCGCCTCATGCACATGTTACGTCGCTGGTTAGGCGATACAGATTTTGCCGCAGGACTAAAAATTTATTTTGAAAAACATCAATATCAAAATACTATTGGTCGTGACCTTTGGAATGCACTTTCTCAAACCTCAGGAAAAGATGTTGCAGCTTTCATGGATTCTTGGTTAGAGCAACCAGGATACCCTGTGATGGCAGCCAAAATAGAAGAAGATGAGCTCATTTTAACTCAAAAACAATTCTTTATTGGTGAACACGAAGATAAGTCTCGCTTGTGGCAAATTCCTCTTAATAGTAATTGGGAAGGAATCCCAGAGATATTAACCGAGGAAACGGTAGTAATCCCCAATTTTAGTCAGTTAGCTGAAAAGAACAAAGAAAATGGTGCACTGCGTTTCAATACTGAAAATACTGCACATTACATTACTAACTATCAAGGTCAACTCTTAGAGCATATCATTTCTGATCTTCCTCTTATGGATAACATTTCTAAACTACAAATTGTACAAGAACGTCATTTACTTGCTGAAAGTGGTATGATTTCATATAGTAGTTTAATACCTTTAGTCTCTCTTTTGAGCCAAGAGACATCATATCTTGTTAACTCTGCTATTAAGAGTGTTATTGATGGTTTATCCTTATTCGTCCAGGAAGATAGCCAAGATGAATTCGACTTTAAAGAATTTGTTAATAAATTATCAGCATTTAATTTTAATAGACTTGGCTTTGAAAAAAGAGAAGGAGAAGGAGATGATAGCGAAATGGTCCGTCATCTATCCCTAAGCCTTGCTCTCTACTCAGATAATGAACATGCTATTGAAGAAGCTCACCATATTTTTAAAGCCCACGAAAATAATATCGCTGCTATACCAGCTGCAATTCGCCTGTTAGTTCTTACCAATGAAATGAAGCATTTCGAATCCAAAGAACTTAGCCACTTGTTATTAGAGACTTATAGTACTACTACCGATGGGAATTTCAAACGACAACTAGCGAGTGCTTTATCTCATACTACAGATAGCAAGACACTCAAGAAATTATTGTCAGATTGGAAAAATAAAGATATTGTGAAACCACAAGACTTAGCTATGAGTTGGTATGCTACTTTCCTTAAAAATTCTTTTACACAAGAAAGTGTCTGGGAGTGGGCCCAAGAAAACTGGGAATGGATCAAAGCAACTCTAGGTGGTGATATGAGTTTTGATAAATTTGTGATTTATCCCTCAAGTAGTTTCAAAACAGAAGAACGCCTTGAACAATATAAAAACTTTTTCGAGCCTCAATTAAGCGATATGGCGATTAGCCGTAATATTTCAATGGGAATTAAAGAAATTTCTGCTCGTGTCCTTTTAATCACGAAGCAAAAAGAAGAAGTTATCAATACTATCAAAAAATATATC

SEQ ID NO: 10724 - protein, 849 aa, Streptococcus agalactiae; identical to SEQ ID NO: 1850

SEQ ID NO: 10725 - protein, 651 aa, Streptococcus agalactiae; identical to SEQ ID NO: 6371

SEQ ID NO: 10726 - protein, 217 aa, Streptococcus agalactiae; identical to SEQ ID NO: 1852

SEQ ID NO: 10727 - protein, 555 aa, Streptococcus agalactiae; identical to SEQ ID NO: 6373

SEQ ID NO: 10728 - protein, 185 aa, Streptococcus agalactiae; identical to SEQ ID NO: 1854

SEQ ID NO: 10729 - protein, 801 aa, Streptococcus agalactiae
ATGGCAGAATATAATTGGGACGAACGCCATATCATTACCTTCCCTGAAGAAAATTCAGCTCTCACCACAAAAGATTTACACGTTTACTACGGTGAGAAAGAAGCTATCAAGGGAATTGATATGCAATTTGAAAAAAATAAAATTACAGCCTTAATCGGCCCATCTGGATGTGGAAAATCAACATATCTTCGTAGCTTAAATCGTATGAATGATACGATTGATATTGCACGCGTGACTGGACAAATCATGTATGAAGGAATTGATGTTAACGCTCAAGATATCAATGTTTACGAGATGCGAAAACATATCGGAATGGTTTTCCAACGTCCAAACCCGTTTGCAAAATCAATTTATAAAAACATTACCTTTGCATATGAGCGTGCTGGTGTAAAAGATAAAAAATTCTTAGATGAAGTTGTCGAAACCTCACTAAAACAAGCTGCTCTATGGGATCAAGTAAAAGATGACCTTCATAAATCAGCATTCACTTTATCTGGCGGTCAACAGCAGCGATTATGTATTGCACGTGCTATCGCAGTTAAACCAGAAATTCTCTTAATGGATGAACCTGCTTCAGCACTCGATCCGATTGCAACTATGCAACTAGAAGAGACAATGTTTGAACTCAAGAAAAATTACACTATAATTATCGTAACACATAATATGCAACAAGCAGCACGTGCTAGTGATTATACTGCATTTTTCTATCTTGGAGACTTAATCGAATACGATAAAACGAATAACATTTTCCAAAATGCTAAATGTCAATCTACTAGCGATTATGTTTCTGGTCGATTTGGA

SEQ ID NO: 10730 - protein, 267 aa, Streptococcus agalactiae; identical to SEQ ID NO: 1856

SEQ ID NO: 10731 - protein, 885 aa, Streptococcus agalactiae; identical to SEQ ID NO: 6377

SEQ ID NO: 10732 - protein, 295 aa, Streptococcus agalactiae; identical to SEQ ID NO: 1858

SEQ ID NO: 10733 - protein, 915 aa, Streptococcus agalactiae; identical to SEQ ID NO: 6379

SEQ ID NO: 10734 - protein, 305 aa, Streptococcus agalactiae; identical to SEQ ID NO: 1860

SEQ ID NO: 10735 - protein, 858 aa, Streptococcus agalactiae
ATGAAAAAAAACATTTTTTTGTTAACCTTGCTAGCCACCGTCTTATTGACGCTGTCTGGTTGTGCTAATTGGATTGATAAAGGTCAATCAATCACCAGCGTTGGTTCAACCGCCTTACAGCCACTTGTAGAAGCTGCAGCAGATGAGTTTGGTAAGACAAACCTCGGTAAGACTATCAATGTCCAAGGAGGAGGCTCAGGAACAGGCTTATCACAAGTACAGTCTGGAGCTGTTCAAATTGGTAATAGCGACTTATTTGCAGAAGAAAAAGATGGTATTGATGCTAAGAAATTGAAAGACCATCAAGTCGCAGTAGCTGGATTAGCTGTTATTGTTAATAAAAAAGTTAATGTTAAAAATCTAACCACCCACCAACTTCGTGATATTTTTGCAGGAAAAATCAAGAATTGGAAAGAAGTGGGAGGACAAGATTTAGATATTTCCATCATCAATCGAGCAGCAAGTTCTGGATCCCGTGCAACCTTCGATAATACTATTATGGGAAATGTTGCTCCTATTCAAAGCCAAGAACAAGATTCAAATGGTATGGTGAAATCAATTGTTTCTCAAACACCTGGTGCGATTTCATACCTCGCTTTTGCATACGTTGATAAATCTGTCGGAACATTAAAACTAAATGGTTTTGCGCCAACAGCTAAAAATGTTACTACCGACAACTGGAAACTTTGGTCATATGAACATATGTATACAAAAGGTAATGAAACAGGTCTAACAAAAGAATTCTTAGACTACATGAAAAGTGATAAAGTTCAAAGTAGTATCGTACAACATATGGGATATATCTCTATTAACGACATGAAAGTTGTTAAAGATGCTGAAGGTAAAGTAACCCCAAAA

SEQ ID NO: 10736 - protein, 286 aa, Streptococcus agalactiae; identical to SEQ ID NO: 1862

SEQ ID NO: 10737 - protein, 1307 aa, Streptococcus agalactiae
ATGAAATTACCGAATGAATTTATTGAAAAATATCAGACTATACTTAAAGATGAAGCAGAAGCTTTTTTTGACAGTTTTGAACAAAAACCCATATCGGCATATCGCACCAATCCTCTCAAAGAAAAGCAACTTGATTTTCCAAATGCCATCCCAAGTACCCCTTGGGGGCATTATGGGAAAATATCAGGAAAATCAATAGAACACACAACTGGCCTTGTTTATTCTCAAGAACCTGCTGCTCAGATAGTGGCTCAGATTGCTGAACCACAAGAAGGAATGAAAGTGCTAGATTTAGCAGCTGCACCTGGTGGAAAAACAACACACCTTCTATCATATTTAAACAATACTGGTCTATTAGTTAGTAATGAAATTTCAAATAAACGTAGTAAAATTTTAGTCGAAAATGTCGAACGTTTTGGTGCTAGAAATGTTATCGTGACTAATGAAAGCTCCCAACGACTAGCCAAATGTTTTAATTCTTTTTTTGATCTTATTGTTTTTGACGGTCCGTGTTCTGGTGAGGGAATGTTCCGCAAAGATCCTCAAGCAATACAATATTGGCACAAAGATTACCCCACTGAATGTGCACAGTTACAAAGAGATATTTTAAAAGAAGCAATCAAAATGCTAGCTCATGGTGGTATACTTGTATACTCTACTTGTACATGGTCACCAGAAGAGAACGAAGAAGTGGTTAATTGGCTCCTTCAAGAGTATGATTACTTAGAACTTGTTGATATTCCTAAACTAAATGGGATGGTTGAAGGGATTAATGTACCACAAGTTGCAAGGATGTACCCTCATCATTTTCAAGGTGAAGGACAATTCGTTGCAAAACTGAGAGATACTAGATCTAAGGAAGCACAGAAAATTAAGCCAAAAGCACAGAAAATAAATAAAATGCAGTTACAATTGTGGCAACAATTTGCACAAGACCATTTAAAGATAGACTTGAACGGTGTTTTAGATGTTTTCGGCGACCAACTCTATCTTCTACCTAATGGTCTCCCCGATTTGTCTAAATTAAAAATAGCACGCAATGGTCTCCATCTAGCACTTTCAAGAAGAATCGTTTTGAGCCATCGTTTGCTTTAGGAATGGCACTTAGCGAACATGACCTAGTACAGTCTATTGAAATTGATATAGAACAGTTTGAGGTGTACGTATCTGGAAATGTAGTCAAACTAGACAAGACTGTTCCAAACGGTTGGTATCAAATTCTTGTAAAAGGCAATGGATTAGGTTTTGCAAAAGTGACAAATAATCCTCTTAAAAATTATTACCCTAAAGGACTACGATTTCAGACA

SEQ ID NO: 10738 - protein, 436 aa, Streptococcus agalactiae
  VARIANT 352: Xaa = Any Amino Acid
MKLPNEFIEKYQTILKDEAEAFFDSFEQKPISAYRTNPLKEKQLDFPNAIPSTPWGHYGKISGKSIEHTTGLVYSQEPAAQIVAQIAEPQEGMKVLDLAAAPGGKTTHLLSYLNNTGLLVSNEISNKRSKILVENVERFGARNVIVTNESSQRLAKCFNSFFDLIVFDGPCSGEGMFRKDPQAIQYWHKDYPTECAQLQRDILKEAIKMLAHGGILVYSTCTWSPEENEEVVNWLLQEYDYLELVDIPKLNGMVEGINVPQVARMYPHHFQGEGQFVAKLRDTRSKEAQKIKPKAQKINKMQLQLWQQFAQDHLKIDLNGVLDVFGDQLYLLPNGLPDLSKLKIARNGLHLXTFKKNRFEPSFALGMALSEHDLVQSIEIDIEQFEVYVSGNVVKLDKTVPNGWYQILVKGNGLGFAKVTNNPLKNYYPKGLRFQT

SEQ ID NO: 10739 - protein, 761 aa, Streptococcus agalactiae
TTGGACGCTAAATTTGATTTCGCTAAACAATTAGTGTATAAAGCTGGTCAATTCATTAAATCTGAGATGCAAAATACTTTTGATGTTGAGGAAAAGTCTCGATTTGATGATTTAGTGACAAGTCTTGATAAAAAAACACAAAAATTATTAATTCAAGAAATTATTCAACATTACCCAGATGATAATATACTTGCCGAAGAAGATGATGTGCGCTCACCCATTGCACAAGGTAATGTTTGGGTTTTAGACCCTATTGATGGAACTGTTAATTTTATTGTTCAAAAAGATAACTTTGCTGTTATGTTAGCTTATTACGAAGAAGGCGTTGGACAATTTGGTATCATCTACGACGTTATGGCTGATATTCTTTACAGCGGGGGAGGACATTTTGATGTCTATGCTAACGATAAAAAAATTGTTCCTTTTCAAGAGTGTCCTTTAGAACGTTGCTTACTTGGAGTAAATTCTGCTATGTATGCAGAAAATGATTGCGGTATTGCCCATTTAGCTTCTGAAACCTTAGGTGTTCGTATCTATGGTGGTGCTGGAATTAGCATGGCAAAAGTCATGCAGGGCAAATTATTAGCTTATTTTTCGTATATTCAACCTTGGGATTATGCTGCAGCAAAAATCTGGGGGAGACATTAGGATTTACCTTATTAACGCTTGACGGGGAAGAACCCAACTATTCAACAAGACAAAAAGTAATGTTCCTACCAAAGTCGAAATTAAATCTTATCCAATCCTACCTTACCAAAAAA

SEQ ID NO: 10740 - protein, 254 aa, Streptococcus agalactiae; identical to SEQ ID NO: 1866

SEQ ID NO: 10741 - protein, 300 aa, Streptococcus agalactiae
GTGCTGAAATTGAGGGAAAACATGATTAGTAGTAATTATAGTTATCCTCTTGATCCTTCATGGAATACGGAAGATATTACTAAGGTACTTCGCTTTTTAAATCAAGTTGAACACGCCTATGAAAATAGTATTAAAGTTGATGATTTGCTAGATAGCTATAAAGAATTTAAAAAAGTTGTTAAATCCAAGGCGCAGGAAAAACAAATTGACCGTGAATTCCAGAGAACTAGCGGTTATTCCACTTATCAAGCTGTTAAAGCAGCACAACAACAAGCGAAAGGATTTATTTCACTTGGACGC

SEQ ID NO: 10742 - protein, 100 aa, Streptococcus agalactiae
MLKLRENMISSNYSYPLDPSWNTEDITKVLRFLNQVEHAYENSIKVDDLLDSYKEFKKVVKSKAQEKQIDREFQRTSGYSTYQAVKAAQQQAKGFISLGR

SEQ ID NO: 10743 - protein, 411 aa, Streptococcus agalactiae; identical to SEQ ID NO: 6397

SEQ ID NO: 10744 - protein, 137 aa, Streptococcus agalactiae; identical to SEQ ID NO: 6398

SEQ ID NO: 10745 - protein, 930 aa, Streptococcus agalactiae; identical to SEQ ID NO: 6399

SEQ ID NO: 10746 - protein, 310 aa, Streptococcus agalactiae; identical to SEQ ID NO: 6400

SEQ ID NO: 10747 - protein, 843 aa, Streptococcus agalactiae; identical to SEQ ID NO: 6401

SEQ ID NO: 10748 - protein, 281 aa, Streptococcus agalactiae; identical to SEQ ID NO: 6402

SEQ ID NO: 10749 - protein, 429 aa, Streptococcus agalactiae
ATGAAGATTAGAACTGCTACACTAGACGATAGTGAAAAATTAGTCCCTTTGTATCAAGAATTAGGATACGCAATATCATTATCAGAGATTCAATCTATTTTAAAGGTTATTCTTACTCATTCAGATTATGGCTTTTTGATAGCTGAGGATAATGGCAAACTCCTCGCCTTCGTTGGATATCATAAACTTTACTTTTTTGAAAAAAGTGGGACTTACTATCGTATTTTAGCACTAGTAGTTAATGAAAAGCACCGTCGTAAAGGCATCGCTAGTCAACTTATTAATCACGTTAAACAGCTAGCTAAAACAGATGGAAGTGAAGTACTGGCTTTAAATAGCAGTTTAAAAGAATATCGTCAGGAAGCTTATCATTTTTATGAAAACCTAGGGTTCAAGAAGGTTAGTACAGGCTTTTCATACTATTTAGAT

SEQ ID NO: 10750 - protein, 143 aa, Streptococcus agalactiae; identical to SEQ ID NO: 6404

SEQ ID NO: 10751 - protein, 1269 aa, Streptococcus agalactiae
ATGAACGAAATCAAATGCCCTCATTGTGGAACAGCTTTTGCCATCAACGAGTCTGAATACCATCAATTACTAGAACAAATTCGCGGAGATGCTTTTGACAAAGAAGTAAGTGAACGGTTGGAAAAAGAACGTCTAATATTAGGGGAGCAAGCAAAAAATCAATTACAGGAAGTTGTTGTAGAAAAAGACAAGGAGATAGCTAAACTTCAGTACAAAGTCAAACAATTTCTTATAGAAAAAGACAATCTTCTCAAAGACAATGAGTACCAACTCGCTGAGCAATTAAATCAAAAAGACATGATGCTTCGCGACCTTGAAAACCAAATCGATAGACTACGTTTAGAGCATGAAAATAGCTTGCAAGAGGCGCTAACAAAAGTCGAACGAGAAAGAGATGCAATACAAAATCAGTTGCACATTCAAGAAAAAGAAAAAGATTTAGCTTTAGCTTCAGTAAAAAGTGATTATGAAGTACAACTAAAGGCAGCCAATGAACAAGTAGAATTCTATAAAAACTTCAAAGCTCAACAGTCTACTAAAGCAGTAGGAGAAAGTTTAGAACATTATGCTGAAACAGAATTTAATAAAGTGCGACATTTGGCCTTTCCTAATGCTTATTTTGAGAAGGACAATACATTATCAAGTCGTGGCTCAAAGGGGGACTTTATCTATCGAGAAAAGGATGAAAATGACCTTGAGTTTTTAAGTATCATGTTTGAAATGAAAAATGAGTCTGATGATACTATCAAGAAGCATAAAAATGAAGATTTTTTCAAAGAATTAGATAAAGATCGTCGTGAAAAATCTTGCGAATACGCAGTTTTAGTAACTATGCTTGAAGCAGACAATGACTATTATAATACTGGAATTGTTGATGTTAGTCACAAATACCCTAAAATGTACGTTATACGTCCACAATTTTTTATCCAATTAATTGGTATTCTAAGAAATGCAGCACTCAATACCTTAAAATATAAACAAGAGCTTGCTTTGATGAAAGAACAAAATATTGACATCACACATTTTGAAGAAGATTTAGATATTTTCAAAAATGCATTTGCTAAAAATTATAATTCTGCAAGCAAAAATTTCCAGAAAGCAATCGATGAAATAGATAAATCTATTAAACGTATGGAAGCTGTTAAGGCTGCTTTAACAACGTCTGAAAATCAACTACGTCTTGCAAATAATAAATTAGACGATGTTTCTGTCAAGAAATTAACAAGAAAAAATCCAACAATGAAAGCAAAATTCGATGCTCTAAAAGAC

SEQ ID NO: 10752 - protein, 423 aa, Streptococcus agalactiae; identical to SEQ ID NO: 6406

SEQ ID NO: 10753 - protein, 588 aa, Streptococcus agalactiae; identical to SEQ ID NO: 6407

SEQ ID NO: 10754 - protein, 196 aa, Streptococcus agalactiae; identical to SEQ ID NO: 6408

SEQ ID NO: 10755 - protein, 815 aa, Streptococcus agalactiae
ATGAGAGAGTCTATTTTTGAGGAAACTGCAAAAGGTAAAGTATCAAGGCATGTCCTTTTAACTATATTATTGGCTTTGATATTACTATTTACAGCAGATTTCCTTACCTATATTATTATTGAATTGATTATCTCGCTTGATTTTTGGAAACTAGAGTGGGATAGCGATATCGTCCAGTTAATCATTTTACTAGCAACTTCAATTAGTACGGTAATGTTATTTATGTGGGTGAAATTTAAAGAGAAGCGTCCAATTAGTTCTCTAGGGCTATTTAAAGAAGGAGCCCTAACAGAATTATCTAGAGGATGGTTAGTCGGGAGCGTTCTCTTTGGAGCCTGCTTAATATTAACAATAATTTCAGGCTCTGGAGTTATCGAAACTGTTCGTTTTACAGCTGATAAATTGATTTGGTTTCTTATTTTTGCTGTTGGATGGCAGGTACAAAGCGCATCTGTTGAAATATTGTGTCGTGGATGGTTACTTCCGGTGAGTGCCACAAAGTATAGTAAGATAGTTTCTGTCAGTATCAGTTCAATCTTTTTCGGTCTTCTGCATAGCGCTAATAATCATGTAAGCCTTATCTCGATTTTCAATCTGTGTCTCTTTGGACTATTTCTATCGCTCTATGTTATTTTAAAAGGTAACATCTGGGGGCGTGTGGTATTCATGGCGCCTGGAACTGTGTACAGGGAGTGTCTTTGGAATCGAAGTTAGTGGAGAGCCAATGTGTCTAACTCCCTAGTCCATGTTAACTATGGTGCTGACTGATTGCGGTGGGAAATTTTGGGTGTGGAAGGGAGCNNNNNTTAATTAAT

SEQ ID NO: 10756 - protein, 274 aa, Streptococcus agalactiae
  VARIANT 230, 270, 271: Xaa = Any Amino Acid
MRESIFEETAKGKVSRHVLLTILLALILLFTADFLTYIIIELIISLDFWKLEWDSDIVQLIILLATSISTVMLFMWVKFKEKRPISSLGLFKEGALTELSRGWLVGSVLFGACLILTIISGSGVIETVRFTADKLIWFLIFAVGWQVQSASVEILCRGWLLPVSATKYSKIVSVSISSIFFGLLHSANNHVSLISIFNLCLFGLFLSLYVILKGNIWGACGIHGAWNCVXGSVFGIEVSGEPMLSNSLVHVKPMVLTGLAVGNFGCGREXXLIN

SEQ ID NO: 10757 - protein, 407 aa, Streptococcus agalactiae
GTGCGTTCTTTAGATGGCTCTATGACTATTTTAGTTGTCGTATCTTTATTGTTAGCCATTGTAATTCTCTATAATCTCACTAATATTAATTTAGCAGAACGTAAGCGGGAGCTATCAACTATAAAGGTATTAGGTTTTTATAATGAAGAAGTAACTTTATACATTTACCGCGAAACCATTATTTTATCAACCATCGGTGTGATTCTAGGCACCATTAGCGGTACTTATTTACACCGTCAAATGATGTTGTAATTGGTTCAGATCAAATACTTTTTGGTGAAAAAGTATCACCAACTACATTTATAATACCAATAAGCGTAGTAGTCATCATTCTAATAAGTCTAGGTTTTATAGTTAACCATCAATTAAAAAAACTCAATATGTTAGATGCCTTGAAATCAGTAGAT

SEQ ID NO: 10758 - protein, 136 aa, Streptococcus agalactiae
  VARIANT 84: Xaa = Any Amino Acid
MRSLDGSMTILVVVSLLLAIVILYNLTNINLAERKRELSTIKVLGFYNEEVTLYIYRETIILSTIGVILGTISGTYLHRQMMLXIGSDQILFGEKVSPTTFIIPISVVVIILISLGFIVNHQLKKLNMLDALKSVD

SEQ ID NO: 10759 - protein, 576 aa, Streptococcus agalactiae
ATGCCCTATGATATATTGCTAACATATAACACAAATGCTTCTCCCCCAAAAATACTTGAACTACTTTCAAAAGATTCAAAAATAGACAAATACCAACCAATACACCTTGAAAATCTTGACGAATCCATTCCTGGACAAATTAATAAACAGTCAATTTCCCTATTCATAACAGACAAAAAACAATTACTACCTTTTATTTATTTACAAGAAGCAACAACTAATAAGTCATTGCACTTGAATAATAAAGGGATTATTATTTCTAAAAAATTAGCTCAATTTTATCATGTTAATACCGGTGATTTTATCCATTTATCTCATTCACAGACACTTCCTTCTAGAAAATTAAAAATAACAGGAGTTGTCAATGCGAATGTTGGTCACTATATTTTTATGACAAAACAATACTATCGAACTATTTTTAAGAAAGAAGCTAAAGATAACGCTTTTTTGGTTAAGTTAACCAAACATAAAATCGCAAATAACTTAGCAGAAAAACTTTTAGAAATTAATGGAGTTGAGTCTCTTACGCAAAATGCTCTTCAGCTGGCTAGTGTAGAAGCCGNNNNNTTAATTAAT

SEQ ID NO: 10760 - protein, 192 aa, Streptococcus agalactiae
  VARIANT 188, 189: Xaa = Any Amino Acid
MPYDILLTYNTNASPPKILELLSKDSKIDKYQPIHLENLDESIPGQINKQSISLFITDKKQLLPFIYLQEATTNKSLHLNNKGIIISKKLAQFYHVNTGDFIHLSHSQTLPSRKLKITGVVNANVGHYIFMTKQYYRTIFKKEAKDNAFLVKLTKHKIANNLAEKLLEINGVESLTQNALQLASVEAXXLIN

SEQ ID NO: 10761 - protein, 726 aa, Streptococcus agalactiae
ATGCAATGGTGTTGGTTCGGGTATGAAATTCTACAAATGATCTGTATCCTCATTTTTAGTGTTGACTTTAATCAGGCGCTTCGATTAGTATCTTTTATCAGCATGCCAATGATTTTAAGTAATACTTTAGGTTTAGGTATATTTATATCCATTATTTCATCTACTCAAAAATTAGAAGAACATGCTAAAGCATTTCAAACCCATCAAGTACTTGAATTAGCAAATTTAACCCTTCCTTACCTTAGAAAGGGACTGACAACAGAATCTTGTCAACCAGTAGCTGAAATTATTCATAAACATATGGATGTGAGTGCTGTTAGCCTGACTAGTCAATCAGCCATTTTAGCCTATGTAGGAGATGGAGCTGACCATCATCTTCCTAATACTCAAATATTAACAAAGCTTGCTAAAAGAGCAATAGATACTGGTAAAGTTAGTGTCGCAACTGATAAAAGTGAAATCGAATGCGACCATAAGAATTGCCCACTTAGTTCAGCAATTGTTATTCCATTACACATCCACGATGTTATAGTGGGTACTTTGAAATTATATTTTTCAGACGCACAACATATGACTTACGTTGACCGTCAATTAGCTGAAGGATTAGGCAATATCTTTTCCACTCAGTTAGCTTTGGGACAAGCTGAGGAAGCAACAAGGTTACTACAGGATGCGGAAATGAAGTCTCTCCAAGCGAAGGTTAATCCGCATTTTCTTTTTNNNNNT

SEQ ID NO: 10762 - protein, 242 aa, Streptococcus agalactiae
  VARIANT 241, 242: Xaa = Any Amino Acid
MQWCWFGYEILQMICILIFSVDFNQALRLVSFISMPMILSNTLGLGIFISIISSTQKLEEHAKAFQTHQVLELANLTLPYLRKGLTTESCQPVAEIIHKHMDVSAVSLTSQSAILAYVGDGADHHLPNTQILTKLAKRAIDTGKVSVATDKSEIECDHKNCPLSSAIVIPLHIHDVIVGTLKLYFSDAQHMTYVDRQLAEGLGNIFSTQLALGQAEEATRLLQDAEMKSLQAKVNPHFLFXX

SEQ ID NO: 10763 - protein, 1488 aa, Streptococcus agalactiae
ATGGGAAAGACATTTTGGAAAGATATCTATCGATCAATTACGACTTCAAAAGGTAGATTTTCATCAATCCTCTTACTTATGATGTTAGGCTCATTTGCTTTTATAGGACTGAAGGTCTCAGCACCTAATATGCAAAGAACAGCACAAAATTACCTTGCTCATCATCATGTTATGGATATTACCGTTTTCAATTCTTGGGGACTTGACAAACATGATCAAACTGTTTTAGAAAGCTTAAAAGGATCACAAGTTGAATTTTCTTACTTTGTAGATACAACCCCTCAACAGAATAGTAAATCTTATCGATTGTATTCCAATACCAAAACGATATCAACCTTTGATCTTGTTAAGGGACGTCTCCCTTTAAATAAATCAGAAATTGCTCTCTCATTTCAGGAACGAAAAAAATATGCAATAGGTGATAAAATTAATTTTAAACAAGATAAAAACAAACTGTTTTCAAATACAGGTCCTCTAACTATTGTAGGTTTTGTTAATTCTACCGAGATTTGGTCTAAGACAAACCTTGGTAGTTCTCAAACAGGGGACGGCGACTTAGATAGTTATGGCGTATTAGATAAGACAGCATTTCACTCTCCAGTATATACAATGGCAAGGGTAACTTTTAAAGATCTTAGGTTGATTAACCCTTTCTCAATAAGTTACAAAGAAAAAGTAGCGAAATACCAAGAAAAGGTATCGCGAAAATTAAATATTCACAATAAAATAAGATATACCAAAACAAAAAAAGAGAGCCTACGTAAAATCGATGAGGAGGAAAAAAGCCTACTAAAAGCTCAAAAACAAATCAATCGGTTAGATAATGATAGCCTAGCGATGCCACTATCTCAAAGACAAGCTATTCAAATGAAAATTAAACAAGACCGACTATCTCTTTTGAAACGAACAAAAGAGCTTCTAAAATTGAGACATAACACCCAAATAATGGAATCGCCTCAAATTATTGTCTACAACCGTACTACCTTTCCTGGAGGACAAGGATATAACACTTTTGACTCCAGTACAAATAGCACTTCTAAAATCAGTAATCTTTTCCCCATTATTTTATATTTAGTCGCAGCATTAGTAACCTTAACAACAATGACTAGGTTCGTCGAGGAAGAAAGAACCAACGCAGGCATATTAAAAGCACTAGGCTATAGTGACCGCCAAGTTATCTTTAAATTTATTATTTATGGTTTTATAGCAGGAACATTAGGGACTACTTTGGGTATCATTGGAGGGCATTATCTTTTACCTCGTATTATTTCTGATATCATTTCCAAAGACCTGACTATTCCAAACACACAGTATCATCTTTTCTTAAATTACAGTTTACTAGCCTTTGTTTTTTCATTATTAAGCATTGTTCTTCCAGTTTTTGTTATCACTCGACGTGAGTTGAAAGAAAAAGCAGCATTTTTATTATTACCAAAACCACCAGCTAAAGGATCTAAAATAGCTTTAGAGTATATCAATGGANNNNNT

SEQ ID NO: 10764 - protein, 496 aa, Streptococcus agalactiae
  VARIANT 495, 496: Xaa = Any Amino Acid
MGKTFWKDIYRSITTSKGRFSSILLLMMLGSFAFIGLKVSAPNMQRTAQNYLAHHHVMDITVFNSWGLDKHDQTVLESLKGSQVEFSYFVDTTPQQNSKSYRLYSNTKTISTFDLVKGRLPLNKSEIALSFQERKKYAIGDKINFKQDKNKLFSNTGPLTIVGFVNSTEIWSKTNLGSSQTGDGDLDSYGVLDKTAFHSPVYTMARVTFKDLRLINPFSISYKEKVAKYQEKVSRKLNIHNKIRYTKTKKESLRKIDEEEKSLLKAQKQINRLDNDSLAMPLSQRQAIQMKIKQDRLSLLKRTKELLKLRHNTQIMESPQIIVYNRTTFPGGQGYNTFDSSTNSTSKISNLFPIILYLVAALVTLTTMTRFVEEERTNAGILKALGYSDRQVIFKFIIYGFIAGTLGTTLGIIGGHYLLPRIISDIISKDLTIPNTQYHLFLNYSLLAFVFSLLSIVLPVFVITRRELKEKAAFLLLPKPPAKGSKIALEYINGXX

SEQ ID NO: 10765 - protein, 699 aa, Streptococcus agalactiae; identical to SEQ ID NO: 6413

SEQ ID NO: 10766 - protein, 233 aa, Streptococcus agalactiae; identical to SEQ ID NO: 1880

SEQ ID NO: 10767 - protein, 2118 aa, Streptococcus agalactiae
ATGGCAACTACGACAAAAACGTCGACCAAAAAAACAAGTAAAAAAAAATCAGCTACTGCTAAAAAAAATCTAGTTATTGTGGAGTCTCCTGCAAAAGCAAAGACTATCGAAAAATACTTAGGACGTAACTATAAAGTTGTAGCCTCAGTAGGTCATATCCGTGATTTAAAAAAGTCAAGTATGTCCATTGATTTTGAGAATAATTACGAACCACAATATATTAATATTCGTGGTAAAGGACCTCTCATTAATGATTTAAAAAAAGAAGCTAAAAAGGCTAAAAAAGTTTACCTCGCGAGTGACCCGGACCGTGAAGGAGAAGCTATTTCCTGGCATTTAGCGCATATTTTAGATTTAGACAAAGAAGACAGAAACCGTGTTGTTTTCAATGAAATCACAAAAGATGCTGTTAAAAATGCTTTTGTGGAACCTCGTCAGATTAACATGGATCTCGTTGATGCTCAGCAAGCACGACGTGTTTTAGATCGCATTGTTGGTTATTCTATCTCACCTATTTTATGGAAAAAAGTAAAAAAAGGGCTATCAGCTGGACGTGTACAATCAGTTGCTCTTAAACTAATCATTGATCGTGAAAATGAGATTAAGGCTTTCCAACCGGAGGAGTATTGGACTATTGACGGTTCCTTTAAAAAAGGAACACGTAAATTCAATGCCACTTTCTACGGTTTAGACGGAAAGAAATTCAAATTATCGAATAATGAAGACGTCAAAACAGTTCTAAAACGTATTAAAACTGATGAATTCTTAGTTGAAAAAGTTGAAAAAAAAGAGCGTCGTCGTAATGCACCATTACCGTATACAACTTCTTCATTGCAACAAGATGCAGCTAATAAAATCAATTTTCGAACTCGTAAAACCATGATGATTGCGCAACAGCTGTACGAAGGACTTAGCTTAGGCACAGCAGGTCATCAAGGTCTGATTACCTATATGCGTACTGATTCTACACGTATTAGTCCGTTAGCACAAAATGAAGCAACAGAATTTATTACTAACCGTTTTGGTGCAAATTATTCTAAACATGGGAATAAAGTTAAAAATGCTTCTGGAGCACAAGACGCTCACGAAGCTATTCGCCCATCTAGTGTTAATCATACACCCGAAAGTATTGCTAAGTATTTAGACAAAGATCAACTAAAACTTTACACTCTTATCTGGAACCGTTTTATTGCAAGCCAAATGACAGCAGCAGTCTTTGACACAATGAAAGTTAATTTAACGCAAAATGGTGTTACTTTTATTGCTAATGGTAGCCAAGTCAAGTTTGATGGTTACATGGCTGTTTATAACGATACTGACAAAAATAAAATGTTACCAGATATGGAGGAAGGAGAAAGTGTTAAAAAGGTTAATACGAATCCTGAACAACACTTCACTCAACCTCCTGCAAGGTTTTCAGAAGCAAGTCTCATTAAAACACTTGAAGAAAACGGTGTAGGTCGTCCTTCAACTTATGCCCCAACGCTTGAGACTATTCAAAAACGTTATTATGTTAAGCTTGCAGCTAAACGCTTCGAACCAACTGAACTTGGTGAAATTGTTAATAGCCTTATTGTAGAATTTTTCCCAGATATTGTTGATGTTACCTTCACTGCCGAAATGGAAGGGAAACTAGACGAAGTTGAGATTGGTAAAGAGCAGTGGCAAAAGATTATCGATGAATTTTATAAACCATTTGAAAAAGAACTTGCAAAAGCAGAAACTGAAATGGAGAAAATTCAAATAAAGGATGAACCTGCTGGATTTGATTGCGAGCTATGTGGATCACCAATGGTAATAAAACTAGGACGTTATGGAAAGTTTTATGCGTGTAGCAATTTCCCTGAATGTCATAACACAAAAGCTATCACTAAGGAAATAGGTGTTATTTGTCCTATCTGTCAAAAAGGACAAGTTATTGAGCGAAAAACAAAACGCAATCGTATCTTTTATGGCTGTGACCGCTACCCAGAATGTGAGTTTACATCTTGGGACAAACCTATTGGACGAACTTGCCCCAAATCAAATGATTTCTTAGTGGAGAAAAAAGTACGCGGTGGTGGTAAACAAGTTGTTTGCTCAAATGAAAAATGCGACTACCAAGAAGAGAAAATTAAA

SEQ ID NO: 10768 - protein, 706 aa, Streptococcus agalactiae; identical to SEQ ID NO: 1882

SEQ ID NO: 10769 - protein, 840 aa, Streptococcus agalactiae
ATGAATCATTTTGAACTATTTAAGCTTAAAAAAGCTGGATTAACAAATCTTAATATCAACAATATTATCAACTATCTCAAAAAGAATAGTTTAACTTCTCTATCTGTTCGCAATATGGCCGTAGTATCAAAATGTAAAAATCCTACTTTCTTTATAGAAAATTATAAACAGCTAGACCTTAAAAAACTTCGACAAGAATTCAAAAAATTTCCAGTTCTATCGATTTTGGATTCTAACTATCCTTTAGAGTTAAAAGAAATATATAATCCACCAGTTCTACTTTTTTATCAGGGTAATATTGAACTTCTATCTAAACCTAAATTAGCTGTAGTGGGGGCAAGACAGGCATCTCAGATAGGTTGTCAGTCTGTTAAAAAGATTATCAAGGAGACTAACAATCAATTTGTTATCGTAAGTGGTTTAGCGCGTGGCATTGATACAGCAGCACATGTTAGTGCTTTAAAAAATGGCGGCAGTAGTATAGCTGTTATCGGGAGTGGTTTAGATGTTTATTATCCAACGGAGAATAAGAAACTTCAAGAATATATGTCATATAATCATCTCGTATTATCAGAATATTTTACCGGAGAACAACCCTTGAAATTTCATTTCCCCGAACGTAACCGTATTATTGCAGGGCTGTGTCAAGGTATTGTGGTTGCCGAAGCTAAGATGAGATCTGGAAGTTTAATTACCTGTGAAAGAGCATTAGAAGAGGGACGAGAAGTTTTTGCCATTCCCGGAAATATTATCGATGGCAAATCAGATGGATGCCACCATCTTATCCAAGAAGGAGCTAAATGCATTATTTCAGGAAAAGATATCCTTTCTGAATATCAG

SEQ ID NO: 10770 - protein, 280 aa, Streptococcus agalactiae; identical to SEQ ID NO: 1884

SEQ ID NO: 10771 - protein, 1026 aa, Streptococcus agalactiae; identical to SEQ ID NO: 6457

SEQ ID NO: 10772 - protein, 342 aa, Streptococcus agalactiae; identical to SEQ ID NO: 1886

SEQ ID NO: 10773 - protein, 759 aa, Streptococcus agalactiae
ATGATTCAAATAAACAATTTACATAAGTTCTATGGCCAAAAGGAAATATTAAAAGACATTAATATTTCGATTCCTAAAGGAAAAGTAACAGCTATTTTAGGTCCAAATGGATCTGGAAAGAGTACATTGCTGAGTTGTATCAGTCGACTTGAACCTTATGATAATGGTGAAATTTTCCTTGATAAAGTACCATTAGCCCACTACAGTTCAAATGACTTAGCCAAAACATTAGCCATATTAAGACAATCTAATCACTTAACACTCAAGATAAAGGTGAGAGACTTGATAGGATTCGGTAGATTTCCTTATAGTAAAGGACGGTTAAGTCAAAAAGATAAAGCTGTCATAGAATCAGTTATATCTTATATGGATTTAAACGATATAGCTGACGAGTTCATTAATAACCTCAGCGGAGGTCAAATTCAAAGAGCTTTTATCGCAATGACAATGGCACAAGATACTCAATATATTTGCTTAGATGAGCCACTCAACAATTTAGATATGAAATATGCTGTTCAAATGATGGATCTTATCAAACGATATGCGTATGAGTTTAATAAAACTATAGTGATTATTATTCACGACATCAATTTTGCAACTCACTACGCTGACAATGTTGTCGCTTTAAAAGAAGGACAAGTGGTGACTTGTGGGACTGTCGAAGATGTTATGCAAGAAAAAATCCTTTCTCATTTATTTGATATGCCTATCCGTATCGAAACTGTTGATGGTAAACCAATTATCCTTTTTTGTACAACG

SEQ ID NO: 10774 - protein, 253 aa, Streptococcus agalactiae; identical to SEQ ID NO: 1888

SEQ ID NO: 10775 - protein, 972 aa, Streptococcus agalactiae; identical to SEQ ID NO: 6461

SEQ ID NO: 10776 - protein, 324 aa, Streptococcus agalactiae; identical to SEQ ID NO: 1890

SEQ ID NO: 10777 - protein, 960 aa, Streptococcus agalactiae; identical to SEQ ID NO: 6467

SEQ ID NO: 10778 - protein, 320 aa, Streptococcus agalactiae; identical to SEQ ID NO: 1892

SEQ ID NO: 10779 - protein, 546 aa, Streptococcus agalactiae
ATGACCGAAAAAGAAAAAATGTTAGCAGGACAATATTATCGTCCATCAGCACCTGAACTACGCAAGGATAGAGAAGTTGCACTAAAAAATATGCAAGCCTTTAACAATGAAGATAATAGTAGCAAACGTAACGTCATTTTACAAAAATGGTTTGGTGCTACTGGGAAGAGTATCCATATGGAACAACGTTTTGTCTGCGATTATGGTTGTAATATTTATGTTGGTGAAAACTTCTACGCCAATTTTAACCAAACTTTCTTAGATGTTTGTGAAATTCGTATTGGCGATAACTGTATGTTTGCCCCAAACTGTCAACTCCTCACCCCACTCCATCCTCTAGATCCAATAGAAAGAAATTCAGGATTAGAATACGGTGCCCCAATCCAAATCGGGAATAATGTCTGGCTAGGTGGAGGAGTGACTATTTTACCAGGTGTTGTATTAGGAGATAATGTCGTCGTTGGCGCTGGAAGTGTCGTTACGAAATCATTTGAAAATAACGTTGTTATAGCAGGAAACCCTGCTAAGATAATCAAAAAATTAGCT

SEQ ID NO: 10780 - protein, 182 aa, Streptococcus agalactiae
MTEKEKMLAGQYYRPSAPELRKDREVALKNMQAFNNEDNSSKRNVILQKWFGATGKSIHMEQRFVCDYGCNIYVGENFYANFNQTFLDVCEIRIGDNCMFAPNCQLLTPLHPLDPIERNSGLEYGAPIQIGNNVWLGGGVTILPGVVLGDNVVVGAGSVVTKSFENNVVIAGNPAKIIKKLA

SEQ ID NO: 10781 - protein, 759 aa, Streptococcus agalactiae; identical to SEQ ID NO: 6475

SEQ ID NO: 10782 - protein, 253 aa, Streptococcus agalactiae; identical to SEQ ID NO: 1896

SEQ ID NO: 10783 - protein, 849 aa, Streptococcus agalactiae; identical to SEQ ID NO: 6477

SEQ ID NO: 10784 - protein, 283 aa, Streptococcus agalactiae; identical to SEQ ID NO: 1898

SEQ ID NO: 10785 - protein, 570 aa, Streptococcus agalactiae; identical to SEQ ID NO: 6479

SEQ ID NO: 10786 - protein, 190 aa, Streptococcus agalactiae; identical to SEQ ID NO: 1900

SEQ ID NO: 10787 - protein, 1482 aa, Streptococcus agalactiae; identical to SEQ ID NO: 6481

SEQ ID NO: 10788 - protein, 494 aa, Streptococcus agalactiae; identical to SEQ ID NO: 1902

SEQ ID NO: 10789 - protein, 732 aa, Streptococcus agalactiae; identical to SEQ ID NO: 6483

SEQ ID NO: 10790 - protein, 244 aa, Streptococcus agalactiae; identical to SEQ ID NO: 1904

SEQ ID NO: 10791 - protein, 1737 aa, Streptococcus agalactiae
ATGACACTCTTTTTAATTATGATGGAGCGAGCGGGGTTAATCATATTATTAGCCTATGCCTTTGTGCATATCCCCTTTATAAAACAAACTTTGAAGCAACCCGAATTAAAAAAACACCAGTATATTCTGCTTATCTTATTTAGCTTATTTGCTATTATTTCTAATTTTACAGGGGTAGAAATTCAGTCAGATTTATCTATCATTCCACAAACTCTTAATCATATAGCAGATCAATCATCGGTTGCCAACACACGTGTTTTAACCATTGGTGTATCAGGTCTAATCGGTGGCCCCATAGTCGGTATTATAGTTGGTCTCTTATCTGTATTCGTTAGGTACTTGCAAGGAGGATTAGCCCCTCATATTTATGTCATTTCTTCCTTACTAATTGGTTTATGCTCTGGGTTATCAGGCAATTATCTTCGTAGAAATTATAATAAAATTCGTGTTTTAGATGCAATGGTTGTTGGTTTCGGTATGGAAATTCTACAAATGATCTGTATCCTCATTTTTAGTGTTGACTTTAATCAGGCGCTTCGATTAGTATCTTTTATCAGCATGCCAATGATTTTAAGTAATACTTTAGGTTTAGGTATATTTATATCCATTATTTCATCTACTCAAAAATTAGAAGAACATGCTAAAGCATTTCAAACCCATCAAGTACTTGAATTAGCAAATTTAACCCTTCCTTACCTTAGAAAGGGACTGACAACAGAATCTTGTCAACCAGTAGCTGAAATTATTCATAAACATATGGATGTGAGTGCTGTTAGCCTGACTAGTCAATCAGCCATTTTAGCCTATGTAGGAGATGGAGCTGACCATCATCTTCCTAATACTCAAATATTAACAAAGCTTGCTAAAAGAGCAATAGATACTGGTAAAGTTAGTGTCGCAACTGATAAAAGTGAAATCGAATGCGACCATAAGAATTGCCCACTTAGTTCAGCAATTGTTATTCCATTACACATCCACGATGTTATAGTGGGTACTTTGAAATTATATTTTTCAGACGCACAACATATGACTTACGTTGACCGTCAATTAGCTGAAGGATTAGGCAATATCTTTTCCACTCAGTTAGCTTTGGGACAAGCTGAGGAAGCAACAAGGTTACTACAGGATGCGGAAATGAAGTCTCTCCAAGCGCAGGTTAATCCGCATTTTCTTTTTAATGCACTTAATACTATTTATGGTTTAATTCGCATGGATAGCGAAAAAGCAAGAAAGCTCGTCCAAGATTTTAGCAAGGTTATTCGTGCTAATCTTCAACGGGCAAAGCAAAATTTAATTCCTCTTCATGATGAATTGGAACAGGTTAACGCCTATTTAGCCCTTGAAGAAGCAAGATTTCCCAACATGGTGGCCTTTAATTTAGACAACCAAACAAATTCAGATGACAACTTAATGATTCCTCCCTTTACATTGCAGGTCTTGATTGAAAACTCTTATAAACACGCTTTTAAGCATGTTAATAAAAATAACCAGCTAAAGGTTACTATTGCAAGAAATAATGATAGGCTTCATATCATTGTCCAAGACAATGGTATTGGGATTCCAAAAGAAAAATTAATAACGCTTGGAAAAAAAACTCAAATTTCAAAACAAGGTTCTGGTACAGCTATTGAGAATCTCGTTCGTCGCTTGAATATTATTTATGATGGACAAGCAAGTTTAAAATTTGAATCAAATGATTCAGGAACTTGTGCTATTGTTAATATCCCCATTAAAAAT

SEQ ID NO: 10792 - protein, 579 aa, Streptococcus agalactiae
MTLFLIMMERAGLIILLAYAFVHIPFIKQTLKQPELKKHQYILLILFSLFAIISNFTGVEIQSDLSIIPQTLNHIADQSSVANTRVLTIGVSGLIGGPIVGIIVGLLSVFVRYLQGGLAPHIYVISSLLIGLCSGLSGNYLRRNYNKIRVLDAMVVGFGMEILQMICILIFSVDFNQALRLVSFISMPMILSNTLGLGIFISIISSTQKLEEHAKAFQTHQVLELANLTLPYLRKGLTTESCQPVAEIIHKHMDVSAVSLTSQSAILAYVGDGADHHLPNTQILTKLAKRAIDTGKVSVATDKSEIECDHKNCPLSSAIVIPLHIHDVIVGTLKLYFSDAQHMTYVDRQLAEGLGNIFSTQLALGQAEEATRLLQDAEMKSLQAQVNPHFLFNALNTIYGLIRMDSEKARKLVQDFSKVIRANLQRAKQNLIPLHDELEQVNAYLALEEARFPNMVAFNLDNQTNSDDNLMIPPFTLQVLIENSYKHAFKHVNKNNQLKVTIARNNDRLHIIVQDNGIGIPKEKLITLGKKTQISKQGSGTAIENLVRRLNIIYDGQASLKFESNDSGTCAIVNIPIKN

SEQ ID NO: 10793 - protein, 114 aa, Streptococcus agalactiae
ATGTTTAAAGGATTTAAAAAATTGATTATTATTATTATGGGAGGGATAAGCTTAATGATGATTTTAACAGCATGTGGCTTAGTAAAAAAAGATCACCAATGGGTTCAAGAACAT

SEQ ID NO: 10794 - protein, 38 aa, Streptococcus agalactiae
MFKGFKKLIIIIMGGISLMMILTACGLVKKDHQWVQEH

SEQ ID NO: 10795 - protein, 204 aa, Streptococcus agalactiae
TTGGGATTATTACTAAAATTGACTGGAAACTCTGAGAGTTTAGTTCTTCAAATATATGATATTGATACGAAGGAGTGGGAAGAAAGAATCAGTCTAGAAAAAGTAGAAGAAGGTTTTTTTGTGAAATCAAAAATAGCTAATCCTGAATATCATACAAATAATATGAATTTAAAAATCTTGATTCTTACATTGATATGTATACCA

SEQ ID NO: 10796 - protein, 68 aa, Streptococcus agalactiae
MGLLLKLTGNSESLVLQIYDIDTKEWEERISLEKVEEGFFVKSKIANPEYHTNNMNLKILILTLICIP

SEQ ID NO: 10797 - protein, 528 aa, Streptococcus agalactiae
ATGAGTCCAAGTGAGAAATTAGATAGAAGAATTGATTCTTCATCAGACCTCTCCCAGTATGTATATGATTTTGAAAAGCAATATACAGAATATATGAAGAAGGGGTATTCTGAAAAAAATGCGAGTATACAAGCACGACGAACCCTGAATGAAATACTACAAGAAAATAATCCAGGATTGAGATCTAGCGACGCCATGTATGATAAAGAAACAGGTATTGCAGCTATTGCTGTAAAAGATAAAAATACTGGTGAGACTTATATAGCTTATGCGGGTACTAATAAGGATGCTGATGGGGCAACCGACTTTATTTCAGATGCAAATATCGGTGCCAATAACTCTGCTTATTTAAAACGATTAGGAGACAAAGCTACTAGCTTTTATGATCGTGTTCAAAGTAATGGCGATAATATTACTGTCACAACAGATCATTCTTATGGTGACTTTCTCGCTTCTAGAGTGGCAATTGAGCTAATTCCATTCTTTATTAACTTTAGAAAAGTTAATGATTCATTTCACTTTTGTTAT

SEQ ID NO: 10798 - protein, 176 aa, Streptococcus agalactiae
MSPSEKLDRRIDSSSDLSQYVYDFEKQYTEYMKKGYSEKNASIQARRTLNEILQENNPGLRSSDAMYDKETGIAAIAVKDKNTGETYIAYAGTNKDADGATDFISDANIGANNSAYLKRLGDKATSFYDRVQSNGDNITVTTDHSYGDFLASRVAIELIPFFINFRKVNDSFHFCY

SEQ ID NO: 10799 - protein, 714 aa, Streptococcus agalactiae
ATGAAAAAACAAAGACTATTACTGCTTTTTGGAGGCTTATTAATAATGATAATGATGACAGCATGTAAGGATTCAAAAATCCCAGAAAACCGCACGAAAAAGGAATACCAGGCAGAACAGAATTTTAAGTCATACTTTAAATATATATCAGATAAAAATAACTATTTAGATAATATAAAAGTTTATTACTTTTCTATAAGTATTTCTAAAGATGTACAAGATAAAGTCAGTGAAACAACAACTTGTTCATATAGACTAGAAAAGCAAAAGAATCAAGAGTTCATTGGTAATTTTGAACATGAAGTTAGTGAATCTAGTCAATATTCAACCGAAGTTAAAAATCAAATACAGTATCCAATCCAGTATAAAGATAATTCAATTCGTTTTACTGAAAAAACACCGTCAGAACGTTATGATGAGTTTGTTTTTAGTTCATTTGATTCTTCATTATTAAAAAAATATAAAATATATTATTACTTACTAAAACATCCCGAAACTGAATTAAAAGGTGTTTCCTATAAGATTCCTATAAATTCTGAAATTGTAGCCCCTTTTATAAAGCAATTAAATATTAAAAATCCTAAAAAATCATCTATTTCGGTTACAAAAACGGGAAGTAAAGAATATTATTATACAATCAGTATTGATACTGATTCTGAGATATATTCTATATTCGAAGGTATTACATTAGAGGATGTAAAGGAGTTTTCTAAA

SEQ ID NO: 10800 - protein, 238 aa, Streptococcus agalactiae
MKKQRLLLLFGGLLIMIMMTACKDSKIPENRTKKEYQAEQNFKSYFKYISDKNNYLDNIKVYYFSISISKDVQDKVSETTTCSYRLEKQKNQEFIGNFEHEVSESSQYSTEVKNQIQYPIQYKDNSIRFTEKTPSERYDEFVFSSFDSSLLKKYKIYYYLLKHPETELKGVSYKIPINSEIVAPFIKQLNIKNPKKSSISVTKTGSKEYYYTISIDTDSEIYSIFEGITLEDVKEFSK

SEQ ID NO: 10801 - protein, 540 aa, Streptococcus agalactiae
TTGTCTAACTTGACGCGCTTCTTAGTTAAATCTGTTTCATTGATTAAAGATAGTAAGGTTTATCTTTTAGACACTGCTTCTGATTATGATGATTTGACAGAACAACAAATTGAATATATCAATAATCGAAGTGAAATAGCAGGACATTTAGAAGCTATTGTTTCAGAAATCTATTTAAGAGAAGAATCTGGTAAAATAGAATCATGGTTTGTTATTATTCCTGATATGAATAGTTTTGTGGCAGAAACAAATATGGATAGAGAACAGATTTTATTCTTACTTGACTCGGCTCACAAATATCATATTTATTTCTTATTTGGTGGTTTAGCATCATACCTTATGACTAATATCTCAGATGTTCCAAAAGCTATTAGAACACAGGCACAGTATGTTCTCTTAGGAATGAGAGTTATGGATCAGTCAGTATTACCGAAATCATATAATTCAAAAGAACCTTATTTGAAACCAGATATGATTTATATTCATGATAGAAGACAAGAAAGAATGCTTAAAATCACTCAAGAAATAGAAATGGAGCAT

SEQ ID NO: 10802 - protein, 180 aa, Streptococcus agalactiae
MSNLTRFLVKSVSLIKDSKVYLLDTASDYDDLTEQQIEYINNRSEIAGHLEAIVSEIYLREESGKIESWFVIIPDMNSFVAETNMDREQILFLLDSAHKYHIYFLFGGLASYLMTNISDVPKAIRTQAQYVLLGMRVMDQSVLPKSYNSKEPYLKPDMIYIHDRRQERMLKITQEIEMEH

SEQ ID NO: 10803 - protein, 885 aa, Streptococcus agalactiae
GTGAAAGGGATTCAAGCTGAAGCTGGCGTAGATGCTTATATTATAGAGGGTGAAGCAAAAGCTGGATTTAAAGTATTTGGTTTAAATATTGATGCGCGTGCAATCATTGCCATTGCTATCGCAGAAAGTTCGCTTGGTACACAAGGTGTTGCCACAGCACCAGGTGCTAATATGTTTGGTTTTGGGGCATTTGACAACAATACAACTAATGCTCAAAACTTTAGTGATGACAAGGCTGTCATTAAAATGACACAGGAAACCATCATCCAAAACCAAAACACCAGCTTTGCCATTCAAGACCAAAAAGCACAACTCTTGTCAACTGGCAACTTGAATGTAGCGGCTCGAGGTGGGGTTTACTGCACGGATGCTAGCGGTTCTGGTAAACGTCGTGCGGCCATTATGGAGAGCATTGACAAGTGGATTGACGCGCATGGCGGAATTTCTGAGATTTCAAAGGAACTGCTCAACACGTCGTCCGTCGCTATGATGGCAGTCCCAACGAGTTACTCTGTTTCAAGAGCTAATCAAGCGGGCAACTATGTGGCAGGCACTTACCCTTGGGGCCAATGCACTTGGTACGTCTTTAACCGCACCAAAGAACTTGGCTACCAGTTTGGACCATTTATGGGTAATGGTGGCGATTGGAAAAATAAGCCGGGCTATCAAACCACACACGAGGCAAAAACAGGCTACGCCATCTCATTTAGCTCCGGCCAAGCTGGTGCTGATAGAACTTACGGCCACGTGGCCATCGTCGAAGACGTTAAGGAAGACGGATCTATCCTGATCTCCGAATCAAATGTCCTAGGACTTGGCACCATCTCCTACCGCACCTTCAGTGCAGCAGAAGCAGCACAATTGACTTATATAGTTGGGGAGAAG

SEQ ID NO: 10804 - protein, 295 aa, Streptococcus agalactiae
MKGIQAEAGVDAYIIEGEAKAGFKVFGLNIDARAIIAIAIAESSLGTQGVATAPGANMFGFGAFDNNTTNAQNFSDDKAVIKMTQETIIQNQNTSFAIQDQKAQLLSTGNLNVAARGGVYCTDASGSGKRRAAIMESIDKWIDAHGGISEISKELLNTSSVAMMAVPTSYSVSRANQAGNYVAGTYPWGQCTWYVFNRTKELGYQFGPFMGNGGDWKNKPGYQTTHEAKTGYAISFSSGQAGADRTYGHVAIVEDVKEDGSILISESNVLGLGTISYRTFSAAEAAQLTYIVGEK

SEQ ID NO: 10805 - protein, 414 aa, Streptococcus agalactiae
ATGTTTAAAAATAAAAAGCAAAAAATCTTAGGGCTATTTATAATTTTAGTTGTAGCTTTTGTTGTTATTAGTAACTTGCTTACACCAATTCAAAGAACATCGAAAACAGATGGTACCTTTTATAAGACAGAAACTATAAATTCAGATAAGACGGTTTCACTTGATAAAACAGAGAAATTAAAAATCATGAATAAACAGTTATATTGGACAAAAAATAGTCAAACTCAAAAGTTTAAAATTAATAAAGAAAAAAGATATGTCTATAATGGATCCTCACAATATCACTATAATTTTCCTGGCAACTTTATTACTATGATTAGAAAAGTTAATGGAAAAGTTGAGTCAACAGAATTCGTAAAAAGTGGTACTCAAGATTACAATGATATTTTAAAAGGAAAACTCAAATATGGTAAA

SEQ ID NO: 10806 - protein, 138 aa, Streptococcus agalactiae
MFKNKKQKILGLFIILVVAFVVISNLLTPIQRTSKTDGTFYKTETINSDKTVSLDKTEKLKIMNKQLYWTKNSQTQKFKINKEKRYVYNGSSQYHYNFPGNFITMIRKVNGKVESTEFVKSGTQDYNDILKGKLKYGK

SEQ ID NO: 10807 - protein, 288 aa, Streptococcus agalactiae
ATGATTAAAAAAGAAGAGTTACTACCATTAGGAAGTATTGTCTATTTAGAAGAGGGAACAGTTAAATTAATGATTGTAGGTAGGGGAGTCATATATGATGATCCAGAAGGTACTGGCCAATTGTTTGCTGACTATATGGGGGGGTTATATCCGGCTGGCCTTCAAACAGAATCAACTTTATTTTTCCAACATGAGAACATTGACGAAGTGATTTTTGAAGGCTATAGAGACGAGGAAGAAGAAAGGTTTTTAAAAATATATCATGAATGGGAAAAAAGTATCTATCCC

SEQ ID NO: 10808 - protein, 96 aa, Streptococcus agalactiae
MIKKEELLPLGSIVYLEEGTVKLMIVGRGVIYDDPEGTGQLFADYMGGLYPAGLQTESTLFFQHENIDEVIFEGYRDEEEERFLKIYHEWEKSIYP

SEQ ID NO: 10809 - protein, 881 aa, Streptococcus agalactiae
ATGCAAAAAACTAGAACAATTTATTCTGCAAATTTTGAAGAAAGTCTTAATCTTTATGACAATGGAATGAGTAGTCTTAACAATGAAGAGCACTTGAAATTGAGAAACAGACAAAGAATGGAGTTCCATCGGTTTGGTTTACTTTAAAATCCATAATTTTAACTATTTTATTTCCTATATTATTGAATTTCTTTATTGTCACTATTTCCATTACTATTCATGCGGAAAAACCTAGTGACTTAACAATACCTATTTCTGACGTTAAACTATTAACAATGAATTTATATTTAATAATGTTAGTTTTTTGGTTTCTCTTAGTGTTATTAGGAAAACGTTTTAAACAAGCATTTATTTTACCATATAGGTATCAGTTTCACGTTTATTCATATATGGTATGGTTTGTATTTGAACTTGATTTAATTGCAGTCGAATGGATTACACCCTCACTGTCAGTAATCGGTACTATTTCAACTCTATTATTTTTAGTATTAATTACAATAACTATTTCTTTGGGTTCAATTAATGATATAAAAGCCATGATATTTGAAAAATCTGAAGAAAAATCTTCCAATAAAACTTACGACTTTTTAAAGACTTATGGTTTAGGTTTTTTAAGCATAGGTATCATTATAAAGTTAATTTTATCATCCTTAGATTTAGGTTTATCTGGAACCGTTAAATTATCGATTTTATTTATCGGGTGGATTATTTTTAATATTATTGTAGTTTATGCTGTATTTAAAGTTGCCATGCCATATTTTTTACAAGGTTTTTATAAGCTTAAGTATCCTGAAGAATATAGAGACTGGGAAAATAAATCTGTTGAAGAATGGTATGGAAAAAAATATTTGAAAAAACATAAGGAGTTAATAAAAAATGAT

SEQ ID NO: 10810 - protein, 294 aa, Streptococcus agalactiae
MQKTRTIYSANFEESLNLYDNGMSSLNNEEHLKIEKQTKNGVPSVWFTLKSIILTILFPILLNFFIVTISITIHAEKPSDLTIPISDVKLLTMNLYLIMLVFWFLLVLLGKRFKQAFILPYRYQFHVYSYMVWFVFELDLIAVEWITPSLSVIGTISTLLFLVLITITISLGSINDIKAMIFEKSEEKSSNKTYDFLKTYGLGFLSIGIIIKLILSSLDLGLSGTVKLSILFIGWIIFNIIVVYAVFKVAMPYFLQGFYKLKYPEEYRDWENKSVEEWYGKKYLKKHKELIKND

SEQ ID NO: 10811 - protein, 740 aa, Streptococcus agalactiae
ATGGAAAGTGATACTGCTAGTAGAATTAGCCAAGTATTTGCTTTATTACCACGGAACTTCTCAAAAAAAGTACTAAAATCTGATGGCCTATGGGATATTTAGCGAATATGGAATCAAAAGGAGCTTCAGGCAAGAAAAATGTAGATTCAATTTTAAATTTTCTTGCAAAATATGAAGGTTATAGTAATTTTGGTAAATCTGCTACTAAAGCAAGAACGTATTTGGAAAATTTAGCAAGTCCCATAAAAGCAGGTGTAAAATTCGGTTTAGAAAAAATAGCTGGTTATGAAAATTTGTCAGAAATGGTATTAAAAGGTGGATCTAAGGCTGAATCTGTAGGTAAATTTTTAGGCAAGTCAGTTAAGATAATAGGTAAAGGAGCAACAGTTCTAACTATAGCAGACATTAGCATTACGGGATTATCAAAGGGAATAGATGAGTATTCAAAAACAAAAGATATTGGCAAGGCCGTAAAAAAGGGTGCCTTATCTGCGGTCGCGAGTGTCGGTCCCTTAGAAGGAGCAACATTGGGTGCGACTGTTGGAGGAGTACCAGGAGCAATTATTGGTGGTGGAATAGGCTTTGCTATTCAAGGAGTAAAAGCTTTAGATCCTAAGTTTTTTGATCACCCAGTTAAAAGTTCACAGAAAATTGCTGATAACATAGGTAAATCTGTAAATGGGGTGAAAAATTCAGTTTCCAAATATATAGGTGGTTTTGGTAAGGTAATAGGTTTTGGG

SEQ ID NO: 10812 - protein, 247 aa, Streptococcus agalactiae
MESDTASRISQVFALLPRNFSKKVLKSDGLWDILANMESKGASGKKNVDSILNFLAKYEGYSNFGKSATKARTYLENLASPIKAGVKFGLEKIAGYENLSEMVLKGGSKAESVGKFLGKSVKIIGKGATVLTIADISITGLSKGIDEYSKTKDIGKAVKKGALSAVASVGPLEGATLGATVGGVPGAIIGGGIGFAIQGVKALDPKFFDHPVKSSQKIADNIGKSVNGVKNSVSKYIGGFGKVIGFG

SEQ ID NO: 10813 - protein, 242 aa, Streptococcus agalactiae
ATGGAATTCAATGCGGAATCCTCGACAGTCTTTGGTGGACTAACAGAAGTTCAGGGTGCCGTTTCTGCAGGCCTTAATTATGTCTCAGAACGTTTTGGAAGTTTCAATGGGACATTTGATACCTCAGAAAAGGATTGGATTGGACAAAAACAATCCAAACAGGAATGAAAAAAAGAGAAGTTGCCAAAGCAGAAGAACTGAAAAAGAAAAAAGCTGAAGAAAGTAAGAGAAAATATCAACAA

SEQ ID NO: 10814 - protein, 81 aa, Streptococcus agalactiae
MEFNAESSTVFGGLTEVQGAVSAGLNYVSERFGSFNGTFDTSGKGLDWTKTIQTGMKKREVAKAEELKKKKAEESKRKYQQ

SEQ ID NO: 10815 - protein, 141 aa, Streptococcus agalactiae
ATGGGAGCAACTAAAGGAGGTGCATTGATTAGTGGACTGCCAGGAATGATAATTGGTGGAGCAATTGGTTTTGTTGGAAGAGTTGCAGGTTCGATAGCATTTGATGCCATTGAGATAATAAAGAGGAAATTGCTGATACCA

SEQ ID NO: 10816 - protein, 47 aa, Streptococcus agalactiae
MGATKGGALISGLPGMIIGGAIGFVGRVAGSIAFDAIEIIKRKLLIP

SEQ ID NO: 10817 - protein, 291 aa, Streptococcus agalactiae
ATGTTATTACCAGTTGGAAGTATTGTATATTTAGTTGATGGAAACCAGAAATTGGTGATTTTAAACCGTGCTTCAATAGTAGATCAAAGTGGGCAAGAAGTTTATTTTGATTATCTGGGCGGGATATTCCCAGAAGGCTTAAATATGGAACAAGTGTATTATTTTAATGAGGAAGATATTGATGAGGTCATTTTTGAGGGATATCATGATGAGGAAGAAGAAAGAGTATCAAAACTTATTGAAAAATGGAAACAAAAAGAAGGAAAAAATATACCCAAAGGTAAAACTGAA

SEQ ID NO: 10818 - protein, 97 aa, Streptococcus agalactiae
MLLPVGSIVYLVDGNQKLVILNRASIVDQSGQEVYFDYLGGIFPEGLNMEQVYYFNEEDIDEVIFEGYHDEEEERVSKLIEKWKQKEGKNIPKGKTE

SEQ ID NO: 10819 - protein, 648 aa, Streptococcus agalactiae
TTGGAAAAACAACAATTAAATCGTGTTGAAAAAATTACAAAATTAAATAGTAGATATTATTTAGTAAGTATCTGTGGACGTTATTACATTCTAGATTATGCTAACCCAAAAAACTACAAAGATTATTTAGTAGGTTTATTCCCTGAGAGATTGAATTCTTATGATATCTTTGATGTAACAGATGATAAGAATATATTCTTAAAAAAAGGAAAAAATTCCAAAGTTACTACTAAAGGTGCTACTATCTTTTTATTCTTATATTTAATACATATTACTATCTTTCCAAATAATATTAATTTGGCTTATCTTACCAGAAGTGAATATATATATAATCATATAAGTTTATTTTTAATTTTAAATATCATAATATTTATTGGTATTTTATTATATTTGAATATGACAACAAAAGAAATAGAATTATCAAAATATGAATCTAGAAAATTATTTAATTCAAAACCACGAAATCGGAAGTGGTTAACTTATATTAGTTCATTAATAATTTCATACCTCGCTTTATGGATTTTAGCAATTTTTGGAACAAATTATTGTAATTTAATATTATTTGGATTTATTTTCTCTAATTGTTTGTTACTAATCAAATTTATCGAATTTCAACCATCATTTAATGGGAAAATTTATTACATTAAA

SEQ ID NO: 10820 - protein, 216 aa, Streptococcus agalactiae
MEKQQLNRVEKITKLNSRYYLVSICGRYYILDYANPKNYKDYLVGLFPERLNSYDIFDVTDDKNIFLKKGKNSKVTTKGATIFLFLYLIHITIFPNNINLAYLTRSEYIYNHISLFLILNIIIFIGILLYLNMTTKEIELSKYESRKLFNSKPRNRKWLTYISSLIISYLALWILAIFGTNYCNLILFGFIFSNCLLLIKFIEFQPSFNGKIYYIK

SEQ ID NO: 10821 - protein, 249 aa, Streptococcus agalactiae
AGTCATATAGCGGATTAACAACGACACGGTGTGGCTGCTGGAGCAATAGGAGCTAGTGTAGGTACTGGATTAGCTACATCTGCTGGATTTGCAGCACCATTGGTGGGAGCAGTTGTTATAGGAGCAATTGCGGTGATTGGTGCAAAAGCAATTTATGAAAATGTTAAACCTGTGCGAAGAGCAATTGACAGTGTTGGAGACGCTCTTAACAATATAGGTAAGTCTTTCAGTTCTGCATTAAAATGGGGG

SEQ ID NO: 10822 - protein, 84 aa, Streptococcus agalactiae
MSYSGLTTTTGVAAGAIGASVGTGLATSAGFAAPLVGAVVIGAIAVIGAKAIYENVKPVRRAIDSVGDALNNIGKSFSSALKWG

SEQ ID NO: 10823 - protein, 595 aa, Streptococcus agalactiae
ATGGAATTCAACGCGGAATCCTCAACAGTCTTTGGTGGACTAACAGAAGTTCAGGATGCCGTTTCGGCAGGACTTAACTATGTCTCGACAGGTTTTGGAAATTTCAATGGTACATTTGATACCTCAGGTAAAGGTCTTGATTGGATAAAAACAATCAAGACTGGGATGGAAGTTCGAAAAGAAGCTAGAGACAAGGAACTGAAGAAGAAAAAGCCAAATGAATCTTATGATGGAAAAGATGCTCTTGCAGATTTTCAAACAGAAACTACAGATTATGTGAATTATGGTACTGAGGCTGCAGGTCAACAATTTGATAAATTTGGGAAAATTATTATTAAAGATGGCAAAAATATAGGTAAAGTTTATGGTGCAAAATTACAACCAAGAGATGCTAACGGACGGTTCGTAAAGGATACTAATCCTTTGCGTAAAAGTGCAACAAGCAAACTTAAAGATATTACAAATGCTGAGAGTAGAGTTATAGGGAGGGCTGCACGTGTTGGTGGTACTGCTTTAGTAGCATATAATTTTTATTCAGATGCAAAAGAACATTATGATAGACATCATAATGTGGAAGAGCAGTCATATAGCGGAT

SEQ ID NO: 10824 - protein, 199 aa, Streptococcus agalactiae
MEFNAESSTVFGGLTEVQDAVSAGLNYVSTGFGNFNGTFDTSGKGLDWIKTIKTGMEVRKEARDKELKKKKPNESYDGKDALADFQTETTDYVNYGTEAAGQQFDKFGKIIIKDGKNIGKVYGAKLQPRDANGRFVKDTNPLRKSATSKLKDITNAESRVIGRAARVGGTALVAYNFYSDAKEHYDRHHNVGRACHIAD

SEQ ID NO: 10825 - protein, 312 aa, Streptococcus agalactiae
ATGGAAAAAATATTACCAATTGGTTCAGTTATCACATTAAAAAATGGTTCATTAAAAGTAATGATTATTGCCCGTTATCCTTTATATAAATATAAGAATAGAATTGGCTATTTTGACTATTCTGGTTGTATATTTCCTAGTGGAGTTACTGACAATCAGACATATTTTTTTAATAACGATGATATTGAAAAGGTGTGGTTTACAGGTTATATTGATGAGAATGAGTTAAAAGCTCAAAAAGTTTTTAAGGAACAAATTGATAAAATTGAATATCCACATTTTACAATTGAAGAAGTTAACAAGATTGAAGAG

SEQ ID NO: 10826 - protein, 104 aa, Streptococcus agalactiae
MEKILPIGSVITLKNGSLKVMIIARYPLYKYKNRIGYFDYSGCIFPSGVTDNQTYFFNNDDIEKVWFTGYIDENELKAQKVFKEQIDKIEYPHFTIEEVNKIEE

SEQ ID NO: 10827 - protein, 543 aa, Streptococcus agalactiae
ATGAATAATAAAATTTTAGCACTAGGAACTTATTACTCAAATGATATTTTATATGATAAGCAAACAAATATTTTGTATAAGGATGTTAATATAAATACTAATTCAAATAAAAATTATCTAGTTGTTTCACTAACTTTATTTAGTCTACCTATCGTAAGATGGTTGACTCAATTTCTTCATTTTGAAAATAGTTTTATCAATAGTTTTATCCTTTTTATAGTAATTTTCTTAACTTTTATACTTACTCATAGTTTAGTAAAGCAAAAATTCAATAAATTACAACTAGAAGTTATCTCTTTAACTGATTATGAAAAAAAAGAGTTCTTAATAAAGGAGAAAAAAAATACTGAAATTGCAATCACAATTTTCTTTATTTCGTTAATGTTAAGTATTATCTGTATGTTTATATATTTGCTAATTTCGTCTATTATTTTGATTTTTATCATTTTTGGTTGCTCGTTTCTTGTATTTTTAACTTTAGAATTGTCAACATTTGAGCGAAAAAGAATTATTAACAAATTAATAAAAGAAGTTGAAATTAAA

SEQ ID NO: 10828 - protein, 181 aa, Streptococcus agalactiae
MNNKILALGTYYSNDILYDKQTNILYKDVNINTNSNKNYLVVSLTLFSLPIVRWLTQFLHFENSFINSFILFIVIFLTFILTHSLVKQKFNKLQLEVISLTDYEKKEFLIKEKKNTEIAITIFFISLMLSIICMFIYLLISSIILIFIIFGCSFLVFLTLELSTFERKRIINKLIKEVEIK

SEQ ID NO: 10829 - protein, 1284 aa, Streptococcus agalactiae
ATGGTAAAAGTTAATGCAGGTTCACTTGCTGCACAGGCGTCATCCGTATCAACAGTAGTTGCTTCACGTGTTACAGCTTTAAATAGTGCAAAGCAAAGTCTGACTAGTTTTGCTAATCAAGCAGGCTTGGAAGGTACTGCCTATCAAAATGCAAAATCCTATGCCACAGGTGTATTAGGAACATTAATAGATGGTATGATCCTTTTATCTGAAGAGACAGAGGAAGGTGTTAGTAAACTACAAAGTTTATATAGCGATAAATGTGGAGGTGAAAGTCTAGATTCTGACGTCCTAACCAAAAAAATCGAAAAAGATGAAGAATTATTAGCTAAAATTCATGATTTGCAAGCACACTTAGACAAACATGCCACTTTTTTGTCGCATGCCTTTGATGGATTAGAAGCGACAATAAAAGCACGGCTCAAAAAGAATAAGAAAAAATTAAAATATCTCATGGAATTCAATGCGGCATCCTCAACAGTCTTTGATGGACTAACAGAAGTTCAGGATGCCGTTTCGGCAGGCCTTAACTATGTCTCAGAAGGTTTTGGAAATTTCAATGGTACATTTGATACCTCAGGTAAAGGTCTTGATTGGACAAAAACAATCAAGACTGGGATGGAAAAGAGGAGAGATAAGGTTTCAATTGATAAAAATTCATTATTGAAAGAAGTAAAAAAAGCTTATAAAGCTGGTAAAATTAATAAACAAACTTATCAATCAATAAAAAGTGGGTTAGTAAATAGTTCCACTGCTTTTCTGAAAGAATTAGCTAAAGCAAAATTAACCGATAAAGCAGTGGAAACATTCACTAAGGAATCATGGGAAGCATTGTCCAAGAATTTCCAAACGATGCAGTTCTCTGGTGTTTTAGCTGCTGTAAATGGAGCTGAATTATCAACTGCAATTGATGTCAATCCTGCTTATGCAGAGATGATTCGTGGAGGTAGTCAATTTGTGAAAAAAGGAGTTCCTGTTATTGGTGCTGCAGTTGACTTTGGACTACAACTTAAAGATGGTGAAGATGTTGGTGATGCAGCAGTCAAGACAGGTGGTCATGTTGCAATTGGTATTGGAGCTGCAAAAGCAGGAGCTATAATAGGGAGTGCATTTCCGGTAGTCGGAACTGCTGGTGGTGCCGTTGTTGGTTTTGCTATTGGGGTTGCTGGTTCAATGGCTTTCGATTGGTTGTATGATAATAAAGAACAAGTTTATAATACTACTAAGAAAGTAATTTCCACTCGTAAGACTATTGATTCAGTAGTTTATGAAGGTTTTTGGAGG

SEQ ID NO: 10830 - protein, 428 aa, Streptococcus agalactiae
MVKVNAGSLAAQASSVSTVVASRVTALNSAKQSLTSFANQAGLEGTAYQNAKSYATGVLGTLIDGMILLSEETEEGVSKLQSLYSDKCGGESLDSDVLTKKIEKDEELLAKIHDLQAHLDKHATFLSHAFDGLEATIKARLKKNKKKLKYLMEFNAASSTVFDGLTEVQDAVSAGLNYVSEGFGNFNGTFDTSGKGLDWTKTIKTGMEKRRDKVSIDKNSLLKEVKKAYKAGKINKQTYQSIKSGLVNSSTAFLKELAKAKLTDKAVETFTKESWEALSKNFQTMQFSGVLAAVNGAELSTAIDVNPAYAEMIRGGSQFVKKGVPVIGAAVDFGLQLKDGEDVGDAAVKTGGHVAIGIGAAKAGAIIGSAFPVVGTAGGAVVGFAIGVAGSMAFDWLYDNKEQVYNTTKKVISTRKTIDSVVYEGFWR

SEQ ID NO: 10831 - protein, 354 aa, Streptococcus agalactiae
ATGAATGATAAACAGTTAAAAGAAGTCGAAAGAAATGAAGCCATTCTTAGAAAAGAACTGGAACGGATTGAAGATAAGAAAATAGTCTTAAAAAAATCCTATGACAAAACTATTAACATGCAACTTGATATTCAACAGTCTCTGAGAGATAGTTCTCAAAGTCTTTCACCAGAAGAAGTTATGGAACAAGAAGAGATCATGTTAATTTTTAATCGACAGTCAAGAATCGTTGAAGATTATTTTCAAGAAGAAATGGCTAAACTCAACAAACAAGAAACAGATGCTAAAGACACATTAGAAGGACTTGTCCAAGAGCGACAGAAACTATATGTGTCTCAATCTGAGAAGGGAGAA

SEQ ID NO: 10832 - protein, 118 aa, Streptococcus agalactiae
MNDKQLKEVERNEAILRKELERIEDKKIVLKKSYDKTINMQLDIQQSLRDSSQSLSPEEVMEQEEIMLIFNRQSRIVEDYFQEEMAKLNKQETDAKDTLEGLVQERQKLYVSQSEKGE

SEQ ID NO: 10833 - protein, 333 aa, Streptococcus agalactiae
ATGGCAAAAATACAAAGTGATGCATCACTGGCATCAAGCTGTGCCACTAGCATTCAAACTGGAGCAAATGGTATTACTTCAGTTGGTAAAGCAACAAAAGATAGCGACAGTCAATATTCAGGTCAGACGAGTGCCTCATTATACATTGATAATGAGGCCAGTAAAAGTGGATCAATTGCAGGTAAATTAACAGAATTTATTGGTCTGATTCATTCTACTGCTAGCGAATTTGAAGCTGTCGATCAAAAATTGAGTCAGTCTATTTCTACACCTAAGCAATACACGACTCCATCTGGCAATTCAACGACATTTCAACCAAAACCGTATTTTAAC

SEQ ID NO: 10834 - protein, 111 aa, Streptococcus agalactiae
MAKIQSDASLASSCATSIQTGANGITSVGKATKDSDSQYSGQTSASLYIDNEASKSGSIAGKLTEFIGLIHSTASEFEAVDQKLSQSISTPKQYTTPSGNSTTFQPKPYFN

SEQ ID NO: 10835 - protein, 4407 aa, Streptococcus agalactiae
ATGTTAGTTATTTGTTATTATCAATCACTCCGCTACGAATTTAATATTGAAGAGGAGAAATCCTTTCTAATATCATCAAACGGCAAGTCGCCAATACCAGTATCAGAATTAGAAAATGACATCACGCTAAAAAATATGCAAGGTCAATTGGTATATATTATTGACCAAAAAGAAAAAGAGTTAACTAATGGTGTAGAGATTTCAGGAATTGTCTTCTATTTAGCGAATAATCAAAAAGAAATCTATACTCCCTTAGATTACGAAGATATATTAATCGGTGATAAAGAAGGGTATCATGTCCGTTTTAAAGAAGGAGCCCCTAATTTATTACTGAAAAAAATAGAAAGCAATTGGCAGCTTAATTTATTTGAAGGTGATATTTATCTGAATAATCATCTTCAAAAAGTAGTGCAGCAGTTACCTTTAAGTTTAGGTGATGAGATTAGCTTCCAAGGAACAATTGTTAAGCTTTTCCCAGATGAAATTCAAATCTGGGGGGGAACTGATTATGAAACATCATTAACTAAGAAAGTTATGTCAGCTTATCAATTTTACGCAGGCTATCCTGATTTTCACCGCTCACCTCGTATTATTTATCGTTCCAGTGAAGATAAAATTACAGTTAATGCGCCTGGTAATGAACCTAATAAGTCTAAAGATGAACTGTTAAAATTAATTGTTCCTCCTCTAGTGATGATTGGAGTCAGCATTCTTATTTCTATTTTTCGTCCTCGTGGTATCTATATCATTGCAACAATGTCAATGGCTCTAGTGACGATGATTTTCTCTATCACTGGTTACTTTAAAAATCGTAAACAGTATAAGCAGGACTTACAAGAACGCATTGATTCCTATCATGACTATTTATCTGATAAGTCAATTGAACTTCAGAAGTTAGCTAAAGAGCAAAAGCGTGGGCAACACTATCATTACCCAACGATTGAAGGTTTACAGGAAATGGCTGATACTTATCACCATCGTATTTATGAAAAGACACCACTTCATTTTGACTTCTTGTATTATCGCCTAGGTTTGGGAGAAGTACCAACGAGCTATAATATTCATTATTCTCAACCAGAACGTTCTGGGAAAAAAGATCCTTTAGAGAACGAAGGCTATAACCTCTACTTTAACAATCGTTATATTAAAAATATGCCGATTGTTGCGAATTTATCACATGGACCAGTTGGCTATATAGGACCACGAGGTTTAGTATTGGAGCAACTCCAATTGATGGTTAATCAATTAGCTTTTTTCCATTCTTACCATGATGTTCAATTTATTACTATTGTTCCAGAGGAAGAGATGGATAAGTGGTCTTGGATGCGTTGGTTGCCACATGCAACCTTACAAGATGTCAATGTTCGTGGCTTTGTTTATAATCAAAGAAGCCGTGATCAAGTGCTCAACAGTCTTAACCAAATTTTAAAATTACGTCGCACACAACGCGAAGATAAATCTGCCAAAGAAGGGACTTTATTTTCTCCGCATTATGTCGTTATTGTAACTGATGAAAAGTTAATTTTAGATCACGTCATCATGGAATTCTTTACGGAAGATCCTACAGAATTGGGATGTTCTCTCATCTTTGTTCAAGATGTTATGAGTTCACTTTCAGAAAATATCAAAACCATTATTAATATTAAAGACCGTAATACTGGTCAGTTAGTTATAGAAGAAGGAGAGCTTAAAGAAACAGATTTTGAATTAGATCATTTCTTAGAGGATTATGACAAGGAAAATATTTCACGTCGCCTAGCTCCGTTAAATCACCTACAAAATCTTAAATCTTCAATACCAGAAGCAGTTACTTTTATGGAAATGTATCAAGCAGAAGAATTTGAAGATTTGCATGTTCAAGAGCGTTGGATAAGCCATGCTCCGTATAAAAGCTTAGCTGTTCCACTTGGCTTACGTGGTCAGGATGATATTGTTTATCTAAACCTACATGAAAAAGCTCATGGTCCTCATGGATTAGTTGCAGGAACAACGGGATCAGGGAAGTCAGAAATTATACAGTCCTATATCCTTTCTTTAGCTGTTAATTTCCATCCACACGATGTAGCTTTCCTTCTCATAGACTACAAAGGTGGGGGGATGGCAAATCTCTTTAAGGACCTGCCACACTTACTTGGCACCATCACCAACTTAGATGGTGCCCAATCGATGCGTGCTTTGGTTTCTATTAATGCTGAATTGAAACGTCGTCAACGTTTATTTGCTAAAGCTGATGTTAATCATATTAACCAGTATCAGAAGAAATACAAACTTGGAGAAGTTTCAGAACCAATGCCTCATCTCTTCTTAATCTCCGATGAGTTTGCCGAATTGAAATCCAACCAACCTGAGTTTATGAAAGAGCTTGTCTCAACAGCGCGAATTGGTCGTTCCCTAGGGATTCACTTAATCCTAGCGACCCAAAAACCATCTGGTGTGGTAGATGACCAAATCTGGTCAAACTCACGCTTCAAACTAGCTCTTAAAGTAGCAGACCGCGGCGACTCCATGGAAATGCTCCATACCCCAGATGCCGCCGAGATTACACAAGCAGGACGTGCCTACCTCCAAGTTGGTAATAATGAAGTCTATGAACTCTTCCAATCAGCATGGTCAGGAGCAGATTACCAACCTGAAAAAGACGACCAAGGGATTGAAGACCATACCATTTATTCCATCAACGACCTTGGCCAATACGAAATCCTAAATGATGATCTTTCAGGCTTAGACCAAGCCGAAAATATTAAAGAAGTACCTACGGAATTAGATGCCATCGTTGAAAACATTCAAGCTTTAACCAAAGAAATGGGCATCTCAGACTTACCTCAACCGTGGCTACCGCCTCTAAGCAATCAGATTTCAGTAACCGATCTCCGTAAGGAAGAATCAGTAGACCTCTGGAGCAAGGCCCCATCTTACAAAGCTGTTCTTGGCTTTATGGATATACCAAGCCAACAAGCACAAGAAGTAGCTTACCACGATTTTGAAGATGATGGGCATTTGTCAATTTTTGCAGGACCAAGTATGGGGAAATCCACAGCCCTTCAAACTGTAACAATGGACTTAGCACGTCACAATAGTCCAGAATTTTTAAACCTTTATCTCTTTGATTTTGGTACCAATGGTCTCCTACCTCTAAGACGTTTGCCACATGTAGCAGATTTCTTTACCATTGATGATGACGAAAAAATAGCCAAGTTTATTGCCCGTATCAAAGTTGAAATGTCTGATCGTAAAAAAGCCCTCAGTCGCTACAATGTCGCGACAGCAAAACTTTACCGTCAGGTATCTGGGGAAACCATGCCTCAAATCCTGATTGTTATCGACAGTTATGAAGGGCTACGGGAAGCTCAGACACTGACTAACTTAGAAGCTTGTTTCCAAAATATTTCGCGTGATGGGTCGTCACTTGGCATTTCCTTAGTTATCTCAGCTGGTCGTATGGCAGCTTTGAGGTCGTCCTTAATGGCAAACCTTAAAGAACGTATCGCTCTTAAATTAACAGATGACTCTGAATCACGGACACTTGTCGGTCGTCACCAACACATCATGGAAGATATTCCAGGACGTGGATTAATCAAACGTGATGACATTGAAGTGTTACAAGTGGCCCTCCCAACAGAAGGCACTGAAACCTTTGACATCATCAGTAACATCCAAACCGAATCTGACGCCATGAACGACAAATGGACTGGACCAAGACCAAAAGCAATACCAATTGTTCCAGAAGAATTAACCTTTGACGACTTTATGGCTACAGATAGTGTTCAAGCAGATCTATCAGCTAATCGTTTACCACTTGGGCTTGAAATGGTTGACGTTGAAAGCTTTAGCCTACCATTAACGAAATTTAAGCACCTCTTATTCCTATCAGATTCAGATGAAGGTTTAGAAAATCTAGGCAGTCATTTACTTAAAACGTTGATTAAAGTGCCAGAATACAGCACCATGATCATTGATTCCTTAGGCGAACATGAAGCCTACCAAGGACAAGTGAGAACCTATGTCGGTGCTGATATGATTAGTGATATGGCAGAACAACTCAATTATGAGCTAGGAAAACGTCAAGAACAAAACGCTTTCGATAGATGGTTTATCTTAATTCCAGATTTTGAAAGTTTCGTCAGCAAAACAAACCTTAGCCTAGAGCAAATCCAAAATCTCTTAGATAATGGACCCAAAGTCGGCTTACACCTGATCATTGGCTCAGCCTTTAGCTTTGTTGGTTCAAAACTTGACCCCGTTAACAAATACGTCAAAACCAATAGCCAATATGTTATGCTAGGCATGCGCCTAATGGACCAAACATTCCTAGAGAAAGTGTATAATAGTAAAGAAGCACGTCTGGAACGCGACGAAGCCTACATTCACGATAGAAAAAACTATCAAAAACTAAAACTCAGCATAGAC

SEQ ID NO: 10836 - protein, 1469 aa, Streptococcus agalactiae
MLVICYYQSLRYEFNIEEEKSFLISSNGKSPIPVSELENDITLKNMQGQLVYIIDQKEKELTNGVEISGIVFYLANNQKEIYTPLDYEDILIGDKEGYHVRFKEGAPNLLLKKIESNWQLNLFEGDIYLNNHLQKVVQQLPLSLGDEISFQGTIVKLFPDEIQIWGGTDYETSLTKKVMSAYQFYAGYPDFHRSPRIIYRSSEDKITVNAPGNEPNKSKDELLKLIVPPLVMIGVSILISIFRPRGIYIIATMSMALVTMIFSITGYFKNRKQYKQDLQERIDSYHDYLSDKSIELQKLAKEQKRGQHYHYPTIEGLQEMADTYHHRIYEKTPLHFDFLYYRLGLGEVPTSYNIHYSQPERSGKKDPLENEGYNLYFNNRYIKNMPIVANLSHGPVGYIGPRGLVLEQLQLMVNQLAFFHSYHDVQFITIVPEEEMDKWSWMRWLPHATLQDVNVRGFVYNQRSRDQVLNSLNQILKLRRTQREDKSAKEGTLFSPHYVVIVTDEKLILDHVIMEFFTEDPTELGCSLIFVQDVMSSLSENIKTIINIKDRNTGQLVIEEGELKETDFELDHFLEDYDKENISRRLAPLNHLQNLKSSIPEAVTFMEMYQAEEFEDLHVQERWISHAPYKSLAVPLGLRGQDDIVYLNLHEKAHGPHGLVAGTTGSGKSEIIQSYILSLAVNFHPHDVAFLLIDYKGGGMANLFKDLPHLLGTITNLDGAQSMRALVSINAELKRRQRLFAKADVNHINQYQKKYKLGEVSEPMPHLFLISDEFAELKSNQPEFMKELVSTARIGRSLGIHLILATQKPSGVVDDQIWSNSRFKLALKVADRGDSMEMLHTPDAAEITQAGRAYLQVGNNEVYELFQSAWSGADYQPEKDDQGIEDHTIYSINDLGQYEILNDDLSGLDQAENIKEVPTELDAIVENIQALTKEMGISDLPQPWLPPLSNQISVTDLRKEESVDLWSKAPSYKAVLGFMDIPSQQAQEVAYHDFEDDGHLSIFAGPSMGKSTALQTVTMDLARHNSPEFLNLYLFDFGTNGLLPLRRLPHVADFFTIDDDEKIAKFIARIKVEMSDRKKALSRYNVATAKLYRQVSGETMPQILIVIDSYEGLREAQTLTNLEACFQNISRDGSSLGISLVISAGRMAALRSSLMANLKERIALKLTDDSESRTLVGRHQHIMEDIPGRGLIKRDDIEVLQVALPTEGTETFDIISNIQTESDAMNDKWTGPRPKAIPIVPEELTFDDFMATDSVQADLSANRLPLGLEMVDVESFSLPLTKFKHLLFLSDSDEGLENLGSHLLKTLIKVPEYSTMIIDSLGEHEAYQGQVRTYVGADMISDMAEQLNYELGKRQEQNAFDRWFILIPDFESFVSKTNLSLEQIQNLLDNGPKVGLHLIIGSAFSFVGSKLDPVNKYVKTNSQYVMLGMRLMDQTFLEKVYNSKEARLERDEAYIHDRKNYQKLKLSID

SEQ ID NO: 10837 - protein, 1275 aa, Streptococcus agalactiae
ATGGAAACAGATTCGTTTGTATTTGAAGAACAAGACTTTCAATTTGAAAAAGGACCAGATTTTTGGCAGTTATCTCTTAAGCGTTCAAAAGTAGGAACTCAAAATCTGCAACAACTGCAATTGTTAGAAATTCACCATTCTTTGTTGATGCCTATGACAACTGCAATTGATGCAGATACCATTCAATTTCAATTCCAGACAGAAGCGCATGCTCTATCTTTTGAAAGCTTTAAAAAAGAAACTTTATCTGAAAAATTACGATTAGCCTTGAATGTCTTGGATTTAGATAAGGCTTTGTCTTTGCCAGTAAATTTCATTTTGCATCCCTCTAATCTATTTTTAACAAAAAATGCAACTGCTAAAATAGCTTATCGTAGCCTTCCTGGGATTATGACACCTGAGAAGTTTGGTCCAGAAGAGTTTTTATATCAATTCAAATGTTTTGTCTTTGCATTATTGACGCAACATGACTATATAGAGTTGTATAATGGTGCTATTTCTGTTATTGAAGTATCAGATTTCCTAAAAAGCATTTATCATGCAGAAACTATTCAGGCTGTTAGAGACATCATTACTACTGATTATGAGCAGCAAGTAGAAGTAGAAACTCATACGTTAGCAAAAGTATCAAAGGCAAAATATAAGCTTTATAAATACATAAGTGTCTGGCTAGGAGCTTTATCTACAATACTCTTGATTCCGCTAGTATATCTGGTTTTTATTCACAATCCATTCAAAGAAAAAATGTTGGCAGCGGATACTTCATTTATTAAAGTTGATTATAATCAAGTGATTAATCGACTAGAACATGTAAAAGTAAGTAAGTTACCTTATACACAGAAGTACGAGTTGGCCTATTCCTATATTAATGGAATGTCATTTTCTGAAGAACAGCGTGAAGTTATTTTAAACAATGTTACGCTCAAGACTGATGAGCTCTATCTTGATTATTGGATTAATATTGGCCGTGGTTTAGATGATGATGCTATTGATGCTGCCAAACGTTTAGACGATTCTGACCTTGTTATTTATGCTATTGTTCAGAAAATGGATCAGGTTAGAAAAGACAATAGTTTATCTGGTAAAGATCGTGAACAAAAACTTTCTGAGCTACAAACAGACTATGATAAATATTGGAAAGACCGTAAGACAGCTTTAACAGATGAGGAATCCAAATCGAAAAATAGCAATAATCATTCGACAAATTCCAACAAAGAGTTATCATCTGAACCATCAAGTACTACAACAAGTACATCTTCTAAAACTAAAAGTAGG

SEQ ID NO: 10838 - protein, 425 aa, Streptococcus agalactiae
METDSFVFEEQDFQFEKGPDFWQLSLKRSKVGTQNLQQLQLLEIHHSLLMPMTTAIDADTIQFQFQTEAHALSFESFKKETLSEKLRLALNVLDLDKALSLPVNFILHPSNLFLTKNATAKIAYRSLPGIMTPEKFGPEEFLYQFKCFVFALLTQHDYIELYNGAISVIEVSDFLKSIYHAETIQAVRDIITTDYEQQVEVETHTLAKVSKAKYKLYKYISVWLGALSTILLIPLVYLVFIHNPFKEKMLAADTSFIKVDYNQVINRLEHVKVSKLPYTQKYELAYSYINGMSFSEEQREVILNNVTLKTDELYLDYWINIGRGLDDDAIDAAKRLDDSDLVIYAIVQKMDQVRKDNSLSGKDREQKLSELQTDYDKYWKDRKTALTDEESKSKNSNNHSTNSNKELSSEPSSTTTSTSSKTKSR

SEQ ID NO: 10839 - protein, 240 aa, Streptococcus agalactiae
ATGAATACACATATTAACATTACTCTAGATATGGGGGAAACCTCAAAAGATTTACGTATCCCTTTGAAAATTAGCGTTAAGCAATTAGTAATGGAATTAGATAGTATTTTTAGCCGTACTGAAAGGCGTACCAAATATCAACTAAGAGTTATAAATAAAGGTATTTTATTGGGAGAGAACGATATATTAGCTCACCATCCAGTAACAACTGGTGATCGTATAAGGATAGAGGAGTTTTAT

SEQ ID NO: 10840 - protein, 80 aa, Streptococcus agalactiae; identical to SEQ ID NO: 1952

SEQ ID NO: 10841 - protein, 471 aa, Streptococcus agalactiae
ATGAAGTTGAAACGATTTTTAGCCTGTCTACTAATATTATCCTGTATGAGTCAAACATCAGTATTTTCTGATGGGTTAAAGAATAATGATATTCATTTTGATACAAAACGTTTAGAATCAGATTCACAAAAAAATTCTGGTTTTCAAACTGAATTAACTAAAGATTTATTTAAAAAAGAAGACCTTAAAAAATTGGATAAAAACCGTCAATCTAAAGTCTCACTCCAGAAAAAGCAGTCTAAGCAACTGTTTCAATATTCAAATAAAGGACAATCTGATAGGAAAAAACGTATCAAACAATTATTTTCTGAAGAAAGTAATCAATTTAAATTTGTTACAAGAACAGAAGAAGCGACTGTTTCGGCTGATATTGGTCATATGATTATGTACCTGGTTCTCATTAGTTTGGTACTAATATTAGCTTCTATAATGACTTTTAAAATAAAGGACAAAAAGGATGAATACACATAT

SEQ ID NO: 10842 - protein, 157 aa, Streptococcus agalactiae
MKLKRFLACLLILSCMSQTSVFSDGLKNNDIHFDTKRLESDSQKNSGFQTELTKDLFKKEDLKKLDKNRQSKVSLQKKQSKQLFQYSNKGQSDRKKRIKQLFSEESNQFKFVTRTEEATVSADIGHMIMYLVLISLVLILASIMTFKIKDKKDEYTY

SEQ ID NO: 10843 - protein, 3015 aa, Streptococcus agalactiae
ATGAAAAGAAATAACTTTAGAATACTTTGGTATATTATAGCTGTTGCTCTCTTTTTAGTAGCTATTGCTGGCCTTAATCTTAAGCTTCAAGGCGATCATGCAAAAGAGAATAAAACAACACAGTCAGCTACTAACACTAAACTAAATATAGCATTAGTTAACGAAGATCAAAATGTATCTAATGGTAAAGAAAGTTATAATTTAGGAGCTAGTTATATTAAGTCTATCGAACGTGATAATAGTCAAAATTGGTCAGTTGTTAGTCGAGGTACTGCTCAAAATGGATTAAACAAAGGTGATTATCAATTAATGGTTATCATCCCTAATAACTTTTCTCAAAAACTCCTTGATGTCAATAAAGCAAATGCAGAGCAAACAACTATCTCTTATAAGGTTAATGCCAAGGGGAATTTAGCATTAGAGAAAAAGGCAACTGAAAAAGGGAAAGATATTGTTTCAGAGTTAAATAGCCACTTAGTAAATATGTATATGGCAAGTATTTTAAGTAACTTATATACAGCTCAAGAAAATGTACAGGCCATGGTAAATGTTCAGTCAGGTAATATCTCAAATTACCAAAAAAATCTTTTAGATTCTGCAACTAATTTCCAAAATATCTTTCCAGCCCTTGTTAACCAGTCTAGTAGTTCCATTACTGCTAACGAATCACTGAAAAAATCTTTAGAAGCTTCTGATAACATGTTTAATGATTTGGTGACAACCCAGACAAATACTGGAAAAGATTTATCAAGGTTAATAGAACAGCGCCATCAAGATAGCATTTCGTATGAAGCGTTTTCGGCCTCATTACTAGAAATGAATAACGAGTTATTAGAGAAGCAATTGTCTGATATTATCACACAAGCACAAAAAGACCAAGAAACATTATCATCACAACTCAATAGTATTATGGGTGATGATAACGATAACGATCATAATCATAAAGAAAACTCATCAGCTTATCTAAATGTTGCAAGGCAAAAAATCCAAGAACTATCTGAAGCACTCAAGTCACAAGATAACGTCGCTAAAGATCAAAGTGAACAACTAGATAAAATTGTTAGAGAGGGACTAGCAAGTTACTTTGCTAAGAATAATAAAGATAATATTACTTTATTAGAATTATTGAAGAGTCATTCTACTAATGAGAAGACTTTGAAAGATTTTAAAGCTAAGGTAGCAGATTTCACAAATTCTCTCATTTCAAGCATTCCTTCACTAAACCTTTCGGAGTTGCACTTAACCCAAGAAGAAGAAAAAGCCATTCAGTTTACATCTTCTGATTCGGAAATCATTAAAAAAGTAAGCAACGAAAGAACTCTGTATTTAAATACTAATTTATTAAATCGTCTTTTTGAAGCTAGGAAAAATAGAGATGAAGCTAAAAATAAAGTTAATCAATTAAAATTGCCATCTAGTTCTACTCGAACTGGTGAGCAGATAGTTTCTGTTGAATCAAATAATCCAGATTACAGGGTAGATACCTGGACGGTTAATGGTAAGCAAACAAGAACCTTGGACCCCAGCCAAAACAATAATATTATTATCAATAGCAGTTATCAAGGGGAATCATCTAACTCTAGTATTACAAAACCAAGCTATACAATCACTATCGGGAATCATAAACAAATTGTACAAAATGATGACGGTAAAACCCAACGGTCTTACTTGGAGGCAGAAGCAACGTATCAACGAACTCTACAAGAAGTAATTGATGCATATAACACCACTCACGGCTTAGTAGCTAAATACTACATTATTTCTGATGGCGAAGAACCGCAAAATTTATTTGATCAATTTTTAAATCAAAGTGTTAACGATACGATGGTTGATCTGGTCAAAAATGGTATAACTAAGTATTTGATGGATGAAAACACTGCTGATGCGCAACAGAAAGTTAAAGATGTCATGGAGGAAGTTGAAAATAGTCAAGATGAATTGGCGGATCAAATGGCAAAAGTAACTGAGACAAATGTACGACTAACAGATGCAATCAAAAAACAGCTTGAGACCCTTCAATCAATTAACATGAAGGTCCAAAACATCACACAGGATCAATCTAAAGTAAACGACTCACAGAAAACAACTGATCAACAATTATCTGATTTGAAGAACCAGCTAGATGGGCTAATGACCTCTGCAGCTGGCGTAAAAGATATGTCCAAATCTAATAGTCAAGAGGCGGACCAAGTTAATCAAATATTCACATCATTCAATAAAGATGTTCAAGATGCTAAAAATTCGGGCAACAAACTTTCGACGGATGCAACAGATTTAATGGCTAACTTCCAAAAAGAATTGGCCAATAACGGTGATTTCGTAGCTTCTTTCTCTAAAGTCTTTAATACTGCTTATAAAAATGGAGTGCCAAATGATATTCTCCTTAATTTCTTATCACGACCTGTCGCTGAATCAGCGTCTGCAGTTAGGGCAACTGAAAATACTTATCGCCCATTCACTTGGATACTATTATTAGAAGTTGTTAGCCTATTTACAGCATATATCTTTGCGACTCAAAACCTTATTAAGAAATTGACAGATAGGTATAATGTCAATCGCTGGCTTCAAACAGACTTTTTAAATGTCATTGTCATTTCAGGCCTCTCTCTTGTGATTGGTTTAGCACTGGGAGTTATCTCAAGCAGAAGTCTTCATGTCATGCCTGAATATGTACCATCTTGGTTCCTAGTTATGACTCTGTTTAGTTTTTTATTAATTCATAGTCAGTATTTCTTTGTTAAAAATTTTAAAGCAGTTGGTATGGGTTTAGCTTTGTTTATGATTATTAGTTTTGTCTATCTATCAAATGCCGTAGGCACAGTAGCGACTGTTAGTGGACTTCCAAAATTACTAAAAGCTATTAATCCACTATCTATCCTTGAAAATCAATTATCGTCTTATTTTGATAATGTGACAACTGGATTTATTTTCCTTATCTTAGTACTTCTTGTGGATGTTGCTTTTATTATCATGAATATTTTTATCACCTTAAATTTTGAAGCTAAAGTAAAAGAG

SEQ ID NO: 10844 - protein, 1005 aa, Streptococcus agalactiae
MKRNNFRILWYIIAVALFLVAIAGLNLKLQGDHAKENKTTQSATNTKLNIALVNEDQNVSNGKESYNLGASYIKSIERDNSQNWSVVSRGTAQNGLNKGDYQLMVIIPNNFSQKLLDVNKANAEQTTISYKVNAKGNLALEKKATEKGKDIVSELNSHLVNMYMASILSNLYTAQENVQAMVNVQSGNISNYQKNLLDSATNFQNIFPALVNQSSSSITANESLKKSLEASDNMFNDLVTTQTNTGKDLSRLIEQRHQDSISYEAFSASLLEMNNELLEKQLSDIITQAQKDQETLSSQLNSIMGDDNDNDHNHKENSSAYLNVARQKIQELSEALKSQDNVAKDQSEQLDKIVREGLASYFAKNNKDNITLLELLKSHSTNEKTLKDFKAKVADFTNSLISSIPSLNLSELHLTQEEEKAIQFTSSDSEIIKKVSNERTLYLNTNLLNRLFEARKNRDEAKNKVNQLKLPSSSTRTGEQIVSVESNNPDYRVDTWTVNGKQTRTLDPSQNNNIIINSSYQGESSNSSITKPSYTITIGNHKQIVQNDDGKTQRSYLEAEATYQRTLQEVIDAYNTTHGLVAKYYIISDGEEPQNLFDQFLNQSVNDTMVDLVKNGITKYLMDENTADAQQKVKDVMEEVENSQDELADQMAKVTETNVRLTDAIKKQLETLQSINMKVQNITQDQSKVNDSQKTTDQQLSDLKNQLDGLMTSAAGVKDMSKSNSQEADQVNQIFTSFNKDVQDAKNSGNKLSTDATDLMANFQKELANNGDFVASFSKVFNTAYKNGVPNDILLNFLSRPVAESASAVRATENTYRPFTWILLLEVVSLFTAYIFATQNLIKKLTDRYNVNRWLQTDFLNVIVISGLSLVIGLALGVISSRSLHVMPEYVPSWFLVMTLFSFLLIHSQYFFVKNFKAVGMGLALFMIISFVYLSNAVGTVATVSGLPKLLKAINPLSILENQLSSYFDNVTTGFIFLILVLLVDVAFIIMNIFITLNFEAKVKE

SEQ ID NO: 10845 - protein, 288 aa, Streptococcus agalactiae
ATGGCACAAATTAAATTAACACCAGAAGAACTTCGCTCATCAGCACAAAAGTACACAGCTGGTTCTCAACAAGTAACAGAAGTTCTTAATTTGCTTACTCAAGAGCAAGCAGTTATTGACGAAAATTGGGATGGATCTGCTTTTGATTCTTTTGAAGCACAATTCAATGAATTATCTCCAAAAATTACAGAATTTGCTCAATTACTCGAAGATATTAACCAGCAATTATTAAAAGTTGCAGATATCATTGAGCAGACGGATGCAGATATTGCTTCTCAAATTAGTGGA

SEQ ID NO: 10846 - protein, 96 aa, Streptococcus agalactiae
MAQIKLTPEELRSSAQKYTAGSQQVTEVLNLLTQEQAVIDENWDGSAFDSFEAQFNELSPKITEFAQLLEDINQQLLKVADIIEQTDADIASQISG

SEQ ID NO: 10847 - protein, 288 aa, Streptococcus agalactiae
ATGGCACAAATTAAATTAACACCAGAAGAACTTCGCGCATCAGCACAAAAATATACTGCTGGTTCTCAACAAGTAACAGAAGTCCTTAACTCACTTACTCAAGAACAAGCTGTTATTGATGAAAACTGGGATGGTAGCGCTTTTGATTCTTTCGAAGCACAATTCAATGAGTTGTCACCTAAAATCACAGAATTTGCTCAATTACTTGAAGACATTAATCAACAATTGCTTAAAGTTGCTGATATTGTTGAGCAAACAGACTCTGATATCGCTTCACAAATTGGTGGA

SEQ ID NO: 10848 - protein, 96 aa, Streptococcus agalactiae
MAQIKLTPEELRASAQKYTAGSQQVTEVLNSLTQEQAVIDENWDGSAFDSFEAQFNELSPKITEFAQLLEDINQQLLKVADIVEQTDSDIASQIGG

SEQ ID NO: 10849 - protein, 778 aa, Streptococcus agalactiae
ATGATTCCAGATAGTAGTTTTAAAGTGCTATCAGACATGGCATATAATATTGAAGAATCCAAAGCAAAAAGTAATGGACACCTTAAAATTATAGAAGGTAGTCAAATTATTGATTTCCATCAAAAACGCTCTTTTATGGTATTAGAGGTTAATGATGATATCGATAATGGTATGCAGGCTATGGCATGTCAGTCTTGGATAGAGTAATCATATTGTTATAGCATATTCAGGAACGAACGCTTTTAATAAGAAAGATATCTTAACAGATATCGATTCAGTTGTATTGGGGAAGAACAATAAATTGCTAACTTGTCCTTCAAGTATTACCCTGAGAGAGGATGGCATTTCTCTGTCTTGTAAAAATCCAAGTCAAATTACAACATCTAAACTATTTGCACAAAAAATTAAGATGAACTATCCTGATGCAACCCTCTGGTTAACAGGGCATTCTCTAGGTGGTTATTTGGCCATGATTGTGGCTTCAGAAATGAGATTATCAGCGCGTGTTTTTAATTCCCCTAGTCCCATTAACAATATGTCTGAAGCAGCCGCATCCTATGTAATTTCACATCCAGAGAAGTATCGTAGTTACCGTATTAATAAAGATTACATTGGTAATTTTGGTATTAATAGTTCAGATGATAAATTAGGTATTTCTAAAAGAGTCAATGCTAAGAAGCAACATGGTTTTTATAAAAAGATTTTCTTTCACGAATTGACACGATTTCGATTAAATCAACAAGGACAGATTGTTGATATAGATGAAAATAAACAGGAT

SEQ ID NO: 10850 - protein, 260 aa, Streptococcus agalactiae
MIPDSSFKVLSDMAYNIEESKAKSNGHLKIIEGSQIIDFHQKRSFMVLEVNDDIDNGMQAMACQSLDESNHIVIAYSGTNAFNKKDILTDIDSVVLGKNNKLLTCPSSITLREDGISLSCKNPSQITTSKLFAQKIKMNYPDATLWLTGHSLGGYLAMIVASEMRLSARVFNSPSPINNMSEAAASYVISHPEKYRSYRINKDYIGNFGINSSDDKLGISKRVNAKKQHGFYKKIFFHELTRFRLNQQGQIVDIDENKQD

SEQ ID NO: 10851 - protein, 321 aa, Streptococcus agalactiae
ATGTTAAAAACACGAACACATATTAATGAATTAGAAACAAAAATCGCCCTTGATTTAGTACACAGATATCTAGGTATTCAACAACTTGTTTTTTCAAAGTGGAGACATTCTTTAGAAACTGGTTCATGGTCTTCTATTATAACAATAAATGGCGCTAATATTATCAATTACATTGTTGATGATATTAGTGACAGTGATAGTATTTCAGGTATTATTTGTCATTCTAAAAGTTTTCATCTCAGACCTAGAGAAAAAAAGGAACCTATTCAGTCTATTGATGAGTTAGATATCATCTGGTCTTTGAATAGAGAGGAAAATGAA

SEQ ID NO: 10852 - protein, 107 aa, Streptococcus agalactiae
MLKTRTHINELETKIALDLVHRYLGIQQLVFSKWRHSLETGSWSSIITINGANIINYIVDDISDSDSISGIICHSKSFHLRPREKKEPIQSIDELDIIWSLNREENE

SEQ ID NO: 10853 - protein, 3180 aa, Streptococcus agalactiae
ATGCCAAAGCGCACAGACATACGTAAAATTATGGTTATCGGTTCTGGCCCGATTGTGATTGGACAAGCAGCAGAGTTTGACTATTCTGGTACACAAGCCTGTCTCTCTTTAAAAGAGGAGGGATACCAAGTTGTTTTGGTCAATTCGAATCCAGCTACTATCATGACAGATAAAGATATTGCTGATAAAGTTTATATTGAACCTATTACCTTGGAGTTTGTCACAAGAATTCTCAGGAAGGAAAGACCTGATGCTCTCCTTCCAACTCTTGGAGGTCAAACTGGATTGAATATGGCTATGGCTCTATCAAAAAATGGTATCCTAGAAGAATTAAATGTTGAACTATTAGGGACCAAATTATCAGCCATTGATAAAGCTGAAGATCGTGATTTATTTAAACAGTTGATGGAAGAACTCAATCAACCTATTCCAGAATCCGAGATTGTTAATTCGGTAGAAGAAGCTATTCAATTTGCAGAGCAAATCGGGTATCCATTAATTGTTCGTCCTGCCTTTACTTTAGGAGGTACAGGTGGAGGCATGTGCGATAATCAAGAACAATTGGTTGACATCACGACGAAGGGGTTAAAGTTATCGCCTGTGACACAGTGCCTTATTGAACGTTCAATTGCTGGCTTTAAAGAGATTGAATACGAAGTTATGCGTGATGCAGCAGATAACGCTCTTGTTGTTTGTAATATGGAGAATTTTGATCCTGTTGGTATCCATACAGGGGACTCTATAGTTTTTGCACCCGCACAAACGTTATCTGATGTAGAAAATCAGTTATTACGAGATGCGAGTTTAGATATTATAAGAGCTTTGAAAATTGAAGGAGGATGCAATGTTCAACTAGCCCTTGATCCGAATAGTTTTAAATACTATGTCATTGAAGTTAATCCAAGAGTATCAAGATCTTCTGCTTTAGCTTCAAAAGCTACTGGATATCCAATTGCTAAATTAGCAGCTAAGATAGCTGTTGGTTTGACACTAGATGAGGTAATTAATCCTATTACAAAAACGACTTACGCTATGTTTGAACCTGCTTTAGATTACGTAGTCGCAAAAATGCCGAGATTTCCTTTTGATAAATTTGAAAGTGGCGATAGAAAATTGGGAACACAGATGAAAGCTACAGGCGAAGTCATGGCAATAGGACGGAATATAGAAGAATCTTTGTTGAAAGCTTGTCGTTCACTAGAAATAGGTGTCGATCACATTAAAATAGCAGATTTAGATAATGTATCAGATGATGTTTTATTAGAAAAAATAAGAAATGCAGAAGATGATCGCTTATTTTATCTAGCAGAAACTTTACGTAGACATTATAGTATTGAAAAATTAGCAAGTTTGACTAGTATTGATTCTTTCTTCCTTGATAAGTTAAGAGTGATTGTAGAGTTAGAAGATTTATTATCTAAAAACAGACTGGATATCAATATTCTCAAAAAGGTTAAAAATAAAGGTTTTTCAGATAAAGCTATAGCGAGTTTATGGCAAATAAACGAAGATCAAGTTCGTAACATGCGAAAAGAAGCAGGAATTCTTCCAGTTTATAAGATGGTTGATACATGTGCGGCTGAGTTTGATTCAGCAACACCCTACTTTTATTCAACTTATGCCGTAGAAAACGAGTCATTGATATCAGATAAAGCCTCTATTTTGGTTTTAGGATCGGGCCCAATCCGAATTGGACAGGGCGTTGAATTTGATTATGCAACGGTTCATTCTGTTAAAGCTATCAGAGAGTCTGGTTTTGAAGCGATTATCATGAACTCTAATCCAGAGACTGTCTCAACAGATTTTTCTATTTCAGATAAGCTTTACTTTGAACCTTTGACTTTTGAAGATGTTATGAATGTTATTGACTTAGAAAAACCTGAAGGGGTCATCTTACAATTCGGTGGTCAGACTGCTATTAATCTAGCAAAAGATTTAAACAAGGCAGGGGTTAAAATACTAGGCACACAATTAGAAGATTTGGATCGTGCTGAAAATAGAAAACAATTTGAAGCCACTTTGCAAGCCCTAAATATCCCTCAACCACCAGGTTTTACCGCCACTACGGAGGAAGAGGCAGTTAATGCAGCGCAAAAGATTGGTTATCCCGTGTTGGTTAGACCATCATATGTTCTTGGTGGACGAGCTATGAAGATAGTTGAAAACGAAGAAGATTTACGTCATTATATGACAACCGCGGTAAAGGCAAGCCCAGATCATCCAGTGCTTATAGATGCATACCTTATAGGTAAAGAGTGTGAGGTTGATGCTATATCCGATGGTCAGAATATACTGATTCCTGGAATAATGGAACATATAGAGCGAGCTGGTGTTCATTCAGGAGATTCCATGGCTGTATACCCTCCTCAAACATTGTCTGAGACCATTATCGAAACTATTGTAGATTATACAAAACGCTTAGCAATTGGATTAAACTGTATCGGTATGATGAATATTCAGTTTGTAATCAAGGATCAGAAAGTATACGTTATTGAAGTTAATCCTCGTGCTAGTAGAACACTTCCATTCTTATCAAAAGTAACTCACATTCCTATGGCCCAAGTAGCAACAAAAGTTATCTTAGGAGATAAACTCTGCAATTTTACATATGGTTATGATCTCTATCCAGCTTCAGATATGGTCCACATTAAAGCCCCTGTCTTTAGTTTTACCAAACTTGCTAAAGTAGATAGTTTATTAGGTCCTGAAATGAAATCAACAGGCGAAGTGATGGGATCAGATATTAATCTTCAGAAAGCCTTGTATAAAGCCTTTGAAGCAGCATATCTCCATATGCCAGACTATGGTAACATTGTTTTTACAGTAGATGATACAGACAAAGAAGAAGCTTTAGAACTTGCAAAAGTCTATCAAAGTATTGGTTATCGTATTTATGCTACCCAAGGGACTGCAATTTATTTTGATGCTAATGGTTTAGAGACAGTTTTAGTAGGTAAGTTAGGAGAGAACGATCGAAATCATATTCCTGATTTAATTAAAAATGGTAAGATTCAAGCAGTTATCAACACAGTTGGGCAAAATAACATTGATAACCATGATGCTCTCATCATCAGACGTTCTGCAATTGAACAAGGAGTTCCTCTATTTACATCTTTAGATACTGCACATGCAATGTTCAAAGTTCTTGAAAGCAGAGCATTTACATTAAAAGTACTAGAT

SEQ ID NO: 10854 - protein, 1060 aa, Streptococcus agalactiae
MPKRTDIRKIMVIGSGPIVIGQAAEFDYSGTQACLSLKEEGYQVVLVNSNPATIMTDKDIADKVYIEPITLEFVTRILRKERPDALLPTLGGQTGLNMAMALSKNGILEELNVELLGTKLSAIDKAEDRDLFKQLMEELNQPIPESEIVNSVEEAIQFAEQIGYPLIVRPAFTLGGTGGGMCDNQEQLVDITTKGLKLSPVTQCLIERSIAGFKEIEYEVMRDAADNALVVCNMENFDPVGIHTGDSIVFAPAQTLSDVENQLLRDASLDIIRALKIEGGCNVQLALDPNSFKYYVIEVNPRVSRSSALASKATGYPIAKLAAKIAVGLTLDEVINPITKTTYAMFEPALDYVVAKMPRFPFDKFESGDRKLGTQMKATGEVMAIGRNIEESLLKACRSLEIGVDHIKIADLDNVSDDVLLEKIRNAEDDRLFYLAETLRRHYSIEKLASLTSIDSFFLDKLRVIVELEDLLSKNRLDINILKKVKNKGFSDKAIASLWQINEDQVRNMRKEAGILPVYKMVDTCAAEFDSATPYFYSTYAVENESLISDKASILVLGSGPIRIGQGVEFDYATVHSVKAIRESGFEAIIMNSNPETVSTDFSISDKLYFEPLTFEDVMNVIDLEKPEGVILQFGGQTAINLAKDLNKAGVKILGTQLEDLDRAENRKQFEATLQALNIPQPPGFTATTEEEAVNAAQKIGYPVLVRPSYVLGGRAMKIVENEEDLRHYMTTAVKASPDHPVLIDAYLIGKECEVDAISDGQNILIPGIMEHIERAGVHSGDSMAVYPPQTLSETIIETIVDYTKRLAIGLNCIGMMNIQFVIKDQKVYVIEVNPRASRTLPFLSKVTHIPMAQVATKVILGDKLCNFTYGYDLYPASDMVHIKAPVFSFTKLAKVDSLLGPEMKSTGEVMGSDINLQKALYKAFEAAYLHMPDYGNIVFTVDDTDKEEALELAKVYQSIGYRIYATQGTAIYFDANGLETVLVGKLGENDRNHIPDLIKNGKIQAVINTVGQNNIDNHDALIIRRSAIEQGVPLFTSLDTAHAMFKVLESRAFTLKVLD

SEQ ID NO: 10855 - protein, 1074 aa, Streptococcus agalactiae
ATGAAGCGTCTATTATTACTGGAAGATGGTAGTGTGTTTGAGGGTGAGGCTTTCGGAGCGGATGTAGAAACAAGTGGTGAAATCGTTTTTAGTACAGGAATGACAGGGTATCAAGAATCTATAACAGATCAATCTTACAACGGTCAAATCATCACTTTTACTTATCCTCTTATTGGAAATTATGGGATAAATCGAGACGATTACGAATCTATTAGACCAACATGTAAGGGAGTAGTTGTTTATGAATGGGCAGAGTATCCAAGTAACTGGCGTCAACAGATGACACTTGATGAATTTTTAAAATTAAAAGGAATACCTGGAATTTCAGGTATAGATACTCGAGCATTAACAAAAATTATTCGAAAACATGGAACAATGAAAGCTTGTTTAATAAACGAGGGAAATTCTATTCATGAAGCACTAGAAAACCTTCAAAAAAGTGTTCTTTTAAATAATCAAATTGAACAAGTATCAACCAAATTAGCTTATGCTTCGCCTGGAGTTGGCAAAAATATTGTATTAGTTGACTTTGGTTTAAAACATTCTATTCTAAGAGAACTGTCACAACGTCAATGTCATATTACAGTGGTCCCTCATACTACGACAGCGCAAGAAATCTTAAATCTCAATCCAGATGGAGTACTCTTATCTAACGGCCCTGGGAACCCAGAACAATTACCGAATGCTTTACAAATGATCCAAGAAATTCAAAGCAAAATTCCAATTTTTGGTATTTGTATGGGACATCAACTATTTGCTAAAGCCAATGGTGCAAAGACTTATAAAATGACTTTTGGTCATCGAGGTTTTAATCATGCTGTTCGTCATTTGCAAACAGGACGGGTTGATTTTACAAGTCAAAATCATGGTTATGCTGTCTCGAGAGAAGATTTCCCTGAGGATCTCTTCATTACACATGAAGAGATTAATGATAAAACCGTCGAAGGTGTTCGACATAAATACTATCCTGCCTTTTCAGTGCAGTTTCACCCAGATGCAGCACCAGGGCCGCATGATACATCTTATCTTTTTGATGAATTTATTAATATGATTGATGATTTCCAGCAAAAAAGC

SEQ ID NO: 10856 - protein, 358 aa, Streptococcus agalactiae
MKRLLLLEDGSVFEGEAFGADVETSGEIVFSTGMTGYQESITDQSYNGQIITFTYPLIGNYGINRDDYESIRPTCKGVVVYEWAEYPSNWRQQMTLDEFLKLKGIPGISGIDTRALTKIIRKHGTMKACLINEGNSIHEALENLQKSVLLNNQIEQVSTKLAYASPGVGKNIVLVDFGLKHSILRELSQRQCHITVVPHTTTAQEILNLNPDGVLLSNGPGNPEQLPNALQMIQEIQSKIPIFGICMGHQLFAKANGAKTYKMTFGHRGFNHAVRHLQTGRVDFTSQNHGYAVSREDFPEDLFITHEEINDKTVEGVRHKYYPAFSVQFHPDAAPGPHDTSYLFDEFINMIDDFQQKS

SEQ ID NO: 10857 - protein, 921 aa, Streptococcus agalactiae
ATGAATCATCAAACACAAACACTTTCATTAGAACATTTTGTCAGTTTAGAAGAATTATCAAATCAAGAAGTTATGTCTTTGATAAAGAGAAGTATCGAAGTTAAAGAAAATCCTAGCAACATTGGTTTTGATAAAGATTACTATGTGTCAAATCTCTTTTTTGAGAATTCAACAAGAACACATAAGTCATTTGAAATGGCAGAACTCAAATTAGGATTAAAAACAATTGAATTTAATGCTGATACAAGTTCTGTTAATAAAGGAGAAACTCTTTATGACACTATCTTAACAATGAGTGCTCTAGGATTGGACGTTTGTGTCATTAGGCATCCTGATATTGACTATTATAAAGAATTGATTGCTAGTCCGAACATTCATTCAGCTATTGTCAATGGGGGTGATGGCTCAGGCCAACATCCAAGCCAATCACTTTTGGATTTGGTAACTATTTACGAAGAATTTGGATACTTCAAAGGGCTAAAAATTGCGATTGTAGGAGATTTAACTCACTCACGGGTAGCTAAATCTAACATGCAAGTGCTAAAACGATTAGGAGCTGAAATTTTCTTTTCTGGACCCAAAGAATGGTATAGTAGCCAGTTCGATGAATATGGGCAATATTTACCAATAGATCAGTTAGTTGATCAAATTGATGTCCTTATGCTTTTACGTGTTCAACACGAACGTCATGATGGTAAAGGGGCGTTTTCAAAAGAAAGCTATCATCAACAATTTGGTCTTACAAAAGAACGCTATAAACATTTAAGGGATACAGCAATTATTATGCACCCAGCACCCGTCAATAGGGATGTAGAGATTGCTAGCGATTTAGTAGAAGCAGATAAGGCTCGAATAGTGAAACAGATGAGTAATGGCGTCTATGCAAGGATAGCTATCTTAGAAGCAGTGCTCAATAGCAGA

SEQ ID NO: 10858 - protein, 307 aa, Streptococcus agalactiae
MNHQTQTLSLEHFVSLEELSNQEVMSLIKRSIEVKENPSNIGFDKDYYVSNLFFENSTRTHKSFEMAELKLGLKTIEFNADTSSVNKGETLYDTILTMSALGLDVCVIRHPDIDYYKELIASPNIHSAIVNGGDGSGQHPSQSLLDLVTIYEEFGYFKGLKIAIVGDLTHSRVAKSNMQVLKRLGAEIFFSGPKEWYSSQFDEYGQYLPIDQLVDQIDVLMLLRVQHERHDGKGAFSKESYHQQFGLTKERYKHLRDTAIIMHPAPVNRDVEIASDLVEADKARIVKQMSNGVYARIAILEAVLNSR

SEQ ID NO: 10859 - protein, 1289 aa, Streptococcus agalactiae
ATGTATATCATTAAAAACGGATTGATTATCGACCCTCAAAGTGGTTTTAATCAAGTATCAGACATGCTGATTGATCAAGGAAAAATTAAACAAATATCGAAAGAAATTGATATTAAAGGCATTCCAATCATTGATGCAAGCAATAAAATTGTAGCTCCAGGATTAGTCGATATTCATGTACATTTTCGTGAGCCTGGACAGACACATAAAGAAAATATCCATACAGGAGCCTTATCAGCTGCAGCAGGTGGTTTTACGACAGTTCTTATGATGGCCAATACTAACCCAACGATTTCTAGCCCAGAAATTGTAAAACAAGTTAAGGAGAGTGCAGCAAAAGAAGCAATTAAGATTGAAACAGTTGCTACAATTACTAAATCCCTGAATGGTAAAGATTTAGTTAATTTCGAAGAACTATTAGAAGCTGGAGCTGCTGGATTCTCAGACGATGGTATCCCTTTGACAGATACTAAGGTTTTGCAAGAAGCTATGAACTTAGCTAGAAAACATGATGTTGTCCTATCGTTACATGAAGAGGATCCATCGTTAAATGGTGTTCTTGGTATCAACGAACATATTGCTCAGAAAATTTATCATGTCTGTGGAGCTAGTGGTCTTGCTGAATATTCAATGATTGCGCGAGATGCTATGATTGCTTACCAAACACAGGCGAAAGTCCATATCCAGCATTTGTCAAGTTCAGAATCAGTAGAAGTAGTTGATTTTGCGCAGAAGCTTGGTGCTAACTTAACAGCAGAAGTAACCCCCCAACATTTTTCAAAGACAGAGGACTTACTTTTAACTAAGGGTGCTAATGCAAAATTAAATCCACCACTGCGACTTGAAAAGGATAGACAAGCCCTCATTGATGGTCTTAAAAGTGGTGTTATTTCAATTATTGCAAGTGACCACGCTCCCCATCATATTATGGAGAAAGCAGCAGATAATATTAGTCAAGCGCCCTCTGGTATGACTGGCTTAGAGACATCATTAGCCTTAGGGATTACTTATTTAGTATCTACTAAAGAACTCTCAATGATTGACTTTTTGGCAAAAATGACATGTAATCTGCACAGTTATATGGATTTGATGCAGGTTATCTCAGAGAAGGTGGACCTGCAGATATCGTTATTTTTGATCAAGCTGAAGAGAGAATAATAAAGGCAGAATTTGCCTCCAAATCCAGCAACTCTCCTTTTATCGGTGATAAATTGAAGGGAGTTGTTCACTACACAATTTGCAATGGTGAAATAGTCTATCAAAAAGATAGCCACGCAGCGACATTGGTA

SEQ ID NO: 10860 - protein, 430 aa, Streptococcus agalactiae
MYIIKNGLIIDPQSGFNQVSDMLIDQGKIKQISKEIDIKGIPIIDASNKIVAPGLVDIHVHFREPGQTHKENIHTGALSAAAGGFTTVLMMANTNPTISSPEIVKQVKESAAKEAIKIETVATITKSLNGKDLVNFEELLEAGAAGFSDDGIPLTDTKVLQEAMNLARKHDVVLSLHEEDPSLNGVLGINEHIAQKIYHVCGASGLAEYSMIARDAMIAYQTQAKVHIQHLSSSESVEVVDFAQKLGANLTAEVTPQHFSKTEDLLLTKGANAKLNPPLRLEKDRQALIDGLKSGVISIIASDHAPHHIMEKAADNISQAPSGMTGLETSLALGITYLVSTKELSMIDFLAKMTCNPAQLYGFDAGYLREGGPADIVIFDQAEERIIKAEFASKSSNSPFIGDKLKGVVHYTICNGEIVYQKDSHAATLV

SEQ ID NO: 10861 - protein, 627 aa, Streptococcus agalactiae
ATGGATTTAGCAAGACAGATTGCCATGGAACTATTAGATATTCAAGCTGTTTACTTAAGACCCAAACAACCCTTTACTTGGGCTTCGGGGGTCAAATCGCCAATTTACACTGATAATCGTGTAACCTTATCGTATCCTGAGACAAGGACACTGATTGAAAATGGTTTTGTTAAACAAATACAGGAACATTTCCCAAACGTTGATATCATCGCAGGGACAGCGACTGCAGGCATACCACATGGCGCTATTATAGCTGATAAGATGAACTTGCCCTTTGCCTATATACGCTCGAAGGCAAAGGATCATGGTGTGGGGAATCAAATCGAGGGACGTGTTTACTCAGGCCAAAAAATGGTTATCATTGAAGATTTGATTTCAACAGGAGGATCTGTTTTAGAGGCTGTTACGGCTGCGCAGAGTCAAGGTATTGAGGTTTTAGGGGTAGTAGCGATATTTACATATCAATTAGCTAAGGCTGAACAAGCATTTCGTGAAGCTGATATTCCTTTGGTGACTTTGACGGATTACAATCAATTAATTAAAGTTGCTAAAGTTAATGGATATATTACAGCTGACCAACTGGTATTACTGAAAAAATTTAAAGAAGATCAAATGAATTGGCAAAGT

SEQ ID NO: 10862 - protein, 209 aa, Streptococcus agalactiae
MDLARQIAMELLDIQAVYLRPKQPFTWASGVKSPIYTDNRVTLSYPETRTLIENGFVKQIQEHFPNVDIIAGTATAGIPHGAIIADKMNLPFAYIRSKAKDHGVGNQIEGRVYSGQKMVIIEDLISTGGSVLEAVTAAQSQGIEVLGVVAIFTYQLAKAEQAFREADIPLVTLTDYNQLIKVAKVNGYITADQLVLLKKFKEDQMNWQS

SEQ ID NO: 10863 - protein, 699 aa, Streptococcus agalactiae
ATGTTAGAAAAATGCCCTATCATTGCCTTAGATTTTTCTGATTTGGCTTCTGTAATAACTTTTTTAGAACATTTTCCAAAAGAAGAATTGCTTTTTGTCAAAATAGGAATGGAGCTTTATTATTCCGAAGGTCCCTCAATTATTAGATATATTAAATCCTTAGGACATCGCATTTTTTTGGATTTAAAATTACATGATATCCCTAATACAGTTCGATCATCTATGTCTGTCTTAGCCAAATTAGGCATTGATATGACTAATGTCCATGCTGCAGGAGGAGTCGAAATGATGAAAGCAGCTAGAGAAGGTTTGGGGGAGGGTCCAATACTATTAGCAGTGACACAATTAACCTCGACTTCACAAGAACAAATGCAGGTGGATCAACATATTAACTTAAGTGTAGTTGATTCGGTTTGCCATTATGCTCAAAAAGCTCAAGAAGCAGGCTTAGATGGAGTAGTCACATCGGCTCAAGAGGTAAAGCAAATCAAGAAACAGACTAACGAACATTTCATTTGCTTAACGCCTGGTATCAGACCTCCACAAACCAATCAGTTAGATGATCAAAAAAGAACGATGACTCCTGAGCAAGCACGTATAGTTGGGGCTGATTATATCGTTGTGGGAAGACCTATAACGAAAGCAGAAAATCCATATCAAGCATATCTAGACATAAAAGAAGAATGGAATCGTATTAAA

SEQ ID NO: 10864 - protein, 233 aa, Streptococcus agalactiae
MLEKCPIIALDFSDLASVITFLEHFPKEELLFVKIGMELYYSEGPSIIRYIKSLGHRIFLDLKLHDIPNTVRSSMSVLAKLGIDMTNVHAAGGVEMMKAAREGLGEGPILLAVTQLTSTSQEQMQVDQHINLSVVDSVCHYAQKAQEAGLDGVVTSAQEVKQIKKQTNEHFICLTPGIRPPQTNQLDDQKRTMTPEQARIVGADYIVVGRPITKAENPYQAYLDIKEEWNRIK

SEQ ID NO: 10865 - protein, 1218 aa, Streptococcus agalactiae
ATGAGCGTTGTTCTTAGAGCAGGTAAATTACTGATTGAAAGCGGAGCAGAAGTCTATCGTGTCGAAGACACGATGAAGCATTTTGCTAAGGCTCTTCAGATAGAAAATTTTGAAGCTTATGTGGTTAGTAGCAGTATTATCGCTTCCGGGATTAACCGCTATGGTAAACAAGAAGCTAAAGTATGCAATACAGATGGTGTAACAGCAAATTTAGGTAGACTTGAAGCTGTTAATAACCTTTCTAGGCAAATTGCTAAACAAGACTTAGTATCTCCAGAAGAAATTGTAAAGCAGTTAGACTTAATTGAACATCAAAAAGATTATAGTTTACTTGTTACTTTAATTTCTTATTTTTGTGGAGCGGGTAGTTTTTCTTTAGCCTTGGGTAGTTCCTTATTAGATTCATTTTCCGCTGCTGTAACAGGCTTAATTTTAGGATATTTTCTGAATTTGATGGAAAGTCGTATACATACAGGATTTCTTTTGACCATTCTAGGTAGTTCTGTAGTGGCTTTAAGTGCTAATTTATTATATTTTTCAGGATTAGGTGAGCATCGTAGCATTATCATATTAGGGGCACTAATGGTGATGGTGCCAGGGGCTGCCTTTGTTAATTCGGTGAGAGAATTTTCACAGAATAATTTTTCAACAGGTTTAGCTTTGATTATGTCTGCTTTACTCATTTGTATTTCTATATCAGCAGGCGTGGCTATTACAATTGAAATTATTCCGTTTGCAGAACAAATGACAGGTTCTTTTTCTGGTGTTCCTAACACCATCCTTGAGATTACCATCAGAACACTGATGGCCGGTTTAGGGACGATAGCCTTCTCTATCCTCTACCATGTTCCAAAACGTTATTTCCTTGACTTAGGTATACTAGGATCAATATCTTGGATGCTCTACCTGATCTTATGGCAACAATTTCATATGGATGCTATAGCCGTATTTTTTCCAGGGCTTTTCATCACTTATTTTTCACGGCTATTAGCTGCTAAACGTAAGTGTCCTGCCACTGTCTTTTTAGCGACAAGTATGTTTCCTCTTATTCCAGGACTTAGCTTCTATAGAGCTGTTTACTTTTTATTGACGGGAGCAGATGCCTTAGCAATGGAATATTTTAGATCCTGTTTTGTAACAGCTTTTACAATTGCTATAGCAATTAGTATTGTACAGCAGATTCCTCTATCGTTCTTTATTAGACGTAAAATGATAAAA

SEQ ID NO: 10866 - protein, 406 aa, Streptococcus agalactiae
MSVVLRAGKLLIESGAEVYRVEDTMKHFAKALQIENFEAYVVSSSIIASGINRYGKQEAKVCNTDGVTANLGRLEAVNNLSRQIAKQDLVSPEEIVKQLDLIEHQKDYSLLVTLISYFCGAGSFSLALGSSLLDSFSAAVTGLILGYFLNLMESRIHTGFLLTILGSSVVALSANLLYFSGLGEHRSIIILGALMVMVPGAAFVNSVREFSQNNFSTGLALIMSALLICISISAGVAITIEIIPFAEQMTGSFSGVPNTILEITIRTLMAGLGTIAFSILYHVPKRYFLDLGILGSISWMLYLILWQQFHMDAIAVFFPGLFITYFSRLLAAKRKCPATVFLATSMFPLIPGLSFYRAVYFLLTGADALAMEYFRSCFVTAFTIAIAISIVQQIPLSFFIRRKMIK

SEQ ID NO: 10867 - protein, 1539 aa, Streptococcus agalactiae
ATGAGTATTTTAGAAGTAAAAAACTTAAGTCACGGTTTTGGTGATCGTGCTATTTTTGAGAATGTTTCTTTTCGCCTTTTAAAAGGTGAACATATAGGACTTATTGGTGCTAATGGTGAAGGAAAATCAACATTCATGTCAATTGTTACAGGTCATCTTCAACCTGATGAAGGAAAAATTGAATGGTCAAAATATGTAACTGCTGGTTACCTTGATCAACATACTGTGTTAGAAGAAGGTCAAACAGTTCGTGATGTTTTGCGAACAGCATTTGATGAACTTTTTAAAACAGAGGCACGTATCAATGATATATATATATCCATGGCAGATGATGGCGCAGATGTAGATAGCCTTATGGAAGAAGTTGGAGAACTACAAGATCGTTTAGAATCACGTGATTTTTATACACTTGATGCTAAAATTGATGAAGTCGCACGGGCATTAGGAGTTATGGATTTTGGTATGGATTCTGATGTTACTGAATTATCTGGTGGTCAAAGGACAAAGGTCCTTTTAGCAAAACTGTTATTAGAAAAGCCAGATATCCTCCTGCTTGATGAGCCTACAAACTACCTTGATGCTGAACACATTGATTGGTTAAAACGCTATTTACAAAATTATGAAAATGCTTTTGTTTTAATCTCACACGATATTCCATTTTTGAACGATGTTATCAATATTGTCTATCATGTTGAAAATCAAGATTTAGTAAGATATTCCGGTGATTATACTAATTTTGAATCAGTCTATGCAATGAAAAAGGCTCAATTAGAAGCAGCCTATGAACGTCAACAAAAGGAAATAGCTGATCTACAAGATTTTGTTAATCGTAATAAAGCACGCGTTGCAACACGTAATATGGCAATGTCTCGTCAAAAGAAACTAGACAAAATGGATATTATTGAGTTACAAGCAGAGAAACCAAAGCCAAGTTTTGAATTTAAAGAATCACGCACACCAGGACGTTTTATTTTCCAAGCTAAAGATCTTCAAATTGGATATGATCGTGCTTTAACAAAACCTCTAAACCTAACATTTGAACGTAATCAAAAAATAGCCATTGTTGGAGCAAATGGGATAGGAAAAACAACATTACTTAAGAGTTTACTAGGTATTATCCCCCCTATTTCTGGTAATGTTGAACGAGGTGATTTTATTGATTTAGGTTATTTTGAACAAGAAGTACCCGGAGGAAATCGCCAAACTCCACTTGAAGCAGTATGGGATGCTTTTCCTGCTTTGAACCAAGCAGAGGTTAGGGCAGCTCTTGCTCGTTGTGGTTTAACTTCAAAGCATATTGAAAGTCAGATTCAGGTGTTATCTGGTGGGGAGCAATCAAAGGTCAGATTTTGCTTATTAATGAATCGCGAAAATAATGTCCTTGTACTTGATGAACCAACCAATCATTTAGATGTAGATGCTAAAGATGAGTTAAAACGTGCTTTAAAAGCTTATAAGGGATCAATCTTGATGGTATGTCATGAACCGGACTTTTATGAAGGATGGATGGATGATGTTTGGGACTTTAACCAACTTAGT

SEQ ID NO: 10868 - protein, 513 aa, Streptococcus agalactiae
MSILEVKNLSHGFGDRAIFENVSFRLLKGEHIGLIGANGEGKSTFMSIVTGHLQPDEGKIEWSKYVTAGYLDQHTVLEEGQTVRDVLRTAFDELFKTEARINDIYISMADDGADVDSLMEEVGELQDRLESRDFYTLDAKIDEVARALGVMDFGMDSDVTELSGGQRTKVLLAKLLLEKPDILLLDEPTNYLDAEHIDWLKRYLQNYENAFVLISHDIPFLNDVINIVYHVENQDLVRYSGDYTNFESVYAMKKAQLEAAYERQQKEIADLQDFVNRNKARVATRNMAMSRQKKLDKMDIIELQAEKPKPSFEFKESRTPGRFIFQAKDLQIGYDRALTKPLNLTFERNQKIAIVGANGIGKTTLLKSLLGIIPPISGNVERGDFIDLGYFEQEVPGGNRQTPLEAVWDAFPALNQAEVRAALARCGLTSKHIESQIQVLSGGEQSKVRFCLLMNRENNVLVLDEPTNHLDVDAKDELKRALKAYKGSILMVCHEPDFYEGWMDDVWDFNQLS

SEQ ID NO: 10869 - protein, 333 aa, Streptococcus agalactiae
ATGCAAATCATCAAACGTGATGGACAGATTGTTGAATTTGATCCTGAAAAATCTACAAGCTATCTTGAAGCTGCTCAAACAGTTTATGTGCTTGATGAGTCACTTCGTCAAGACCTTGCTCAAGTGACTAAAAAAGTAATCTTAGATTTAGAGGATGCTCAGGTTGAACGACCAACGATCAATATGATTCAGTCTTTGGTTGAAAATCGTTTATTGGATGCAGGATACATTCATATTGCTGAACACTATATTTCATACCGTTTGCAACGTGATTTAGAGCGAAATGGTTATGATGATCAAATCACTGTTCATTTACACTTTGAAAAAATTAAG

SEQ ID NO: 10870 - protein, 112 aa, Streptococcus agalactiae; identical to SEQ ID NO: 6566

SEQ ID NO: 10871 - protein, 1023 aa, Streptococcus agalactiae
ATGATTCGTCAATTAGAACAATCGAATTTACCAATAGAACAAGTGAAACTTTTATCATCAAGTCGCTCAGCAGGTAAGATTTTACATTTTAAAGATGAGGCTATACGTGTTGAAGAGACAACTAAAGAATCATTTTACGATGTTGATATTGCCTTGTTTTCAGCTGGTGGATCTATTTCAGCAAAATTCGCTCCTTATGCAGTAAAGTCTGGAGCAGTTGTAGTAGATAACACGTCATATTTTCGTCAGAATCCTGATGTTCCACTAGTTGTTCCTGAAGTAAATGCTCATGCCATGACTGGTCATAATGGTATCATAGCTTGCCCCAATTGTTCTACTATTCAAATGATGATTGCTTTAGAGCCCATTCGTCAAAAATGGGGGATAGAGCGTGTTATAGTTTCCACCTATCAAGCTGTTTCGGGTTCAGGTGCACGTGCTGTTGAAGAAACTAAGGAACAGTTGAGACAAGTTTTAAATGATAACCTTTCACCTGATCAATTAATTGCAACAGTCTTGCCATGTTCTAGCGATCAAAAACATTATCCTATCGCATTCAATGCATTACCTCAAATTGATACTTTTACTGATAATGATTATACGTACGAAGAAATGAAGATGACTTTGGAGACAAAGAAAATTATGGAAGATGCTACTATTAAGGTTTCAGCTACCTGCGTCCGTATTCCCGTTTTATCGGGTCATTCTGAGTCCATTTATATTGAGACGAAAGAATTAGCCTCAATCTCTGAAATTAAAAAGGCTATTGCTAATTTTCCTGGTGCCGTCCTACAAGACCTTCCATCTCAGCAAATTTACCCTCAAGCGATTAATGCTGTAGGTCATAGGGAGACCTTTGTTGGTCGTATTCGAAAAGACCTTGATCAAGAAAATGGTGTTCATATGTGGGTAGTTTCAGATAATCTATTGAAGGGGGCAGCTTGGAATTCTGTTCAAATCGCAGAAACATTGCATAAGAATGGGCTGGTTAAACCAGCGAAAGAGTTAAAATTTGAATTAATA

SEQ ID NO: 10872 - protein, 341 aa, Streptococcus agalactiae
MIRQLEQSNLPIEQVKLLSSSRSAGKILHFKDEAIRVEETTKESFYDVDIALFSAGGSISAKFAPYAVKSGAVVVDNTSYFRQNPDVPLVVPEVNAHAMTGHNGIIACPNCSTIQMMIALEPIRQKWGIERVIVSTYQAVSGSGARAVEETKEQLRQVLNDNLSPDQLIATVLPCSSDQKHYPIAFNALPQIDTFTDNDYTYEEMKMTLETKKIMEDATIKVSATCVRIPVLSGHSESIYIETKELASISEIKKAIANFPGAVLQDLPSQQIYPQAINAVGHRETFVGRIRKDLDQENGVHMWVVSDNLLKGAAWNSVQIAETLHKNGLVKPAKELKFELI

SEQ ID NO: 10873 - protein, 1182 aa, Streptococcus agalactiae
TTGTTCAATAAAATAGGTTTTAGAACTTGGAAATCAGGAAAGCTTTGGCTTTATATGGGAGTGCTAGGATCAACTATTATTTTAGGATCAAGTCCTGTATCTGCTATGGATAGTGTTGGAAATCAAAGTCAGGGCAATGTTTTAGAGCGTCGTCAACGTGATGCAGAAAACAGAAGCCAAGGTAATGTTCTAGAGCGTCGTCAACGTGATGCAGAAAACAGAAGCCAAGGTAATGTTCTAGAGCGTCGTCAACGCGATGCAGAAAACAGAAGCCAAGGTAATGTTCTAGAGCGTCGTCAACGTGATGTTGAGAATAAGAGCCAAGGCAATGTTTTAGAGCGTCGTCAACGCGATGTTGAGAATAAGAGCCAAGGTAATGTTCTAGAGCGTCGTCAACGTGATGCGGAAAACAAGAGCCAAGGCAATGTTCTAGAGCGTCGTCAACGTGATGCGGAAAACAAGAGCCAAGGCAATGTTCTAGAGCGTCGTCAACGCGATGCAGAAAACAGAAGCCAAGGTAATGTTTTAGAACGTCGTCAACGCGATGTTGAGAACAAGAGCCAAGGTAACGTTCTAGAGCGTCGCCAACGTGACGTTGAGAACAAGAGCCAAGGTAATGTTTTAGAGCGTCGCCAACGCGATGCGGATAACAAAAGTCAGGGCAATGTTTTAGAGCGTCGCCAACGTGATGTTGAGAACAAGAGCCAAGGTAATGTTCTAGAGCGTCGCCAAAATAATGTCCTTATTAAGAGTCAAGATAATGTTCTAGAGCGCCGCCAACGTGATGCGGATAACAAGAGCCAGGGTAACGTTCTAGAGCGTCGTCAACGCGATGTTGAGAATAAGAGCCAAGGTAATGTTTTAGAGCGTCGCCAACATGATGTTGAGAATAAGAGTCAAGTAGGTCAACTTATAGGGAAAAATCCACTTTTTTCAAAGTCAACTGTATCTAGAGAAAATAATCACTCTAGTCAAGGTGACTCTAACAAACAGTCATTCTCTAAAAAAGTATCTCAGGTTACTAATGTAGCTAATAGACCGATGTTAACTAATAATTCTAGAACAATTTCAGTGATAAATAAATTACCTAAAACAGGTGATGATCAAAATGTCATTTTTAAACTTGTAGGTTTTGGTTTAATTTTATTAACAAGTCTCTGCGGTTTGAGACGCAATGAAAAT

SEQ ID NO: 10874 - protein, 394 aa, Streptococcus agalactiae
MFNKIGFRTWKSGKLWLYMGVLGSTIILGSSPVSAMDSVGNQSQGNVLERRQRDAENRSQGNVLERRQRDAENRSQGNVLERRQRDAENRSQGNVLERRQRDVENKSQGNVLERRQRDVENKSQGNVLERRQRDAENKSQGNVLERRQRDAENKSQGNVLERRQRDAENRSQGNVLERRQRDVENKSQGNVLERRQRDVENKSQGNVLERRQRDADNKSQGNVLERRQRDVENKSQGNVLERRQNNVLIKSQDNVLERRQRDADNKSQGNVLERRQRDVENKSQGNVLERRQHDVENKSQVGQLIGKNPLFSKSTVSRENNHSSQGDSNKQSFSKKVSQVTNVANRPMLTNNSRTISVINKLPKTGDDQNVIFKLVGFGLILLTSLCGLRRNEN

SEQ ID NO: 10875 - protein, 1593 aa, Streptococcus agalactiae
TTGATTTGCAGGGGGGAAAAACTTATCAGTAATAAAGTCAAAATTGTTCGTTTACTTAATAAGAGTAAGAAAAGTTTACTAAGGGGTATATTTAGTCGAACAACCGTTATCGCTATTTTATTGATTTTACAATTATTGTTTTTACTAGCCTCTTACTCATGGCTAGAGCAGTATCGTGTTTGGTTAGCAACCGTTGAGCATATCTTAACAATTGGAGCGGTCTTATATTTAGTTAATAGTGAAATGGATGCTTTGTCCCGAGTAACTTGGTTAATATTGGTAATGATTGCCCCTTTACTAGGGGCGATGTTCCTAATGTACACCAAATTTGACTGGGGTTATCGTGGTTTGAAACAAAGATTGGAGACATTGATTGATGAGAGTCAGATTTATCTAGAGGATGATCCTGAAACTTTGAATCAGCTTAAGTCAAGTACATCCACAACATATCATTTGGTTCAATATTTTGAAAAAGCACATGGAAATTTCCCAGTTTATCGAAATACTGATGTGACATTTCTACCAACGGGAGAAGCATTCTTTGAAAAAATGAAAGAAGAACTACTAAAAGCTAAAAAGTATATCTTTTTAGAATTCTTTATCATTGACGAAGGAATAATGTGGGGAGAAATACTTAGTATTTTAGAACAAAAGGTGGAAGAAGGTGTTGAAGTCCGTATCTTATATGATGGTATGATAGAAATTACAAAATTATCCTTTGATTATACGAAACGACTTGAGAAAATAGGAATAAAAGCAAAAGCATTTTCTCCGATTTCTCCTTTTATTTCAACTTATTATAACTATCGTGACCATCGAAAAATTGTTGTTATTGATGGAGTAGTAGGCATGACTGGTGGTGTAAACTTAGCCGATGAGTATATTAATCACATTGAGTTATTTGGGCATTGGAAAGATTCAGGTATTATGTTAAAGGGGAAAGCAGTGGATAGTTTCCTCCTACTTTTCTTACAGATGTGGTCCATTACTGAGGAAAAAATGTTAGTAGCGCCTTACCTCGGTGTACACGATGATTTAGTTGAAAATGAAGGCTATGTTATTCCTTATGGAGATTCTCCTTTAGACACTGATAAAGTAGGGGAAAATGTTTATATAGATATTCTTAATCATGCTAGAGAATATGTTTACATCATGACACCTTATTTAATATTAGACAGTGAATTGGAACATGCCATTCAGTTTGCTGCGGAACGTAGTGTAGATGTACGTATTATTATGCCGGGTATCCCAGATAAGCCAATCCCTTATGCTCTTGCTAAAACTTACTATCAAGCTTTAACAAAATCAGGTGTTAAAATATATGAATACACCCCTGGATTTGTTCATTCAAAAATATTCCTTAGTGATAATACAAAGGCTGTTGTAGGTACGATAAATCTTGATTACCGTAGCCTGTATCACCATTTTGAATGTGCTGTTTATCTTTATAAGGTAGATGCAATCCAAGACATTTATCGAGATTATATGGATACATTAAATAAATCAAGGTTAGTTAGCTTGAAAGATATAAATAATATTCCAAAATTCCAAAAAGTAATTGGCATAGTGACAAAAACTATTGCTCCCCTGCTT

SEQ ID NO: 10876 - protein, 531 aa, Streptococcus agalactiae
MICRGEKLISNKVKIVRLLNKSKKSLLRGIFSRTTVIAILLILQLLFLLASYSWLEQYRVWLATVEHILTIGAVLYLVNSEMDALSRVTWLILVMIAPLLGAMFLMYTKFDWGYRGLKQRLETLIDESQIYLEDDPETLNQLKSSTSTTYHLVQYFEKAHGNFPVYRNTDVTFLPTGEAFFEKMKEELLKAKKYIFLEFFIIDEGIMWGEILSILEQKVEEGVEVRILYDGMIEITKLSFDYTKRLEKIGIKAKAFSPISPFISTYYNYRDHRKIVVIDGVVGMTGGVNLADEYINHIELFGHWKDSGIMLKGKAVDSFLLLFLQMWSITEEKMLVAPYLGVHDDLVENEGYVIPYGDSPLDTDKVGENVYIDILNHAREYVYIMTPYLILDSELEHAIQFAAERSVDVRIIMPGIPDKPIPYALAKTYYQALTKSGVKIYEYTPGFVHSKIFLSDNTKAVVGTINLDYRSLYHHFECAVYLYKVDAIQDIYRDYMDTLNKSRLVSLKDINNIPKFQKVIGIVTKTIAPLL

SEQ ID NO: 10877 - protein, 1668 aa, Streptococcus agalactiae
ATGAAAACAGATATTGAAATAGCGCAAAGCGTCGCCCTAAAGCCTATTGCTGAGATTGTTGAGCAAGTAGGAATTGGTTTTGATGATATAGAATTGTATGGTAAATACAAAGCAAAATTATCTTTTGATAAGATTGAAGCTGTAAGATCTCAAAAAGTAGGAAAGTTAATTTTAGTAACTGCTATTAATCCGACACCAGCAGGTGAGGGAAAATCCACTATGAGCATTGGATTAGCTGATGCTTTAAATAAAATTGGTAAAAAAACGATGATTGCGCTTCGCGAACCTTCTTTAGGTCCTGTAATGGGTATTAAAGGAGGAGCTGCTGGAGGTGGATACGCACAAGTACTACCAATGGAAGATATTAATTTGCATTTTACTGGTGATATGCACGCAATCACAACTGCTAATAATGCTTTATCAGCTCTACTTGATAATCATATTCATCAAGGCAATGAATTAGATATTGACCAACGTCGAGTGATTTGGAAGCGTGTAGTTGATCTTAACGATCGTGCTCTTCGTCAGGTGATCGTTGGCTTAGGAAGCCCTGTCAATGGGATACCACGTGAAGATGGCTTTGATATTACTGTTGCTTCTGAAATAATGGCTATTCTATGTTTAGCTACTGACCTATCAGATTTAAAGAAACGCCTGTCAAATATTGTTGTGGCTTACTCAAGGGACCGTAAACCAATCTATGTTAAAGATTTGAAGATTGAAGGAGCTCTCACACTTATCCTAAAAGATGCTATCAAACCTAATTTGGTTCAAACCATTTATGGGACACCGGCTCTTGTCCATGGGGGACCATTTGCTAATATTGCACATGGATGTAATTCTGTCTTAGCGACTTCAACAGCTCTACGCTTAGCAGATTACGTTGTTACTGAAGCTGGTTTTGGAGCAGACTTGGGCGCTGAAAAGTTTCTTGATATAAAAACGCCAAACCTTCCGACTTCTCCCGATGCGATTGTTATTGTTGCTACATTGCGTGCATTGAAAATGCATGGAGGTGTTTCAAAAGAAGATCTTTCACAAGAGAACGTCAAAGCAGTTAAAAGAGGTTTTACAAATCTCGAGCGTCACGTTAACAATATGCGTCAATATGGTGTTCCGGTAGTTGTAGCTATCAATCAGTTTACTGCAGATACAGAAAGTGAAATTGCAACTCTTAAAACCTTATGTAGTAATATTGATGTGGCAGTTGAATTAGCAAGTGTGTGGGAAGATGGAGCAGACGGTGGCCTTGAACTTGCACAGACTGTTGCTAATGTGATTGAAACACAATCATCCAATTACAAACGCTTATATAATGATGAAGACACTATTGAAGAAAAAATTAAAAAAATTGTTACTAAAATATATGGTGGTAATAAAGTTCATTTTGGACCTAAGGCACAAATACAATTAAAAGAGTTTAGTGACAATGGCTGGGACAAGATGCCTATTTGTATGGCAAAGACACAATATAGCTTTTCTGATAATCCAAATTTACTTGGTGCTCCAACTGACTTTGATATAACTGTTCGTGAATTTGTTCCAAAAACAGGAGCTGGTTTTATAGTTGCTCTTACTGGAGACGTATTGACAATGCCTGGTTTACCTAAAAAACCTGCAGCTCTCAATATGGATGTTTTAGAAGACGGTACAGCCATTGGATTATTT

SEQ ID NO: 10878 - protein, 556 aa, Streptococcus agalactiae; identical to SEQ ID NO: 1984

SEQ ID NO: 10879 - protein, 1017 aa, Streptococcus agalactiae
ATGTATCTTATTGAACCAATTAGAAATGGTAAGCGTATCACAGACGGTGCGATTGCACTTGCCATGCAAGTTTATATTTTACAAAATGTTTTTTTAGATGATGATATTTTATTTCCATACTATTGTGATCCTAAAGTTGAAATCGGAAAATTTCAGAATGCAGTTATAGAGACTAATCAAGAATATTTGAAAGAACATGATATTCCTGTTGTTCGTCGAGATACTGGTGGAGGGGCTGTTTACGTTGACTCAGGTGCTGTAAATATTTGCTATCTAATGAAAGATCATGGACAATTTGGTGATTTCAAACGAGCTTATGAGCCAGCTATTAAGGCCCTAAAAACTTTAGGTGCTTCTAGTGTTGAAATGAGGGGACGAAATGACTTAGTTATTGATGGTAAAAAAGTATCAGGTGCAGCAATGACGATAGTAAACGGTCGTATTTACGGTGGTTACTCTCTTTTATTAGATGTTGATTTTGATGCTATGGAAAAAGTGTTAAATCCTAATCGGAAAAAAATTGAATCTAAAGGGATAAAATCTGTCCGAAGTCGAGTAGGAGATATTCGTAGCCACTTGTCAGAAGATTATCGTCATATCACAACCGATCAATTTAAAGATTTAATGGTTTGTCAATTATTACATATTGATCATATTGATCAGGCAAAACGCTATCATCTAACCGAAAAAGATTGGGCTGCGATTGACGCTCTAGCTGATGAAAAATATAAGAATTGGGATTGGAATTATGGTAACTCACCACAGTATTCGTATCACAGAGATGCTCGTTTTCCGTCAGGAACTTACGATTTTCACTTAGAAATTGAGAAAGGTATTATTACGAATTGCCGTATTTATGGTGACTTTTTCAGTTCTAAAGATATTTCAGATATTGAAAACCTTCTCATTGGTTGCCCTATGAAAGAAGAATTAGTCTTGGAAAAATTAAGTACTGTATCACTAGAAGATTATTTTGGTCAGACTAGCCCAGAAGAAATAAAAGCAGTTTTATTTCCA

SEQ ID NO: 10880 - protein, 339 aa, Streptococcus agalactiae; identical to SEQ ID NO: 1986

SEQ ID NO: 10881 - protein, 876 aa, Streptococcus agalactiae
ATGACAGTGTGGAAGACTCTAGAAAAAACTAATCATTCTCAATCAGAAATACTAAGTCAGTTAATAGAAGAATCAGATGCTATTGTAGTTGGTATTGGTGCAGGCATGTCTGCAGCGGATGGATTCACCTATATTGGCCCCAGATTTGAAGAAGCTTTTCCGGATTTTATTGCTAAATATCAACTATTAGATATGTTGCAAGCAAGTCTTTATGACTTTGAAGATTGGGAAGAATATTGGGCCTTCCAAAGTCGTTTTGTGGCACTTAATTATTTAGATCAACCGGTAGGACAAGCTTATCTTGATTTAAAGGATATTTTAGCGAAAAAAGAATATCATATTATTACAACTAATGCTGATAATGCCTTCGCTGTGGCTGATTATAATTTAGAAAAAGTTTTTCATATTCAAGGTGAATATGGCTTATGGCAGTGTAGTCAACATTGTCATCAACAAACTTATCGAAATGATCAGGCAATTCGTCAAATGATTGCACAACAAAAGGATATGAAGATTCCTAGTAACTTAATCCCCAAATGCCCAAAGTGTGATCAACCGTTTGAAATTAATAAACGTAACGAAGAAAAAGGTATGGTGGAAGATGCTGACTTTCATGCTCAACGACAACGTTATGAAAATTTCTTATCACAACATCAAAATGACAAAGTTCTTTATCTAGAGATTGGAGTTGGACATACCACGCCACAATTTATTAAGCATCCGTTTTGGCGATTCGTCTCTTTAAATGAAAACTCTTTATTTGTTACTCTTAATCACAAGCATTATCGCATTCCTCAAAAGATTCGCTCAAGGAGTGTGCAACTGACACAGCATATCGCTGAATTAATTGCTGAAGCGAAAAAAGAAATTATTGGA

SEQ ID NO: 10882 - protein, 292 aa, Streptococcus agalactiae
MTVWKTLEKTNHSQSEILSQLIEESDAIVVGIGAGMSAADGFTYIGPRFEEAFPDFIAKYQLLDMLQASLYDFEDWEEYWAFQSRFVALNYLDQPVGQAYLDLKDILAKKEYHIITTNADNAFAVADYNLEKVFHIQGEYGLWQCSQHCHQQTYRNDQAIRQMIAQQKDMKIPSNLIPKCPKCDQPFEINKRNEEKGMVEDADFHAQRQRYENFLSQHQNDKVLYLEIGVGHTTPQFIKHPFWRFVSLNENSLFVTLNHKHYRIPQKIRSRSVQLTQHIAELIAEAKKEIIG

SEQ ID NO: 10883 - protein, 816 aa, Streptococcus agalactiae
ATGCCTAATCAAAAACAACTATTGCTAGCCATGATTGAGTATCTTCGGTCAGAAAAATTAACAGACGTTGATGACTTGAGGACCACCGATTTGCAAACGGTTTGGCGTGCTCTAGTTAATCAACAAGATCCTCAAAACATTAGTCAAGAGTACCTGTCTTTAGAAGATAGGTATTTGTCACATTGGTGGAATACTCAAAAAGTAAAAACGATAGACGTCTGTCATCAAACGGTATATTCAAATGTATTTACCTACCATGGGGATATTTGCTTATTACAAGTGGATGCTATTGTTAATGCAGCAAATGGTAAGTTGTTAGGTTGTTTTATTCCTAATCACCATTGTATTGACAATCATATTCATACGTTTGCAGGTTCACGATTACGTTTAGCATGTCATCAATTGATGACACAACAAGGACGAATGGAAGCCGTAGGACAAGCTAAACTTACCGAATCCTATCATCTTCCTTGTAAGTATGTTATTCATACAGTCGGACCTTACGTAAAAGTTGATCAAAAGCCATCTCGTATAAGAGAGGATTTATTAAAGTCTTCTTATAAATCCTGCTTACAGTTGGCAGTTCGAGCTAATCTTAAAACAATTGTCTTCCCTTGTATATCAACGGGAGAATTTGGTTTTCCTAATCAAAGAGCTGCTGAATTGGCTGTTCAAGCGATATTAGAGTGGCAACGCGAAAATCAGCACAAACTCTATATTATTTTCAATACATTCACACCTAAAGACCAAGAGATTTATCAAAAATTATTATTAAAAGAGGAAATAGATGACAGTGTGGAAGACTCTAGAAAAAAC

SEQ ID NO: 10884 - protein, 272 aa, Streptococcus agalactiae
MPNQKQLLLAMIEYLRSEKLTDVDDLRTTDLQTVWRALVNQQDPQNISQEYLSLEDRYLSHWWNTQKVKTIDVCHQTVYSNVFTYHGDICLLQVDAIVNAANGKLLGCFIPNHHCIDNHIHTFAGSRLRLACHQLMTQQGRMEAVGQAKLTESYHLPCKYVIHTVGPYVKVDQKPSRIREDLLKSSYKSCLQLAVRANLKTIVFPCISTGEFGFPNQRAAELAVQAILEWQRENQHKLYIIFNTFTPKDQEIYQKLLLKEEIDDSVEDSRKN

SEQ ID NO: 10885 - protein, 330 aa, Streptococcus agalactiae
ATGAAAAAAATTGCGAACTACTTATTAATTGAAAAAAATGAAGAACGTTATACTATCAGCTTAACTCCCGAACTTCAAGATGACTTGGGAACTGTTGGATATGTAGAATTCACAGATGATACAAATTTAGAAGTTGATGATGTTATTTTAAATATTGAAGCTTCAAAGACGGTTATGGCAATTTTATCTCCTCTTACAGGTAAAGTTGTTAAAGTTAATACAGCTGCAAGTCAAGAACCAACTTTGTTAAATTCTGAAAAAGCTGACGAAAATTGGTTGGTTGTGTTAACAGACGTTGATTATGCTGCTTTTGAAGCTTTAGAAAATGCC

SEQ ID NO: 10886 - protein, 110 aa, Streptococcus agalactiae; identical to SEQ ID NO: 1992

SEQ ID NO: 10887 - protein, 984 aa, Streptococcus agalactiae
ATGAAATTAAGTGTCCTTGATTATGGGCTTATTGATTATGGAAAAACTGCAAGTGATGCAATACAAGAAACGATTCTTTTATCACAAGAGGCGGAGCGACTAGGATATCATCAATTTTGGGTGGCTGAACATCACGGTGTTAAGGCATTCAGTATTAGCAATCCAGAATTAATGATAATGCATTTGGCTAACCAGACTAAATCTATCAAAATTGGCTCTGGAGGTATAATGCCTCTGCACTATAGTAGTTTTAAACTCGCGGAGACTCTCAAGACATTAGAGACATGTCATCCGAATCGAGTAAGTATTGGTTTAGGAAATTCACTAGGGACAGTTAAAGTTTCAAATGCACTTCGTAGCTTACATAAAGCACATGATTACGAAGAGGTACTGGAGGAATTGAAGTCATGGCTTATTGATGAATCATCCAGTAAGGAACCATTAGTTCAACCGACTCTTTCTAGCTTCCCAGACTTATATGTGTTGGGGAGTGGTCAAAAATCAGCTTATTTAGCGGCTAAACTTGGCTTAGGCTTTACCTTCGGTGTTTTTCCTTTTATGGACAAAGACCCATTGACAGAAGCTAAAAAGCTTTCATCTCTTTATTATCATCAGTTTGAAGAATATTATCCTAATAAGTCTCCTAATTTGATGGTAGCTGCATTTGTAGTTATAGCTGATACTTCAGAAGAAGCTGAAAACATAGCAAAGACTTTAGATATCTGGATGCTAGGAAATAAAGACTTCAATGAATTTGCAACATTTCCTACTATTGAAGAAGCTAATCATTACCAATTGACTCCTGAACAAAAAGCAAAAATTAAATCAAATCGCCACCGTATGATTGTAGGTGATCCAAAACAAGTTAAAGACAGCCTTGACGCTTTAGTTAATGCTAGTCAAGCAGAAGAACTACTTTTGATTCCTCTTGTTCCAGGACTTGATCAACGAATCAAATCCTTAAAATTATTATCACAGTTATAT

SEQ ID NO: 10888 - protein, 328 aa, Streptococcus agalactiae; identical to SEQ ID NO: 1994

SEQ ID NO: 10889 - protein, 1197 aa, Streptococcus agalactiae
ATGAATAATGTCCAAGGTAATTTATTTCGTCCATTAATACTTCCCAATGGATTGAGCTTAGAAAATCGTTTTGTTCTATCACCTATGGTAACTAATTCTTCTACATCAGAAGGTTTTGTAACTGATGACGACATAGCATATGCTGTTCGTCGTGCTAAATCCGCTCCATTACAAATTACTGGAGCAGCATATGTTACAGAATATGGTCAGTTATTTGAATATGGTTTTAGCGTTTCAAAGGATGAGGACATTCCTGGTTTGACTAAATTGGCTAAAGCAATGAAGTCTAAGGGAGCGAAAGCTGTTTTGCAGCTGACGCATGCTGGACGTTTCTCAAGTCACACTTTGGCAAGACACGGATATGTATATGGTCCCAGCCCTATGCAATTGCAATCGCCATACCCACATCAGGTTAAAGAACTAACACACAAAGATATACTAATGATTATCGATGAATATGTCCAGGCTACAAGACGAGCTATACAAGCTGGATTTGATGGTGTTGAAATATCTTCTGCACAACGATTACTAATTCAAACTTTTTTCTCAACCTTCTCAAATCAAAGAAAAGATGAGTATGGTCCTCAAACTTTGACTAATCGCTGTCGTTTAGGCTTAGAAGTTTTTAAAGCGGTACAAAAAGTTATCAGAGAAGAAGCAGAGTCAGATTTTATCCTTGGTTTTAGAGCGACGCCTGAAGAAACTCGCGGTTCACAAATTGGATATAGCATTGAAGAGTTTATGGAATTTCTTGAAAAAATTTTAGCGATTGCTCAGGTAGATTATCTTGCTATTGCAAGCTGGGGGCATGATGTCTTTAGAAATACTATACGTTCTGAGGGAGTTTACAAAGGGCAGCTGGTTAATCAAGTTATATTTGAACATTTTGGTGATAGAGTTCCAATTATGGCAACTGGAGGTATTAATAGTGCTTCAAAGGTGTTTGAAGCCTTACAACATGCTCATATGGTAGGAGCTTCCACGCCCTTAGTAGTTGATCCGGAATTTTTACAAAAAATAAAAGCTAAGCGTTCTGATCAGATTAATTTAAGGATTAAAGTGAGTGATTTAGAAGGTTTGGCGATTCCAAAAGCCTCCTTTAAAGATATTGTTCCTTTGATGGATTATGGAGAATCTTTACCAAAGGAAGCTCGAGAAGTTTTTAGAGAACTTCGAAGCAATTATAGGGAGGAAAGA

SEQ ID NO: 10890 - protein, 399 aa, Streptococcus agalactiae; identical to SEQ ID NO: 1996

SEQ ID NO: 10891 - protein, 834 aa, Streptococcus agalactiae
TTGGAATGGCAAGATCTAGCGCAGTTACCTGTATCTATTTTTAAAGACTATGTTACAGATGCTCAAGACGCGGAAAAACCTTTTATATGGACAGAAGTATTTTTAAGGGAGATTAATCGCTCAAATCAAGAAATTATTTTGCATATTTGGCCGATGACTAAGACAGTCATTCTGGGGATGTTAGATCGAGAATTACCACATTTAGAATTAGCTAAAAAAGAAATCATCAGTCGTGGCTATGAACCAGTTGTTCGGAATTTTGGTGGTCTCGCAGTTGTAGCTGATGAAGGAATTTTAAATTTTTCATTGATTATTCCAGATGTTTTTGAGAGAAAATTGTCTATCTCAGATGGGTATCTTATAATGGTCGATTTTATTAGAAGTATATTTTCAGATTTTTATCAACCTATTGAGCACTTTGAAGTAGAGACCTCCTATTGTCCTGGTAAGTTTGATCTTAGTATAAATGGCAAAAAATTTGCTGGCTTGGCTCAGCGCCGTATAAAGAATGGTATTGCGGTATCGATTTACCTTAGCGTTTGTGGCGATCAAAAAGAGCGGAGTCGAATGATTTCAGATTTTTATAAGATTGGTCTAGGTGATACGGGTAGTCCAATTGCTTATCCAAATGTAGATCCTGAAATTATGGCTAATCTATCTGATCTATTAGATTGTCCTATGACAGTAGAAGATGTTATTGATCGTATGTTGATTAGCCTTAAACAAGTAGGTTTTAATGATCGTTTACTGATGATTAGGCCCGATTTAGTTGCAGAGTTTGATAGATTTCAGGCTAAGTCTATGGCTAATAAGGGGACGGTGAGCAGAGATGAA

SEQ ID NO: 10892 - protein, 278 aa, Streptococcus agalactiae; identical to SEQ ID NO: 1998

SEQ ID NO: 10893 - protein, 699 aa, Streptococcus agalactiae
ATGTACAATATGGCTATGAAAATTTTGATTACATCAGGTGGAACTACCGAGAAAATTGATACCGTTAGGAGTATCACGAATCACGCAACAGGAGCTTTAGGAAAAATAATTGCAGAAAAATATTTACGAGAAGGACATCAGGTGACACTCGTGACTACTAAAAATGCAATCAAACCAGAATCTGCTACCAACTTATCCATATTTGAGATTGAGGACGTTGACTCATTAATAAAAACCTTGAAGCCATTAGTGAAAGAGCATGATATTTTAATTCATAGCATGGCAGTGTCTGACTATACCCCCGTCTACATGGCTGATTTCGAAAAGGTTAAATCAAGCGATGATTTAGATACTTTTTTGCGCAAAGATAACCACGAAGGGAAAATATCATCTGAATCAGAATATCAAGTCCTTTTTCTCAAAAAAACACCAAAAGTTATCAGCCTTGTAAAAAAATGGAATCCTCAAATTATTCTAGTAGGTTTTAAACTACTTGTGAACGTTACTAAAGAAAATCTTTTTAAAGTTGCTCGTCATAGCTTAATCAAAAATAAAGCTACGTTTATTTTAGCTAATGACCTCATTGATATTACCTCAAAACATCACATAGCCTACCTACTTGATCATGATAATGTGTATAAAGCTACCACCAAAGAAGACATTGCTCAATTAATTTACGAAAAGGTAAAAAAATATGAT

SEQ ID NO: 10894 - protein, 233 aa, Streptococcus agalactiae; identical to SEQ ID NO: 2000

SEQ ID NO: 10895 - protein, 540 aa, Streptococcus agalactiae
ATGATTAAACGTATTACACTAGCCGTCACCGGTTCAATTTCGGCCTATAAAGCAGCAGACCTTACAAGTCAATTAACTAAAATTGGCTATGATGTTCATATCATAATGACACAAGCTGCCACAGAATTTATTACACCGTTAACTCTGCAAGTATTATCAAAAAATCCTATTCATTTAGATGTTATGGATGAGCATAACCCAAAAATCATCAACCATATCGAATTAGCAAAACGCACAGATTTATTTATCGTTGCACCTGCCTCTGCTAATACTATTGCTCATCTAGCATATGGCTTCGCTGATAACATCGTAACAAGCGTTGCTCTTGCTATGCCTGATGAAACTCCAAAACTTATCGCACCAGCAATGAATACAAAGATGTATCATAATACAATCACCCAACGTAACATTGATATTTTGAAAAAAATAGGTTATCAGGAAATTGAACCTCGTATTAGTTTGCTTGCCTGTGGTGATACCGGTCAAGGAGCCCTAGCTGATATCTCTACTATACTTAAATGTATACAAGAAGTTGCAAAT

SEQ ID NO: 10896 - protein, 180 aa, Streptococcus agalactiae; identical to SEQ ID NO: 2002

SEQ ID NO: 10897 - protein, 570 aa, Streptococcus agalactiae
ATGAAAAAGAAAAACAAATCCTCTAACATTGCTATAATTGCAATCTTTTTTGCTATTATGCTTGTCATTCATTTTTTGTCATCATTTATTTTTAGTTTTTGGTTAGTCCCCATTAAACCTACTTTGATGCATATCCCAGTTATTATTGCATCTATAGCCTATGGACCTCGTATTGGTGCAACTCTAGGCGCCTTAATGGGTGGGATCAGCGTAGCTAACAGCAGCATTGTTCTATTACCAACGAGTTACCTCTTCTCACCTTTTGTTGAAAATGGTAATTTTTATTCGCTAATTATTGCACTTGTACCACGTATTCTAATCGGGATTATTCCTTATTTCGTTTACAAATTACTACACAACCGCTTTGGTTTGGCTATCTCAGGTGCTATAGGCTCTCTAACAAACACAGTATTTGTTTTATCTGGAATTTTTATCTTTTTTTCAAGTACTTATAATGGGAATATCAAGCTAATGCTCGCTGGGATTATTTCATCTAATTCATTAGCTGAGATGGTCATTGCAGCTATCATTGTATATCTAACTGTTCCTCGTATTCTCAATATTAAACAT

SEQ ID NO: 10898 - protein, 190 aa, Streptococcus agalactiae; identical to SEQ ID NO: 2004

SEQ ID NO: 10899 - protein, 1716 aa, Streptococcus agalactiae
ATGACTTACACAGAAAATTTTCAAAAATGGTTAGATTTTGAGCAGCTTCCTGACTATCTTCGTCAAGAATTACTATCAATGGATGAAAAAACAAAAGAAGATGCTTTTTACACAAACTTAGAATTTGGTACTGCTGGTATGCGTGGTTATATTGGTGCTGGTACAAATCGTATTAATATTTATGTTGTCCGTCAAGCAACCGAAGGATTGGCAAAATTAATCGAAACTAAGGGAGAGGAAGCTAAAAAACGTGGTGTAGCTATCGCTTATGATTCGCGCCACTTCTCTCCAGAATTTGCTTTTGAGTCTGCACAGGTCTTGGCACAGCATGGAATTAAATCTTACGTATTTGAAGCTCTTCGTCCAACACCAGAACTCTCTTTTGCTGTTCGCCATTTAAATGCCTATGCTGGTATTATGGTTACTGCAAGCCACAATCCAGCACCTTTCAATGGTTATAAAGTCTACGGACAAGACGGAGGTCAACTACCACCAGCTGATGCTGATGCACTAACAGACTTTATCCGTGCTATTGAAAATCCATTTGCAGTTGAACTTGCTGATTTAGATGAAAGCAAATCAGCGGGTCTTATTCAAGTTATCGGTGAAGATGTTGATATTGAATATCTTAGAGAGGTTAAAGATGTTAATATCAATCAAGATTTAATCAATAACTTTGGAAAAGACATGAAAATTGTCTATACTCCTCTCCACGGAACTGGTGAGATGTTGACACGCCGTGCCCTTGCTCAAGCCGGTTTTGAATCTGTTGTTGTAGTAGAATCACAAGCTAAGGCAGATCCAGACTTTTCTACTGTCAAATCTCCTAACCCTGAAAGCCAAGCTGCCTTTGCTCTTGCTGAAGAACTCGGACGAGAAGTTGATGCAGATGTCTTAGTAGCTACTGATCCTGATGCAGACCGCCTAGGCGTTGAAATTCGCCAACCAGATGGTTCTTATAAAAACCTTTCTGGAAATCAAATTGGAGCGATTATTGCGAAATACATCCTGGAAGCTCATAAAACAGCAGGAACACTTCCAGAAAATGCTGCTCTCGCTAAATCAATCGTATCAACAGAATTAGTAACAAAAATTGCCGAAAGTTATGGCGCTACAATGTTTAACGTTTTAACTGGATTTAAATTCATCGCTGAGAAAATTCAAGAGTTTGAAGAAAAACATAACCACACCTATATGTTTGGTTTTGAAGAAAGCTTCGGATATCTTATTAAACCATTTGTCCGTGATAAAGACGCTATTCAAGCAGTTCTTTTGGTTGCTGAGATTGCAGCTTATTACCGTTCGCGTGGTTTAACACTTGCAGATGGTATTGATGAAATTTACAAAGAATATGGTTATTTTGCTGAAAAAACGATTTCAGTAACACTTTCAGGAGTGGATGGAGCTGCTGAAATTAAGAAGATTATGGACAAATTCCGTGAAAATGGTCCAAAACAATTTAACAATACTGATATTGTATTATTAGAAGATTTCCAAAAACAAACCGCTACTAAAAATGATGGAATAATATCTAACTTAACAACTCCTCCAAGTAATGTTTTGAAGTACACGTTAGCTGATGATTCATGGATTGCAGTTCGCCCTTCAGGAACTGAACCAAAAATCAAGTTCTATATTGCTACGGTCGGTAATGATTTAGCAGATGCAGAAACAAAAATCGCCAATATTGAAAAAGAGATTACAACATTTGTAAAT

SEQ ID NO: 10900 - protein, 572 aa, Streptococcus agalactiae; identical to SEQ ID NO: 2006

SEQ ID NO: 10901 - protein, 1731 aa, Streptococcus agalactiae
ATGAAAGCAAGTCATCCTAAAAAGATACAAAAAAAGCTTGTTCAAGATCTTCTTTCTAAAAAAAGCTTAGTAGGAATGGCATTATTAGGGACGGTTGTACAAGTTTGCCTCACTGTTTATTTGCCTGTTCTAATTGGACAAGCGGTAGACGTTGTATTATCGCCTCATTCTATGATATTATTGTTACCTATAATGTGGAAGATGATTGCAGTCATTTTAGCAAATGCTATTATTCAATGGATTAATCCTCTGCTCTATAACCGCTTAATTTTTCATTATGTTGCTTCTTTAAGAAAGGCTGTAATGGAAAAGTTGAATCTATTGCCTATAGCTTACCTTGATAAACGTGGCATAGGTGACTTGATTAGTCGTGTGACTACCGATACGGAGCAATTATCAAATGGTTTATTAATGGTTTTTAACCAGTTCTTTGTTGGTTTATTAACTATTCTAGTTACTATTTTTAGTATGGCAAAGATTGATTTATTAATGCTTTTTTTGGTATTATTTCTGACGCCTTTATCACTCTTTCTAGCCCGCTTTATTGCTAAAAAGAGTTATCACTTATATCAAAATCAAACGGCATCACGAGGACGACAAACTCAATTCATTGAAGAGATGGTGAGTCAAGAAAGCCTTATTCAAGCATTCAGTGCGCAAGAAGAAAGTAGTAATCATTTTAGGACTATTAATCAAGAGTATGCTAACTTTTCTCAATCAGCAATTTTTTATTCTTCAACTGTCAATCCATCAACCCGATTTATCAATAGTTTGATTTATGGCTTCTTAGCTGGGATTGGTGCCCTTCGTATTATGTCAGGGGCTTTTAGTGTTGGTCAATTAATCACTTTCTTAAATTATGTCAATCAATATACTAAGCCATTTAATGACATCTCTTCCGTCCTGTCTGAGATGCAAAGTGCTCTGGCTTGTGCAGAACGCCTTTACTCTATTTTAGAAGAATCGTCACCAAATATAACAGGGACAGAAAAACTTGATTCATCAACGGTCAAGGGTCAAATCGATTTTAAAAATGTTGTTTTTGGTTATAATAAATCAAAACCACTATTGAATGGTATTAATTTACACATTCCAGCAGGAGCTAAGGTCGCTATTGTAGGACCAACAGGTGCTGGGAAGTCTACTTTAATCAATTTATTAATGCGTTTCTATGAAGTTGACGGGGGAAATATCCTTTTAGATGGTAAGCCTATTACTGATTATGAGCCATCACAATTAAGGCAAGAAATTGGAATGGTATTACAAGAAACGTGGTTAAAAAGTGCTACGATTCACGATAACATTGCATATGCCAATCCTAAAGCTAGCCGTGACGAAGTGATAGAGGCTGCAAAAGCAGCTAATGCAGATTTCTTTATCAAACAATTACCGAATGGATATGATACGTATTTAGAAGATGCTGGAGACTCGTTATCACAGGGGCAATGTCAGCTATTGACAATTGCTCGTATTTTTCTTAAATTACCTAGAATATTGATATTAGATGAGGCAACATCGTCTATAGATACTCGTACTGAAGTTCTTGTTCAAGAAGCATTCCAAATGTTGATGAAGGGGAGAACAAGCTTTATTATTGCACATCGCTTATCTACCATTCAAACAGCAGATATTATTTTAGTTATGGTATCTGGTGAAATTGTAGAAGTGGGTAACCACTCTGAATTAATAGCTCAAAAAGGTATTTATTATCAAATGCAAAATGCACAAAAG

SEQ ID NO: 10902 - protein, 577 aa, Streptococcus agalactiae; identical to SEQ ID NO: 2008

SEQ ID NO: 10903 - protein, 1719 aa, Streptococcus agalactiae
ATGAAAAGACTAACTTATTATTTTAAGGGGTATATCAAAGAAACTATCTTTGGACCCCTTTTCAAATTATTAGAAGCCTCTTTTGAACTTTTGGTACCAATCGTTATTGCAAAAATGATTGACGAGACCATTCCACGAGGGGATAGAAGTAGTTTACTGTTGCAAATTGGATTGATTTTCTTTTTGGCTGCGGTGGGTGTTGTAGTAGCGATAACTGCTCAATATTATTCTTCAAAAGCCGCAGTTGGTTATACGAGACAATTGACAGAGGATCTCTACCAAAAAGTCATGTCACTGGGGAAAAAAGACAGAGATGAATTGGGAACTGCTAGTTTGATTACTCGTTTGACTGCTGATACATTTCAAATCCAAACTGGTTTAAATCAATTTTTACGTTTATTTTTGAGGGCTCCGATTATTGTTTTTGGTGCCATAATTATGGCTTTTTCCATTAGCCCCTCATTGACTATTTGGTTCTTGGTAATGGTTGTCACGTTATTTATCATTGTTTTTGTAATGTCTCGACTATTAAATCCTATTTACCTTAAAATCAGAACTTCAACCGATTATTTGGTAAAGTTGACTAGGCAACAACTTCAAGGTGTACGAGTTATCCGTGCCTTTAATCAAGTAGATAGAGAGAGTGAAGCATTTAATGATATCAATTATCATTATACGAATTTACAATTAAAAGCAGGTAGGCTTTCTAGTTTAGTAACGCCTCTAACATTTCTAGTTGTTAATATCACTTTGGTTGTGATTATTTGGCGTGGTAATTTAAATATAGCTAATCATCTTTTATCACAAGGAATGTTGGTTGCTTTAATTAATTACTTATTGCAAATTCTTGTTGAATTGTTAAAAATGACAATGTTGGTGACATCACTGAACCAAAGTTATATCAGTGCTAAGCGAATTATAGCCGTTTTTGAAAGACCGTCTGAAATAATTGATGACAAACTTGAGCCAAAATATTCGAATAAGGCTTTAGAAGTACAAGAAATGGCATTTTCTTATCCAAATTCTTCTGAAAAAGCTTTATCTGATATTACTTTTTCTATGAATGTAGGAGAAACTTTAGGGATAATTGGTGGAACTGGCTCTGGGAAATCAACCTTGGTTAATTTACTGCTTCATATTTATAAAGTGCAAGAAGGGGATATTGATATATATCATCAGGGAAAAAGTCCAGATACAATTTCAAATTGGCGTACCCTGGTAAGAGTTGTTCCTCAAAATGCTCAGTTGTTTAAAGGAACTATTCGTTCTAACCTTTCTTTGGGACTTGGTAAAGTTAGTGAGGAAAAACTTTGGACTGCTTTAGAAATAGCACAAGCTAGTGATTTTGTAAAAGAAAAAGATGGTCAACTTGATGCCCCTGTAGAGAGTTTTGGTAGAAATTTCTCTGGTGGTCAAAGGCAAAGGTTGACGATTGCAAGAGCTTTAGTTCAAGATAAGATACCATTTTTGATTTTAGACGATGCAACATCTGCATTGGATTATTTAACAGAAACTCGTTTATTTAAAGCCATAACTAAACATTTCAACCAAACTAATCTTATTATTGTATCACAGAGAATTAATAGTATACAAAATGCAGATAGAATCTTACTCCTTGATAAGGGGAAACAAGTTGGTTTTGATAATCATCAATCTTTATTAGCTCATAACAAAGTTTATAAGTCCATTTACCATTCACAAAATTTTAAGGAGGAGGAG

SEQ ID NO: 10904 - protein, 573 aa, Streptococcus agalactiae
MKRLTYYFKGYIKETIFGPLFKLLEASFELLVPIVIAKMIDETIPRGDRSSLLLQIGLIFFLAAVGVVVAITAQYYSSKAAVGYTRQLTEDLYQKVMSLGKKDRDELGTASLITRLTADTFQIQTGLNQFLRLFLRAPIIVFGAIIMAFSISPSLTIWFLVMVVTLFIIVFVMSRLLNPIYLKIRTSTDYLVKLTRQQLQGVRVIRAFNQVDRESEAFNDINYHYTNLQLKAGRLSSLVTPLTFLVVNITLVVIIWRGNLNIANHLLSQGMLVALINYLLQILVELLKMTMLVTSLNQSYISAKRIIAVFERPSEIIDDKLEPKYSNKALEVQEMAFSYPNSSEKALSDITFSMNVGETLGIIGGTGSGKSTLVNLLLHIYKVQEGDIDIYHQGKSPDTISNWRTLVRVVPQNAQLFKGTIRSNLSLGLGKVSEEKLWTALEIAQASDFVKEKDGQLDAPVESFGRNFSGGQRQRLTIARALVQDKIPFLILDDATSALDYLTETRLFKAITKHFNQTNLIIVSQRINSIQNADRILLLDKGKQVGFDNHQSLLAHNKVYKSIYHSQNFKEEE

SEQ ID NO: 10905 - protein, 600 aa, Streptococcus agalactiae
ATGTTTAAATTTTTAAAACGTTTGATAGCATTAATTATTATTATTTTCATTGGGTACCGTCTGGTTATCATCCATGAAAATGTTAAAAAAGTGCTTCAATATCATGATTTAGTGCAGAATACTCTTGCAGAGAATGGTTCAGAGGCTAATGTGCACTTAGTATTATCTATGATTTATACTGAAACTAAGGGAGATGCTATAGATGTGATGCAATCAAGTGAAAGTATCAGTGGAACTACGAACAGTATTACGGATAGCCACACCAGTATTAAACATGGCGTCACTCTGTTGTCACAAAATATAAGTCAAGCTAAAAAAGCTAAGGTTGATGTATGGACTGCTGTCCAAGCATACAATTTTGGTTCTTCTTATATTGATTATGTAGCGGATCATGGGGGTGAAAATTCCATTGAGTTGGCCAAAAATTACTCTAAAAATGTTGTAGCTCCCAGCCTAGGAAATTATAACGGGGACACTTACTTTTACTATCATCCTCTCGCCTTAATTTCAGGAGGGAAGCTCTATAAAAATGGTGGTAATATTTACTACTCACGTGAAGTTCAATTCAACCTTTATTTGATAAAAATAATGGAGTTGTTT

SEQ ID NO: 10906 - protein, 200 aa, Streptococcus agalactiae; identical to SEQ ID NO: 2014

SEQ ID NO: 10907 - protein, 975 aa, Streptococcus agalactiae
ATGATGGATTTTTATATCAAACAGATTATTATACATCAGTTTTCTCCTAACGACACAGAGTTAGTGCTATCAGATACTCCGTTAACCCTAACTCCAAGGATTGATGACTACTTTCGTAAAAAATTAAGTAAAGTTTTTTCTGATGAAGCTAAGCGTGGCTATTTTGGAGAGGATAATGTATTTATGAGTCATTTACAAGATGATTTATATGTTTCTTCCTGTCAAATTGCGCAACTTTGGAAAGAAGAGTTTGTCATATCGGAAGATCAAAAAACGAATGACTTAGTTTTTATTCAATTTGACAAGGATGGAATGGAACATTTTGCTTTTCTTCGAATCTCATTAAAGGAACAATTTGCTCATGTTTCTGAAAATCAAGAGCAGCCAATTACAATAACACAGAATAACCTTCCAAGTGCTGCTCAAACTCCAGATGAAGCTTTGGTTGTTAACAAGTCATCAAAGCAATACTATTTAATTGAAAAGCGTATCAAACACAATGGTTCATTTGCTAATTATTTTTCTGAAAATTTATTACAAGTACAACCAGAACAGTCGGTTAAAAAATCTATCAAAATGGTTGAACAGACTGCTCAAAAAATTGCTGAAAATTTCAACAAAGATGATTTTTCTTTCCAATCAAAAATGAAATCGGCTATTTATAAGAATTTAGAAGAAGAGCAAGAATTGTCTCCAGAAAAATTAGCAGATCAATTATTTGATGATAATTTAACAGCCAGGCTGACTTTTGTTGATGAATTGAAAGATGCAATACCTGGACCTGTTCAAGTAAGTGATATTGATCATTCCCGTCAAATTAAGAAGTTAGAGAATCAGAAGCTATCTCTTTCAAATGGTATTGAATTGATTGTACCCAACAATGTCTACCAAGATGCCGAATCAGTTGAATTTATCCAAAACCCTGATGGTACATACTCAATACTAATCAAAAACATACAGGATATTCAAAATAAA

SEQ ID NO: 10908 - protein, 325 aa, Streptococcus agalactiae; identical to SEQ ID NO: 2016

SEQ ID NO: 10909 - protein, 1254 aa, Streptococcus agalactiae
ATGATTTTTGATAAAGACAATTTTAAAGAAATTGACCAAGAACTTTGGCAGGCTATTCATGATGAGGAAATTCGCCAACAAAATAATATTGAATTAATTGCATCAGAAAACGTTGTTTCAAAAGCTGTTATGGCAGCACAAGGTTCTGTTTTGACAAATAAATATGCCGAAGGGTATCCTAGTCATCGTTATTATGGAGGAACAGATTGTGTTGATGTAGTTGAAAGTTTAGCTATAGAACGAGCTAAGACGTTATTTAATGCTGAGTTTGCTAATGTTCAACCACATTCTGGTAGTCAGGCTAATGCAGCAGCTTACATGGCTTTAATCGAGCCGGGAGATACTGTCTTAGGGATGGACTTAGCAGCAGGTGGGCACTTAACACATGGCGCTTCAGTTAGCTTCTCAGGAAAAACTTATCATTTTGTTTCTTATTCTGTTGATCCTAAGACGGAGATGCTAGACTATGATAACATTTTGAAAATAGCACAGGAAACGCAGCCTAAATTAATTGTTGCAGGGGCATCGGCTTATTCTCGCATTATTGATTTTGAAAAATTTCGTCAAATAGCAGACGCAGTAGATGCTTACTTAATGGTTGATATGGCTCACATTGCAGGTTTAGTTGCTTCTGGTCATCACCCTAGTCCTATTCCTTATGCTCATGTAACGACAACGACAACACATAAGACTCTACGTGGACCTAGAGGTGGTTTGATTTTAACCAATGATGAAGCAATTGCTAAAAAAATTAATTCTGCAGTCTTTCCAGGACTCCAAGGTGGACCATTAGAACATGTAATTGCTGCAAAAGCTGTAGCTTTGAAAGAAGCCCTAGATCCTTCCTTTAAAATATACGGTGAGGATATTATTAAAAATGCTCAAGCCATGGCTAAAGTTTTTAAAGAAGATGATGACTTTCATTTGATTTCTGATGGTACTGATAATCATTTGTTCTTAGTAGACGTCACAAAAGTTATTGAGAATGGCAAAAAGGCACAAAATGTTCTTGAAGAAGTCAATATCACTCTTAACAAGAACTCTATACCGTTTGAGCGACTATCACCATTTAAAACATCAGGTATTCGAATTGGTACTCCAGCAATTACTAGTCGAGGAATGGGAGTTGAAGAATCTCGAAGAATCGCTGAATTAATGATTAAGGCACTCAAAAATCATGAAAATCAAGATATCCTCACAGAAGTTCGTCAAGAAATTAAATCATTAACGGACGCTTTCCCCTTGTATGAGAAT

SEQ ID NO: 10910 - protein, 418 aa, Streptococcus agalactiae
MIFDKDNFKEIDQELWQAIHDEEIRQQNNIELIASENVVSKAVMAAQGSVLTNKYAEGYPSHRYYGGTDCVDVVESLAIERAKTLFNAEFANVQPHSGSQANAAAYMALIEPGDTVLGMDLAAGGHLTHGASVSFSGKTYHFVSYSVDPKTEMLDYDNILKIAQETQPKLIVAGASAYSRIIDFEKFRQIADAVDAYLMVDMAHIAGLVASGHHPSPIPYAHVTTTTTHKTLRGPRGGLILTNDEAIAKKINSAVFPGLQGGPLEHVIAAKAVALKEALDPSFKIYGEDIIKNAQAMAKVFKEDDDFHLISDGTDNHLFLVDVTKVIENGKKAQNVLEEVNITLNKNSIPFERLSPFKTSGIRIGTPAITSRGMGVEESRRIAELMIKALKNHENQDILTEVRQEIKSLTDAFPLYEN

SEQ ID NO: 10911 - protein, 594 aa, Streptococcus agalactiae
ATGAATGATTTGGGACAGATTTTAGAGGATCATGGCGCAGTTATTATGCCAACAGAAACAGTCTACGGAATTTTTGCCAAAGCTTTGAGTGAAGAAGCTGTGAACCACGTCTATGAGCTTAAAAAAAGGCCTCGTGATAAGGCTATGAACTTAAATATATGTGATTTTGAGACTATTTTAAAATATTCTAAAAATCAACCGACCTATTTAAAGCAATTGTACGATGCTTTTTTACCAGGACCGCTAACCATTATTTTGGAAGCTTCACAAGAAGTTCCGCATTGGATCAATTCTGGGTTATTAAGCGTAGGATTTCGGATGCCTAAGCACCCTGTAACCCTTGATATGATTGCTAACCATGGTCCACTGATTGGTCCTTCTGCTAATATTTCTGGATGTGATAGTGGTCGTGTGTTCTCAGAAATTCAAAAACAGTTTAATCATCAAGTTTTAGGTATTGAAGATGATAAAGCATTGACAGGTGTGGATTCTACTATTATTGATTTGTCTGGTGATAGAGTTAAGATTTTAAGGCAAGGTGCAATCACGCAAGAGGTACTAACGGCTACGATACCTGAATTAATTTTTGAAAAT

SEQ ID NO: 10912 - protein, 198 aa, Streptococcus agalactiae; identical to SEQ ID NO: 2020

SEQ ID NO: 10913 - protein, 828 aa, Streptococcus agalactiae
ATGAATTATGCGCAGTTAATCAAGCATTACGGACAGTTATTAGAAGCTTGTGGTGAAGAAGTCGAAAATTTTATTTATGTATTAAAAGACCTAAAACAATGGTCAACAACTGATTACCTTTTAAATCAAAATAGTAGTGTGAGTGATACTGATCAGCAATTAATGGAAAATATTTTTCAACAGCTTAAAAAACATAGATCACCGCAGTATATTACAGGTAAAGCTTACTTTAGAGACCTTATTTTCTTTGTTGATGAACGAGTTTTAATTCCGAGGCCTGAAACAGAGGAGTTGGTTGATCTAATCTTATCAGAGAATAAAGTAGAAGATTGTTCTGTTTTAGATATTGGTACAGGTAGTGGAGCAATTGCCATTTCTCTAAAAAAAGAACGCCCCTCTTGGGATGTTCTAGCTAGTGACATTTCTGTATCTGCATTAGACTTGGCAAAGGAAAATGCTAATAATTGTGATGCGGAAGTGACTTTTATAGAATCAGATGTCTTTAGTAACATTTCAGGTAAATTTGATATTATTGTGTCTAATCCTCCCTATATTTCTTACAATGACAAAGACGAGGTGGGGAAGAATGTGCTAGCTTCAGAGCCTCATAGTGCCCTTTTTGCAGACGAAGAAGGATTAGCTATTTATCGTAAAATCATTGAAAACTCAAGAGAATATTTGCAACCTAGAGGTAAATTATATTTTGAAATAGGTTACAAACAAGGTGATGATTTACGAAGTTTATTGAAAAGATATTTTCCAAACAATCGTTGCAGAGTTTTGAAAGATATATTTGGTAAAGATAGAATGGTGGTATTAGATAATGAA

SEQ ID NO: 10914 - protein, 276 aa, Streptococcus agalactiae; identical to SEQ ID NO: 2022

SEQ ID NO: 10915 - protein, 1077 aa, Streptococcus agalactiae
ATGAATATTTATGATCAATTGCAGGCAGTTGAAGATCGTTATGAAGAGTTAGGTGAGTTACTTAGTGATCCAGATGTTGTTTCAGATACAAAGCGATTTATGGAATTATCACGTGAAGAAGCTAATACTCGAGAAACTGTCACAGCTTATAGAGAATATAAGCAAGTCATTCAAAATATTTCAGATGCTGAAGAAATGATCAAGGATGCTTCTGGTGATGCTGAATTGGAAGAAATGGCTAAAGAAGAACTTAAAGAATCAAAAGCAGCTAAAGAAGAGTATGAAGAAAGATTAAAAATCCTTCTATTACCTAAAGATCCTAACGATGATAAAAACATTATTTTAGAAATTCGTGGTGCTGCTGGTGGCGATGAAGCAGCGCTTTTTGCTGGTGATCTTTTAACAATGTATCAAAAATATGCTGAAACTCAAGGATGGCGTTTTGAAGTTATGGAATCATCCGTTAATGGTGTTGGTGGTATTAAAGAAGTGGTTGCTATGGTTTCTGGTCAGTCAGTTTATTCTAAGCTTAAATATGAATCAGGAGCTCATCGTGTTCAACGTGTCCCGGTGACAGAGAGTCAGGGTCGTGTTCATACTTCAACTGCAACTGTTTTGGTAATGCCAGAAGTTGAAGAAGTAGAATACGAAATTGATCAAAAAGACCTTCGCGTCGATATTTACCACGCGTCTGGTGCTGGTGGTCAGAACGTCAATAAAGTTGCTACTGCAGTTCGTATGGTACACATTCCTACAGGAATCAAAGTTGAAATGCAAGAAGAACGTACTCAGCAAAAAAACCGTGATAAAGCGATGAAAATCATTCGTGCTCGTGTTGCTGACCATTTTGCGCAAATTGCTCAAGATGAACAAGATGCTGAACGTAAATCAACAGTTGGTACTGGTGATCGTTCAGAACGTATTCGCACTTATAATTTCCCACAAAATCGTGTAACAGATCATCGTATTGGTTTGACACTTCAAAAATTAGATACTATTTTATCTGGAAAAATGGATGAAGTTATTGATGCACTTGTTATGTATGATCAGACTCAAAAGTTAGAAGCCTTAAATAAA

SEQ ID NO: 10916 - protein, 359 aa, Streptococcus agalactiae; identical to SEQ ID NO: 2024

SEQ ID NO: 10917 - protein, 567 aa, Streptococcus agalactiae
TTGGCTCAACTCTATTATAAATATGGGACAATGAATTCTGGTAAAACCATTGAAATTTTAAAAGTTGCTCATAACTATGAAGAACAAGGAAAACCTGTGGTTATTATGACAAGCTCCTTGGATACTCGAGATGAATTTGGAGTCGTTTCAAGTCGTATTGGAATGCGTCGTGAAGCAGTTCCAATTTCAGATGATATGGACATTTTCTCCTATATTCAGAATTTACCACAAAAGCCTTATTGTATTTTAATTGATGAATGTCAATTTTTGAGTAAGAAAAACGTCTACGATTTAGCTAGAGTAGTAGATGACTTAGATGTACCAGTCATGGCTTTTGGTTTGAAAAATGATTTCCAAAACAATCTTTTTGAAGGTTCAAAACATTTGCTATTATTGGCCGATAAGATTGATGAAATCAAAACAATTTGCCAATACTGTAGTAAGAAAGCAACCATGGTTTTAAGGACAGAAAACGGAAAACCTGTCTATGAAGGTGATCAGATACAAATTGGTGGTAATGAAACATATATCCCAGTTTGTCGAAAACATTATTTTAATCCAGATATT

SEQ ID NO: 10918 - protein, 189 aa, Streptococcus agalactiae; identical to SEQ ID NO: 2026

SEQ ID NO: 10919 - protein, 180 aa, Streptococcus agalactiae; identical to SEQ ID NO: 6615

SEQ ID NO: 10920 - protein, 60 aa, Streptococcus agalactiae; identical to SEQ ID NO: 2028

SEQ ID NO: 10921 - protein, 936 aa, Streptococcus agalactiae
TTGCAACTTTCTCATAGTTTAAGACTCATGGGAACGACTATCGATATTCAAATTAATTCTAAAAATGCTCAAAAACAAATCCAAGAGGTCATAGAACTCTTGGAGCTCTACAAAAATCGCTTTAGTGCAAATGACTTTAATTCAGAGTTAATGGCTATAAATAATAACGCTGGTATCAAGCCTATTCAAGTACATCCAGACCTCTTTGAATTAATCACAATTGGGAAAGAGCACAGCTTAGCTAGGCCTGGTAACCTAAATATTGCTATTGGTCCTTTAGTGCAAACTTGGAGAATTGGATTTTCAGATGCTAAACTACCTAGCCCTAGTGAAATATCAGAAGCTATGATTTTATCTGACCCAACTCATATACTTCTAGATTCAAAAAATCAATCTGTTTTTTTAAATCAGATAGGAATGAAAATTGATTTGGGTGCACTTGCAAAAGGATATATCGCTGACAAAATTATAATCTATCTCAAAAATGAGATGATTGATTCTGCTATCATTAACTTAGGCGGAAACGTTTTAGTTCACGGAGATAATCCTAATCGTTCAGAAGGGTATTGGGTTATCGGTATTCAACATCCGAAAAAGAAACGGGGACAAAATATTGGAGCTGTCAAAATTAAAAACCAATCTGTTGTAACCTCAGGTACTTATGAACGCCGTCTAATTATTGACGATAAGGAATACCATCATATTTTTGATCGACAGACTGGTTATCCGATACAAACAGAGATGGCTAGCATTTCTATTGTTTCTAAACAATCCGTCGACTGTGAAATCTGGACCACAAGGTTGTTTGGCTTATCCATTAAAGAGGCTCTTGATATTTTAAACGCTGTTTCCTACATTGAAGGCATTATCATCACTAAAGATGATCGTATCTATTTATCTGATGGCTTAAAACATCATTTTCAACTATTTTATCAT

SEQ ID NO: 10922 - protein, 312 aa, Streptococcus agalactiae; identical to SEQ ID NO: 2030

SEQ ID NO: 10923 - protein, 600 aa, Streptococcus agalactiae
ATGAAACTTATTGGCATCGTTGGAACTAACTCAAATAAATCAACAAATCGTCAATTATTACAATACATGCAACAACACTTTGCTGACAAAGCAGAAATTGAACTCATCGAAGTTAAAGACCTTCCGTTATTTAATAAACCTGCTGATAAAAATGTTCCCCAAGTAATTTTAGATATTGCTGCTAAAATTGAAGAAGCTGATGGTGTTATTATTGGTACGCCAGAATATGATCATTCTATACCTTCGGCCTTAATGAGTGTTTTAGCTTGGCTATCATATGGTATTTACCCACTTCTCAACAAACCCGTTATGATTACTGGTGCTTCATATGGAACACTTGGATCATCACGTGCACAATTACAATTACGTCAAATACTTAACGCTCCTGAACTAAAAGCAAGTGTTTTACCTGACGAATTCTTGTTATCACACTCTCTCCAAGCCTTTGATAAAGATGGCAACCTACACGATATCGAAACAAGTCAGAAGCTAGATGCTATCTTTGATGATTTTCGTCTTTTTGTTAAGATTACTGGTAAATTATCAAATGCTCGTGATTTACTTCAAAAAGAAGCAGAAAATTTTGACTGGGAAAGTTTA

SEQ ID NO: 10924 - protein, 200 aa, Streptococcus agalactiae; identical to SEQ ID NO: 2032

SEQ ID NO: 10925 - protein, 1233 aa, Streptococcus agalactiae
ATGAAATTTGTAGGTATTGTTGGCTCAAATGCAGAGCAATCATATAATCGTATGTTGCTTGAATTTATTCGCAAGAATTTTAAAACCAAATTTGAATTGGAAGTCCTTGAAATCGATGATATTCCAATGTTTAATCAAGTCCAAAATTGGGAAGAAAGTTTCCAACTTCGTCTTCTTAATAATAAGATCACACGAGCTGATGGCGTTATTATTGCCACTCCTGAACATAATCATACTATTACGGCCGCTCTTAAAAGTGTGCTTGAGTGGCTCTCATTTGCTGTGCATCCACTCGAAAATAAACCTGTTATGATTGTCGGTGCTTCATATTATGATCAAGGCACATCACGTGCTCAAATACACCTTCGTAAAATCCTTGATGCTCCTGGCGTTAATGCTTACACACTTCCAGGAAATGAATTCTTATTAGGAAAAGCTAAAGAAGCCTTTGATGATAATGGAAACATTATCAATCCTGGGACTGTTCAATTTTTAGAAACTTGTCTTGATAATTTTATCAAATATGTAGGAGTTGTATCATCATTGAGAAAACCTAAAGCTATTGAATCTGAAGACCTCTACTGTCAGGGACAAATCGATACAACCATTACTGGTATCGATCCAGATGATCCTGATTGGTTAGACAAGGCAGCCGAGAAAGTTAACGCCGTTGAAGGGGATGCTTACGTTAAACTAGACAATGGTTTACTTACTGTTAACCAACTTAATATGTTTTTAAATGCTATGCCATTTGAGCTAACATATGCAGATGATAATAATCAATTTCTATATTACAATAATAATCATCCAGATCCAGATACAATGTTAGGAAAACGTGTTCGTGAACAAGTAGGAAACCGTATGGCCACAGTTCATGGTAGTTTACCACCGGCACGAATGAAAAATGTTGAATGGGTTATCGGTACTCTTCGTAATGGAAATCAAGAATATGTACGTACAGTCGTTCCTGGTACACCTCCAGAAGTTATCAATACTCACAACTATCAAGCTATGTACTACCCAGACGGATCTTATGCTGGTATTAATGAAATTATCTTTAACTTTAAACCGTGGTTAGATTGGTACCTCCAAACTACTGGACAACGTTTGGTCGGTGGAACTACTGCTGCTCCTGGAGCTTCAGCAGTTGACGCTACTTCTAGCGCTTCAACTAGCACAGAGGATGCTCCCGTTGATCAAGCCACAGATGCCACTTCTGGTGCCTCTGAACAT

SEQ ID NO: 10926 - protein, 411 aa, Streptococcus agalactiae; identical to SEQ ID NO: 2034

SEQ ID NO: 10927 - protein, 786 aa, Streptococcus agalactiae
ATGTCACTTTTTCAAGAAAAAATTGCTTACAATTGCGCTAAAAAGGAAGCGCTTTATAAAGAGAGTTTAGGACGCTACGCCTTGAGATCAATGCTAGCAGGGGCTTATTTGACAATGAGTACTGCTGCCGGTATCGTCGCAGCTGATACTATTGGTAAAATTTCTCCTGCTCTATCAGGTTTTGTATTTGCTTTCATCTTTAGTTTTGGACTTATTTATGTTTTAATATTTAATGGTGAATTGGCGACATCTAATATGCTTTATCTCACTGCAGGAGCCTATAATAAAAATATCTCTTGGAAAAAAGCCATAACAATTTTAATTTATTGTACTTTTTTCAACCTCGTTGGTGCTTGTATATTAGCTTGGTTGTTTAATCAATCGTACTCATTCCAGCATTTAACAAATGATAGCTTTTTAGGGCATGTCGTTGCTAAAAAGTTAGGAAAACCTAGTTCAGGAGCTTTCCTAGAAGGTATTATTGCTAATATGTTTGTGAATTTAGCTATCCTTGCTTACATGTTATTAAAAGAAGAATCGGCAAAAATGACGGTTATTTTATCTGCTATTTTTATGTTTGTTTTTCTATCAAACGAACACTTAATTGCTAATTTTGCATCCTTTATGTTAGCTGCTTTTAGCCATATCGAACATATTAAAGGTTTTACTCTTTTAAACGTTATCCGCCAATGGACACTTGTATTTTTTGGTAACTGGATAGGAGGGGGCGTTTTCATCGGCCTAGCCTATGCTTGGTTAAATAAAACAAAAACTTCTCACCATGAA

SEQ ID NO: 10928 - protein, 262 aa, Streptococcus agalactiae; identical to SEQ ID NO: 2036

SEQ ID NO: 10929 - protein, 1272 aa, Streptococcus agalactiae
ATGAAATTTAATGAGCAAAGTAACTCGCAAGCAGCACTTCTAGGCTTGCAACACCTGTTAGCTATGTATGCAGGATCCATTCTTGTACCTATCATGATTGCTAGTGCTCTTGGTTATAATGCTGAGCAACTAACTTATCTTATTGCGACAGATATTTTTATGTGTGGGATTGCCACCTTATTACAATTACAATTAAGTAAGCACTTTGGAGTGGGTCTTCCAGTTGTATTAGGGTGTGCCTTTCAGTCTGTAGCTCCTTTATCAATTATTGGTGCACAACAAGGTTCCGGCTATATGTTTGGAGCTTTAATTGCTTCAGGAATATATGTCGTTTTAGTTGCTGGCATTTTTTCTAAAGTTGCAAATTTCTTTCCTCCAATTGTAACAGGATCAGTTATTACTACAATTGGTTTGACATTAATACCAGTTGCGATGGGAAATATGGGTGATAATGCAAAAGAACCGAGCTTACAATCTTTAACTTTATCACTGGTAACGATTGGTGTTGTTTTATTAATTAATATTTTCGCAAAAGGCTTTTTGAAGTCAATTTCAATCCTTATTGGACTCATATCAGGTACAATTCTTGCAGCATTTATGGGCTTAGTTGATGCTTCTGTGGTAGCAGAAGCACCACTTGTACATATTCCGAAGCCATTTTATTTTGGAGCTCCTAGATTTGAATTTACTTCTATTTTAATGATGTGTATTATTGCAACAGTTTCTATGGTAGAATCAACAGGTGTTTACCTTGCGCTTTCAGATATTACAAACGATAAATTAGACAGTAAGAGACTTCGTAATGGTTACCGTTCAGAAGGATTGGCAGTATTACTTGGCGGCTTATTTAATACCTTTCCATATACCGGTTTTTCTCAAAATGTGGGACTGGTACAGATATCTGGGATACGTACGCGTAAGCCGATATATTTTACAGCTCTCTTCTTAGTTATACTTGGCTTGTTACCTAAATTTGGCGCAATGGCTCAAATGATTCCAAGTCCAGTTCTTGGTGGTGCTATGTTAGTTTTATTTGGTATGGTAGCACTTCAAGGGATGAAAATGCTTAATCAGGTTGATTTTGAGCATAATGAGCATAACTTTATCATTGCAGCCGTATCAATTGCAGCAGGAGTAGGTTTTAATGGGACAAATCTCTTCATTAGTCTTCCTAATACTTTACAAATGTTTTTGACAAATGGTATTGTTATCTCAACCCTGACAGCTGTTGTTTTAAATATCATTTTGAATGGATTGCCTAAAAAATTAATA

SEQ ID NO: 10930 - protein, 424 aa, Streptococcus agalactiae; identical to SEQ ID NO: 2038

SEQ ID NO: 10931 - protein, 579 aa, Streptococcus agalactiae
ATGAAGTTATTGGAAGAACGTATTCTTAAAGATGGTGATGTTTTAGGTGAGAACATTTTAAAGGTTGATTCTTTTTTGACTCATCAGGTAGATTTTGAGTTAATGCAGGAAATAGGTAAAGTTTTTGCTGATAAATATAAAGAAGCCGGCATTACGAAGGTTGTTACGATTGAAGCATCTGGAATTGCACCAGCAGTGTACGCAGCTCAAGCATTGGGCGTACCAATGATATTTGCTAAAAAAGCTAAGAACATTACTATGACTGAAGGTATCTTAACTGCTGAAGTGTATTCTTTTACAAAGCAAGTTACGAGTCAAGTTTCTATTGTGAGTCGCTTTTTATCTAACGATGATACTGTACTCATCATTGATGACTTTTTAGCAAACGGTCAAGCGGCTAAAGGATTACTTGAAATTATTGGTCAAGCTGGAGCTAAGGTTGCTGGTATCGGAATCGTTATTGAAAAATCTTTCCAAGATGGGCGTGATTTGTTAGAAAAAACAGGTGTTCCAGTTACTTCTCTTGCTCGTATTAAAGCGTTTGAAAATGGTCGAGTTGTTTTTGCGGAGGCTGATGCT

SEQ ID NO: 10932 - protein, 193 aa, Streptococcus agalactiae; identical to SEQ ID NO: 2040

SEQ ID NO: 10933 - protein, 981 aa, Streptococcus agalactiae
ATGTTTAACGATATTCCTGTTTTTGATTATGAAGATATTCAATTAATACCAAACAAGTGTATTATATCTAGCCGCTCACAAGCTGACACAAGTGTCAAACTTGGAAACTATACCTTTAAACTTCCAGTAATCCCTGCTAATATGCAGACTATTATTGATGAAGAGGTAGCTGAAACATTAGCGTGTGAAGGTTATTTTTATATTATGCACCGTTTTAATGAAGAAGAAAGAAAACCTTTTATCAAGCGTATGCATGATAAAGGTTTAATTGCATCGATTTCGGTTGGGGTCAAAGACTATGAATATGACTTCGTGACAAGTCTGAAAGAAGATGCTCCTGAGTTTATCACTATTGATATTGCACATGGCCATTCTAACAGTGTTATAGAGATGATCCAACACATTAAACAAGAGCTTCCAGAAACTTTCGTTATTGCTGGAAATGTAGGAACGCCTGAAGCTGTTAGAGAATTGGAAAATGCAGGTGCAGATGCAACTAAAGTTGGTATTGGACCTGGTAAAGTTTGTATTACTAAAGTCAAGACAGGTTTTGGTACTGGAGGTTGGCAATTAGCTGCCTTACGTTGGTGTTCTAAAGCTGCTCGCAAGCCAATTATTGCTGATGGTGGTATTCGAACACATGGGGATATTGCAAAATCTATCCGCTTTGGTGCTAGTATGGTAATGATTGGTTCGCTGTTTGCTGGTCACCTTGAAAGTCCTGGAAAACTTGTGGAAGTAGATGGACAGCAATTTAAAGAATACTATGGCTCAGCTTCTGAATATCAAAAGGGAGAACATAAAAATGTTGAAGGTAAGAAAATTCTATTACCTGTTAAAGGGCGACTAGAGGATACTTTGACAGAAATGCAACAAGATTTGCAAAGTTCTATTTCTTACGCAGGAGGAAAAGAATTGGATAGCTTGAGACACGTTGATTACGTTATTGTTAAAAATTCTATTTGGAATGGTGATTCCATT

SEQ ID NO: 10934 - protein, 327 aa, Streptococcus agalactiae; identical to SEQ ID NO: 2042

SEQ ID NO: 10935 - protein, 1338 aa, Streptococcus agalactiae
ATGACTAAAAAGGGATGGCGTATTATGCCTGCCATAATTACAACGGCTATATTAGGTTTTTCAGGGATTCTTATTGAAACATCTATGAATGTCACTTTTCCGCTTTTGATGAAAGAATTTGGGGTTAACCCCGCTGTTATTCAATGGGTGACAACAGGAAATTTGTTAGCTGTTGCTGTGACTGTGCCTTTGTCAGCATTTATGATTAAAAATTTATCAGAGAGACAAATTTTTACATTGGCAAATGTGCTTTTTTTATCTGGTGTTTTAATTGATAGCTTTGCCCCTAATTTAGCTATATTGTTAGTAGGGAGAGTCTTGCAAGGTGTTGGGACAGGATTAGCCCTCCCTTTATTGTTTCATATCATTCTTACACAAATCCCGATGGAGCGTAGAGGACTAATGATGGGAGTAGCTGCTATGGTCACACTTTTAGCACCGGCAGTTGGACCTACTTATGGTGGTGTCATTTCAGGAATGTTAGGATGGAAGATGATTTTTATGCTTCTGGCACCAATACTTATCATATCTACCTTTATAGGTTTGGCTTCTATTCCCAAACGTCAAGTAAGAATTAATGATAAACTCAATTTTCCTGCCTTTGTCAGTTTAGGTATTGGCTTGGCAACCCTTCTTTTAGCTATTGAAAAGATGTCTATTTTTTACTTATTAGTAGCTATTGTTAGTTTTGTTATTTTTTACTATTTAAATAAACAGCTAGAATTTTTGAATTTGAATGTTTTTAAAGATAAAGATTTCTCAATCTTATTGTATGGCGTCCTGGCTTTTCAAATGATTCCTCTAGCACTTTCGTTCTTATTACCTAACCTCTTGCAACTTGTTTTACATCAAACTTCAACCAAAGCTGGTTTGTTTATGTTTCCAGGTGCAATAGCAGTAGTTTTTTTATCCCCTTTTGCAGGTTATCTCCTGGATAAAATTGGTGCATTTAAGCCAATTATGATAGGTATCTCCCTTTCTTTGATAGGTTTAATTGGTACAGCTATATTCATTCCTGCGAAGTTTGTTGTAGTACTTTTAGCCTTTGATATTCTTACTAAAATTGGTATGGGGATTGGAGCAAGTAATATGGTTACGACAGCTTTAACAAAACTAAAGCCAGCACAGTCAGCGGATGGTAATAGTATCTTAAATACACTACAACAATTTGCGGGAGCTTTTGCAACCGCAGTAGCCTCACAAATTTTTACCATCGGACAAGTAGCTATTCCGAAAAATGGAGCTATAATCGGTAGTCAATTTGCAGTTCTATTCGTTATCATTGTTGTTATCTTAGCTATTGTAGGATTAACTTATCTTCGAAAAAGAAAAGCAATA

SEQ ID NO: 10936 - protein, 446 aa, Streptococcus agalactiae
MTKKGWRIMPAIITTAILGFSGILIETSMNVTFPLLMKEFGVNPAVIQWVTTGNLLAVAVTVPLSAFMIKNLSERQIFTLANVLFLSGVLIDSFAPNLAILLVGRVLQGVGTGLALPLLFHIILTQIPMERRGLMMGVAAMVTLLAPAVGPTYGGVISGMLGWKMIFMLLAPILIISTFIGLASIPKRQVRINDKLNFPAFVSLGIGLATLLLAIEKMSIFYLLVAIVSFVIFYYLNKQLEFLNLNVFKDKDFSILLYGVLAFQMIPLALSFLLPNLLQLVLHQTSTKAGLFMFPGAIAVVFLSPFAGYLLDKIGAFKPIMIGISLSLIGLIGTAIFIPAKFVVVLLAFDILTKIGMGIGASNMVTTALTKLKPAQSADGNSILNTLQQFAGAFATAVASQIFTIGQVAIPKNGAIIGSQFAVLFVIIVVILAIVGLTYLRKRKAI

SEQ ID NO: 10937 - protein, 690 aa, Streptococcus agalactiae
ATGCTAATACCCAAGAAAATAGTGGCTTTTGCCTCAAATGAATCTGAAAATAATTTCTTTATTACGTTAAAGACTTACTTTAATTATTTGTTTTCTATTCAAATCATTACAGATATTTCAACTCTCAATCATGCAGATTTTGACGGTAGCTTTGCATTCCATGATATAGAAACTAGCATACCTCATCTGGTAATTGACTCCAACTACTTAGCGATTAGTCAGACTAACTCAAAAACAGAGGCTAACGATATTAAAACGTTCTCGGAACTCTCCAAAACAATGACCGAGTTTCACTATATGCTAAATTTTGACTTATTTAACCATCTCCCATATCGTTTTAGATTGCATAATAAGGACGGTCAAACAATTTATTCGAACCATAAACCTGAAGATCCTTTTGATATTTATCCTGAAGAAGAATATCCTATAGACAAATGGGTTCAAAACAGTCTAATAGAGAAAAAAGCGAAAGAGCTACATTTACTCTTACCTGGCGCATCACAAGATTATATTCTAGTACAATCTTATAAACGCTTAGAAAATGATAGTGGGCAACTAGTTGGTTATATTGAACATGTCCATAATATTAAACCACTATTAGAGGGGTATTTAAAAGAATCCGGTCAAGCTATCGTTGGATGGTCTGATGTCACGTCTGGTGCTTCTATCTCTAACGATGATTTTGAACTA

SEQ ID NO: 10938 - protein, 230 aa, Streptococcus agalactiae
MLIPKKIVAFASNESENNFFITLKTYFNYLFSIQIITDISTLNHADFDGSFAFHDIETSIPHLVIDSNYLAISQTNSKTEANDIKTFSELSKTMTEFHYMLNFDLFNHLPYRFRLHNKDGQTIYSNHKPEDPFDIYPEEEYPIDKWVQNSLIEKKAKELHLLLPGASQDYILVQSYKRLENDSGQLVGYIEHVHNIKPLLEGYLKESGQAIVGWSDVTSGASISNDDFEL

SEQ ID NO: 10939 - protein, 159 aa, Streptococcus agalactiae
ATGCTAATGAAATCATCTGTAAAGCATTGGACAGCAACACCAATACGATGGTTTGGTCTACAATTTTCCGAAGTTACAACAGAAGTAGTTCCTTTGATTTTTACAGCTAATCGAGGTCTACCAATTAAAGAAAAAATTGAACTTACAACAACTGGAGAT

SEQ ID NO: 10940 - protein, 53 aa, Streptococcus agalactiae
MLMKSSVKHWTATPIRWFGLQFSEVTTEVVPLIFTANRGLPIKEKIELTTTGD

SEQ ID NO: 10941 - protein, 1821 aa, Streptococcus agalactiae
ATGCAACATGTCAATCATTCTTCTTTTGATAAAGCATCAAAAGCAGGATTTATTATTGCTTTAGGCATTGTTTATGGAGATATTGGTACAAGCCCACTCTATACGATGCAATCATTGGTTGAAAACCAAGGTGGTATTTCTAGTGTCACAGAATCGTTTATCTTAGGTTCTATATCTTTAATCATATGGACCTTGACACTTATTACAACTATCAAGTATGTGCTTGTAGCTTTAAAGGCGGATAATCACCACGAAGGTGGTATTTTTTCTTTATATACCCTTGTTAGAAAAATGACACCTTGGTTAATTGTTCCGGCTGTTATTGGAGGTGCAACCTTGTTGTCAGATGGAGCTTTGACGCCAGCTGTAACCGTAACTTCAGCCGTTGAAGGATTAAAAGTAGTTCCTAGTTTGCAGCATATTTTCCAGAATCAGAGTAATGTTATTTTTGCGACCTTGTTTATTTTACTGTTACTTTTTGCCATCCAAAGGTTTGGAACGGGTGTTATTGGGAAATTATTTGGGCCAATTATGTTTATATGGTTTGCCTTTTTAGGTATTAGCGGTCTCCTTAATAGTTTTGCCCATCCAGAAGTTTTCAAAGCAATTAATCCATACTACGGTTTGAAATTGTTATTTAGTCCAGAGAATCATAAAGGTATTTTTATTTTAGGATCTATTTTCCTGGCGACAACGGGGGCAGAAGCACTATACTCTGACTTAGGTCATGTTGGGCGTGGAAATATACATGTTTCATGGCCGTTCGTTAAGGTTGCCATTATACTTTCTTATTGTGGGCAAGGGGCATGGATTTTAGCTAATAAGAACGCAGGAAATGAATTGAATCCCTTTTTTGCTAGTATTCCTTCGCAATTTACAATGCATGTCGTTATTTTAGCTACTTTGGCAGCTATCATCGCTTCACAGGCACTGATTTCTGGATCATTTACCTTAGTTTCTGAAGCTATGCGACTAAAAATATTCCCACAATTTCGTTCAACTTATCCTGGTGACAATATTGGTCAAACCTACATACCTGTTATTAATTGGTTCTTATTTGCCATTACAACCTCTATTGTTTTGCTTTTTAAGACTTCAGCGCACATGGAAGCAGCATATGGATTAGCGATAACAATTACGATGCTAATGACAACTATTTTACTGTCTTTCTTTTTAATTCAAAAAGGAGTAAAAAGAGGTTTAGTCTTATTGATGATGATTTTCTTTGGTATTTTAGAGGGAATCTTCTTCCTTGCTTCAGCTGTTAAATTTATGCATGGAGGCTATGTTGTTGTTATTATAGCAGTAGCAATTATATTCATCATGACTATCTGGTATAAAGGTAGTAAAATTGTTTCGCGTTATGTTAAGTTGTTGGATTTAAAAGATTACATCGGACAATTAGATAAACTTAGACATGATCATCGTTATCCGATTTATCATACTAACGTTGTTTATTTGACAAATCGTATGGAGGGAGACATGATTGATAAGTCTATCATGTATTCTATCCTTGATAAGCGCCCTAAAAAAGCACAAGTTTATTGGTTTGTAAACATTAAGGTCACTGATGAACCTTATACAGCTGAGTATAAAGTTGACATGATGGGAACCGACTTCATTGTGAAGGTAGAACTTTACCTTGGATTTAAGATGCGTCAGACTGTGTCACGCTATCTTCGTACGATTGTAGAAGAATTACTTGAAAGTGGACGTCTGCCTAAACAAGGAAAGACATACAGCGTTAGACCTGATAGTAAAGTAGGAGATTTTAGGTTTATTGTCCTTGATGAACGTTTTTAGTCAAAACCTAAAACCTGG

SEQ ID NO: 10942 - protein, 609 aa, Streptococcus agalactiae
MQHVNHSSFDKASKAGFIIALGIVYGDIGTSPLYTMQSLVENQGGISSVTESFILGSISLIIWTLTLITTIKYVLVALKADNHHEGGIFSLYTLVRKMTPWLIVPAVIGGATLLSDGALTPAVTVTSAVEGLKVVPSLQHIFQNQSNVIFATLFILLLLFAIQRFGTGVIGKLFGPIMFIWFAFLGISGLLNSFAHPEVFKAINPYYGLKLLFSPENHKGIFILGSIFLATTGAEALYSDLGHVGRGNIHVSWPFVKVAIILSYCGQGAWILANKNAGNELNPFFASIPSQFTMHVVILATLAAIIASQALISGSFTLVSEAMRLKIFPQFRSTYPGDNIGQTYIPVINWFLFAITTSIVLLFKTSAHMEAAYGLAITITMLMTTILLSFFLIQKGVKRGLVLLMMIFFGILEGIFFLASAVKFMHGGYVVVIIAVAIIFIMTIWYKGSKIVSRYVKLLDLKDYIGQLDKLRHDHRYPIYHTNVVYLTNRMEGDMIDKSIMYSILDKRPKKAQVYWFVNIKVTDEPYTAEYKVDMMGTDFIVKVELYLGFKMRQTVSRYLRTIVEELLESGRLPKQGKTYSVRPDSKVGDFRFIVLDERFSSQSKPKTW

SEQ ID NO: 10943 - protein, 757 aa, Streptococcus agalactiae
ATGATATCACGTAAAGTTGCGCTTGTGACGGGGGCATCTGCTGGTTTTGGTGCAGCTATTGTTACTAAATTAGTTTCAGATGGTTATAGCGTTATTGGTTGTGCTCGTCGAATGGATAAATTAAAATGCCTTGGAGAAAAGTTTTCAGAGGGTTACTTTTATCCACTTCAAATGGATATTACAAGTAGAGAATCGGTTGACAAAGCTTTAGAAAGTCTGCCTAAAAATTTGCAATCAATTGATTTGTTGGTTAATAATGCAGGTTTAGCACTTGGATTGGATAAATCATATGAAGCTGATTTTGAAGATTGGATGACTATGATTAATACTAACGTTGTAGGATTAATTTACTTGACACGATGCATTTTACCGAAAATGGTAGAAGTTAATAGAGGGTTAATTATCAATTTGGGATCAACCGCAGGAACAATTCCTTATCCAGGAGCTAATGTCTATGGCGCATCAAAAGCTTTTGTAAAACAATTTTCTCTCAACTTGCGTGCCGATTTAGCTGGAACTAAAATCAGAGTTACTAACCTAGAACCCGGTTTATGTGAAGGGACAGAATTTTCAACTGTACGTTTCAAAGGAGATCATAAAAGAGTTGAAAAACTTTATGAAGTGCGCATGCATTCAAGCAGAGGATATTGCTAATACCGTGTCATGGGTTGCTAGCCAACCAGAACACATTAATATTAATCGCATAGAAATAATGCCAGTCAGTCAAACTTATGGACCTCAACCTGTTTATCGTTAT

SEQ ID NO: 10944 - protein, 253 aa, Streptococcus agalactiae
MISRKVALVTGASAGFGAAIVTKLVSDGYSVIGCARRMDKLKCLGEKFSEGYFYPLQMDITSRESVDKALESLPKNLQSIDLLVNNAGLALGLDKSYEADFEDWMTMINTNVVGLIYLTRCILPKMVEVNRGLIINLGSTAGTIPYPGANVYGASKAFVKQFSLNLRADLAGTKIRVTNLEPGLCEGTEFSTVRFKGDHKRVEKLYEGAHAIQAEDIANTVSWVASQPEHININRIEIMPVSQTYGPQPVYRY

SEQ ID NO: 10945 - protein, 988 aa, Streptococcus agalactiae
ATGCGTTCCTTATTTGGTGGTTTAAGAGAAAAAGTTGCAAGTGATTATGTTAAGATTGTTTCCCTGAGGGAAGCGATGAACGTGTATTACGTGCAGCAGCTCGTTTGAAATTGAAGGTCTTGTGGATCCTGTTATTTTAGGTAAGGCTGACGAAGTTCACGATTCTTTGGCAAGACTTGGTTTTGTTGATCAAGATTATAGCGTTATTGACCCTGAACAATACGAAAAATTTGAAGAGATGAAAGAAGCTTTTGTTGAGATTCGTAAAGGCAAAGCTACTATGGAAGATGCAGATCGTCTTTTGAAGGATGTTAACTATTTTGGGGTTATGTTAGTAAAACTTGGTTTGGCAGATGGTATGGTATCAGGGGCCATTCATTCAACAGCTGATACTGTACGTCCTGCTCTTCAAATTATTAAAACAAAACCAGGAATTTCACGCACTTCAGGTGTATTCTTGATGAACCGTGAAAGTACACAAGAACGTTATATTTTTGCTGACTGTGCTATTAACATTGATCCTAATGCACAAGAGCTAGCAGAAATTGCAGTAAATACTGCGGATACAGCCAAAATATTTGATATTAATCCCAAGATTGCTATGCTTAGTTTTTCAACAAAAGGAAGTGCAAAAGCGCCTCAAGCTGAAAAAGTTCAAGAAGCAGCTAAAATTGCCAAAGATTTATCTCCCGAATTAGCTGTTGATGGAGAATTACAATTTGATGCAGCTTTTGTTCCGGAAACTGCAGAAATTAAAGCTCCTAATAGTGATGTTGCTGGAAAAGCAAATGTTTTTATTTTCCCAGACCTTCAATCAGGAAATATTGGCTATAAAATTGCACAACGTTTGGGTATGTTTGAAGCAATCGGACCGATCTTACAAGGATTGAATGCTCCAGTAAATGATTTATCACGTGGATCAAGTGCTGAAGATATTTACAAACTTGCTATCATTACAGCTGCTCAAGCTATTGATGAGAAATCAAAA

SEQ ID NO: 10946 - protein, 330 aa, Streptococcus agalactiae
MRSLFGGLREKVASDYVKIVFPEGSDERVLRAAARLKFEGLVDPVILGKADEVHDSLARLGFVDQDYSVIDPEQYEKFEEMKEAFVEIRKGKATMEDADRLLKDVNYFGVMLVKLGLADGMVSGAIHSTADTVRPALQIIKTKPGISRTSGVFLMNRESTQERYIFADCAINIDPNAQELAEIAVNTADTAKIFDINPKIAMLSFSTKGSAKAPQAEKVQEAAKIAKDLSPELAVDGELQFDAAFVPETAEIKAPNSDVAGKANVFIFPDLQSGNIGYKIAQRLGMFEAIGPILQGLNAPVNDLSRGSSAEDIYKLAIITAAQAIDEKSK

SEQ ID NO: 10947 - protein, 882 aa, Streptococcus agalactiae
TTGAAATTTGAATACATAGCAGAAGAAAGGTGCAAAGTTAAAACACTTTTGAAAAGTCATGATGTTTCAAGGGGGTTATTAGCAAAGATTAAGTACAGAGGTGGTAAGATTTTTGTCAATGGTGAAGAGCAGAACGCTATTTTCTTATTAGAGATTGGCGATGTTGTTACGATAGATATTCCTGACGAGCCTTCTCACGAAACTTTGGAACCAGTACCTCACGATTTAGATATTGTTTATGAGGATGATCATTTTTTGATTTTAAATAAACCTTTTGGTTTCGCTAGTATTCCTAGCTCTATTCATTCAAATACAATTGCTAATTTTATAAAACACTATTATGTGTCTAATAACTATGCCAATCAGCAGGTCCATATTGTGACCCGGTTGGATCGAGATACAAGTGGATTAATGTTATTCGCCAAGCATGGTTATGCCCATGCTCGTCTAGATAAACAACTTCAGGCTAAAGCAATTGAAAAAAGGTATTATGCATTAGTATCAGGGAGTGGTGATTTAGCAGATAGTGGTGATATTATAGCTCCTATTGCACGAGATGTTGATAGTATTATTACGAGGCGAGTCCATGAATCAGGCAAATATGCACATACTAGTTATCAAGTAGTTGCTCGTTATGGTGATGTTAGATTAGTGGATATCAAATTACATACAGGGCGTACTCATCAAATTAGAGTTCACTTTGCTCATATCGGCTTTCCTCTTTTGGGAGATGATTTGTACGGAGGACGTATGGATCTAGGAATAAACAGGCAAGCATTGCATTGTCATTCTTTGTCTTTTTACGACCCTTTTATGGGAAAAATAAATAAACAGACGCTAGACTTGACAGATGACTTTGACAGCGTTATCATGGAATTACAT

SEQ ID NO: 10948 - protein, 294 aa, Streptococcus agalactiae; identical to SEQ ID NO: 6650

SEQ ID NO: 10949 - protein, 270 aa, Streptococcus agalactiae
TTGCAACTAACAGAAATTTCTAGTCTTAATAATCGCGTCTATCGTACCTTGGGGTCATCGGTTATCATCCCCAAAAAAGATGCTATAGAGATAGTTCCTAAACGAGTTGGTGTCTATACAATTTCTATAGATAACAAAACGGTCCATTACAAAAATGTTACCAAAATAGAATATAGTATTGACGAAAAAAGTATTAACTTTGTTTCAACTCCAAGTCACACTAGCTTTTGGGAACGTGTTAACGATGCTTTTATCGGAGAACCTGAACAT

SEQ ID NO: 10950 - protein, 90 aa, Streptococcus agalactiae
MQLTEISSLNNRVYRTLGSSVIIPKKDAIEIVPKRVGVYTISIDNKTVHYKNVTKIEYSIDEKSINFVSTPSHTSFWERVNDAFIGEPEH

SEQ ID NO: 10951 - protein, 484 aa, Streptococcus agalactiae
ATGACACAGATGAATTTTACAGATAGAGCAACACGTGTTGCTATAATTGCTAACGGAAAATATCAAAGCAAGCGTGTAGCCTCAAAGCTCTTTGCTGCTTTTAAACATGATCCTGATTTTTATTTATCAAAAAAGGATCCTGATATTGTCATTTCTATTGGTGGAGATGGTATGCTTTTGTCAGCCTTCCATATGTACGAAAAACAACTGGATAAAGTAAGGTTTGTCGGTGTTCATACAGGACATTTAGGGTTTTATACAGACTATCGAGATTTTGAAGTTGACACATTAATTAATAATTTGAAAAATGATGAAGGTGAACAAATCTCCTATCCCATTTTGAAAGTAACTATTACCCTTGAAGATGGTCGAGTTATTCGTGCGCGTGCTTTAAATGAGTCTACTATTAAGCGTATTGAAAAAACAATGGTAGCGGATGTTGTATTAATCAAGTGGTATGAAAGGTTTAGGGGAGATGGCATTT

SEQ ID NO: 10952 - protein, 162 aa, Streptococcus agalactiae
MTQMNFTDRATRVAIIANGKYQSKRVASKLFAAFKHDPDFYLSKKDPDIVISIGGDGMLLSAFHMYEKQLDKVRFVGVHTGHLGFYTDYRDFEVDTLINNLKNDEGEQISYPILKVTITLEDGRVIRARALNESTIKRIEKTMVADVVINQVVLKGLGEMAF

SEQ ID NO: 10953 - protein, 669 aa, Streptococcus agalactiae
ATGTCAATGGATTGGGAAACATTTCTAGACCCTTATATTCAAACGGTTGGTGAATTAAAAATAAAGCTTCGTGGTATTCGTAAACAATTTAGAAAGCAAAATCGTCACTCTCCAATAGAATTTGTTACTGGACGCGTAAAGTCGGTTGAAAGTATTCAAGAAAAGATGGTTTTACGTGGTATTTCAGAAGAAAATCTTGCTCAGGACTTGCAAGATATTGCAGGTCTTCGTATCATGGTACAATTTGTAGATGACGTTGATGAAGTCCTTGCCTTATTGAGAAAACGTCATGACATGACAGTGGTTCAGGAGCGAGACTATATTACCCATATGAAATCTAGTGGATATCGTTCATATCATGTCGTTGTAGAGTATCCTGTAGACACAATAGATGGACAAAAGAAAGTTTTAGCAGAAATACAAATTAGAACTCTGGCTATGAATTTTTGGGCAACCATCGAACATTCATTAAATTACAAGTATCAGGGGGACTTCCCTGAAGAAATTAAACAAAGACTGGAGAAAACAGCAAAAATCGCTTTAGAATTGGATGAAGAAATGCGTAAGATTCGCGAAGATATTCGTGAAGCACAGCTTTTATTTGATCCTTTAAATCGAAAATTGAGCGATGGTGTAGGAAATAGTGATGACACAGATGAATTTTACAGA

SEQ ID NO: 10954 - protein, 223 aa, Streptococcus agalactiae; identical to SEQ ID NO: 2064

SEQ ID NO: 10955 - protein, 570 aa, Streptococcus agalactiae
ATGACACACCTAGAAATTGAATACAAAACTCTATTGAATAAAGACGAATTTAATCGTCTAACAAGCTTATTTTCTCATGTTCAACCTATTACTCAAACCAATTACTATTTTGACACAGAAACATTTGAAATGAAAGCACACCGAATGTCACTTCGTATTAGAACGTTACCTAACCGTGCCGAACTAACACTAAAAATCCCTAGAGAAGTGGGAAATTTAGAGCACAATCATGGCCTTACTTTAGAAGAAGCTAAATATATCGTTAAAAATGGCCAGTTCCCTGAAGATACTGAGATTGCTTCTTTAATCCTTGAAAAGGGAGTTGATCCAACCAAATTAGTTGTCTTTGGACAACTTACAACAACAAGACGAGAGATGGAAACTTCAATCGGCTTAATGGCTCTAGACAGCAATATATATGCTGATATTAAAGATTATGAACTTGAGTTAGAAGTCAAACAACCTAAACAAGGGAAAAGAGATTTCGACCAGTTTTTAAAAGAAAATAATATTAATTTTAAATACGCCAAAAGTAAGGTGGCTAGATTCTCTGCTACTTTAAAGAATAAC

SEQ ID NO: 10956 - protein, 190 aa, Streptococcus agalactiae
MTHLEIEYKTLLNKDEFNRLTSLFSHVQPITQTNYYFDTETFEMKAHRMSLRIRTLPNRAELTLKIPREVGNLEHNHGLTLEEAKYIVKNGQFPEDTEIASLILEKGVDPTKLVVFGQLTTTRREMETSIGLMALDSNIYADIKDYELELEVKQPKQGKRDFDQFLKENNINFKYAKSKVARFSATLKNN

SEQ ID NO: 10957 - protein, 972 aa, Streptococcus agalactiae
ATGGCAGAACAATACGCCGATAAACAAATCAAACTTTTCTCATTAACCGCTAATAGAGAAATTGCTGAAAAAATTTCCCAAGCTTCAGGAATTCCTTTGGGTAAGATGTCATCACGTCAATTCTCTGATGGCGAAATTATGATTAATATTGAGGAAACGGTGCGCGGTGACGATATCTATATCATCCAATCTACAAGCTTCCCAGTCAATGATAATCTCTGGGAATTACTCATTATGATTGACGCTTGCAAACGTGCAAGTGCTAATACTGTTAACATCGTAGTCCCTTATTTTGGTTACTCTCGTCAGGACCGCATCGCTGCATCTCGTGAACCTATTACTGCAAAATTGGTCGCTAATATGTTAGTTAAAGCTGGAGTTGATCGAGTTCTTACCCTCGACTTACATGCAGTACAAGTACAAGGGTTCTTCGATATCCCAGTTGACAATCTTTTTACTGTCCCACTATTTGCTGAACACTATAATCAACTCGGTCTCTCTGGTGAAGATGTCGTCGTTGTTAGTCCTAAAAATTCTGGAATCAAGCGTGCTCGTAGTTTGGCAGAATACCTTGACTCTCCAATTGCTATCATTGATTATGCACAAGATGATTCTGAACGTGAAGAAGGCTATATTATTGGTGAGGTAGAAGGTAAGAAAGCTATTATTATTGATGATATTTTAAATACAGGAAAAACCTTTGCCGAAGCTGCAAAAATTTTAGAACGTGGTGGAGCAACTGAGATTTATGCTGTTGCTAGTCATGGGCTTTTTGCTGGCGGCGCAGCTGATATTTTAGAGTCTGCACCAATTAGAGAAATTATCGTAACAGACTCTGTTTTATCTAAAGAGCGTATTCCTAGCAATATTAAATATCTGACAGCTAGCCATCTCATTGCAGATGCTATTATCCGTATCCATGAAAGAAAACCTTTAAGTCCATTATTTTCATATCGTTCAGATAAGAAGGAT

SEQ ID NO: 10958 - protein, 324 aa, Streptococcus agalactiae; identical to SEQ ID NO: 2068

SEQ ID NO: 10959 - protein, 1113 aa, Streptococcus agalactiae; identical to SEQ ID NO: 6659

SEQ ID NO: 10960 - protein, 371 aa, Streptococcus agalactiae; identical to SEQ ID NO: 6660

SEQ ID NO: 10961 - protein, 345 aa, Streptococcus agalactiae
ATGGCATTTGAAAAAGAAATAAATCTTCCAGACTGCAATTACATTTATACTATCAGCCCGAACATTAAAAAATATACCTTACGCGATACTACATTCACTCAAAATCGCTTAGGTAATTATGAATTAGAGCGTCTCCTAGAAACAGTACCTAATTCTGGCGATGGCTTTCCTCTAAAGATTACAATCAATAAAGAACTTTCTGGTTTTAAGCTCTTAATTACTGATAAATCTGGCCTTAGAATAGTAAATATCTTTAAATCTACCGATCATAAAATTCTTCAAGACAAATTTTATTTCTTAATGGACAGCCTTGTTGAGCGTGATATCTTTACGAAAACTGCAAAA

SEQ ID NO: 10962 - protein, 115 aa, Streptococcus agalactiae; identical to SEQ ID NO: 6662

SEQ ID NO: 10963 - protein, 630 aa, Streptococcus agalactiae
ATGGATAAGTCTATTCCTAAAGCAACTGCTAAACGTTTATCACTGTACTACCGTATTTTTAAACGTTTTAATACTGATGGCATCGAAAAAGCTAGTTCCAAACAAATTGCAGATGCCCTAGGTATCGATTCTGCTACTGTTCGACGTGATTTTTCTTATTTTGGTGAACTAGGACGCCGTGGTTTTGGTTATGATGTCAAAAAACTTATGAACTTCTTTGCAGAAATATTGAACGATCATTCTACAACAAATGTTATGTTGGTGGGATGTGGAAATATCGGTAGAGCTCTCTTGCATTATCGTTTCCACGATCGCAATAAAATGCAAATTTCAATGGCTTTTGATTTAGATAGCAATGATTTAGTTGGTAAAACAACCGAGGATGGCATTCCTGTCTACGGTATTTCGACTATCAATGACCATTTAATAGATAGTGATATTGAAACTGCTATCCTAACAGTACCTAGTACAGAAGCCCAAGAAGTTGCTGACATCTTAGTCAAAGCAGGTATAAAAGGCATCTTGAGTTTTTCTCCAGTTCATTTAACATTACCAAAAGATATCATTGTTCAGTATGTAGATTTAACAAGCGAATTACAAACTTTACTTTATTTCATGAACCAGCAGCGA

SEQ ID NO: 10964 - protein, 210 aa, Streptococcus agalactiae; identical to SEQ ID NO: 2074

SEQ ID NO: 10965 - protein, 678 aa, Streptococcus agalactiae
ATGTACCATATTGAATTAAAAAAGGAAGCTTTACTACCAAGAGAACGCCTAGTTGATTTAGGCGCAGATAGATTGAGTAATCAGGAGTTATTAGCCATTCTCTTACGTACAGGTATTAAAGAAAAACCTGTTCTTGAAATTTCAACGCAAATTTTAGAAAACATAAGCAGTTTAGCAGATTTTGGTCAATTATCCTTACAGGAGTTGCAATCCATTAAAGGAATCGGTCAGGTTAAATCCGTCGAAATAAAAGCTATGCTAGAACTAGCAAAACGGATTCACAAAGCTGAATATGATCGTAAAGAGCAAATTTTAAGTAGTGAACAATTAGCGAGGAAAATGATGCTCGAATTAGGGGATAAAAAACAAGAACATTTAGTAGCTATTTATATGGATACACAAAATCGTATTATCGAACAGAGAACTATTTTTATTGGTACTGTACGTCGTTCAGTAGCAGAGCCAAGAGAAATTCTACATTATGCTTGTAAAAACATGGCAACTTCTTTGATTATTATACATAATCATCCCTCAGGTTCTCCAAATCCCAGTGAAAGTGATTTAAGTTTCACTAAAAAAATAAAACGATCATGTGATCATCTGGGAATTGTCTGCCTAGATCACATCATCGTTGGAAAAAATAAATATTATAGTTTTCGAGAAGAAGCAGATATTTTA

SEQ ID NO: 10966 - protein, 226 aa, Streptococcus agalactiae; identical to SEQ ID NO: 2076

SEQ ID NO: 10967 - protein, 1131 aa, Streptococcus agalactiae
ATGAAATTTGAAAAACGGCAGGTCTATTATGTTGTCATAACATTTGCTATTTGCTATGCTATACAGGCTTATTGGGGAGCTGTTTCTAATATTTTAACTACGCTTCATAAGGCAATATTTCCTTTTTTGATGGGAGCTGGAATTGCCTATATTATTAATATTGTAATGTCAGTCTATGAGCGATTATATATAAAGCTTTTTAAAGGATCTAGACTATTAATGGCAATCAAGCGTAGTGTTTCTATGATTTTATCCTATGCAACTTTTATTGGTTTAATTGTCTGGCTATTTTCAATTGTCATTCCAGATTTGATTTCTAGTTTGAGTTCTTTATTGGTTATTGATACCGGAGCACTTGCTAAATTGGTTAATAATCTCAATGAAAATAAACAAATTTCTGAGGCTTTAAATTATATGGGAACAGATAAAGACTTAGTTTCTACTTTAAGTGGTTATAGCCAGCAGATTTTGAAGCAAGTTTTATCTGTTTTAACAAATTTACTAACCTCAGTTTCCTCTATTGCGGCAACACTTCTGAATGTTTTTGTTAGTTTTATTTTTTCAATTTACGTTTTGGCAAACAAGGAGCAGTTGGGACGTCAATTTAATTTGTTAATTGATACCTATTTAGGTTCAACAGGCAAAACATTCCATTACGTTCGTCATATCCTTCATCAACGTTTCCATGGTTTTTTTGTAAGCCAAACTTTAGAAGCTATGATTTTAGGAAGTTTGACGGTTATTGGTATGTTGATTTTCCAATTTCCTTATGCTTTAACAGTTGGGGTTTTAGTTGCTTTTACAGCTCTAATACCGGTTGTGGGAGCCTACATTGGTGTTACAATCGGTTTCATCTTAATTGCTACTGAATCGCTTACTGAAGCATTCTTGTTTGTTCTTTTCTTGATCCTTTTACAACAATTTGAGGGAAATGTCATTTATCCGAAAGTTGTCGGTGGATCGATTGGACTGCCTTCTATGTGGGTTTTAACGGCTATTACTATCGGAGGTGCTTTATGGGGGATCTTAGGCATGTTACTTGCTGTTCCTGTTGCAGCTACTATCTATCAGATTGTAAAAGATCATATTATCAAGCGACAAACGCTTAGAAATCGTGCACGAACCTATCGT

SEQ ID NO: 10968 - protein, 377 aa, Streptococcus agalactiae; identical to SEQ ID NO: 2078

SEQ ID NO: 10969 - protein, 1434 aa, Streptococcus agalactiae
ATGGTAAAACAAGTATTTCCAAAAGGTTTTTTATGGGGCGGGGCAACTGCTGCCAATCAATGTGAAGGAGCTTACAATGTTGATGGACGTGGCCTAGCAAATGTAGATGTTGTTCCTACTGGAGAAGATCGATTTGCAATTATTTCAGGACAAAAGAAAATGTTTGATTTTGAGGAAGGATACTTTTATCCAGCAAAAGAATCAATAGATTTTTATCATCATTATAAAGAAGACCTTGCATTACTTGCAGAAATGGGTTTCAAAACCTATCGTATGTCAATAGCATGGACGCGTATTTTTCCAAAGGGTGATGAGCTATATCCAAATGAAGCTGGTCTTCGGTTTTATGAAAATATTTTTAAAGAGTGTCGTAAGTATGGTATTGAACCTTTGGTAACCATCACACATTTTGACTGTCCTATCTACCTTATTAAACATTACGGTGGGTGGCGGAGCCGTAAAATGATTGGTTTTTATGAGCGCCTTGTACGAGCTTTATTTACTCGTTTTAAGGGGTTAGTTAAATATTGGTTGACCTTTAACGAAATCAATATGATTTTACACGCTCCTTTTATGGGCGCTGGCTTATATTTTGAAGATGGTGAAAATCAAGAGCAAATTAAATATCAAGCAGCTCACCATGAGTTAGTGGCTTCGGCTATTGCAGTAAAAATTGCTCATGAAGTTGATCCAAATAATCAAATCGGATGTATGTTAGCTGCAGGTCAATACTATCCAAATACGTGTCATCCACAAGATTATTGGGCTTCGATGCAAAAAAATAGAGAAAATTATTTTTTTATTGATGTGCAAACGCGTGGCAAATACCCTAATTATGCTAAAAAATATTTTGAGCATTTAGGTATTTCAATTCAAATGACAGCAGAAGATCTTGCTTTGTTAAGAGACTATACGGTTGATTTTATTTCATTTTCTTACTATTCAAGCCGAGTAGCTTCAGGTAATCCAACTGTCAGTGAACAGGTTCAAGAAAATATTTTCGCATCTCTTAAGAATCCTTACTTGAAATCTTCTGAATGGGGATGGCAAATTGATCCGCTTGGATTACGCATTACCTTAAATGCTATCTGGGATCGTTATCAAAAACCGATGTTTATTGTTGAAAATGGACTTGGAGCAGTAGATATTCCTGATGAGAATGGTTACGTAGAAGATGATTATCGTATTGATTACCTCCGTCAGCACATTGCTGCAATGAGAGATGCTATATATGTAGATGGTGTTAATCTAATTGGCTATACTACATGGGGATGTATTGATTTAGTATCTGCAGGAACTGGTGAAATGGAAAAACGCTATGGTTTCATTTATGTTGATCGCAATAATAAAGGAGAGGGAACACTCAAGCGTTACAAGAAAAAATCGTTTTATTGGTACAAGAAGGTTATTGCAAGTAATGGCAGTCAAATAGAA

SEQ ID NO: 10970 - protein, 478 aa, Streptococcus agalactiae; identical to SEQ ID NO: 2080

SEQ ID NO: 10971 - protein, 612 aa, Streptococcus agalactiae; identical to SEQ ID NO: 6671

SEQ ID NO: 10972 - protein, 204 aa, Streptococcus agalactiae; identical to SEQ ID NO: 6672

SEQ ID NO: 10973 - protein, 795 aa, Streptococcus agalactiae; identical to SEQ ID NO: 6673

SEQ ID NO: 10974 - protein, 265 aa, Streptococcus agalactiae; identical to SEQ ID NO: 6674

SEQ ID NO: 10975 - protein, 927 aa, Streptococcus agalactiae
ATGAACTCACTTGATAATTTACTATCACATAATTTAGAAGATAACCGGCATTTATTACCCTATGAACACATGCATACTGAGGTTAGAAATGGTTACCCTGACATTTTATTTCACTGGCATCCGGAACTTGAAATTTCATATGTCCACGAGGGGACCGCACGTTATCACATCGATTATGATTTTTTTAATAGCCAATCTGGTGATATTATCTTGATCCGTCCAAATGGTATGCATTCTATTCATCCGATTGAAAATAAAGAGCATATCACAGATAGCATTAAATTTCACTTAGATTTAATAGGATATTCTATTGTAGACCAAGTTAGCCTTCGTTATTTACAACCGTTGCAGACTAGCTCTTTTAAGTTTATTCAATGTATCAAACCTAGTATGACAGGATATAATGATATCAAAAATTGTTTGTTTGATATTTTTAATATTTCAAAAGAAGAAAATCGACATTTTGAGCTACTCCTAAAAGCTAAATTAAACGAACTCTTGTATTTACTCTATTATCATCAATATGTCATTAAAAAACATACTGATGATACCTACAGAAAAAACGAGAGAATTCGTGATCTGATTGATTATATTAATAATAATTACCAGCAAAATCTTACCATTGAATTTTTAGCTGATTATATGGGGTATAGTAAGACACATTTTATGACCGTATTTAAACAGCATACTGGAACATCCTGTACAGAATTTATCATACAAGTTCGTCTTAATAAAGCTAGTGAGCATCTTATTAACTCCACTACGGCCATTATTGATATTGCCAACAGCGTTGGTTTTAATAATCTATCAAATTTTAATCGCCAATTTAAACGCTATTATCATACAACTCCTCGCCAGTACCGCAAACAATTTACCAACAAAAAAGACGGTAGTACGCTTGTCTATAGAAATATAAATACAAAAAAA

SEQ ID NO: 10976 - protein, 309 aa, Streptococcus agalactiae; identical to SEQ ID NO: 2086

SEQ ID NO: 10977 - protein, 1530 aa, Streptococcus agalactiae
ATGGAAAATCATAAAAATGAATTTCAGTTTTCACTTGAATCAATTCTGGGATTTGTTTGGAGAGGAATAGTAGTAGGCTTAATATCAGGATTTGTTGTCAGCATATTTCGATTAGCGATTGAAAAAATTTTTTTAGTTGTTATGGAACTTTATAAAAGTGCCCATTATCAACCAATTATTTTATTGAGCATTACGGTTACTAGTATTATCGCTGCAGTGATAATAGGTTTTTTTATCAAATCTGATCCTGATATTAAAGGTTCAGGTATCCCGCATGTTGAAGGTGAACTTAAAGGAATGCTATCGCCAGACTGGTTTAGTATTGTATGGAAGAAATTCATTGCGGGTATTTTAGCTATTTCTTCGGGACTTATGCTTGGTCGCGAAGGTCCCAGTATTCAGTTAGGAGCTATGACAGGTAAGGGAATTGCACAGTATCTCAATGCTAGTCGAATGGAAAAACGTGTTTTAATTGCTAGTGGTGCAGCAGCAGGTCTTTCAGCAGCCTTCAATGCTCCTATTGCAGGCCTTTTATTTGTAGTTGAAGAAATTTACCATCATTTTTCTCGCTTAGTTTGGATAACAGCTTTGGTAGCAAGTTTAGTGGCAAACTTTGTCTCACTTAATATCTTTGGTTTAACCCCAGTTTTAGCTTTACCATCAGAATTACCATCTTTAAATCTCAACTTTTATTGGATTTTTTTACTCATGGGTCTCTTTTTGGGTATCTTAGGCTTTATCTATGAGTGGGTAATTTTGAGATTTCATGTGATCTATGATTATTTAGGTAAACTATTTCATCTACCATCTCACCTATATGGTATATTAGCGGTAATTTTTATTCTTCCTATTGGTTACTATTTCCCACAATTATTGGGGGGTGGAAATGGCTTAATTGTATCACTGCCTAGGAGTAATCTTAGTCTGATGATGTTAGGATTATTTTTCCTCATTCGTTTTTTATGGAGTATGTTGAGTTACAGTAGTGGCTTGCCAGGAGGAATTTTTTTACCAATTCTAGCTTTAGGATCTTTAGCAGGTGCTTTTTTTGCAGTAGGTATGCAGTACTTTGGTATAATATCTCATCAGCAGATATCTTTATTTGTTGTTCTAGGAATGGCGGGCTATTTTGGTGCAATCTCAAAAGCACCACTAACAGCTATGATTTTGGTTACAGAAATGGTTGGCGATTTAAAACAATTAATGGCTATTGGAATTGTAACAATGGTATCTTATATTGTCATGGATTTATTAAAGGGAGAACCTATTTATGAAGCGATGTTGGCTAAAATGACCTTCAATCCAAAAGATAAAGTAATGACACCTACATTGATTGAATTAACTGTTTCAGATAAAATATCAGGAAAGTATGTCCGAGATTTAGAATTACCAGAAAATGTGCTAATAACGACTCAAATTCATCATAAGACATCGGCTGTAGTATCAGGAAATACTATCTTGAATGCTGGTGACACCATTTTTTTAGTTGTGAATGAATCGGAAATTAAAGAAGTACGTGAGCAGCTGATG

SEQ ID NO: 10978 - protein, 510 aa, Streptococcus agalactiae; identical to SEQ ID NO: 2088

SEQ ID NO: 10979 - protein, 1071 aa, Streptococcus agalactiae
ATGCGTAGAGTTTATTCCTTTTTAGGCGGTATTATTCTTGTTATCCTGATCCTCTTTGGTTTAACCACTTACTTAGAAAAGAAGAGTAGTTCAACACCTAACTCAGATAAGTTAGTTATTTATAACTGGGGAGACTATATTGATCCAGCCTTATTAAAAAAATTTACAAAAGAAACTGGAATTGAAGTACAATACGAAACGTTTGACTCTAATGAGGCTATGCACACCAAAATTAAGCAGGGTGGGACGACATATGATATTGCTGTACCTAGTGATTATATGATTGACAAAATGATAAAAGAAAACCTTCTGGTTAAACTTGATCATTCAAAGATAGCTAATTGGGATGCTATTGGAGCTAGGTTTAAAAATTTGAGTTTCGATCCTAAAAATAAATATTCGATTCCTTATTTTTGGGGAACTGTTGGGATTGTTTATAATGATCAATTAGTTAAAACTCCTCCTAAACATTGGGATGATTTATGGCGTCCAGAGTTTCGAAATAAAATCATGCTAGTTGATAGTGCACGTGAGGTTATTGGAGTTGGTTTAAATTCCTTGGGATATGGATTGAATACAAAGAACATATCAGAATTAAAAGCCGCTTCTAAAAAGTTAGATGCTCTAACACCAAACGTTAAGGCTATTGTTGCTGATGAGATGAAAGGCTATATGATTCAGGGAGATGCAGCGATTGGTGTTACATTCTCTGGAGAAGCACGAGAAATGCTTGATGGGAACAAGCATTTGCATTACGTTGTTCCTAGTGAAGGATCGAACCTTTGGTTTGATAATATTGTAATCCCCAAAACAGTAAAGCATCGCAAAGAAGCTTATGCCTTTATTAATTTCATGATGGAACCTAAAAATGCGGCACAAAATGCAGAATATATTGGTTATGCGACCCCTAATCTCAAAGCAAAAGCGCTGTTACCAGCAGATATCAAAAATGATAAAGCATTTTATCCTCCTGATAAAACAATTGATCATTTAGAAGTTTATAATAACTTGGGTCAAAAATGGCTTGGTATTTATAATGATTTGTACTTACAATTTAAAATGTATCGTAAG

SEQ ID NO: 10980 - protein, 357 aa, Streptococcus agalactiae; identical to SEQ ID NO: 2092

SEQ ID NO: 10981 - protein, 774 aa, Streptococcus agalactiae; identical to SEQ ID NO: 6683

SEQ ID NO: 10982 - protein, 258 aa, Streptococcus agalactiae; identical to SEQ ID NO: 2094

SEQ ID NO: 10983 - protein, 792 aa, Streptococcus agalactiae
ATGAAGAAAACCTCTAGTCTATTTTCAATTCCTTATATGGCTTGGTTATTCTTATTTGTATTAGCACCTGTTGCTTTGATTGCTTGGAACTCGTTCTTTGATATTAATGGGCACTTTACTTTAGCTAATTACCAGACGTTTTTTAGCTCAGGAACCTATCTTAAAATGAGCTTTAACTCGGTCCTATATGCAGGCATCGTTAGTTTCATAACGCTTTTGATTAGCTATCCAGCTGCTTATTTGCTTACAAAATTAAAACACAAGCAATTATGGCTAATGCTAGTTATTTTGCCAACATGGATTAATCTTTTGTTAAAAGCCTATGCTTTTATGGGGATATTTGGTCAACAAGGGGGAATTAACGCCTTCTTAACCTTTATAGGTATCGGCCCAAAACAGATTCTATTTACAGATTTTTCATTTCTTTTTGTAGCAGCTTACATTGAATTACCGTTTATGTTATTACCCATTTTTAATGCCTTGGATGATATTGATCAAAATCTCATTTATGCAAGTGATGACTTGGGTGCAAATGCATGGCAAACTTTTCAGAAGGTTATATTTCCTCTATCTCTGAATGGTGTAAGAGCAGGTGTACAATCTGTCTTTATTCCTAGTTTAAGTCTCTTTATGCTTACGCGTCTTATTGGTGGTAATCGAGTTATTACTTTAGGGACAGCCATAGAACAACATTTTTTAATCACACAAAATAAAGGTATGGGCTCAACCATAGGGGTTATTTTAATTTTAGTGATGGTTGCTATTATGTGGTTAACAAAGGAGAGGAAAGCA

SEQ ID NO: 10984 - protein, 264 aa, Streptococcus agalactiae; identical to SEQ ID NO: 2096

SEQ ID NO: 10985 - protein, 1152 aa, Streptococcus agalactiae
TTGACTAACCCAATCATTGCATTTAAAAATGTATCAAAGGTATTCGAAGACAGCAACACGGTTGTCTTAAAAGATATTAATTTTGAACTTGAAGAAGGTAAATTTTACACCTTATTAGGGGCCTCAGGAAGTGGTAAATCAACTATCTTAAATATTATTGCAGGTTTGCTAGAGGCGAGTACAGGCGATATTTACTTAGATGGGAAACGCATCAATGATGTTCCCACTAATAAACGGGATGTTCATACCGTTTTCCAAAACTATGCTTTGTTTCCACATATGACGGTTTTTGAAAACGTTGCTTTTCCATTAAAGTTGAAAAAAATGGATAAGAAAGAAATTCAAAAACGTGTTCAAGAAACTCTAAAAATGGTTCGTTTAGAAGGGTTTGAAAAGCGAGCTATTCAAAAATTATCAGGAGGACAACGCCAGCGTGTTGCGATAGCGCGTGCTATCATCAATCAACCTAAAGTAGTCTTACTAGATGAACCCTTATCAGCATTGGATTTGAAATTGCGTACAGAGATGCAATATGAATTGCGCGAACTGCAACAACGTTTAGGAATTACCTTTGTTTTTGTCACACATGATCAAGAAGAAGCGTTGGCAATGAGTGATTGGATTTTCGTCATGAATGAAGGTGAAATTGTTCAATCAGGAACACCAGTAGATATCTACGATGAACCTATCAATCATTTTGTAGCAACTTTTATAGGTGAATCAAATATCTTATCTGGCAAGATGATTGAGGATTATTTGGTTGAATTTAACGGTAAGCGCTTTGAGGCTGTTGATGGCGGTATGCGCCCTAATGAATCAGTCCAAGTAGTTATTCGTCCAGAAGATCTTCAAATTACCCTACCCGATGAAGGAAAACTTCAAGTTAAAGTGGACACACAACTTTTTCGAGGTGTCCACTATGAAATTATTGCTTATGATGATTTAGGTAATGAATGGATGATTCATTCAACTCGTAAAGCTATTGAGGGTGAAGTTATTGGGTTAGATTTCACTCCAGAAGATATACATATTATGCGTCTTAATGAAACAGAAGAAGAATTTGATGCGCGCATTGAAGAATATGTAGACACTGACGATCATGAAGATGGTTTAATCAATGCTATCGAGGAGGAGAGAAATGAAGAAAACCTC

SEQ ID NO: 10986 - protein, 384 aa, Streptococcus agalactiae; identical to SEQ ID NO: 2098

SEQ ID NO: 10987 - protein, 900 aa, Streptococcus agalactiae
ATGATTAAAACAATACAAAAAGAATTAGAAGGTCTCGATATTCGCTTTGATGAGCCTTTAAAGAAATATACTTATACTAAAGTAGGAGGACCTGCTGATTATCTTGCATTCCCAAGGAATCGCCTTGAACTATCGCGTATTGTTAAGTTTGCTAACAGTCAAAATATTCCTTGGATGGTTTTAGGAAATGCGAGTAATATTATCGTTAGAGATGGTGGTATCCGTGGTTTTGTTATCATGTTTGATAAACTGTCAACTGTTACAGTCAACGGTTATGTTATTGAAGCAGAAGCAGGAGCTAATCTCATTGAAACAACTCGTATTGCACGTTATCATAGTTTAACTGGCTTTGAGTTTGCTTGCGGAATTCCTGGAAGTGTAGGTGGAGCAGTCTTTATGAATGCTGGCGCTTACGGTGGTGAAATTGCTCATATTTTATTGTCTGCACAAGTTTTGACACCACAGGGTGAACTCAAAACGATTGAAGCTAGGAATATGCAATTTGGTTATCGTCATTCTGTCATTCAAGAGAGTGGAGATATTGTTATATCAGCTAAGTTTGCCTTAAAACCAGGAGATCATCTCATGATTACTCAGGAAATGGATCGTTTAACCTATCTCCGTGAGCTGAAACAACCTTTAGAATACCCTTCTTGTGGTTCTGTGTTCAAACGTCCTCCAGGACATTTTGCAGGGCAACTCATTAGCGAAGCACATCTTAAAGGTCAACGTATTGGTGGAGTAGAGGTTAGTCAAAAACATGCTGGTTTTATGGTTAACATTGCAGAAGGTTCAGCTCAAGATTATGAAAATCTTATTGAACATGTTATTAACACCGTTGAATCAACTTCAGGTGTCCATTTGGAACCAGAAGTTCGTATTATCGGTGAGTCGCTATTA

SEQ ID NO: 10988 - protein, 300 aa, Streptococcus agalactiae; identical to SEQ ID NO: 2100

SEQ ID NO: 10989 - protein, 486 aa, Streptococcus agalactiae
ATGACAACCGTTTACTTGAGTTTAGGTAGTAATATTGGTGATAGAGAAACTTTTCTGAAGCAGGCTCTCTTTTCAATTGATCATTTGCAAAAGACAAAAGTCGCGCAAATTTCCGCTATTTATGAAACAGCTGCTTGGGGGAATACTAACCAAGAAGATTTTTTTAATATATGTTGTCAGGTAGAGACAGACTTAGCACCTTTTGAATTATTGGATTATTGTCAAGAAATCGAAAAACGCTTAAAGCGCGTGAGACATGAGCACTGGGGTCCAAGGACAATAGATATTGATATCTTACTTTTTGGTAATCAAGTGATTAACCAAGAAGATTTAGTAGTACCCCATCCGTATATGACGAAGCGAGCATTTGTTTTAGTTCCGTTACTCGAAATAGCACCTCAACTAAGTTTACCTAATGGTTCTAAGCTAGAAGACTATCTCGAAAAATTGAATTTAGGAGAAGTTCATTATTTCAAGCCAGTCGAA

SEQ ID NO: 10990 - protein, 162 aa, Streptococcus agalactiae
MTTVYLSLGSNIGDRETFLKQALFSIDHLQKTKVAQISAIYETAAWGNTNQEDFFNICCQVETDLAPFELLDYCQEIEKRLKRVRHEHWGPRTIDIDILLFGNQVINQEDLVVPHPYMTKRAFVLVPLLEIAPQLSLPNGSKLEDYLEKLNLGEVHYFKPVE

SEQ ID NO: 10991 - protein, 360 aa, Streptococcus agalactiae; identical to SEQ ID NO: 6693

SEQ ID NO: 10992 - protein, 120 aa, Streptococcus agalactiae; identical to SEQ ID NO: 6694

SEQ ID NO: 10993 - protein, 801 aa, Streptococcus agalactiae
ATGAAAATAGGACAATATGATATTACAGGTAAAGCTTGTATCATGGGGATTTTAAATGTAACGCCTGATTCCTTCTCAGATGGTGGTTCTTATACCACAATTGATTCAGCTTTAAATCAAGTTGGTGAGATGCTTGAACAAGGGGTGGCAATTGTAGATATTGGGGGAGAATCAACGCGGCCAGGTGCAGTATTTGTGACTGCTGAAGAAGAAATTAAACGTGTAGTTCCAATGATTAAAGCTATTAGAGAGGTCTACCCTGATCTTTTGTTATCAATAGATACTTATAAAACAGAGGTAGCTCAAGCAGCCCTTGATGCAGGTGTACATATTTTAAATGACGTTTGGTCAGGTTTATATGATGGTAAAATGCTATCTTTAGCAGCAGAACGAAATGTTCCAATTATTTTGATGCATAACCAGGAAGAAGCTGTTTATCAAGATATCAAAAAAGAAGTTTGTGAATTCTTACTTGAAAGAGCAGAGCGTGCTTTAGAAGCAGGTGTTTCAAAGGATAATATTTGGATAGATCCTGGCTTTGGTTTTGCTAAAACAGAGGAGCAAAATTTAGAACTATTAAAAGGTTTGGAACAAGTGTGTGATTTAGGTTATCCTGTGTTATTTGGGATCTCTCGAAAACGTACTGTTAATTATCTTCTAGGTGGTAATAGGGAAGTAACTGAACGTGATATGGGGACTGCTGCTTTATCGGCATGGGCAATAGCAAAGGGGTGTCAGATTGTACGTGTTCACAATGTTGAAGTAAATAAGGACATTGTGACAGTAATTAGTCAGTTGGTG

SEQ ID NO: 10994 - protein, 267 aa, Streptococcus agalactiae; identical to SEQ ID NO: 2106

SEQ ID NO: 10995 - protein, 561 aa, Streptococcus agalactiae
ATGCCCAATCAAGAAAAAATGGAAAAAGCTATTTATCAATTTTTAGAGGCTTTAGGAGAAAATCCTAATCGAGAAGGATTGAAAGATACACCGAAGCGTGTGGCAAAAATGTATATAGAAATGTTCTCAGGACTTAATCAAGATCCAAAGGAGCAATTCACTGCAGTCTTTTCTGAAAATCATGAAGAGGTTGTGATTGTCAAGGATATTCCATTCTATTCCATGTGTGAACATCATTTGGTTCCTTTTTATGGTAAAGCTCATATTGCTTATTTACCGAACGATGGACGTGTTACTGGACTTAGTAAGCTTGCACGTGCAGTTGAAGTGGCGAGTAAGCGTCCTCAACTTCAGGAACGTTTAACAGCACAAGTTGCACAAGCTTTAGAGGATGCTTTGGCGCCTAAAGGTATTTTTGTTATGATAGAAGCAGAGCATATGTGCATGACAATGCGTGGCATTAAAAAACCAGGAAGTAAGACGATTACAACGGTAGCTCGTGGTTTATACAAGGACGATCGATATGAAAGACAAGAAATTCTATCGCTAATACAAAAAGGA

SEQ ID NO: 10996 - protein, 187 aa, Streptococcus agalactiae
MPNQEKMEKAIYQFLEALGENPNREGLKDTPKRVAKMYIEMFSGLNQDPKEQFTAVFSENHEEVVIVKDIPFYSMCEHHLVPFYGKAHIAYLPNDGRVTGLSKLARAVEVASKRPQLQERLTAQVAQALEDALAPKGIFVMIEAEHMCMTMRGIKKPGSKTITTVARGLYKDDRYERQEILSLIQKG

SEQ ID NO: 10997 - protein, 1260 aa, Streptococcus agalactiae
ATGACTTATCAAGAAGCGCTAGAATGGATTCATAGCAAATTAGCTTTTGGTATTAAACCAGGTTTGGAACGTATGAGATGGATGCTAGAGCAGTTGGGAAACCCTCAAAACAACCTATCTGCCATTCATGTTGTTGGAACGAATGGTAAAGGATCAACAACTAGTTATTTACAACATATTTTTACCAATTCTGGTTATCAAGTTGGAACATTTACATCACCGTATATTGTTGACTTTAGAGAGCGTATTAGCATTGATGGTCAAATGATTCCAGAGTCTGATTTTATCAAACTTGTTGAAACTGTTCGTCCAGTTGTTGAACGGTTGCACCTTGAGACCAACCTAGAACCAGCTACAGAATTTGAAGTTATAACAGTTTTGATGTTCTATTACTTTGGCAATAGCTGTCCGGTTGATATCGTCATTATTGAGGCTGGAATGGGCGGTTATTATGATTCTACCAACATGTTCAAGGCTTTAGCGGTTACTTGTCCGTCAATTGGATTAGATCATCAGGAGGTTTTAGGACGAACTTATGTAGATATAGCTGAGCAAAAAGTAGGTGTTTTAAAAAAAGGAGTTCCATTCGTATATGCTAATGATCGTCAGGATGTTGAAGAAGTCTTTCAAATAAAAGCCAAGGAAACACACAGCCAGACTTATCGTTTACACAATGACTTTTATATAAAAGAAGAGGAAAATTATTTTAACTATATAGGTCCTCAAGCAAATATTGATCATATTCAGTTGCAAATGCCAGGACATCACCAAGTTTCCAATGCTAGCATAGCTATAACTACCAGTTTATTATTAAGAGACAAATATCCAAAGTTAACCCTACAGACCATTAAAGATGGGCTTGAAATGACAAAATGGGTAGGCCGTACAGAATTAATCTTTCCAAATGTAATGATTGATGGTGCTCATAATAATGAAAGTGTCGATGCTCTCGTTCAAGTTATAAAAAAATATCAGCAGAAAAACGTGCATATTCTATTTGCTGCAATTAATACTAAACCGATAGAGAGTATGTTAGAATCATTGTCTAGTATCGCTCCGGTTTCGGTTACTAGCTTTGATTACCCTAAATCAATAAGCCTAGACAAATATCCTAAAGCGTACACTAGAGTTAGTGATTGGAAGAAATGGCTACATGATATAAATCTGACATCAGATAAAGATTTCTATGTGATTACTGGCTCCCTTTATTTTATTTCTCAAGTTCGTCGGGAACTACTATTAATCAAAACTACAACAACT

SEQ ID NO: 10998 - protein, 420 aa, Streptococcus agalactiae
MTYQEALEWIHSKLAFGIKPGLERMRWMLEQLGNPQNNLSAIHVVGTNGKGSTTSYLQHIFTNSGYQVGTFTSPYIVDFRERISIDGQMIPESDFIKLVETVRPVVERLHLETNLEPATEFEVITVLMFYYFGNSCPVDIVIIEAGMGGYYDSTNMFKALAVTCPSIGLDHQEVLGRTYVDIAEQKVGVLKKGVPFVYANDRQDVEEVFQIKAKETHSQTYRLHNDFYIKEEENYFNYIGPQANIDHIQLQMPGHHQVSNASIAITTSLLLRDKYPKLTLQTIKDGLEMTKWVGRTELIFPNVMIDGAHNNESVDALVQVIKKYQQKNVHILFAAINTKPIESMLESLSSIAPVSVTSFDYPKSISLDKYPKAYTRVSDWKKWLHDINLTSDKDFYVITGSLYFISQVRRELLLIKTTTT

SEQ ID NO: 10999 - protein, 885 aa, Streptococcus agalactiae
TTGAGAAAAGATAATTTAGGAATTATCCTTGGCTTGTCAGCCTATGTTTTATGGGGGCTGTTATCTCTTTATTGGAAATTATTATCTGGAATTGAAGCATATAGTACGTTTGCTTATAGGATTATATTCACTGTTTTAACTATGCTTATTTATATGCTCGTTTCGGGTAGAAAAACAGTCTATTTAAAAGACTTAAAAGGCTTAGTTAACAATAAAAAGTCATTTTGGACAATGTTTGTAGCCAGTATTTTAATTTCAATTAATTGGTTGGTCTATATTTTTGCAGTCACGCATGGTCACGCTACTGAGGCAAGTCTTGGTTATTATATGATGCCGATTATTTCAATTTTGTTGTCGGTCCTTGTTTTACGTGAACATCTGGCAAGAGTAGTTAGCCTTGCAATTTTGATTGCAATCATGGGAGTTGGAGTTTTAGTTTATCAAACTGGTCATTTTCCTTTAATTTCACTAACTCTAGCGCTTTCTTTTGGTTTTTATGGGTTATTAAAAAAATCAATTTCTTTATCTAGCGATTTTTCGATGCTGGTAGAAAGTAGTTTTATTGCTCCGTTTGCACTCATTTATATAGTGTTTTTCGCCAAAGATTTTCTAACTGATTATAATATATTACAATTAGTTTTACTCTCACTTTCAGGAATCATTACAGCAGTTCCTCTTTTATTATTTGCAGAAGCCATTAAGAGGGCTCCTCTAAATATTATCGGTTTTATCCAATACATCAATCCAACCATCCAATTATTGCTAGCATTGTTTATTTTTAAAGAAACTATCGTTAGTGGGGAGATAATAGGTTTTATTTTTATCTGGCTTGCTATTTTAGTTTTTAGTATTGGACAAGTACATACGATGTTAAAGAAAGGTAAA

SEQ ID NO: 11000 - protein, 295 aa, Streptococcus agalactiae
MRKDNLGIILGLSAYVLWGLLSLYWKLLSGIEAYSTFAYRIIFTVLTMLIYMLVSGRKTVYLKDLKGLVNNKKSFWTMFVASILISINWLVYIFAVTHGHATEASLGYYMMPIISILLSVLVLREHLARVVSLAILIAIMGVGVLVYQTGHFPLISLTLALSFGFYGLLKKSISLSSDFSMLVESSFIAPFALIYIVFFAKDFLTDYNILQLVLLSLSGIITAVPLLLFAEAIKRAPLNIIGFIQYINPTIQLLLALFIFKETIVSGEIIGFIFIWLAILVFSIGQVHTMLKKGK

SEQ ID NO: 11001 - protein, 864 aa, Streptococcus agalactiae
ATGAGGATAATTGTACCTGCAACTAGTGCGAATATTGGTCCGGGCTTTGATTCAATAGGAGTTGCGTTATCAAAGTATTTAATCATTGAAGTATTAGAAGAAAGTACAGAGTGGTTAGTTGAACACAATTTAGTAAATATTCCAAAAGATCATACTAACCTCCTTATTCAAACAGCTTTGCATGTTAAGTCGGATTTGGCACCACACCGCTTAAAAATGTTTTCAGATATTCCTTTGGCCAGAGGTTTAGGCTCTTCTTCCTCTGTAATTGTTGCAGGAATAGAATTAGCCAATCAATTAGGAAATTTGGCTCTTTCTCAAAAAGAAAAATTAGAGATAGCTACCCGATTAGAAGGACATCCTGATAATGTAGCACCGGCCATTTTTGGTGATTTAGTTATTTCATCAATAGTGAAAAATGATATTAAAAGCTTGGAAGTGATGTTTCCAGATAGTTCCTTTATTGCTTTTATTCCAAATTATGAATTAAAAACAAGTGATAGTCGAAATGTACTACCTCAAAAATTGAGTTATGAGGATGCAGTTGCTTCAAGCAGCGTCGCTAATGTGATGGTTGCGTCGTTGTTGAAAGGTGATTTGGTAACTGCTGGATGGGCTATAGAAAGGGACCTCTTTCATGAAAGATATCGTCAACCTTTGGTGAAGGAATTTGAAGTTATAAAACAAATCAGCACTCAAAATGGTGCGTATGCTACTTATTTGTCTGGAGCAGGACCGACGGTAATGGTTCTGTGTTCGAAAGAAAAAGAACAACCAATTGTCACAGAGTTAAGTAAATTATGTTTAGATGGACAGATTCAAGTGCTTAATATTGAGCGAAAAGGAGTGAGAGTTGAGAAAAGA

SEQ ID NO: 11002 - protein, 288 aa, Streptococcus agalactiae
MRIIVPATSANIGPGFDSIGVALSKYLIIEVLEESTEWLVEHNLVNIPKDHTNLLIQTALHVKSDLAPHRLKMFSDIPLARGLGSSSSVIVAGIELANQLGNLALSQKEKLEIATRLEGHPDNVAPAIFGDLVISSIVKNDIKSLEVMFPDSSFIAFIPNYELKTSDSRNVLPQKLSYEDAVASSSVANVMVASLLKGDLVTAGWAIERDLFHERYRQPLVKEFEVIKQISTQNGAYATYLSGAGPTVMVLCSKEKEQPIVTELSKLCLDGQIQVLNIERKGVRVEKR

SEQ ID NO: 11003 - protein, 1281 aa, Streptococcus agalactiae
ATGACTATTAAAATAGCTTTATTAGGTTTTGGAACGGTTGCTAAGGGTATTCCATATTTGCTAAAAGAAAATCAACATAAGCTACTTTCTTTAGAAGGCGAAGATATTGTGATTGATAAAGTATTAGTAAGAGATAATGAAAGCCGCCAGCGCTTCATCAATCAGGGATTTACTTATAACTTTGTGACAGAGATAAATACTATTCTCCAAGATCCACAAATTGATATTGTAGTGGAATTAATGGGGGGGATTGAGCCAGCTAAAACTTATTTGAGTCAAGCATTAGGATTTGGTAAACATATTGTGACAGCCAATAAAGATCTCATTGCTTTACACGGAAAAGAGTTGATGGATTTAGCAGACGCTAGAGGTCTAGCTTTATTCTATGAGGGAGCAGTTGCTGGAGGCATTCCTATTTTAAGGACCCTATCGCATTCGTTTGCCTCAGATAAAATGACACGTTTATTAGGAATTCTCAACGGTACCTCCAACTTCATGTTAACAAAAATGTTTGAAGAGGGATGGTCTTATGAACAAGCTCTAAAAAAGGCACAAGAGTTAGGTTATGCTGAAAGTGATCCCACAAATGATGTTGAAGGTATTGATACTGCCTACAAAGCCACTATCTTAAGCCAATTTGGATTTGGTATGCCTATTGATTTTGATGATGTTAATTATAAGGGGATTTCTAGTATTCGCTCAGAGGATGTTGAAGTAGCTCAGGAGATGGGCTTTGCCATTAAGTTGGTAGCTGATCTTCGTGAAACTCCAACTGGTATAAGTGTAGACGTTTCTCCGACACTAATTTCTCAAAAGCATCCCTTAGCTGCAGTTAATCATGTGATGAATGCAGTATTCATTGAATCAATAGGGATTGGTCAGTCTCTTTTTTATGGACCAGGTGCGGGACAAAATCCAACAGCAACCTCTGTTTTAGCGGATATCATCGATATTAGTCGTAGTATTCGATCACAGATAAAAATTAAGCCTATGAATACTTATCATTGTCCGTGTAGGTTGTCAATGCAGTCTGATATCTTCAATGAGTACTATCTAGCTATTTCTTTGAGAAATGCTGAAGATAGTGATACACTTGGAAGGTACTTTGAGCAAGAAAATATAGGTTTGAAAAATGTTATCGAAAAAGCATTGGGTGATAAACAACAAGAGATCTATGTATTAACAGATGAAGTTAGCCAAGAGAAAATAACTCAATTTATTGAGGAGTTTCCTGAGAGTGGTGTCATTCAGTTAATCAATGTTTTCAAAGTAATAGGAGGG

SEQ ID NO: 11004 - protein, 427 aa, Streptococcus agalactiae
MTIKIALLGFGTVAKGIPYLLKENQHKLLSLEGEDIVIDKVLVRDNESRQRFINQGFTYNFVTEINTILQDPQIDIVVELMGGIEPAKTYLSQALGFGKHIVTANKDLIALHGKELMDLADARGLALFYEGAVAGGIPILRTLSHSFASDKMTRLLGILNGTSNFMLTKMFEEGWSYEQALKKAQELGYAESDPTNDVEGIDTAYKATILSQFGFGMPIDFDDVNYKGISSIRSEDVEVAQEMGFAIKLVADLRETPTGISVDVSPTLISQKHPLAAVNHVMNAVFIESIGIGQSLFYGPGAGQNPTATSVLADIIDISRSIRSQIKIKPMNTYHCPCRLSMQSDIFNEYYLAISLRNAEDSDTLGRYFEQENIGLKNVIEKALGDKQQEIYVLTDEVSQEKITQFIEEFPESGVIQLINVFKVIGG

SEQ ID NO: 11005 - protein, 885 aa, Streptococcus agalactiae
ATGGCACACACACCTACTAGTCATCGTAAACCACGAAAACGTTCCCCATGGTTAGCTATTGCTTCTGTCTTTTTTTTGTTAATAGCTTTAATAGGCATATTTCTATTCTTCAACAATCGTTCAAAGCAAGAAATAAAAACAAAAACGAACGCCTCTAGTCATCGAAAAATTGTCACATCTATCAAAAAAAAGAAATGGATTAAGCAAAAGACTCCTGTCAAAATACCCATTTTAATGTACCATGCTGTTCATGTTATGGACCCTTCTGAAGCCGCCAGTGCTAACTTAATTGTGGCACCTGACATTTTTGAAAGTCATATAAAACGTCTCAAAAAGGAAGGATATTACTTCTTAGCCCCTAACGAGGCATATCGTGCACTAAACGAAAATGCCTTACCTGACAAAAAAGTCATTTGGATTACTTTTGATGATGGAAATGCTGATTTCTACACTAAGGCATACCCTATACTCAAAAAGTACAAGGTTAAAGCCACTAATAATATCATCACTGGCTTTGTTCAAGAGGGACGAGAATCTAACCTCAACGTTCAACAAATGCTAGAAATGAAGCAAAACGGCATGTCATTCCAAGGACATACGGTTACTCACCCCAATCTTTCTCTCTTAACTCCAGAACTACAAACCCAAGAAATGACACTATCAAAACAGTTTTTAGATCAAAAACTCTCTCAAGATACTCTTGCGATTGCTTATCCATCAGGGCGCTACAATCCTACAACCTTGGATATTGCTAGTCAATATTATAAACTAGGCCTTACAACAAACGAAGGAGTTGCAACAAAAGATAACGGTTTGCTTTCTCTTAATCGAGTTCGTATCTTACCAACTACTAGCGATGATGATTTGATCAAGACGATTAACCAA

SEQ ID NO: 11006 - protein, 295 aa, Streptococcus agalactiae
MAHTPTSHRKPRKRSPWLAIASVFFLLIALIGIFLFFNNRSKQEIKTKTNASSHRKIVTSIKKKKWIKQKTPVKIPILMYHAVHVMDPSEAASANLIVAPDIFESHIKRLKKEGYYFLAPNEAYRALNENALPDKKVIWITFDDGNADFYTKAYPILKKYKVKATNNIITGFVQEGRESNLNVQQMLEMKQNGMSFQGHTVTHPNLSLLTPELQTQEMTLSKQFLDQKLSQDTLAIAYPSGRYNPTTLDIASQYYKLGLTTNEGVATKDNGLLSLNRVRILPTTSDDDLIKTINQ

SEQ ID NO: 11007 - protein, 1545 aa, Streptococcus agalactiae
TTGAGTAAAAAACATATTACGCCTGTATTTACAGGTTCACTAATTGTATCACTTATTTTAGTCTTATTAGGAATTATTGTTCCTCGTGGTTTTCAATCTTGGACACAAATCTTGCGTGAACAGGTATCTACCAATTTCGGTTGGTTGTACTTGTTGTTAGTTACTTCAATTCTTGCTTTGTGTGTCTTTTTTATTATGAGTCCTCTTGGACAAATACGTTTAGGGCAACCTCATTCACGTCCTGAATATTCAACTGTATCATGGATAGCAATGATGTTTTCAGCAGGTATGGGGATTGGTTTGGTCTTCTACGGAGCAGCTGAACCCTTATCGCATTTTGCTATTTCGACACCTGGTGCACCTAAGGAATCGCAAACAGCATTAGCTGATGCATTTCGTTTTACATTTTTTCACTGGGGGATACATGCTTGGGCAGTATATGCATTGGTTGCTTTGGCTCTAGCTTATTTTGGATTTCGAAAGCAAGAGAAATACCTCTTGTCTGTCACTTTAAAGCCTCTTTTCGGTGATAAGACAGATGGTTGGCTAGGAAAAATTGTTGATATCACCACAGTTGTTGCTACAGTTATTGGAGTTGCTACGACACTTGGATTTGGAGCTGCTCAAATCAACGGAGGGTTAAGTTTTTTATTGGGTGTTCCCAATAATGCATTTGTTCAAATTGTTATTATCCTTATTACAACAGCTTTATTTGTTATGTCAGCTTTATCAGGTTTAGGAAAAGGTGTTAAAATTTTATCGAACTTAAATTTGATTTTAGCGGTAGCCCTCTTAGCTTTAGTTATTGTATTGGGACCAACGGTTCGTATTTTTGATACCCTAACAGAGTCTTTAGGCTCTTATTTACAAAATTTCTTTGGAATGAGCTTTCGTGCAGCTGCTTTTGACAATACTAAACGTTCTTGGATTGATAATTGGACGATTTTTTATTGGGCGTGGTGGATTTCCTGGTCTCCTTTTGTTGGAGTTTTCATCGCTCGTATTTCTAAAGGGCGTAGTATTCGTGAGTTTTTAACGGTAGTTCTTTTAATACCGACATTATTGAGTTTTGTATGGTTTGCAGCATTTGGCACATTATCAACTCAGGTACAACAACTGGGTACTAATTTGACAAAGTTTGCAACAGAGGAAGTATTGTTTGCTACTTTTAATCACTACACTTTAGGTTGGCTTTTATCCATTATTGCTATCATTTTAATTTTTTCATTTTTTATTACATCAGCAGATTCTGCAACGTACGTTTTGGCTATGTTGACAGAAGATGGTAATTTAAATCCAAAAAATCGAACTAAAGTAATTTGGGGGCTAGTGTTGGCAGTGATTGCTATTGTCTTACTCTTGTCTGGTGGTCTGTTAGCGCTGCAGAACGTTTTAATTATTGTCGCTCTGCCATTTTCATTCGTAATGATTTTGATGATGCTAGCGCTATTAGTGGAACTTTTCCATGAGAAAAAAGAAATGGGCTTATCAATTTCTCCAGATCGTTATCCACGTAAAAATGAACCATTTAAATCTTATGAAGAA

SEQ ID NO: 11008 - protein, 515 aa, Streptococcus agalactiae
MSKKHITPVFTGSLIVSLILVLLGIIVPRGFQSWTQILREQVSTNFGWLYLLLVTSILALCVFFIMSPLGQIRLGQPHSRPEYSTVSWIAMMFSAGMGIGLVFYGAAEPLSHFAISTPGAPKESQTALADAFRFTFFHWGIHAWAVYALVALALAYFGFRKQEKYLLSVTLKPLFGDKTDGWLGKIVDITTVVATVIGVATTLGFGAAQINGGLSFLLGVPNNAFVQIVIILITTALFVMSALSGLGKGVKILSNLNLILAVALLALVIVLGPTVRIFDTLTESLGSYLQNFFGMSFRAAAFDNTKRSWIDNWTIFYWAWWISWSPFVGVFIARISKGRSIREFLTVVLLIPTLLSFVWFAAFGTLSTQVQQLGTNLTKFATEEVLFATFNHYTLGWLLSIIAIILIFSFFITSADSATYVLAMLTEDGNLNPKNRTKVIWGLVLAVIAIVLLLSGGLLALQNVLIIVALPFSFVMILMMLALLVELFHEKKEMGLSISPDRYPRKNEPFKSYEE

SEQ ID NO: 11009 - protein, 1374 aa, Streptococcus agalactiae
ATGGCATATAAAACAATTTATCCGTACACTAACGAAGTATTGCATGAATTCGATAATATCAGTGACAGTGATCTCGAACAGTCATTAGACATAGCGCATGCCCTCTACAAGACATGGCGCAAAGAAGATAATGTTGAAGAACGCCAAAATCAATTGCATAAAGTAGCAGATTTATTACGTAAGGATCGTGATAAGTACGCTGAAGTTATGACTAAAGATATGGGAAAACTTTTCACTGAAGCACAAGGAGAAGTGGACTTGTGTGCAGACATAGCTGACTATTATGCTGATAATGGGCAAAAGTTTTTAAAACCTGTTCCGTTAGAAAGTCCAAATGGAGAGGCTTACTATTTGAAGCAAGCTGTCGGTGTTTTACTTGCTGTTGAGCCATGGAATTTCCCATTTTATCAGATTATGCGTGTATTTGCCCCTAACTTTATAGTGGGTAATACTATGCTTTTAAAACATGCTTCTATTTGTCCTGCCTCAGCTCAAGCGTTTGAGGATTTAGTCCGAGAAGCAGGAGCTCCAGAAGGAGCGTTTAAAAATATTTTTGCTTCGTATGATCAAGTTTCAAACCTTATATCAGATCCTCGTGTTGCAGGTGTGTGTTTAACTGGTTCTGAGCGTGGTGGGGCATCAATAGCAGCTGAGGCTGGTAAAAATTTGAAAAAATCGTCTATGGAATTAGGTGGGAACGATGCTTTTCTTATTTTAGATGATGCTGACTTTGATTTACTTAGTAAAACAATATTCTTTGCGCGTTTATATAATGCAGGTCAAGTATGTACATCTTCAAAACGTTTCATTGTCATGGCTGATAAGTATGACGAATTTGTAAATATGGTAGTTGAGACCTTTAAGTCTGCTAAATGGGGTGACCCAATGGATTCGGAAACAACCTTGGCTCCACTGTCATCTGCAGGTGCAAAGGATGATGTTTTAAAACAAATTAAATTGGCGGTAGACCACGGTGCTGAGGTAGTTTTTGGAAATGACACTATAGATCATCCAGGAAACTTCGTCATGCCAACTGTTTTAACGAATATCACTAAAGCAAATCCAATCTATAATCAAGAAATTTTCGGCCCCGTAGCCTCTATCTATAAAGTGGATACTGAAGAAGAAGCTATTGCTTTAGCTAATGATTCTAGTTATGGTTTAGGAAGCACTGTTTTTTCTTCTGATCCAGAACATGCTAAAAAAGTGGCGGCTCAGATTGAAACAGGGATGACATTTATTAATTCAGGGTGGACATCATTACCGGAATTACCGTTTGGAGGTATTAAAAATTCAGGATATGGTCGTGAGTTGAGCCAACTTGGATTTGATGCCTTTGTCAACGAACATTTGGTATTTACACCAAATAGTGAT

SEQ ID NO: 11010 - protein, 458 aa, Streptococcus agalactiae; identical to SEQ ID NO: 6722

SEQ ID NO: 11011 - protein, 1005 aa, Streptococcus agalactiae; identical to SEQ ID NO: 6723

SEQ ID NO: 11012 - protein, 335 aa, Streptococcus agalactiae; identical to SEQ ID NO: 6724

SEQ ID NO: 11013 - protein, 639 aa, Streptococcus agalactiae
ATGAAAAAGTTTTTAAAAGTTTTTTTAACTGTACTAGTACTTATTTTAATTGTAGGTGCAGGCGGTCTCTATTTCTGGAATAATCATCAGTCACTAGAGGGGAAATGGCGTACAGTTTCTTTAGAGAAGCAAGTTGAGAAAGAAATAGAACAACAACTTGGAAGTCAAGCAGCGGATATGGGGATTAGTGCAGCTGATTTGGTTAAGGGTGCTAATATGCATATGAACGTCAAAAACGATGAGGCAAAGATAACAGTCACTGCTCAAATTGATGAGGTAAAATTCCATCAAGCTATAAAAACTTTTATTGATAAAGCTCTTGAAAAACAATAAAAGATCAAGGTTTGACTTACAATGATTTAAGTGAAGCAGGAAAAAGATTTTGATGAAACAAAAATCACTGACCAACAAATTGACCAACAAATTGATAGAAGTTTCCAAAGTGCTGCACAAGCTGCCGGAGGAAAATATAATACTAATACTGGTGAAATGACATTGCCAGTTATGGATGGTAAAGTACATCGCTTAACAAGTGTTATTAAAGTATCGCATATCAATAAAAAGGCAAATGCGTTCTATGGTAATATTGTGAAAAATGGTGAAAAAACAGCCTATAAAAAAGAGGGCTCTAAATTGATT

SEQ ID NO: 11014 - protein, 214 aa, Streptococcus agalactiae
  VARIANT 129: Xaa = Any Amino Acid
MKKFLKVFLTVLVLILIVGAGGLYFWNNHQSLEGKWRTVSLEKQVEKEIEQQLGSQAADMGISAADLVKGANMHMNVKNDEAKITVTAQIDEVKFHQAIKTFIDKALEKQLKDQGLTYNDLSEAGKKIXDETKITDQQIDQQIDRSFQSAAQAAGGKYNTNTGEMTLPVMDGKVHRLTSVIKVSHINKKANAFYGNIVKNGEKTAYKKEGSKLI

SEQ ID NO: 11015 - protein, 1341 aa, Streptococcus agalactiae
ATGTCTAGGAAAACATTTAAACGTATACTATCGATTGGAGTTTGCACGCTCGTACTATCGATGAGTCTTTATTACACTGAAAAAGCCCACGCTATTGCTGGTCCTAGTGACCGCCAATACGTAGAAAACCCAAATCCTCACATTATTGTAAATGTTACAGGTACTGATCAAAACGGAAATAGCATTTTACCGCATTATATCGAAGTCAATGTAAATATGGGACAAACTTTAAGTAAAAAAGAAATTCTAGATTATATTGCTCGAAATTTAAACTCTAGTGTTGGAGGAGAAAGTAAAAACGTTCAATACAGCAACATCGAGTTTAAGGAAAGTGCTTATCTGAAGCGTCAATTAGATGATGGCAAGACAGAAGAAATAGCAATTGATAACGACGGTGTTACTGTACCTAAAGACGGTCCAAACAAATTTTGGATTGACGTTCCAGTAACTTGTACTGTTACTCCTATCGTAACAGAAACACATGAAGTTCGATGGGGGACTCCAGTCGATATATCACACCGTATTTACTTTGTTGAAGAATCTTCTGGAAAAGTTTTAGATGAATACACAAATCTACACACTGCTTATTCGGAATTTAACGGTTATCGTGTTGGAGATTATATCACAGACTATGCACTTTCTAAGTCTGCTTACGAAGCTTTTTTAAACTCTCGTTTAGATAAAGAAGGTTACAAACTTCAACATCGTATTAGCACGAATGTACGACAAAACCTTCAAATTGATAAATTGATTTTCAATTATGACTTTAATGAGGAAAATATTCACTACCAAATCGGGAATATCCGTCCACTATTAAGTCGCTCATCAGCTGAAGTAGAATCTGACATCATTACAGAACGCTACTATGTTTCTAAAAATGCTAAAAGTTTAGCACGTACAGAATCAACCATTTCGATTAAAATGGTTGATGCCAAAACTGAACAAGCGCTATTTAACCACACATTAACGGGTTATCAATTGTCAACTGTTTCCAATGTCTATAACAGACTCTTTGAAGAAAATCTTATCCCAACTACAAAATCAGGAGAAAAATATTTTATTCAAAATATGAAAAAAACAGCTGAACAAGAATATACTGTTTACCTTTCAGAAACACCTTATTCTGAAGAGAACGCTCCCGTAATTTCTTATGATGCAAGACCTGTTGATTGGGATTATCACTCAGGCGCTTCAGGATCACTTGAAAATCAGCCTAACATCTATACTGAAGAAGATTCAACTGAATTTTTGGGTAATAAACCACAAGCAGCTTGTTATCCAAACAAACAATTTGCTTGCGAAAATACTGACTCTAAATACAACTATAGCTATTTAGAAAAA

SEQ ID NO: 11016 - protein, 447 aa, Streptococcus agalactiae
MSRKTFKRILSIGVCTLVLSMSLYYTEKAHAIAGPSDRQYVENPNPHIIVNVTGTDQNGNSILPHYIEVNVNMGQTLSKKEILDYIARNLNSSVGGESKNVQYSNIEFKESAYLKRQLDDGKTEEIAIDNDGVTVPKDGPNKFWIDVPVTCTVTPIVTETHEVRWGTPVDISHRIYFVEESSGKVLDEYTNLHTAYSEFNGYRVGDYITDYALSKSAYEAFLNSRLDKEGYKLQHRISTNVRQNLQIDKLIFNYDFNEENIHYQIGNIRPLLSRSSAEVESDIITERYYVSKNAKSLARTESTISIKMVDAKTEQALFNHTLTGYQLSTVSNVYNRLFEENLIPTTKSGEKYFIQNMKKTAEQEYTVYLSETPYSEENAPVISYDARPVDWDYHSGASGSLENQPNIYTEEDSTEFLGNKPQAACYPNKQFACENTDSKYNYSYLEK

SEQ ID NO: 11017 - protein, 108 aa, Streptococcus agalactiae; identical to SEQ ID NO: 6733

SEQ ID NO: 11018 - protein, 36 aa, Streptococcus agalactiae; identical to SEQ ID NO: 6734

SEQ ID NO: 11019 - protein, 147 aa, Streptococcus agalactiae
TTGGGTTTAACAACTAACAATAACACTCCGCTGATTGTATCGCTATTTTCTTTAAAAGTTATTTTGGCTAGTATTATGTCCGGTGTAGCTTACAATGGAGTTATGTATCTAATATTTAAAAACAATGTTGATATTGAAAAAGATGAA

SEQ ID NO: 11020 - protein, 49 aa, Streptococcus agalactiae
MGLTTNNNTPLIVSLFSLKVILASIMSGVAYNGVMYLIFKNNVDIEKDE

SEQ ID NO: 11021 - protein, 492 aa, Streptococcus agalactiae
ATGACAACATTTCTTGGAAATCCTGTTACTTTTACAGGAAAACAGCTACAAGTTGGGGATATTGCAAAAGATTTTTTACTAATAGCTACAGACTTATCTCAAAAATCTTTAAAAGATTTTGAAGGGAAAAAGAAAGTTATTAGCGTTGTTCCTTCTATTGATACAGGTATTTGTTCAAAACAAACACGTACTTTTAATGAGGAATTATCAGAGCTAGATAACACAGTGGTTATTACTGTTTCTATGGACCTTCCATTTGCTCAGAAGCGTTGGTGCAGTGCTGAAGGCCTTGATAACGTAATTTTATTATCAGATTTTTATGATCATTCGTTTGGTCAAGAGTACGCTCTTTTGATGAATGAGTGGCATTTGTTAACACGTGCAGTTCTTATTTTGGATGAGCATAATAAGGTGACTTACACCGAATACGTTGACAATGTTAATTCAGATGTTGACTACGAAGCGGCGATTAATGCTGCAAAGATATTACCA

SEQ ID NO: 11022 - protein, 164 aa, Streptococcus agalactiae; identical to SEQ ID NO: 6738

SEQ ID NO: 11023 - protein, 531 aa, Streptococcus agalactiae
ATGCTCTACAAAGAGCTTATAAAGGCCGCTAAAAGACAAGCAAAAATTGATTGGCAATTGCTTGATAAATGTTGGCAAAGTGACTATCGTGAATATCATCATTTTGTACTTGATTATCTATTAGCTATGAGTCAATTTCTCACCTATAATGATTGCTCTAGACTAGAGTTTTACGCTCGTCATCAACAGTGGTGGGATAGTATTGATGTTCTGACTAAGATTTTTGGGAACTTATCCTTAAAAGATGACAAGGTTATGAATTTACTATCAGAATGGTCACTTGATCAAGATTTTTGGATGAGGCGACTAGCTATTGAGCATCAACTAGGATTTAAAGAAAAAACAAATACTGATATTTTGTCACTTTTTATTTTAAGAAATACAGGAAGTCAAGAATTTTTTATCAATAAGGCGATTGGCTGGGCGCTTAGGGGTTATTCAAAATATAATAAAGTATGGGTAAAGGACTTTATCAGTAATTATTATGATGAGTTGTCGACTTTGAGCATACGCGAAGGAAGTAAGTACCTC

SEQ ID NO: 11024 - protein, 177 aa, Streptococcus agalactiae
MLYKELIKAAKRQAKIDWQLLDKCWQSDYREYHHFVLDYLLAMSQFLTYNDCSRLEFYARHQQWWDSIDVLTKIFGNLSLKDDKVMNLLSEWSLDQDFWMRRLAIEHQLGFKEKTNTDILSLFILRNTGSQEFFINKAIGWALRGYSKYNKVWVKDFISNYYDELSTLSIREGSKYL

SEQ ID NO: 11025 - protein, 123 aa, Streptococcus agalactiae
ATGACAGCAGAAGATCTTGCTTTGTTAAGAGACTATACGGTAGATTTTATTTCATTTTCTTACTATTCAAGCCGAGTAGCTTCAGGTAATCCACCTGTCAGTGAACAGGNNNNNTTAATTAAT

SEQ ID NO: 11026 - protein, 41 aa, Streptococcus agalactiae
  VARIANT 37, 38: Xaa = Any Amino Acid
MTAEDLALLRDYTVDFISFSYYSSRVASGNPPVSEQXXLIN

SEQ ID NO: 11027 - protein, 296 aa, Streptococcus agalactiae
ATGTTAGCGGATTAAATCGTTTTGGACTTAGTAGTCACTTTTTCCACGAATTTGAAAAATGTTTGTACATAAATCCCATTGCAGTTGACAAGGGAAAAGCCACTAAGAAATTATTTGGGAATCGTTTTATAGCTTTTGGCAATGATAAAAATGATATTTCTATGTTTGATGCTGCGCATTATAGTGTTCAAGTAGGGGATTTTGATGAACTGACTCCTTACGCTAATTTACGTGTATCAAGAGAATCTGTACATGAAGGAATTACAACGCTTTTTGAAAAATACAAGGGGATTACG

SEQ ID NO: 11028 - protein, 99 aa, Streptococcus agalactiae
  VARIANT 4: Xaa = Any Amino Acid
MLAXLNRFGLSSHFFHEFEKCLYINPIAVDKGKATKKLFGNRFIAFGNDKNDISMFDAAHYSVQVGDFDELTPYANLRVSRESVHEGITTLFEKYKGIT

SEQ ID NO: 11029 - protein, 467 aa, Streptococcus agalactiae
ATGGATTTTGTCTTTGATATAGATGGAACTCTTTGTTTTGATGGTATGAGTCTATCTAAAGAAATACAAGGAATACTAGAGAGAGCCCAGATTGATTATGGTCATAGAGTCACTTTTGCTACAGCGCGATCTTATAGAGACACTATAGGTATCCTTGGCGACAAGCTATCTTTATCAAAAATTATTGGTTTAAATGGTGCGACTTTACATGAAAATGGTCACTTAGTGGATAGTTACTATTTACAAAGTGACTTTTTTAGTACTATTATTTCATATTGTCATCGCCATCAGATTCCATATTTTGTTGATGAGGTCTTTAATTACGCTACTTATCAGGCTTCTAAAATTCCCTTTATTGCTTATGTTGATCCTCAAAAAAGGGGAGAGCTTCTAGAAGTTTCTAAAATTGAGAAACCGATAAAAATGGTGTTGTATTTTGGTGATCAGCTGGGAAGGGCAGCAAATGT

SEQ ID NO: 11030 - protein, 156 aa, Streptococcus agalactiae
MDFVFDIDGTLCFDGMSLSKEIQGILERAQIDYGHRVTFATARSYRDTIGILGDKLSLSKIIGLNGATLHENGHLVDSYYLQSDFFSTIISYCHRHQIPYFVDEVFNYATYQASKIPFIAYVDPQKRGELLEVSKIEKPIKMVLYFGDQLGRADKC

SEQ ID NO: 11031 - protein, 639 aa, Streptococcus agalactiae
ATGGTTTCTGAACAATCTGAAATTGTAACATCTAAATATCAAAAAATAGCAGTAGCGGTTGCACAAAGAATCGCAAATGGAGATTATGAAGTTGGAGAGAAGTTGAAATCTAGAACAACTATTGCTTCAACATTCAACGTATCACCAGAAACAGCACGTAAGGGTCTTAATATTTTAGCAGATTTACAGATTTTAACTTTAAAGCATGGCAGTGGAGCCATTATTCTCTCTAAAGAAAAAGCAATTGAATTCTTAAACCAATATGAAACCTCTCATTCAGTTGCTATTTTGAAAGGTAAAATCCGTGATAATATCAAGGCTCAGCAACAAGAAATGGAAGAGTTAGCTACTTTAGTTGATGATTTTTTGCTCCAAACACGTGCGGTTAGTAAACAATACCCACTAGCACCATATGAAATTATTGTCAGTGAAGATTCTGAACACCTTGGTAAGTCAATAGGAGAATTAAATGTATGGCATCAAACTGGTGCGACTATTGTGGCTATTGAACACGAAGGGAAATTTATTGTTTCTCCGGGGCCTTTCTCAGTTATAGAGCAAGGAGATCATATTTTTTTTGTTGGTGATGAAGATGTTTATGCACGTATGAAAACCTATTTTAACTTAAGGATGGGACTT

SEQ ID NO: 11032 - protein, 213 aa, Streptococcus agalactiae; identical to SEQ ID NO: 6746

SEQ ID NO: 11033 - protein, 549 aa, Streptococcus agalactiae
ATGGAAAATCAAAAACAAGATATTAAAACTTCAGTAACTTATGAAGAAAAGGTAATTGCTAAAATTGTTGGACATGCTTTAGAATCAGTAGACGGACTCTTAGCTGTGAGTGGAGGTTTCTTCTCTAATCTAAAAAATAGCGTTGTAAATTCTGACTCAGTAACTGATGGTGTAAATGTTGAAGTTGGTACTAAAGAAGTTGCAGTTGATTTAGACATCGTTGTTGAATACGGCAAGGACATCCCAGCTATCGTTGAAAGCATTAAAGCGATTGTCAGTCAAAACGTTGAAGTGATGACCCACCTTAAAGTTGTTGAATTGAACGCAAATGTCGTAGATATTAAGACTAAAGCTGAACATGAAGCTGACTCAGTGACAGTACAAGATCGTGTATCTGATGCAGCACAAGCAACAGGAAACTTTGCTTCTGAACAGGCTGGCAAAGCTAAAGCAGCAATTTCCTCTGGAGCAGAGAAAACAAAAGAAGCAGTATCAAATGGTACTGAGGCTGCAAAAGAAAAAATCTCAGAAGCTCGTACTAGTGAATCT

SEQ ID NO: 11034 - protein, 183 aa, Streptococcus agalactiae
MENQKQDIKTSVTYEEKVIAKIVGHALESVDGLLAVSGGFFSNLKNSVVNSDSVTDGVNVEVGTKEVAVDLDIVVEYGKDIPAIVESIKAIVSQNVEVMTHLKVVELNANVVDIKTKAEHEADSVTVQDRVSDAAQATGNFASEQAGKAKAAISSGAEKTKEAVSNGTEAAKEKISEARTSES

SEQ ID NO: 11035 - protein, 194 aa, Streptococcus agalactiae
ATGTCTGAAGAAAAATTTGATGCAAAAGTTGATAAGGTTTCTGGTTCAGTAAAAGAATCTGTTGGGAAACTTACTGGCGATAAAGAAGTTGAATCTGAAGGTAAAGTTGATAAATGAAAGGTCATGCAAAAGAAAAACTTGCTGACATTAAAGATACCATTAAGGGTGCTTCAGAGAGCTTTAAGAAAAAGGAC

SEQ ID NO: 11036 - protein, 65 aa, Streptococcus agalactiae; identical to SEQ ID NO: 6750

SEQ ID NO: 11037 - protein, 540 aa, Streptococcus agalactiae
ATGACTGAAACTTACATCAAAAACACAACTAACAATTCTGGCACGACAGCTGTTCGTGGAGAATTAACTTTTGAAGATAAAGTGATTGAAAAAATTGTTGGAATTGCGATTGAGCATGTAGATGGTCTTTTGGCTGTAAATGGTGGTTTTTTCTCAAATTTAAAAAATAGCGTTGTAAATTCTGATTCAGTTACAGATGGCGTAAATGTTGAAGTGGGTAAAAAGCAAGTTGCAGTTGATTTGGATATTGTTGCTGAATACCAAAAACATGTTCCAACTATCTTTGCCGATATCAAAAAAGTTGTTGAAGCTGAAGTGAAACGTATGACAGACCTTGAAGTGGTTGAAGTTAATGTTAATGTTGTTGATATTAAAACTCGTGCTCAACATGAAGAAGATTCAGTAACTCTTCAAGATCGTGTAACAAATGCAGCACAAGCAACAGGTGAATTTGCTTCGAATCAAGTTTCAAACGTTAAAAGTGCCGTAAGTAGCGGTGTTGATAAAGTGGAAGACATGAAGTCTGAACCACGTGTACAA

SEQ ID NO: 11038 - protein, 180 aa, Streptococcus agalactiae
MTETYIKNTTNNSGTTAVRGELTFEDKVIEKIVGIAIEHVDGLLAVNGGFFSNLKNSVVNSDSVTDGVNVEVGKKQVAVDLDIVAEYQKHVPTIFADIKKVVEAEVKRMTDLEVVEVNVNVVDIKTRAQHEEDSVTLQDRVTNAAQATGEFASNQVSNVKSAVSSGVDKVEDMKSEPRVQ

SEQ ID NO: 11039 - protein, 192 aa, Streptococcus agalactiae
ATGTCAGAATTCGTGAGGAAATACAGATATCCACTAGGAGGTGCAGTTATTGGGCTCGTTTTAGCTGCTATGATTGTAACCATTGGATTCTTTAAAACAATTCTTGCTCTTGTTATCATTGTGCTAGGTGCTTATGCTGGACTTTATGTGCAAAGAACAGGTATGCTTGACCAATTCTTTAATAAGAGAAAA

SEQ ID NO: 11040 - protein, 64 aa, Streptococcus agalactiae; identical to SEQ ID NO: 6754

SEQ ID NO: 11041 - protein, 579 aa, Streptococcus agalactiae
ATGTCAAAAGGACTAAAAAGTTTATATACTTTACTAGGTCTAATCTCCCTTACCCTACTAGGATTTGTAGCTGTTATCAGTAAACAACACATTTATCTACCATCTTTTAATTGGTTAGATTGGGATTTTAATTTGCCATCACCGATTGACGTTGGTATGTATCATTATTTCTTTTGGGGAGCATTAGTGCTGTTTGTAATCGTTTTACTGGCTATATTGGTAGTTCTGTTTTATCCAAGACGATACACAGAGTATAAACTAGCTGATAAAACTGGTAAATTGATGTTAAAAAAATCTGCAATAGAGGGATTTGTTAAAACAGAAGTATTAAAAACTGGTTTGATGAAATCTCCTAGTGTGACAGCTCATTTATATAAGAAAAAAGTGAAAGTTGATGTTAAAGGTCTTTTAACTTCTCGTACAAATGTACCGGAACAACTTGAACATATTCAAAGTGATGTTGAACTTGGCTTAAAAGAATTCTTTGGGTTGGAAAAGAAAATGAACACTAGAGTATTTGTTAAGCAAGTTGAAGAAGAAAATGTTGGAAATGCTAAGACGAATAAAAGTCGTGTAGAA

SEQ ID NO: 11042 - protein, 193 aa, Streptococcus agalactiae
MSKGLKSLYTLLGLISLTLLGFVAVISKQHIYLPSFNWLDWDFNLPSPIDVGMYHYFFWGALVLFVIVLLAILVVLFYPRRYTEYKLADKTGKLMLKKSAIEGFVKTEVLKTGLMKSPSVTAHLYKKKVKVDVKGLLTSRTNVPEQLEHIQSDVELGLKEFFGLEKKMNTRVFVKQVEEENVGNAKTNKSRVE

SEQ ID NO: 11043 - protein, 246 aa, Streptococcus agalactiae
ATGAGTTTAATTTGGTCATTAATCGTAGGTGCTATTATCGGTGCTATTGCAGGGGCTGTTACTAACAAAGGTGGATCAATGGGTTGGATAGCTAACATCTTAGCTGGTTTAGTTGGTTCATTTGTTGGTCAAAGTTTACTAGGAACATGGGGGCCTAAATTAGCAGGTATGGCTTTGATTCCTTCAATCGTAGGTGCGATTATTGTTGTCATTGTTACTTCATTTGTACTAGGTAAAATGAATAAC

SEQ ID NO: 11044 - protein, 82 aa, Streptococcus agalactiae; identical to SEQ ID NO: 6758

SEQ ID NO: 11045 - protein, 336 aa, Streptococcus agalactiae; identical to SEQ ID NO: 6759

SEQ ID NO: 11046 - protein, 112 aa, Streptococcus agalactiae; identical to SEQ ID NO: 6760

SEQ ID NO: 11047 - protein, 2277 aa, Streptococcus agalactiae
ATGAATCCTTTAATAATTGGAATGAATGATAAACAAGCAAAAGCGGTACAAACGACAGACGGACCGCTTTTGATTATGGCAGGAGCTGGCTCTGGAAAAACACGTGTCCTGACTCATCGTATTGCTTATTTAATAGATGAAAAATATGTTAATCCTTGGAATATTTTAGCGATTACTTTTACTAATAAAGCAGCGCGTGAAATGCGTGAACGTGCTATCGCCTTGAATCCAGCTACCCAAGATACTTTGATTGCAACTTTTCATAGTATGTGTGTTCGTATTTTACGTCGTGAAGCTGATTATATTGGATATAATCGTAACTTTACAATCGTTGATCCAGGTGAGCAGCGTACTTTAATGAAGCGAATCATTAAGCAATTAAATTTGGACACAAAAAAGTGGAATGAACGTTCAATTTTAGGTACAATCTCTAATGCTAAAAATGACCTTCTTAATGAAATTGCATATGAGAAGCAAGCCGGAGATATGTATACACAGGTAATTGCTAAATGCTATAAAGCTTATCAAGAGGAATTACGTAGAAGTGAGGCCATGGATTTCGATGACTTGATTATGATGACACTTCGACTATTTGATCAGAATAAAGATGTTTTGGCCTATTACCAACAGAGGTATCAATATATCCATGTAGACGAGTATCAAGATACTAACCACGCTCAATACCAATTAGTTAAGTTATTAGCTTCGCGTTTCAAAAATATTTGTGTTGTTGGTGATGCCGATCAATCTATTTATGGATGGCGTGGAGCTGATATGCAAAATATTCTTGATTTTGAAAAGGACTATCCGCAAGCAAAAGTTGTATTATTAGAAGAAAATTATCGCTCAACTAAGAAAATACTTCAAGCTGCTAATAATGTGATCAATCATAATAAAAATCGCCGTCCTAAAAAATTATGGACTCAAAATGATGAAGGTGAGCAAATTGTATATCATAGAGCTAACAATGAGCAAGAAGAAGCCGTTTTTGTAGCATCAACTATTGATAACATCGTTCGAGAACAAGGAAAAAATTTCAAAGATTTTGCCGTTCTTTATCGTACGAATGCGCAATCTCGTACTATTGAGGAAGCACTTTTAAAATCAAATATTCCATATACAATGGTTGGTGGAACGAAATTCTATAGTCGCAAAGAAATTCGAGATGTTATTGCTTATCTCAATATCCTTGCAAATACTTCTGATAATATTTCTTTTGAGCGGATTGTAAATGAACCTAAAAGAGGGGTGGGGCCAGGAACTTTAGAAAAAATACGGTCATTTGCCTATGAACAGAGCATGTCTCTTCTTGATGCCTCTTCAAATGTCATGATGTCGCCCTTAAAAGGGAAGGCTGCTCAAGCTGTTTGGGATTTAGCTAATCTGATTTTGACTCTACGTAGTAAGCTAGATAGTTTAACTGTGACGGAGATTACAGAAAACCTACTGGATAAGACAGGATATCTAGAAGCACTTCAAGTTCAAAATACATTAGAAAGTCAAGCGCGTATTGAAAATATTGAAGAATTCTTGTCAGTGACTAAAAATTTTGACGATAACCCTGAGATTACAGTAGAGGGTGAAACTGGTTTAGATCGTCTATCGCGTTTTTTAAATGATTTAGCTTTAATAGCAGATACTGATGATAGCGCCACTGAAACGGCTGAGGTCACTTTAATGACATTACATGCTGCCAAGGGTCTAGAATTTCCAGTTGTTTTCTTAATCGGTATGGAAGAAGGAGTATTTCCTTTATCGCGTGCAATAGAGGATGCTGATGAATTAGAAGAAGAGCGTCGTTTAGCTTATGTCGGGATTACGAGAGCAGAACAAATACTTTTCCTTACCAATGCTAATACCCGTACTTTATTTGGTAAAACTAGTTATAATAGACCAACCCGTTTTATACGTGAGATTGATGATGAGCTGATACAATATCAAGGGTTAGCTCGACCAGTTAATTCTTCATTTGGTGTGAAATATTCAAAAGAACAGCCTACACAATTTGGTCAAGGAATGAGTCTTCAACAAGCGCTTCAAGCACGTAAAAGTAATTCACAACCTCAAGTAACTGCCCAACTCCAGGCTCTTAACACGAACAATAGCCATGAGACATCATGGGAGATTGGTGATGTTGCAACTCATAAAAAATGGGGGGACGGTACGGTGCTTGAAGTTTCAGGTAGCGGAAAGACTCAAGAGTTAAAAATAAATTTTCCAGGTATTGGGTTAAAGAAATTATTAGCGAGTGTCGCTCCTATTAGCAAAAAGAAAAAC

SEQ ID NO: 11048 - protein, 759 aa, Streptococcus agalactiae
MNPLIIGMNDKQAKAVQTTDGPLLIMAGAGSGKTRVLTHRIAYLIDEKYVNPWNILAITFTNKAAREMRERAIALNPATQDTLIATFHSMCVRILRREADYIGYNRNFTIVDPGEQRTLMKRIIKQLNLDTKKWNERSILGTISNAKNDLLNEIAYEKQAGDMYTQVIAKCYKAYQEELRRSEAMDFDDLIMMTLRLFDQNKDVLAYYQQRYQYIHVDEYQDTNHAQYQLVKLLASRFKNICVVGDADQSIYGWRGADMQNILDFEKDYPQAKVVLLEENYRSTKKILQAANNVINHNKNRRPKKLWTQNDEGEQIVYHRANNEQEEAVFVASTIDNIVREQGKNFKDFAVLYRTNAQSRTIEEALLKSNIPYTMVGGTKFYSRKEIRDVIAYLNILANTSDNISFERIVNEPKRGVGPGTLEKIRSFAYEQSMSLLDASSNVMMSPLKGKAAQAVWDLANLILTLRSKLDSLTVTEITENLLDKTGYLEALQVQNTLESQARIENIEEFLSVTKNFDDNPEITVEGETGLDRLSRFLNDLALIADTDDSATETAEVTLMTLHAAKGLEFPVVFLIGMEEGVFPLSRAIEDADELEEERRLAYVGITRAEQILFLTNANTRTLFGKTSYNRPTRFIREIDDELIQYQGLARPVNSSFGVKYSKEQPTQFGQGMSLQQALQARKSNSQPQVTAQLQALNTNNSHETSWEIGDVATHKKWGDGTVLEVSGSGKTQELKINFPGIGLKKLLASVAPISKKKN

SEQ ID NO: 11049 - protein, 384 aa, Streptococcus agalactiae
ATGAAATTCAATTTAGAACAAGTAAAAGTATTTGAGAATTACGAAATTGAGAACTGGGAAGAAGGTCAAGTTACCTTAACAACGAAGGTCGTTGACTCTTCGCTCAACTATTATGGTAATGCTCATGGTGGTTATTTGTTTACACTGTGTGATCAAGTCAGTGGTTTAGTTGCTATTTCAACAGGATATGAAGCGGTAACTCTACAATCAAATATCAACTATTTGAGGGCAGGCCGATTAGATGATCTGCTTACTGTCATCGGTACTTGTGTTCATAATGGTCGTACTACAAAAGTCGTTGATGTTCACATTAAAAATCAGAAAGGCGAAATGGTTACAACTGCTATTTTTACAATGTTTGTAACTGGAGAAAGAAAAGAGAAG

SEQ ID NO: 11050 - protein, 128 aa, Streptococcus agalactiae; identical to SEQ ID NO: 2130

SEQ ID NO: 11051 - protein, 1323 aa, Streptococcus agalactiae
ATGACTTTAAATGCTAAAGGTGAAAGTAATCAAATTCTAGTAGATAAGGAAGTACATTCTACTAACTTATTACTAGATATCGATGAAAAACCAGAATTATTTCAAGGTTTGTTGTTAAGTTTTCAACATGTTTTTGCCATGTTTGGAGCTACGATATTAGTTCCGCTTATTTTAGGGATGCCTGTATCAGTGGCTTTATTTGCTTCTGGTTGCGGAACGCTCATTTATCAAGTTGCGACAAAATTTAAAGTCCCTGTTTACCTAGGCTCATCATTTGCTTATATTACAGCTATGGCATTAGCCATGAAACAAATGCATGGCGATATTTCGGCTGCTCAAACAGGTATTCTTTTTGTAGGTCTAATCTATGTCGTTGTGGCGACGGTTATTAAGTTCGTAGGAAATTCATGGGTTGATAAGATTTTGCCACCAATAATCATTGGACCTATGATTATTGTTATTGGTTTAGGTTTGGCAAACTCTGCTGTAACTAATGCAGGTTTTGTCGCTAAAGGTGATTGGCGTAAAATGCTAGTTGCTGTTGTTACATTCTTGATTGCAGCTTTTATCAATACTAAAGGGAAAGGTTTTATCAAGATTATTCCATTTTTATTTGCAATTATTGGAGGTTATATTTTATCAATCATTCTTGGCTTGGTAGATTTATCTCCAGTTGAAAAAGCTGCCTGGTTTGAATTACCAAAATTCTATTTACCGTTTAAGACAGGTTTATTTCACAGTTATAAACTTTACTTTGGACCAGAAATGCTTGCAATCCTTCCAATCTCAATTGTAACGATTGCTGAAAATATCGGTGATCATACAGTTTTAGGTCAGATTTGTGGGCGTAACTTTCTAAAAAAACCAGGTTTAAATCGTCTTTTAATTGGAGATGGTTTAGCAACCGCATTTTCTGCTCTTATAGGAGGACCAGCTGAAACTACTTATGGTGAAAATACAGGTGTTATTGGTATGACGCGTATAGCTTCTGTAACGGTTATTCGTAATGCAGCTTTTATTGCAATCGCTTTTTCATTCTTTGGTAAATTTACAGCTTTGATCTCTACAATTCCTAGTGCAGTACTTGGTGGAATGGCTATATTACTTTATGGTGTTATTGCAAGTAATGGATTAAAAGTGTTGATTGAAAATCGTGTCAATTTTGCTGAGGTTCGTAATCTAATTATTGCCAGTTCCATGTTAGTTTTAGGCCTCGGTGGAGCAGTCCTTGATCTAGGTGCTCTAACTTTATCAGGAACAGCATTAAGTGCTATAGTGGGTATTATATTAAATTTAATATTGCCAAAAGAAAGCATGAAATCA

SEQ ID NO: 11052 - protein, 441 aa, Streptococcus agalactiae
MTLNAKGESNQILVDKEVHSTNLLLDIDEKPELFQGLLLSFQHVFAMFGATILVPLILGMPVSVALFASGCGTLIYQVATKFKVPVYLGSSFAYITAMALAMKQMHGDISAAQTGILFVGLIYVVVATVIKFVGNSWVDKILPPIIIGPMIIVIGLGLANSAVTNAGFVAKGDWRKMLVAVVTFLIAAFINTKGKGFIKIIPFLFAIIGGYILSIILGLVDLSPVEKAAWFELPKFYLPFKTGLFHSYKLYFGPEMLAILPISIVTIAENIGDHTVLGQICGRNFLKKPGLNRLLIGDGLATAFSALIGGPAETTYGENTGVIGMTRIASVTVIRNAAFIAIAFSFFGKFTALISTIPSAVLGGMAILLYGVIASNGLKVLIENRVNFAEVRNLIIASSMLVLGLGGAVLDLGALTLSGTALSAIVGIILNLILPKESMKS

SEQ ID NO: 11053 - protein, 1260 aa, Streptococcus agalactiae
ATGCTAACACTTTTTACTCATATCAATAGCTTCGTTTGGGGTCCACCTTTACTTGCTTTATTAGTCGGAACAGGTATTTACCTATCATTTCGCTTAGGTTTTATTCAATTGAGACAACTTTCTAGAGCTTTCAAATTGATTTTCCGAGAGGATAACGGGCAAGGAGATATTTCAAGTTATGCTGCCCTTGCAACTGCTCTTGCTGCAACGGTAGGGACAGGTAATATCGTTGGTGTGGCTACGGCTATTAAATCTGGAGGACCAGGAGCTTTGTTTTGGATGTGGGTAGCCGCCTTTTTTGGAATGGCAACAAAATACGCAGAAGGATTATTAGCTATCAAATATCGCACAAAAGATACTAATGGAGAAATTTCTGGGGGACCAATGTACTACATTGTCAATGGAATGGGACAAAAATGGAAACCATTAGCAGTCTTTTTTTCTGCAGCAGGTATCTTAGTAGCTCTTTTAGGAATAGGGACATTCACTCAAGTCAATGCAATTACCTCTTCTCTTGAGCATACTTTCAAAATATCAACTAGATTTACCAGCCTCATTCTTGCTGTTATAGTATTATTTATTATATTTGGAGGTATAAAATCTATTTCAAAAGTTTCAGAAAAAATAGTGCCTTTTATGGCTATAAGCTATATTTTAGCAACTCTGATTATTATTGCAGTTAATTACAATAAGATTCCACATACTTTCCAACTCATCTTTAGCGGTGCTTTTTCTGGGACAGCAGCCATTGGTGGTTTTTCTGGAGCTATCGTTAAAGAAGCAATTCAAAAGGGAATTGCTAGAGGAGTTTTCTCAAATGAATCTGGATTGGGTTCTGCTCCAATAGCTGCAGCAGCAGCTAAAACAAAAGAACCTGTTGAACAAGGGCTTATTTCAATGACAGGAACCTTCATTGACACTATTGTTATTTGTACTTTGACAGGGATTGCAATTTTAGTTACAGGAAAATGGCTAGAATTTGATTTACAGGGTGCTCCATTAACACAAGCATCTTTTAATACCGTATTTGGCTCACTAGGTAGTTTTGCTCTAACCTTCTGCCTTGTCTTATTTGCTTTTACTACTATTTTAGGATGGAGCTACTACGGAGAGCGTTGCTTTGAATATCTATTTGGGACTAAATTTATTAACGCTTATCGTATTATTTTTGTCATTATGGTTGGCTTAGGTGGTTTCTTACAGCTCGATCTTATTTGGGTTATCGCTGATATCGTTAATGGTTTAATGGCTTTACCAATC

SEQ ID NO: 11054 - protein, 420 aa, Streptococcus agalactiae
MLTLFTHINSFVWGPPLLALLVGTGIYLSFRLGFIQLRQLSRAFKLIFREDNGQGDISSYAALATALAATVGTGNIVGVATAIKSGGPGALFWMWVAAFFGMATKYAEGLLAIKYRTKDTNGEISGGPMYYIVNGMGQKWKPLAVFFSAAGILVALLGIGTFTQVNAITSSLEHTFKISTRFTSLILAVIVLFIIFGGIKSISKVSEKIVPFMAISYILATLIIIAVNYNKIPHTFQLIFSGAFSGTAAIGGFSGAIVKEAIQKGIARGVFSNESGLGSAPIAAAAAKTKEPVEQGLISMTGTFIDTIVICTLTGIAILVTGKWLEFDLQGAPLTQASFNTVFGSLGSFALTFCLVLFAFTTILGWSYYGERCFEYLFGTKFINAYRIIFVIMVGLGGFLQLDLIWVIADIVNGLMALPI

SEQ ID NO: 11055 - protein, 1044 aa, Streptococcus agalactiae
TTGGCTAGTCAACCAGCCGACTCAAACCATCGTTTTGGTCACTGGAAAATTGAAGATTTAGCAAGCCTGATCACCTCTTTTATCATGTTTGTTGTAGGTATTCAAGTTTTTATTCAAACTGTCACTAAGATTATTAATAATACTGATACTAACATTGATCCTCTAGGTGCTATAGTAGGTGCTATATCTGCTCTTGTTATGCTTGGCGTTTATCTCTATAATAAACAATTATCTCAAAGAGTAAAGTCTAGCGCTCTGGTTGCAGCTTCTAAAGATAACCTTTCTGATGCTGTGACATCTATCGGCACATCTATTGCTATCATTGCAGCTTCTCTAAATTTTCCTATTATTGATCGTTTAGCTGCTATCATTATTACTTATTTTATTCTTAAAACAGCTTATGATATTTTTATAGAATCTGCTTTCAGCTTATCGGATGGTTTCGATGATTATCAATTAAAACAATACGAAAAAGCTATATTAACAATTCCTAAAATATCCGCTGTAAAATCTCAACGTGGACGTACTTACGGTAGTAATATTTACCTTGATATTGTTCTCGAAATGAACCCTGATCTCTCAGTCTTTGAAAGTCATGCCATTACCGAAAGAGTGGAAAAACTACTCAGTGATAAATTTTCTGTATATGACATAGATATTCATGTAGAACCCGCTTCTATTCCAGAAGACGAAATTTTCGATAATGTTTACCAAAAATTATACAAAAATGAAAAAATCATCCTAGCAAAAATTCCCGGTTATGAGACCTTTATTAGCCCTGACTTTTATATGATTAATGAAAAGGGAAATATTATCACTTCTGACATGCTTACTAATGCTACAAATCATTCATTGGCAAGCAACTTTAAATATTTCAATGTAAAATCAATTAGTCAAAAAACAAAACTTGTGTCTTATGAATTGGAAGGTAAACGACATACTAGTATTTGGCGCCGTAATGAAAAATGGTTCTTAATCTACCATCAAATAACTGCCAAGTCAAGTCCGTATAAAACGAGACGATATCAAATCACTTCCCTTGAT

SEQ ID NO: 11056 - protein, 348 aa, Streptococcus agalactiae
MASQPADSNHRFGHWKIEDLASLITSFIMFVVGIQVFIQTVTKIINNTDTNIDPLGAIVGAISALVMLGVYLYNKQLSQRVKSSALVAASKDNLSDAVTSIGTSIAIIAASLNFPIIDRLAAIIITYFILKTAYDIFIESAFSLSDGFDDYQLKQYEKAILTIPKISAVKSQRGRTYGSNIYLDIVLEMNPDLSVFESHAITERVEKLLSDKFSVYDIDIHVEPASIPEDEIFDNVYQKLYKNEKIILAKIPGYETFISPDFYMINEKGNIITSDMLTNATNHSLASNFKYFNVKSISQKTKLVSYELEGKRHTSIWRRNEKWFLIYHQITAKSSPYKTRRYQITSLD

SEQ ID NO: 11057 - protein, 390 aa, Streptococcus agalactiae
ATGAAATTATACGTTCAATTAATGGTTATTTTAACCTTTTCATTCGCTGGTGAGGTTCTATCTACTATATTCAACTTACCTGTACCAGGTAGTATTATTGGATTAATATTACTATTCCTAGCGTTAAAATACAAAATCATCAGGCTCAGGCATATTGATGCCGTGGGGAATTTTCTATTAGCAAATATGACCATTTTATTTTTACCACCAGCAGTTGGACTGATGGAGCACTTTCAAGACATAAAGCCCTATCTTTTTGGAATAGCTATCATTATCTTAGGAGCGCTATTTCTCAATATTCTAACTATTGGACTGGTATCCCAATGGATCAAAAAGAGATATGAAGGAGATTATCCAGAAATTGGAGGTAAAAATGGCAACTTTAACGAA

SEQ ID NO: 11058 - protein, 130 aa, Streptococcus agalactiae; identical to SEQ ID NO: 2138

SEQ ID NO: 11059 - protein, 693 aa, Streptococcus agalactiae
ATGGCAACTTTAACGAATAACCCTATCTTTGGTATTATGTTAACCGTATGGGCGTATTACATTGGCATAAGGATTTTTAGAAAATATCCTTCCCCTGCAACAACTCCACTTCTTTTGGCGACTATTTTATTAATTGCTTTTTTAAAATTAACACATATCTCCTATAAAGATTACTACAATGGCGGTTCATTTCTAACGATGTTAATTACGCCTTCAACGGTTGTATTGGCTATTCCTCTCTATAGAACCTTTCATTTAATGAAGCATCACATTAAAAGTATTAGCATTAGCATCATCTTAGCTTCTGTTATCAACACAGTTTTTACCGCAATAGTTGCTAAGTTTTTTGGTATGAAATATTTCTTAGCAATCTCACTTTTCCCAAAGTCCGTAACTACAGCTATGGCCGTTGGAATTACAAGTAAAGCAGGTGGATTAGCTACTATCACTCTGGTCGTAGTTGTTATTACAGGCATCTTAACAAGCGTTTTGGGTCCTATTTTTCTAAAATTATTAAGGATAGAAGATCCTGTTGCTATAGGGCTCGCGCTAGGAGGAACTGGGCATGCTATAGGAACTGGACAAGCCTTAAAATATGGCCAAGTTCAAGGCGCCATGGCTGGACTAGCAATTGGTATCACAGGGATTTGCTATGTTATTGTCAGTCCTTTAGTTGCAGGCTTAATATTGAAA

SEQ ID NO: 11060 - protein, 231 aa, Streptococcus agalactiae; identical to SEQ ID NO: 2140

SEQ ID NO: 11061 - protein, 360 aa, Streptococcus agalactiae
ATGATACCGTTAAAAAAAATAACTGTTGGAACGATTGTCTGTCTCTCATTTTTGGGTTTAACAGCATGCTCTTCTTCAAATACTCAGCAAACCTCTACTTCAAAATCAAATGTATCACAACATAAAAATATCAAAGCTGACCACGAAGAATTACGTTTGAAATTTAATAAAGTAAAGTTAGGGGTTAAAGCAAATAACTTTAAAGGAGGCACTAGTCTCGCTGAATACAATTATTTGGTGGCGAACAAATGAAAATGATAAGCGGGAAATGTCACTCTAAGGCTATCGTTGGAATGTCGATGATATCTCCATCACTATACATTATTAACGATAGTAGCATTGGTCGTTCATTTAGTATTT

SEQ ID NO: 11062 - protein, 123 aa, Streptococcus agalactiae
  VARIANT 86, 110, 112: Xaa = Any Amino Acid
MIPLKKITVGTIVCLSFLGLTACSSSNTQQTSTSKSNVSQHKNIKADHEELRLKFNKVKLGVKANNFKGGTSLAELTIIWWRTNEXLITAGNVTLKAIVGMSMISPSLYXYXTIVALVVHLVF

SEQ ID NO: 11063 - protein, 527 aa, Streptococcus agalactiae
ATGATACCGTTAAAAAAAATAACTGTTGGAACGATTGTCTGTCTCTCATTTTTGGGTTTAACAGCATGCTCTTCTTCAAATACTCAGCAAACCTCTACTTCAAAATCAAATGTATCACAACATAAAAATATCAAAGCTGACCACGAAGAATTACGTTTGAAATTTAATAAAGTAAAGTTAGGGGTTAAAGCAAATAACTTTAAAGGAGGCACTAGTCTCGCTGAATTAAAACAATTATTTGGTGGCGAACCAAATGAAAAATTTGATACACCAGCGGGAAATGTCACTCTTAAAGGCTATCGTTGGAATGTCGATGATATCTCCATCACTATACAATTATTAAACGATAGTAGCATTGTTCGTTCAATTAGTAATTTTAAGTTTATTCGTGATGCCAACATCACAACAAAAGATTATAATAGTTTAAAAAATAGTCATACAATAAAGTAAAAGAACTTCTAGGAGAACCTGATGATATTTCTCAAGCAGTTCTTCAGATAAAGAGGAACTACANNNNNTTAATTAAT

SEQ ID NO: 11064 - protein, 177 aa, Streptococcus agalactiae
  VARIANT 145, 146, 173, 174: Xaa = Any Amino Acid
MIPLKKITVGTIVCLSFLGLTACSSSNTQQTSTSKSNVSQHKNIKADHEELRLKFNKVKLGVKANNFKGGTSLAELKQLFGGEPNEKFDTPAGNVTLKGYRWNVDDISITIQLLNDSSIVRSISNFKFIRDANITTKDYNSLKNXXSYNKVKELLGEPDDISQAVLQIKRNYXXLIN

SEQ ID NO: 11065 - protein, 153 aa, Streptococcus agalactiae
TTGGGGTATAGCCAAGCGGTAAGGCAAGGGACTTTGACTCCCTCATGCGTTGGTTCGAATCCAGCTACCCCAGTCAAAGGTATCAAACTTTTGTTTGACACCGTCAAAGAGATATATGTTGTCCTTGCGGGTTACCTTGAGAAAATATATTGT

SEQ ID NO: 11066 - protein, 51 aa, Streptococcus agalactiae
MGYSQAVRQGTLTPSCVGSNPATPVKGIKLLFDTVKEIYVVLAGYLEKIYC

SEQ ID NO: 11067 - protein, 228 aa, Streptococcus agalactiae; identical to SEQ ID NO: 6791

SEQ ID NO: 11068 - protein, 76 aa, Streptococcus agalactiae; identical to SEQ ID NO: 4036

SEQ ID NO: 11069 - protein, 1019 aa, Streptococcus agalactiae
ATGACAGTAAATTTAGATTGGGATAATTTAGGTTTTGCTTACAGAAAATTACCATTCCGATACATTTCGCATTTTAAAGATGGGAAATGGGATGATGGCAAGTTGACAGATGATGCAACGCTACATATTTCAGAAAGTTCTCCTGCCCTCCACTATGGGCAACAAGCTTTTGAAGGATTGAAAGCTTATAGAACTAAAGATGGCTCTATTCAGTTATTTCGTCCAGATCAAAATGCAGAACGACTTCAAAGAACAGCAGATCGTCTTTTAATGCCACATGTTCCGACAGACAAATTTATTGCAGCGGTTAAATCTGTTGTACGCGCTAATGAGGAGTTTGTTCCACCGTATGGTACAGGGGCAACATTATACATTCGTCCCTTATTAATTGGTGTGGGAGATATTATTGGAGTTAAACCTGCTGAAGAATATATTTTTACGGTATTTGCAATGCCAGTAGGTAGTTATTTTAAAGGTGGTTTAACACCAACTAACTTTATTGTTTCCAAAGAATATGATAGAGCAGCACCGAATGGTACAGGAGCTGCAAAAGTTGGTGGTAACTATGCTGCTAGTCTTCTTCCTGGGAAATACGCTCATGAGAAACAATTTTCAGATGTTATCTATCTTGATCCAGCGACACATACTAAAATTGAAGAGGTTGGAGCAGCTAATTTCTTTGGAATTACTAAAGATAATCAGTTTATCACCCCTTTGAGTCCTTCAATTTTACCTTCAATTACTAAATATTCATTGCTTTACCTTGCTAAAGAAAGGTTTGGTATGGAAGCGATTGAAGGAGATGTCTTTGTCGACGAATTAGATAAATTCACAGAAGCTGGCGCATGTGGTACAGCCGCAGTTATTTCACAATTGGAGGAATTCAAAACGGAGATGACTTCCATGTCTTCTACAGTGAGACAGAAGTTGGTCCAGCGACACGTAAACTATATGATGAGTTAGTAGGGATCCAGTTTGGTGATGTTGAAGCACCAGAAGGGTGGATTTATAAAGTAGAT

SEQ ID NO: 11070 - protein, 340 aa, Streptococcus agalactiae; identical to SEQ ID NO: 6794

SEQ ID NO: 11071 - protein, 2457 aa, Streptococcus agalactiae
ATGTCTAATATTCAAAATATGTCCCTTGAGGACATTATGGGAGAGCGTTTTGGGCGCTATTCTAAGTATATCATTCAAGAACGGGCGTTGCCGGATATTCGTGATGGCTTAAAACCTGTTCAACGTCGAATCCTTTATTCAATGAATAAAGATGGTAATACTTTTGAAAAGGGATTTCGCAAATCTGCAAAATCAGTCGGTAATGTTATGGGGAATTTCCATCCTCATGGGGATTCCTCTATCTATGACGCGATGGTTCGTATGTCTCAAGATTGGAAAAATCGTGAGACATTGATTGAAATGCACGGAAATAATGGTTCTATGGATGGAGATCCTGCGGCGGCTATGCGTTATACGGAAGCCCGTCTATCAGAAATTGCTGGTTATCTTCTTCAAGATATTGATAAGAATACCGTACCCTTTGCCTGGAATTTCGATGATACAGAGAAAGAACCAACTGTTTTACCAGCTGCCTTTCCCAATCTTTTAGTCAACGGAGCAACAGGAATATCTGCAGGCTATGCAACAGATATTCCACCACATAATTTAGCAGAAGTCATTGATGCTGTCGTGTACATGATTGATCACCCTAAAGCTAAATTAGATAAATTAATGGAATTTCTACCTGGTCCAGATTTTCCAACTGGCGCTATCATTCAAGGAAAAGATGAAATTCGTAAGGCATATGAGACTGGTAAGGGGAGAGTAGCGGTTCGCTCGCGAACTGCTATTGAAACCTTAAAAGGTGGTAAGAAACAAATTATTGTTACTGAAATTCCTTATGAAGTTAATAAGTCAGTTTTAGTAAAACGAATCGATGATGTTCGTGTTAATAATAAAGTTCCAGGAATAGCAGAGGTGCGTGATGAGTCTGATAGAGATGGTCTTCGTATCGCTATTGAGCTCAAAAAAGAAGCCGATGAAACAATTGTCTTAAATTATCTTTTTAAATATACAGACCTACAAGTGAATTATAATTTCAATATGGTTGCTATTGATGACTACACCCCTAAGCAGGTGGGTCTATCAAGAATATTAACTAGCTATATCGCTCACCGAAGAGAAATTATTATTGCTCGTTCAAAATTTGATAAAGAAAAAGCCGAAAAACGTCTCCATATTGTTGAGGGACTGATTAGGGTTCTTTCTATTTTGGATGAAGTGATTGCATTAATTCGTGCTTCTGAGAATAAAGCTGATGCGAAAGAGAATTTGAAGGTCAGCTATGAGTTTTCAGAAGCCCAAGCAGAGGCTATCGTCACATTGCAATTATATCGTCTCACAAATACTGATATTGTGACGTTGAGAGAAGAAGAAGAAGAACTTCGTCAACAAATCACAATGCTTAAGGCAATTATTAGTGATGAACGTACGATGTATAACGTAATGAAACGTGAGTTACGTGAGGTCAAAAAGAAATTTGCCAATACTAGACGTTCTGAACTTCAAGAATTAGCTGAAACTATTGAAATCGATACTGCAAGTTTAATTATCGAAGAGGACACATACGTCAGTGTTACTAGAGGCGGATATGTAAAACGCACCAGTCCTCGCTCTTTCAATGCATCAACTGTTGATGAACTTGGTAAGCGAGAAGATGACGAATTGATATTTGTGAGCAATGCAAAGACTACCCAACATTTATTGATGTTTACTAACCTTGGTAATCTTGCTTATCGTCCAGTTCATGAATTAGCTGATATTCGATGGAAAGACGTTGGTGAACATTTATCACAAAATCTTGTTAACTTTGCTTCAAATGAAGAAATTATTTATGCTGAATTAGTAGATGATTTTACTAAAGAAACTTATTTTGCTGTCACTAGCTTAGGGCAAATAAAGCGTTTTGAACGTCAAGAAATCAGTCCATGGCGGACATATAAGTCAAAAACAGCTAAATATGCTAAGTTAAAAAATGTAGATGATTACGTTGTGACTGTTGCTCCTATCCAATTAGAGGATGTTATACTTGTCACTTATAATGGTTATGCGTTGAGATTTAGTATAAATGATGTACCAGTCGTTGGTAGTAAAGCCGCAGGTGTAAAAGCGATGAATTTAAAAGATAGTGATCACATCGTATCTGCATTTATAGCTAACACCACAAGTTTATATTTATTAACTCATAGAGGAAGTCTTAAACGAATGGCCATTGATGTTATCCCCACAACTAGTCGTGCTAATCGAGGACTTCAAGTTCTTCGTGAATTGAAATCCAAACCGCATCGCGTTTTTAAAGCAGGACCTGTATATTTAGAGGATTCATCTTTTGAATTTGATTTATTTAGTTCAGTATCGAATCATGAAGGAGATACTTTCGTACTTGAGATTATGTCTAAAACAGGAAAAGTTTACGATGTTGATTTAAGTCAATGGAGTTTTTCTGAACGTACAAGTAATGGCTCTTTTGTATCTGATAAGATTTCTGACGAAGGAGTATTCTCAGTTAAAATTAAG

SEQ ID NO: 11072 - protein, 819 aa, Streptococcus agalactiae
MSNIQNMSLEDIMGERFGRYSKYIIQERALPDIRDGLKPVQRRILYSMNKDGNTFEKGFRKSAKSVGNVMGNFHPHGDSSIYDAMVRMSQDWKNRETLIEMHGNNGSMDGDPAAAMRYTEARLSEIAGYLLQDIDKNTVPFAWNFDDTEKEPTVLPAAFPNLLVNGATGISAGYATDIPPHNLAEVIDAVVYMIDHPKAKLDKLMEFLPGPDFPTGAIIQGKDEIRKAYETGKGRVAVRSRTAIETLKGGKKQIIVTEIPYEVNKSVLVKRIDDVRVNNKVPGIAEVRDESDRDGLRIAIELKKEADETIVLNYLFKYTDLQVNYNFNMVAIDDYTPKQVGLSRILTSYIAHRREIIIARSKFDKEKAEKRLHIVEGLIRVLSILDEVIALIRASENKADAKENLKVSYEFSEAQAEAIVTLQLYRLTNTDIVTLREEEEELRQQITMLKAIISDERTMYNVMKRELREVKKKFANTRRSELQELAETIEIDTASLIIEEDTYVSVTRGGYVKRTSPRSFNASTVDELGKREDDELIFVSNAKTTQHLLMFTNLGNLAYRPVHELADIRWKDVGEHLSQNLVNFASNEEIIYAELVDDFTKETYFAVTSLGQIKRFERQEISPWRTYKSKTAKYAKLKNVDDYVVTVAPIQLEDVILVTYNGYALRFSINDVPVVGSKAAGVKAMNLKDSDHIVSAFIANTTSLYLLTHRGSLKRMAIDVIPTTSRANRGLQVLRELKSKPHRVFKAGPVYLEDSSFEFDLFSSVSNHEGDTFVLEIMSKTGKVYDVDLSQWSFSERTSNGSFVSDKISDEGVFSVKIK

SEQ ID NO: 11073 - protein, 1947 aa, Streptococcus agalactiae
TTGGCTAAACAAGATATAACAGTGACGAATTATGGCGACGATGCTATTCAAGTCTTAGAAGGATTAGATGCTGTTCGTAAGCGTCCAGGGATGTATATAGGTTCCACAGATGGAACTGGTTTACATCATTTAGTGTGGGAAATTGTAGATAATGCAGTTGATGAAGCTCTATCAGGTTTTGGAAATCGCATTGATGTTATTATTAACAAAGATGGGAGTATAACTGTTACAGACCATGGACGCGGTATGCCAACTGGAATGCATGCTATGGGAAAACCTACTGTTGAAGTCATCTTCACGGTGCTTCATGCAGGTGGAAAATTTGGACAAGGTGGTTATAAAACATCAGGTGGTCTCCATGGTGTTGGATCATCTGTAGTTAATGCTTTGTCTTCTTGGTTAGAAGTTGAAATCATTCGCGACGGAGCTATTTACAGACAACGTTTTGAAAATGGTGGTAAGCCCGTTACAACCCTGAAAAAAATCGGCACGGCACCAAAATCAAAATCTGGGACATCTGTCAGCTTTATGCCAGATCAGTCAGTATTTTCAACGATAGATTTTAAGTTTAATACAATTGCAGAGCGCTTAAAGGAATCTGCCTTTCTCTTAAAAAATGTTACTTTAACCTTAACAGATAATCGTTCAGAAGAAGCAGAGCATCTAGAATTTCATTATGAAAACGGTGTTCAAGATTTTGTAGAGTATTTAAATGAAGATAAAGAAACGTTGACACCAATCATGTTTTTCGAAGGTGAAGAACAAGAATTTCATATCGAAGTTGCTTTGCAGTATAATGATGGTTTTTCAGATAATATTCTTTCTTTTGTCAATAATGTTCGTACTAAAGATGGTGGAACACATGAAACTGGCTTGAAATCAGCTATTACAAAGTCTATGAATGACTATGCACGTAAAACAGGACTTCTTAAAGAAAAAGATAAAAACCTTGAAGGTTCTGATTATCGTGAGGGGCTATCAGCCATTTTATCTATTCTTGTACCTGAGGAGCACTTGCAATTTGAAGGCCAAACTAAAGATAAACTAGGAAGTCCCTTAGCACGACCAATTGTTGATGGTATTGTTTCTGAAAAGTTAACTTACTTTCTTATGGAAAATGGAGATTTAGCATCTAATTTAATCCGTAAGGCAATAAAAGCACGTGATGCGCGTGAAGCTGCACGTAAAGCTCGTGATGAAAGTAGAAATGGGAAAAAGTCGAAAAAAGATAAAGGTCTACTTTCTGGAAAATTAACCCCTGCACAATCAAAAAATGCTAAGAAAAATGAACTCTATTTAGTCGAAGGAGACTCTGCAGGTGGCTCTGCTAAGCAAGGTCGTGATAGAAAGTTTCAAGCTATTTTACCGTTGCGAGGAAAAGTATTGAATACAGCTAAGGCAAAGATGGCTGATATTATAAAAAACGAAGAAATTAATACAATGATCCATACCATTGGTGCAGGTGTTGGTCCTGATTTTAATATTGACGATATTAATTATGATAAAGTTATCATTATGACCGATGCTGATACTGACGGAGCTCATATTCAGACACTATTATTAACTTTCTTTTATCGCTATATGAGACCTCTTGTTGAAGAGGGACATGTCTATATTGCTTTGCCACCTTTGTATAAAATGTCAAAAGGAAAAGGTAAGAAAGAAATTGTTGAGTATGCTTGGACGGATATAGAGTTAGAAGAATTACGACAAAAATTTGGTAAAGGCTCACTATTACAACGATATAAAGGGCTTGGGGAAATGAATGCCGATCAATTGTGGGAAACCACTATGAACCCTGAGACAAGGACATTAATTCGTGTAACAATTGAAGATTTAGCAAGAGCAGAACGTCGAGTTAATGTCTTGATGGGTGATAAAGTTCCTCCAAGACGCCAATGGATTGAAGATAATGTCAAGTTTACTTTAGAAGAGAATACAGTATTT

SEQ ID NO: 11074 - protein, 649 aa, Streptococcus agalactiae
MAKQDITVTNYGDDAIQVLEGLDAVRKRPGMYIGSTDGTGLHHLVWEIVDNAVDEALSGFGNRIDVIINKDGSITVTDHGRGMPTGMHAMGKPTVEVIFTVLHAGGKFGQGGYKTSGGLHGVGSSVVNALSSWLEVEIIRDGAIYRQRFENGGKPVTTLKKIGTAPKSKSGTSVSFMPDQSVFSTIDFKFNTIAERLKESAFLLKNVTLTLTDNRSEEAEHLEFHYENGVQDFVEYLNEDKETLTPIMFFEGEEQEFHIEVALQYNDGFSDNILSFVNNVRTKDGGTHETGLKSAITKSMNDYARKTGLLKEKDKNLEGSDYREGLSAILSILVPEEHLQFEGQTKDKLGSPLARPIVDGIVSEKLTYFLMENGDLASNLIRKAIKARDAREAARKARDESRNGKKSKKDKGLLSGKLTPAQSKNAKKNELYLVEGDSAGGSAKQGRDRKFQAILPLRGKVLNTAKAKMADIIKNEEINTMIHTIGAGVGPDFNIDDINYDKVIIMTDADTDGAHIQTLLLTFFYRYMRPLVEEGHVYIALPPLYKMSKGKGKKEIVEYAWTDIELEELRQKFGKGSLLQRYKGLGEMNADQLWETTMNPETRTLIRVTIEDLARAERRVNVLMGDKVPPRRQWIEDNVKFTLEENTVF

SEQ ID NO: 11075 - protein, 621 aa, Streptococcus agalactiae
ATGATTATCATTGCCTATCTGTTAGGCTCTATCCAAACTGGACTTTGGATTGGTAAATATTTTTACCAAGTCAATCTTCGTCAACACGGTAGTGGTAATACTGGCACCACGAATACCTTCCGTATTTTAGGTGTAAAAGCTGGCATTGTCACTTTGACTATTGACATTTTAAAAGGGACTCTAGCAACACTTATTCCTATCATGTTAGGTGTAACGACAGTATCTCCATTTTTTATCGGTTTTTTTGCTATTATAGGTCACACTTTCCCTATTTTTGCACAATTCAAAGGTGGGAAAGCCGTTGCTACAAGCGCTGGGGTTTTGCTAGGATTTGCACCTTCTTTTTTCCTTTACTTATTAGTTATCTTTTTATTAACGCTTTATCTTTTTAGCATGATTTCGCTATCCAGTATTACAGTAGCTGTCGTAGGTATCCTGAGTGTCTTAATTTTTCCATTAGTAGGTTTTATATTAACGGACTACGACTGGATATTTACCACTGTGGTTATCTTAATGGCCCTCACGATTATTATCCGACATCAGGATAATATCAAACGTATTCGAAAAAGGCAAGAAAATTTGGTTCCGTTTGGCTTAAACCTAAGTAAACAAAGAAATAAA

SEQ ID NO: 11076 - protein, 207 aa, Streptococcus agalactiae
MIIIAYLLGSIQTGLWIGKYFYQVNLRQHGSGNTGTTNTFRILGVKAGIVTLTIDILKGTLATLIPIMLGVTTVSPFFIGFFAIIGHTFPIFAQFKGGKAVATSAGVLLGFAPSFFLYLLVIFLLTLYLFSMISLSSITVAVVGILSVLIFPLVGFILTDYDWIFTTVVILMALTIIIRHQDNIKRIRKRQENLVPFGLNLSKQRNK

SEQ ID NO: 11077 - protein, 651 aa, Streptococcus agalactiae
ATGAAACATTCTAGTTGGCATGATTTAATAAAAAGAGAACTACCCAATCATTACTACAATAAAATTAATACATTTATGGATGCAGTTTACGAAAGCGGAATCGTTTATCCTCCAAGAGATAAGGTATTCAATGCCATACAGATAACACCACTAGAAAACGTAAAAGTAGTGATTATTGGCCAAGATCCTTACCATGGACCTCAACAAGCTCAAGGACTCTCATTTTCTGTTCCAGACAATTTACCAGCTCCTCCTTCACTTCAAAATATTCTAAAAGAATTAGCAGAAGATATCGGGTCACGTTCACATCATGACTTAACATCATGGGCGCAACAAGGAGTGCTGCTATTAAATGCTTGTTTAACAGTTCCAGAACACCAAGCTAATGGTCATGCTGGGCTTATATGGGAACCCTTTACTGATGCTGTTATCAAAGTGGTTAACCAAAAGGAAACACCCGTAGTCTTTATTCTGTGGGGTGGCTATGCTCGAAAGAAAAAGTCGCTAATTGATAATCCTATTCATCACATTATTGAGAGTCCTCATCCGAGTCCCCTATCTGCTTATCGTGGTTTCTTTGGTAGCAGACCTTTTTCTAGAACAAATCATTTCTTAGAAGAAAAAGGAATAAATGAGATTGATTGGTTAAAT

SEQ ID NO: 11078 - protein, 217 aa, Streptococcus agalactiae
MKHSSWHDLIKRELPNHYYNKINTFMDAVYESGIVYPPRDKVFNAIQITPLENVKVVIIGQDPYHGPQQAQGLSFSVPDNLPAPPSLQNILKELAEDIGSRSHHDLTSWAQQGVLLLNACLTVPEHQANGHAGLIWEPFTDAVIKVVNQKETPVVFILWGGYARKKKSLIDNPIHHIIESPHPSPLSAYRGFFGSRPFSRTNHFLEEKGINEIDWLN

SEQ ID NO: 11079 - protein, 483 aa, Streptococcus agalactiae
ATGAGAGAAACTGAAACACACGATCACCAAGCGCTAATTCAAAAATTGTTAGTCAGTATTCATTATTTAACCTTGTTTCGTGATGAAATTATATTAGTAGAAAAAACCCCATCTTTACTGGGGAAACATTTTTCTATTGCTATTGTGCAGAATGAACTAGGTGAGATACTTTCTAAAATAGAAGCTTTGAGTAAGCAAAAAAAACTGATTCGTTCTATTTATTGGTATGATGAATCGTCATTTAAAGTCATGAATAAGGCTCTGGCTATTGTAGAAGAATGGATTAAGGGCTTAGATAATCTTTTAGAATTCTGTCAATCACAGACGGTTTTTCAAGCAATTTTAGGTGATGAACGTGCACATGTATTTGGAATCCTTATTGATGTTTATACTTCTTTAAACATTATAAATACTTCTTTGAAAGAAGAAAATTCTAGACCAGTGTCCTTATCTGATTTGGCTCTAGGTCTTAAGGACGAAGAT

SEQ ID NO: 11080 - protein, 161 aa, Streptococcus agalactiae
MRETETHDHQALIQKLLVSIHYLTLFRDEIILVEKTPSLLGKHFSIAIVQNELGEILSKIEALSKQKKLIRSIYWYDESSFKVMNKALAIVEEWIKGLDNLLEFCQSQTVFQAILGDERAHVFGILIDVYTSLNIINTSLKEENSRPVSLSDLALGLKDED

SEQ ID NO: 11081 - protein, 1239 aa, Streptococcus agalactiae
ATGAAGCCAATTTGTATTATTCCTGCGCGATCAGGGTCAAAAGGATTACCAGATAAGAATATGTTATTCCTAGCAGGTAAACCCATGATTTTCCATACTATAGATGCTGCAATTGAATCTGGAATGTTTGATAAGAAAGATATTTTTGTTAGTACAGATTCAGAATTGTACAGAGAGATTTGTTTAGAACGCGGTATTTCAGTGGTGATGAGAAAACCGGAACTTTCAACTGATCAGGCAACTTCGTATGATATGTTAAAAGATTTTTTATCTGACTATGAAGATAATCAGGAGTTTGTGTTACTTCAAGTAACTTCTCCACTAAGAAAATCATGGCATATAAAGGAAGCAATGGAGTATTATTCTTCACATGATGTTGACAATGTTGTAAGTTTTTCTGAAGTTGAGAAACACCCTAGTCTGTTTACAACATTATCTGATGAAGGCTATGCTATAGATATGGTGGGAGCAGATAAAGGTTATCGTCGCCAAGATTTACAACCTTTATACTATCCGAACGGCGCTATTTTTATTTCTAATAAAGAAACTTACTTAAGGGAAAAAAGTTTTTTCACCTCTAAGACATATGCTTATCAAATGGCAAAGGAATTTTCATTAGATGTTGATACGAGAGATGATTTTATCCACGTCATCGGTCACCTCTTTTTCGATTATGCCATTAGGGAAAAAGAGAATAAAGTTTTTTATAAAGAAGGCTATAGTCGTTTGTTCAATAGAGAAGCTTCAAAGATAATTTTAGGTGATTCAAAAACGATATCTATCTCACTAGAAAGTTACCATAATTATTCCCAAGGTGGTGTAACATTAGCAACGATGTTGGAAAACTTACCTAACTTTTTGACAGCTAATGTAACAGAGGCTTTTGTTTCTATAGGGGTAAATGATCTCATTACAGGTTATAGTGTGGAAGAAATATTCAGCAATTTCCAAAAACTCTACTCATTATTAGCTGAGAATAAAATAAAGATGAGATTGACAACTATTGCTTACACCCTTTTTAGAGAAACTGTCAATAATGCAGATATTGAGAAAATCAATCAATGGCTAACAGAATTTTGTTATCAAAATCAGATTCCATTGTTAGATATTAATAGATTTTTATCAAAGGATGGTAATCTAAATTATCATTTAACTAGTGATGGATTGCATTTTACTCAAGAGGCTAATGATTTGTTACAAAGTCAATATCAATTATTTGTAGACGAAGTTAAAACCTTA

SEQ ID NO: 11082 - protein, 413 aa, Streptococcus agalactiae
MKPICIIPARSGSKGLPDKNMLFLAGKPMIFHTIDAAIESGMFDKKDIFVSTDSELYREICLERGISVVMRKPELSTDQATSYDMLKDFLSDYEDNQEFVLLQVTSPLRKSWHIKEAMEYYSSHDVDNVVSFSEVEKHPSLFTTLSDEGYAIDMVGADKGYRRQDLQPLYYPNGAIFISNKETYLREKSFFTSKTYAYQMAKEFSLDVDTRDDFIHVIGHLFFDYAIREKENKVFYKEGYSRLFNREASKIILGDSKTISISLESYHNYSQGGVTLATMLENLPNFLTANVTEAFVSIGVNDLITGYSVEEIFSNFQKLYSLLAENKIKMRLTTIAYTLFRETVNNADIEKINQWLTEFCYQNQIPLLDINRFLSKDGNLNYHLTSDGLHFTQEANDLLQSQYQLFVDEVKTL

SEQ ID NO: 11083 - protein, 627 aa, Streptococcus agalactiae
ATGAAAAAAAAGTTGGCATTTTTAGGCGCAGGAAGTCATGCTGATGCGATTGCTCCGGTTATTGATCCTCTTGTGTATGATTTCGTAGGTTTTTTTGATGATAAAGATATTACGGAGCATGATGGTTATCCTGTTCTTGGAAAACTTTATGATGTGCTACCTTACCTTGAAGATGGCTCAATAGATGCAGTATTTATTACAATAGGTGATAATGCTAAAAGGAAAGAACTATTTGAATATGTAGCAAAGGATTATTATGACTTTATTATTAACATCATTAGTCCCAATGCTTTAGTATTGACACCAGATAGTATTTGTGGACGTGGTATCTTTATTGGTTTTGGGGCTTTTATAGGTTCTAAAGTGAAGCTGTTTGATAACAACGTTGTTAATACAGGAGCGCTCATTGAACATCATACTGTTGTAGAATCACACTGTAATATAGCACCTAATGCTACCATAAATGGTCTTTGTTATATTAGAGAAGAAGTTTATGTAGGTAGTGCCAGTGTTATTATTCAAACCTTGGATATTTCATCGTGTACGACAATTGGAGCAGGAGCTGTTGTTGTAAAAGATATTATAGAACCTGGAACCTATGTAGGGGTTCCAGCCAAAAAAATAAAA

SEQ ID NO: 11084 - protein, 209 aa, Streptococcus agalactiae; identical to SEQ ID NO: 2168

SEQ ID NO: 11085 - protein, 1151 aa, Streptococcus agalactiae
ATGAAAAAAATTTGTTTAGTAACCGGATCGCGTGCTGAATACGGAATAATGAAGCCATTGATTCAAAGATTGTCAAAAGATAAAGAAGTCAACTTACAAATTATTGCAACAGCAATGCATCTGGAAGAAAAGTACGGCTATACTTATCGTCAAATTGAAGAAGACGGTTTTGATATTGCTTATAAAGTTCCCTTACATCTTTATGATACTGACAGAAGAACTGTATCTACTGCAATGGCGCATTTACAACTAGGATTGACCAAAATTTTTGACAAGGAAGACTATGATCTAGTCATCATTTTAGGGGATCGTTATGAAATGTTACCAGTTGTGAATGTAGCGTTGATTTATAATGTCCCAGTATGCCACCTTCATGGAGGGGAGACCTCATTAGGCAATTTTGATGAGTATATTCGCCATGCAATTACTAAGATGAGTCACCTACACTTAGTCTCTACAGAGGACTTTCGTCAACGTGTGATTCAGATGGGAGAACAACCTCAATTTGTAATTAACACAGGAGCTCTCGGAGTGGAAAATGCTCTATCAATCCCTTCTCTAACCAAAGAAGCAATAGAAAAGCAATTAGGTATTGCACTAGAGGAATCCTATTTTGTTGTTCTCTATCATCCGTTACTTTTGAACAAGGAAAAAGTGCTGGAGAGCAGATGAAAGCGGTACTATCAGCCCTTTCTAAGTTTGGTGTCCAGTGTCTATTTATAGGATCCAATTCAGATACTGGTTCTGATGATATTGCAAAGGCTATCAATACTTATTTGACAAATCATGAAAATAGTCATTGCTTTGCTTCTTTATCAACCCAACTTTATCATTCCTTAATTCGTCATTCACTAGGACTGATTGGTAATTCGTCTTCTGGTTTAATAGAAGTTCCTTCTTTGATGAAACCTACTCTTAATATTGGTGATCGCCAAAAAGGTAGGCTACATGGAGAAAGTGTAGTAAGTGTACCAGTCGAAACCTCCTCTGTATTGGAGGGATTATCAAAATTGAATGAAGTGACCAACTTTGACAATCCCTACTACAAAGAGAATGCTTCATCTATTGCATATGAAGCAATAAAGCTGTATTTGAAAGATGAACCTTCAATTTCCCAACCATTTTATGATTTAAAGGAGAATAATCTAAAA

SEQ ID NO: 11086 - protein, 384 aa, Streptococcus agalactiae
MKKICLVTGSRAEYGIMKPLIQRLSKDKEVNLQIIATAMHLEEKYGYTYRQIEEDGFDIAYKVPLHLYDTDRRTVSTAMAHLQLGLTKIFDKEDYDLVIILGDRYEMLPVVNVALIYNVPVCHLHGGETSLGNFDEYIRHAITKMSHLHLVSTEDFRQRVIQMGEQPQFVINTGALGVENALSIPSLTKEAIEKQLGIALEESYFVVLYHPVTFEQGKSAGEQMKAVLSALSKFGVQCLFIGSNSDTGSDDIAKAINTYLTNHENSHCFASLSTQLYHSLIRHSLGLIGNSSSGLIEVPSLMKPTLNIGDRQKGRLHGESVVSVPVETSSVLEGLSKLNEVTNFDNPYYKENASSIAYEAIKLYLKDEPSISQPFYDLKENNLK

SEQ ID NO: 11087 - protein, 1023 aa, Streptococcus agalactiae
ATGGTTTATATTATTGCAGAGATTGGTTGCAATCATAATGGAGATATTAATCTTGCGAAAAAAATGGTAGATGTTGCCGTGTCTTGTGGTGTTGATGCTGTTAAATTTCAGACTTTTAAAGCTGAGAAACTTATTTCTAAATTTGCTCCCAAAGCTGAATATCAAAAAGCAACTACAGGAACAGCAGACAGTCAACTTGAGATGACGAAACGTTTAGAGTTAAGCTTTGAAGAATACTTAGAAATGCGTGATTATGCAATTTCAAAAGGTGTGGAGACCTTTTCAACACCTTTTGATGAAGAGTCATTAGAGTTCTTAATTTCTACAGATATGCCAATTTACAAAATTCCATCAGGAGAAATCACTAATTTACCTTACTTAGAAAAGATTGGCAAGCAACAAAAGAAAGTTATTCTTTCGACGGGTATGGCGGTAATGGAAGAGATCCATCAAGCGGTGAATATTTTACGTCAGAATGGTACAACCGACATTTCTATTTTACATTGTACAACAGAGTACCCAACACCTTACCCCTCTCTAAATTTAAACGTTATTCATACTTTGAAAGATGAATTTAAAGATTTAACGATAGGTTATTCGGATCATTCAATTGGATCAGAAGTACCTATCGCAGCAGCAGCAATGGGTGCAGAAGTTATTGAAAAACACTTTACTTTAGATACTAATATGGAAGGTCCGGATCATAAAGCCAGTGCAACACCTGATATTTTAGCTGCTTTAGTTAAAGGGGTTCGCATTGTTGAACAAGCCTTAGGTAGATTTGAAAAAATCCCAGATCCAGTAGAAGAAAAAAATAAGATTGTTGCTCGTAAATCAGTCGTTGCTTTAAAACCAATTAAAAAAGGCGATATTTATTCAATAGAAAATATTACGGTGAAGCGCCCAGGTAATGGTATTTCTCCTATGAACTGGTATGACATCTTGGGACAAGAAGCGCAAGATGATTTCGAAGAGGATGAAGTTATTCGTGATTCACGCTTTGAAAATCAATTGCCCGAGTTA

SEQ ID NO: 11088 - protein, 341 aa, Streptococcus agalactiae; identical to SEQ ID NO: 2172

SEQ ID NO: 11089 - protein, 1398 aa, Streptococcus agalactiae
ATGAATACTAAGAAATTACTTCAATCTGGTTTTATTTATACACTCGGGAATTTATTGGTGCAAGGATTAGCCTTTATCACACTTCCCATCTACACTCGAGTCATCTCAACAGAAGTTTATGGCCAATATAGTTTATATGTTGCTTGGATGGGAATTATTACTCTGTTTATTGGTCTTCAGACGAGCGGTTCTTTAAGTTCGGCTCGAGTCAAATATGGAGAAGAGTTTAAAAGCTACTCTGGGAGTGCCTTTTCTGTAGGTAATATATGGTTTCTTATTGTACTTTTGATAGCTTTTCTATTTAGAAGTTTTCTTGCACCATTAGTTGGTTTTTCTGAATCTATTTTTTTATTAATGGTGTGTCAAAGTTACGCTAACTATGTGGTGACTTTCTTTGGTCAGTATTTTATACAACAACAGAGGAGCTTGGCTAATTTAATACTATCCTTAGCCAATGCAGTTTCATCTGTTGCACTATCTCTATTTTTAATTTTTCATTGGTCCGATGACTTTTTATCTAGGGTTTTTGGAGCTTTTGTTCCTACTATAATAACTGGAATAGTTGCCTTTGCTTATATTTATTATCATAGCAAATCTTTTTACAATCCTAAGTATTTTCGGTTCATTGTCACTGTGTCTATTCCTTTGATTTTTCATTTGTTAGGACATCAGTTATTAAATCAATTAGATAGGATTATGCTAGCTCGCTTATATAGTACTAAAGAAGTTGCAATGTATAGTTTCGGTTATTCGCTTGGAATGATTATTCAGATTGTTTTGAATAGTATTAATATGGCTTGGATTCCATGGTTTTTTGATGCTAGAAAAGAAAAATTACTGCAACTTTCAACTTATATTAGCCGTTATCTCTATTTAGGAGTTTTCTTAACATTAGGTTATTTGACTGTTTTTCCTGAGTTAGCTCAAATAATGGGAGGAGACAAGTATAGTAGTAGTGTTCAATTTATTTCTTTAATTATTGTCAGCTATTTTTTAGTCTTTCTCTATACATTTCCTGTAAATATCCAATTCTTCTATGCTAATACGACATGGATTCCTATTGGGACATTATTAGCTGCTGGTGTAAATTGGTTACTAAACCTTGTATTAATTCCTCATTATGCAGCCTATGGCGCTGCTATGGCTACAATAATATCTTATTTAGCCTTGTTGATTTTTCATCATATTGTTTCGAAAGTTAAATACCATTATTCAGATGTCTCAGTTAGGCAGTACATTATTTTAAGTGGTATAGTATTTAGTTATGCTATGTTAATGAACATGTTCCTAGGTAATATCGTTATTAGATGGAGTTTAGGAATAATTATTCTTATAGTATATAGCGTTGTTTTTCAAAAAGTCATTTTAGACTTATTGGGTAAAAAAAGAAGGAGAAGA

SEQ ID NO: 11090 - protein, 466 aa, Streptococcus agalactiae
MNTKKLLQSGFIYTLGNLLVQGLAFITLPIYTRVISTEVYGQYSLYVAWMGIITLFIGLQTSGSLSSARVKYGEEFKSYSGSAFSVGNIWFLIVLLIAFLFRSFLAPLVGFSESIFLLMVCQSYANYVVTFFGQYFIQQQRSLANLILSLANAVSSVALSLFLIFHWSDDFLSRVFGAFVPTIITGIVAFAYIYYHSKSFYNPKYFRFIVTVSIPLIFHLLGHQLLNQLDRIMLARLYSTKEVAMYSFGYSLGMIIQIVLNSINMAWIPWFFDARKEKLLQLSTYISRYLYLGVFLTLGYLTVFPELAQIMGGDKYSSSVQFISLIIVSYFLVFLYTFPVNIQFFYANTTWIPIGTLLAAGVNWLLNLVLIPHYAAYGAAMATIISYLALLIFHHIVSKVKYHYSDVSVRQYIILSGIVFSYAMLMNMFLGNIVIRWSLGIIILIVYSVVFQKVILDLLGKKRRRR

SEQ ID NO: 11091 - protein, 954 aa, Streptococcus agalactiae
ATGAATAATTTTGTGTGTCATACTTTATACCATCTACTGATTACTATAATAAAGTTAAAAGATAAAGAAAATACTAGAATATTTATTTGTGACACTATCACGAATTATGAAACTTGGGTAAAAACATTAAATGAACAGGGAATAAGGACGGAAGCAGTTAAAGAGTTTGCTTATCGGGAGCAGTTACAAAGTAAAAATATTGAAGAAGTGATGGAGCTTGTAGATTCAGACTTAAATCACTACTTTGAGAGAGTAGATACACAAGTCTATCTATTTAATGATGATACTTTAATAGGTCGCTATATGGTGTATTTGGGTAAAAATTATCATCTAATTGAAGATGGTTATAACTGTTTTCAAGCCAAGTTATTCTTGGGTGGTTCTGTCGTAAAACGAGTAATTAAAACTTACTTATTTAAAAAGTATGTTCCGTATGGTTTTTCAAAATATTGTCTCTCAATTGAGGTTAATTCTTTAGTGGGGCTACCTCATGACATAAGGAGTAAGAAATATAAAGAACTACCGAGAAAAAAATTATTTGATAGTCTTAACAAAGAGCAAAAATCACTGATTTTCAAAATATTTAAAACAAAACCATTAACTATAACTCCAAAGTCAGTATTATTGTTGACACAGCCACTTGCACAAGATAAATGTTATAAAACACCTACAGAGAGGTTTCAAAGTATTCAAGAGCAATACGATTATTTTGACGATATTGTCCAGGAATATAGAACGTTAGGGTACAATGTTTATTTAAAAGTTCATCCTAGAGATGTAGTAGATTATTCCAAATTGCCGGTAGAGCTATTACCATCAAATATCCCTATGGAAATTATAGAGTTGATGTTAACAGGACGGTTCGAATTTGGGATAACACATTCGTCCACCGCGCTGGATTTTTTAACTTGTGTTGATAAAAAAATAACTTTAGTAGATCTGAAGGATATTAAA

SEQ ID NO: 11092 - protein, 318 aa, Streptococcus agalactiae
MNNFVCHTLYHLLITIIKLKDKENTRIFICDTITNYETWVKTLNEQGIRTEAVKEFAYREQLQSKNIEEVMELVDSDLNHYFERVDTQVYLFNDDTLIGRYMVYLGKNYHLIEDGYNCFQAKLFLGGSVVKRVIKTYLFKKYVPYGFSKYCLSIEVNSLVGLPHDIRSKKYKELPRKKLFDSLNKEQKSLIFKIFKTKPLTITPKSVLLLTQPLAQDKCYKTPTERFQSIQEQYDYFDDIVQEYRTLGYNVYLKVHPRDVVDYSKLPVELLPSNIPMEIIELMLTGRFEFGITHSSTALDFLTCVDKKITLVDLKDIK

SEQ ID NO: 11093 - protein, 963 aa, Streptococcus agalactiae
ATGGATAAAGTTAGTATCATTATCCCAGTTTATAACGTTCAATCTTTCCTAAACGAGTGTATAGAAAGTGTTTTAGCTCAAACTTATTCAAATTTAGAAATTATTCTAGTTAACGATGGCTCTACAGATAATTCCGGGGATATCTGTGATTATTATTCAGAAATAGATGGGCGTATATTCGTTTTTCACAAAAATAATGGTGGTTTATCAGATGCTCGTAATTATGGAATTAGTAGAGCTACTGGCGATTATATTTATTTACTTGATTCGGATGATTATCTATATAAAGAAGATGCAATCGAGAGAATGGTTGAATTTAGCGAGAAATATAATTCAGAAATTGTTTTAGGGTGTTATGTTGAAAAAAGAGAACAACATATTATAAATATCGTTTTAGAAGATGAAATGATAGAAACTATTAGTCCAGTACAAGCAATACAAAATATTTATAATTATGATGCCTATAGAGCTATTTTTACTGTAGCACATAATAAATTATATAAGAGAGAATTATTTTCTACGCTGTGCTATCCAGTAGGGAAGTTACACGAAGATGAATTTTTAACCTATAAATTATATTTGAAAGCCAAAAATATAATTTTCTTTAGATATAATACTTATGCATATCGTATTAGAGAAAATAGCATAATGACTGGTTCCTACAATATTAAAAGGCTACATGCTGTAGAAGCACTTAAGGAAAGAATTTATTTATTAGAAAAGTATCCAGACTTAGTATTTCAAAGTGAGAGAGCTTTAATTAAAACTATGGAAGTAAATTTGATAGAGTTATATAAAAATAATTTTTATAAGGAATTTCATACTCTGAAAACTGAATATAAAAAAACTATTTTTGATTTTATAAAAAAACAACGTATGCTACTAAAAATAAAGTATTATTTAAAGTATTGTGTAGTGCATTTTAAAATATTAAATTGTAAAAGAAAGAAAAAGATAAATAAA

SEQ ID NO: 11094 - protein, 321 aa, Streptococcus agalactiae
MDKVSIIIPVYNVQSFLNECIESVLAQTYSNLEIILVNDGSTDNSGDICDYYSEIDGRIFVFHKNNGGLSDARNYGISRATGDYIYLLDSDDYLYKEDAIERMVEFSEKYNSEIVLGCYVEKREQHIINIVLEDEMIETISPVQAIQNIYNYDAYRAIFTVAHNKLYKRELFSTLCYPVGKLHEDEFLTYKLYLKAKNIIFFRYNTYAYRIRENSIMTGSYNIKRLHAVEALKERIYLLEKYPDLVFQSERALIKTMEVNLIELYKNNFYKEFHTLKTEYKKTIFDFIKKQRMLLKIKYYLKYCVVHFKILNCKRKKKINK

SEQ ID NO: 11095 - protein, 981 aa, Streptococcus agalactiae
ATGGAATTAATTTCAATAATAGTGCCTGTATATAATGGAGAAATATATATTGGGAGATGTCTAGATAGTATTCTTGAGCAAACTTATCAGAATTTAGAGATTATCATAATTGATGATGGCTCTAGTGATCGCACAGGGGATATTTGCGAAAAGTATTTATTGGAAGACAGGCGAATAAAATATTTCTATCAAGAAAACAGAGGCCAATCAGTTGCACGTAACAACGGAGTACTTAGGTGTACAGGAGATTGGATTGCTTTTTTAGACAGTGATGATGTTTATCTTCCTTATTCAATTGAGGTTATGTACAACATACAGAAAGCTACCAATGCCGATATTGTTTTAACTAGTATTGGTAACTTCAACAATACTTACAATACTAGTATTAATTCACAGTATTTAAAAGAGATTAAACTTTATACTTTAGAGGTGGCGTTGGAAGAAATGTATTATGGGAAAACTTATGGAGTTTCCCCGTTAGCAAAATTATATCCGAGAAGTAATTTATTGAGTAATCCATATCCAGAAGGAAAAATTCATGAAGATATGGATACAACTTTTAAGCTTATATCTTGCGCTTCAAAAATAGCAGTTTGTGATATTGTCACTGCAGTGGTGTATTTTAGCGATAATAGTACTACTAGGACAAAATTCAATGAGAGAATGTTGTATTTTTTTGAGGCAATTCAAAATAATATTGTATTTATAAATCTAAATTTTCCACATAATACATCTTTAATCTCTGCTGTAATATATAATGAAGTATTTGGTGGAATAGATATATGTGGGAAGATGATTGATTTTAAATTATATGATACAGTTGATTATTACAGAAAAAAATATAGAAAATATTTTAAGACTATTCTCTTTAATAATAGGATTAGTGTGAAGGAGAAGGTTAAATATATATTATTTATTTCCTCTATAAGATATTTCACTATTGTAAGAAAAATATATAATTTGAGGTTATCAAGGAATGGA

SEQ ID NO: 11096 - protein, 327 aa, Streptococcus agalactiae
MELISIIVPVYNGEIYIGRCLDSILEQTYQNLEIIIIDDGSSDRTGDICEKYLLEDRRIKYFYQENRGQSVARNNGVLRCTGDWIAFLDSDDVYLPYSIEVMYNIQKATNADIVLTSIGNFNNTYNTSINSQYLKEIKLYTLEVALEEMYYGKTYGVSPLAKLYPRSNLLSNPYPEGKIHEDMDTTFKLISCASKIAVCDIVTAVVYFSDNSTTRTKFNERMLYFFEAIQNNIVFINLNFPHNTSLISAVIYNEVFGGIDICGKMIDFKLYDTVDYYRKKYRKYFKTILFNNRISVKEKVKYILFISSIRYFTIVRKIYNLRLSRNG

SEQ ID NO: 11097 - protein, 885 aa, Streptococcus agalactiae
ATGTTATATATTTTTACTCCTACATTTAACAGAGGCTACCGATTATCCTATCTGTATGATTCTCTATGTAATCAGACAAATAAAAATTTTATATGGTTGATTGTTGATGATGGTTCTGAGGACAGTACTAAGGAAATTGTAAGTAATTATATAAAAGAGAATAAAGTTAGTATTGTATATCTGTATAAACGTAATGGCGGTAAGCATTCAGCCTATAATCTAGCAATGAGATATATGCAACCAAGTGATTATCATGTATGTGTAGATAGTGATGATTGGTTATTAGAAGATGCAGTTGAAATTATTTTTAAAGATTTAGAGAGCCTAACGTTGTCTAATAGATATGTAGGCCTTGTTTATCCTCGATATTCATTAAACCAAGGTAATAATTGGTTGAATCCCAAAATATTAGAAGTTAATATTCCTGATTTAAAATATAAATATCACTTAAAAATTGAAACTTGTATTGTTATTAATAATGCTTATTTAGTAGATTTCGAATTTCCTTGTTTCGAAGGGGAGAATTTCTTATCAGAAGAAATAATGTATATATATTTATCAAAAAAGGGATACTTTTGTCCCCAAAATAGGAAAATCTATTGTTTTGACTACTTAGAAGATGGTTTGACTTCTAATATTTTTAAATTATGGAGAAAAAATTTCAAAGGGACTATTTTTTCATTAGAAAATTCATATATGTATGTAATGTCTTTTCCTAATATATTTGATCGCTGGTGGTCAGCTATAAAGATAAAAATGAACATACAGGCTTTGAAAATGACTACTTTAGGGGTAATACCTACACTAAAGAGTGAAGAGGCTGGGTGGAAAATTTTGTTGGGTTTTAGCTATCTTTGGAAGGTAGCAAGGTTTAAAAAGAGCGAG

SEQ ID NO: 11098 - protein, 295 aa, Streptococcus agalactiae
MLYIFTPTFNRGYRLSYLYDSLCNQTNKNFIWLIVDDGSEDSTKEIVSNYIKENKVSIVYLYKRNGGKHSAYNLAMRYMQPSDYHVCVDSDDWLLEDAVEIIFKDLESLTLSNRYVGLVYPRYSLNQGNNWLNPKILEVNIPDLKYKYHLKIETCIVINNAYLVDFEFPCFEGENFLSEEIMYIYLSKKGYFCPQNRKIYCFDYLEDGLTSNIFKLWRKNFKGTIFSLENSYMYVMSFPNIFDRWWSAIKIKMNIQALKMTTLGVIPTLKSEEAGWKILLGFSYLWKVARFKKSE

SEQ ID NO: 11099 - protein, 488 aa, Streptococcus agalactiae
ATGATTTTTGTCACAGTGGGGACACATGAACAGCAGTTCAACCGTCTTATTAAAGAAGTTGATAGATTAAAAGGGACAGGTGCTATTGATCAAGAAGTGTTCATTCAAACGGGTTACTCAGACTTTGAACCTCAGAATTGTCAGTGGTCAAAATTTCTCTCATATGATGATATGAACTCTTACATGAAAGAAGCTGAGATTGTTATCACACATGGCGGCCCAGCGACGTTTATGAATGCAGTTTCTAAAGGAAAAAAAACTATTGTGGTTCCTAGACAAGAACAGTTTGGAGAGCATGTGAATAATCATCAGGTGGACTTTGTTAATAAGGTAAAAACAATGTATAATTTTGATATCGTTGTAGATATTGAAAGGTTACAAAATGTAGTCTATGAGGGAATGATGAATCGTCCGTTTTTAGAAACTAATAGTAGTAATTTTATTGAAGAATTTAAGGTAATATTAAGGAGTTGTGCGATGAAAATCAA

SEQ ID NO: 11100 - protein, 163 aa, Streptococcus agalactiae
MIFVTVGTHEQQFNRLIKEVDRLKGTGAIDQEVFIQTGYSDFEPQNCQWSKFLSYDDMNSYMKEAEIVITHGGPATFMNAVSKGKKTIVVPRQEQFGEHVNNHQVDFVNKVKTMYNFDIVVDIERLQNVVYEGMMNRPFLETNSSNFIEEFKVILKELCDENQ

SEQ ID NO: 11101 - protein, 447 aa, Streptococcus agalactiae
ATGAAAATTTGTCTGGTTGGTTCAAGTGGTGGTCATCTAGCACACTTGAACCTTTTGAAACCCATTTGGGAAAAAGAAGATAGGTTTTGGGTAACCTTTGATAAAGAAGATGCTAGGAGTATTCTAAGAGAAGAGATTGTATATCATTGCTTCTTTCCAACAAACCGTAATGTCAAAAACTTGGTAAAAAATACTATTCTAGCTTTTAAGGTCCTTAGAAAAGAAAGACCAGATGTTATCATATCATCTGGTGCCGCTGTAGCAGTACCATTCTTTTATATTGGTAAGTTATTTGGTTGTAAGACCGTTTACATAGAGGTTTTCGACAGGATGGATAAACCAACTTTGACAGGAAAATTAGTGTATCCTGTAACAGATAAATTTATTGTTCAGTGGGAAGAAATGAAAAAAGTTTATCCTAAGGCAATTAATTTAGGAGGAATTTTT

SEQ ID NO: 11102 - protein, 149 aa, Streptococcus agalactiae
MKICLVGSSGGHLAHLNLLKPIWEKEDRFWVTFDKEDARSILREEIVYHCFFPTNRNVKNLVKNTILAFKVLRKERPDVIISSGAAVAVPFFYIGKLFGCKTVYIEVFDRMDKPTLTGKLVYPVTDKFIVQWEEMKKVYPKAINLGGIF

SEQ ID NO: 11103 - protein, 1380 aa, Streptococcus agalactiae
TTGAAAGAAAAAGAAAATATACAAAAGATTATTATAGCGATGATTCAAACCGTTGTGGTTTATTTTTCTGCAAGTTTGACATTAACATTAATTACTCCCAACTTTAAAAGCAATAAAGATTTATTGTTTGTTCTATTGATACATTATATTGTCTTTTATCTTTCTGATTTTTACAGAGACTTTTGGAGTCGTGGCTATCTTGAAGAGTTTAAAATGGTATTGAAATACAGCTTTTACTATATTTTCATATCAAGTTCATTATTTTTTATTTTTAAAAACTCTTTTACAACGACACGACTTTCCTTTTTTACTTTTATTGCTATGAATTCGATTTTATTATATCTATTGAATTCATTTTTAAAATATTATCGAAAATATTCTTACGCTAAGTTTTCACGAGATACCAAAGTTGTTTTGATAACGAATAAGGATTCTTTATCAAAAATGACCTTTAGGAATAAATACGACCATAATTATATCGCTGTCTGTATCTTGGATTCCTCTGAAAAGGATTGTTATGATTTGAAACATAACTCGTTAAGGATAATAAACAAAGATGCTCTTACTTCAGAGTTAACCTGCTTAACTGTTGATCAAGCTTTTATTAACATACCCATTGAATTATTTGGTAAATACCAAATACAAGATATTATTAATGACATTGAAGCAATGGGAGTGATTGTCAATGTTAATGTAGAGGCACTTAGCTTTGATAATATAGGAGAAAAGCGAATCCAAACTTTTGAAGGATATAGTGTTATTACATATTCTATGAAATTCTATAAATATAGTCACCTTATAGCAAAACGATTTTTGGATATCACGGGTGCTATTATAGGTTTGCTCATATGTGGCATTGTGGCAATTTTTCTAGTTCCACAAATCAGAAAAGATGGTGGACCGGCTATCTTTTCTCAAAATAGAGTAGGTCGTAATGGTAGGATTTTTAGATTCTATAAATTCAGATCAATGCGAGTAGATGCAGAACAAATTAAGAAAGATTTATTAGTTCACAATCAAATGACAGGGCTAATGTTTAAGTTAGACGATGATCCTAGAATTACTAAAATAGGAAAATTTATTCGAAAAACAAGCATAGATGAGTTGCCTCAATTCTATAATGTTTTAAAGGGTGATATGAGTTTAGTAGGAACACGCCCTCCCACAGTTGATGAATATGAAAAGTATAATTCAACGCAGAAGCGACGCCTTAGTTTTAAGCCAGGAATCACTGGTTTGTGGCAAATATCTGGTAGAAATAATATTACTGATTTTGATGAAATCGTAAAGTTAGATGTTCAATATATCAATGAATGGTCTATTTGGTCAGATATTAAGATTATTCTCCTAACACTAAAGGTAGTTTACTCNNNNNTTAAT

SEQ ID NO: 11104 - protein, 460 aa, Streptococcus agalactiae
  VARIANT 458, 459: Xaa = Any Amino Acid
MKEKENIQKIIIAMIQTVVVYFSASLTLTLITPNFKSNKDLLFVLLIHYIVFYLSDFYRDFWSRGYLEEFKMVLKYSFYYIFISSSLFFIFKNSFTTTRLSFFTFIAMNSILLYLLNSFLKYYRKYSYAKFSRDTKVVLITNKDSLSKMTFRNKYDHNYIAVCILDSSEKDCYDLKHNSLRIINKDALTSELTCLTVDQAFINIPIELFGKYQIQDIINDIEAMGVIVNVNVEALSFDNIGEKRIQTFEGYSVITYSMKFYKYSHLIAKRFLDITGAIIGLLICGIVAIFLVPQIRKDGGPAIFSQNRVGRNGRIFRFYKFRSMRVDAEQIKKDLLVHNQMTGLMFKLDDDPRITKIGKFIRKTSIDELPQFYNVLKGDMSLVGTRPPTVDEYEKYNSTQKRRLSFKPGITGLWQISGRNNITDFDEIVKLDVQYINEWSIWSDIKIILLTLKVVYSXXN

SEQ ID NO: 11105 - protein, 695 aa, Streptococcus agalactiae
ATGACTCGTTTAGAAATAGTTGATAGCAAGTTAAGACAAGCAAAAAAAACAGAAGAATACTTCAATGCGATCCGTACAAACATACAGTTTAGTGGAAAGGAAAATAAAATTCTTGCAATTACCTCTTTTAGGGAAGGGGAAGGAAAATCCACTACTTCAACAAGTTTAGCTTTATCTTTAGCTCAAGCAGGATTTAAAACATTATTAATTGATGCGGATACTAGGAACTCTGTTATGTCTGGAACCTTTAAAGCAACTGGAACTATTAAAGGCTTGACGAATTATTTATCAGGTAATGCAGATCTTGGAGATATTATCTGTGAAACCAATGTTCCTAGACTGATGGTCGTTCCTTCAGGGAAAGTACCACCAAATCCAACAGCATTACTTCAGAACGCTTATTTTAATAAGATGATTGAAGCTATTAAAAATATATTTGATTATATTATCATCGATACTCCACCTATTGGTTTAGTTGTTGATGCCGCAATAATCGCTAATGCTTGCGATGGTTTTATTTTAGTAACCCAAGCAGGTAGAATAAACGTAATTATGTTGAAAAAGCAAAAGAACAGATGGAACAAAGTGGTTCAAAGTTCTTAGGTATTATTCTTAATAAAGTTAATGAATCTGTTGCTACTTACGGCGATTACGGCGATTATGGAAATTACGGAAAAAGGGATAGAAAAAGGAAG

SEQ ID NO: 11106 - protein, 232 aa, Streptococcus agalactiae
MTRLEIVDSKLRQAKKTEEYFNAIRTNIQFSGKENKILAITSFREGEGKSTTSTSLALSLAQAGFKTLLIDADTRNSVMSGTFKATGTIKGLTNYLSGNADLGDIICETNVPRLMVVPSGKVPPNPTALLQNAYFNKMIEAIKNIFDYIIIDTPPIGLVVDAAIIANACDGFILVTQAGRIKRNYVEKAKEQMEQSGSKFLGIILNKVNESVATYGDYGDYGNYGKRDRKRK

SEQ ID NO: 11107 - protein, 690 aa, Streptococcus agalactiae
ATGAATAAAATAGCTAATACAGAAGTTGAAATAAATATATTCAACCTTTTAAAAAAATTGTGGAAAAAGAAATTTTTAATCACATTTGTTGCCATTGCGTTTGCAACAGCTGGACTTTTCTATAGTCTTTTTATTGTTACGCCACAATATACTTCTTCAACAAGGATATATGTCATTAACCCTAATACCCCTAATAATAGTATTACTGCACAAGATCTACAAGCGGGGAGTTTTCTTGCAAATGACTATAAGGAGATTATTACGTCTACTGACGTTCTAGAAAAAGTTATTTCTTCTGAAAAATTGAATTATCCTTCGTCTCAGTTGCTGCAAAAAATAACAGTTTCTATTTTAAAAGATACACGTGTTATTTCAATATCGGTCGAAGATGCTAATCCAAAAATGTCTCAAAAATTAGCAAATTCAGTTAGAGAAGCAGCAGTTTCAAAAATCAAGGCAGTTACTCAAGTAGAGGATATCACTACTCTTGAGAAGGGAAATTTACCTAAAGCACCATCTTCTCCTAATATTAAAAAGAATGTACTAATCGGGTTTATTGTTGGTGCAGGATTATCAACTATTGTTTTAGTTATTATGGGTATTTTGGATGATCGTGTTAATACTGAAGAAGATATTGAAAAGGTCCTAGGACTTACTTCTTTAGGTATAGTACCAGATTTGAATAAACTT

SEQ ID NO: 11108 - protein, 230 aa, Streptococcus agalactiae
MNKIANTEVEINIFNLLKKLWKKKFLITFVAIAFATAGLFYSLFIVTPQYTSSTRIYVINPNTPNNSITAQDLQAGSFLANDYKEIITSTDVLEKVISSEKLNYPSSQLLQKITVSILKDTRVISISVEDANPKMSQKLANSVREAAVSKIKAVTQVEDITTLEKGNLPKAPSSPNIKKNVLIGFIVGAGLSTIVLVIMGILDDRVNTEEDIEKVLGLTSLGIVPDLNKL

SEQ ID NO: 11109 - protein, 729 aa, Streptococcus agalactiae
ATGATTGATATTCATTCTCATATCGTTTTTGATGTAGATGATGGGCCTAAAACGCTTGAAGAGAGTTTATCTTTGATAGAAGAAAGTTATCGACAAGGTGTTAGAATAATTGTTTCGACATCACATAGAAGAAAAGGTATGTTTGAAACACCTGAAGATATTATCTTCAAAAACTTTTCTATAGTTAAACACGAAGCGGAAAAAAGATTTGAACATCTTCAAATCTTATATGGTGGAGAATTGTACTATACAAGTGATATGTTAGAAAAACTGAAGTTAAAGCAAATTCCAACTTTAAACAATACGAAATTTGCTTTAATTGAATTTTCTATGCAAACTTCTTGGAAAGATATTCATACAGCTTTGTCAAATGTTTTAATGCTTGGTATTACACCAGTCGTTGCGCATATAGAGAGGTATAACGCTTTAGAGAATCAAAAAGAACGGGTGAAGGAAATTATTAATATGGGGTGTTACACACAAATAAATAGTTCTCATATTTTGAAACAAAAACTTTTTAATGATAAGCATAAACGCTTTAAGAAAAGAGCCCGTTATTTTTTAGAGGAAAATTTAGTGCATTTTGTAGCGAGTGATATGCATAACCTTGATGTTAGACCGCCATTTTTAGCAGAAGCTTATAAGATTATCTGTAGAGATTTCGGTAAAGAACGTGCTAACCAACTTTTTATTGAAAATGCTCAATCTATATTAAAAAACCATTACATT

SEQ ID NO: 11110 - protein, 243 aa, Streptococcus agalactiae; identical to SEQ ID NO: 2180

SEQ ID NO: 11111 - DNA, 1455 bp, Streptococcus agalactiae
atgtctaatcattcgcgccgtcaacaaaagaaacactcacatacacctctacgggtgattaatttatttcttttggtgatttttattttgttaagtgtagtctcattatttcttatgtatcgtcaccattttttggcatttagacacctgaacgtcatttatggagttgtaattgttttaatcattttagcaagtttatttctttgtattaagaataaagctagaatttttacaactataattttagtattagcttctattttcgttgctactactttatatggatttaagtcaaccattgatttgacaaataatctaaataaaactgcttcatactctgaaattgagatgagtgtagttgtaccaaaagattctaaaataaccaatatagaagctgtcagcaaattagccgcaccagttaaaaacgatacttcaaatattactgatttgatagaacatataaaatcagaagaaggaatctctattacaccacaaaaaacagattcttaccaggatgcatacaatagaattaaaaatggtaatagtcaggctatggttttaaataatgcttatgttagcttaattgaacttagcacccctgattttaaatcgcagataaaaacgatttatacttacaaaattaagaaaaaaattaatcgtaaaaatactaatcataaagaaggggtatttaatatctatattagcggtattgatacttttggctctatatcaacagtatcaagatctgatgtaaatattattatgacggttaataccaatacccacaaagtattgttaacgacaacaccacgagatgcctatgtaaaaattccagatggtgggggcaatcaatatgataaattaacccatgcaggtttgtatggcgttgagacatcaatgaaaacacttgaaaacctttacgacatcaaccttgattattatgctagaattaatttttcatcatttttaaaattaatagacctcttgggaggagtgacagtttataacgatcaagcttttacaagtaaacatggtaattttgacttccctgttggtcaagtaacattgaattctgagcaggctttgggctttgttagagaacgttattctctacaaggaggcgataacgatagaggtagaaatcaagaaaaagtgattgcagctattataaataagttagcttctagtcagtcagtaacaaaattaaatagcattacctcacagctccaaacgtccgttcaaactaatatgactattgataatattaatgatttgattaacaatcaattgtcaactggacaacgcttcactgtcgagtcacaagcattaactggtcatggttcaacgggtgaactcccttcatatgcaatgccaggagctcaactttatatgatgtcaattgatcaatctagcttatctaatgcaaaatcaaaaattaagaacacaatggaggaa

SEQ ID NO: 11112 - protein, 485 aa, Streptococcus agalactiae
MSNHSRRQQKKHSHTPLRVINLFLLVIFILLSVVSLFLMYRHHFLAFRHLNVIYGVVIVLIILASLFLCIKNKARIFTTIILVLASIFVATTLYGFKSTIDLTNNLNKTASYSEIEMSVVVPKDSKITNIEAVSKLAAPVKNDTSNITDLIEHIKSEEGISITPQKTDSYQDAYNRIKNGNSQAMVLNNAYVSLIELSTPDFKSQIKTIYTYKIKKKINRKNTNHKEGVFNIYISGIDTFGSISTVSRSDVNIIMTVNTNTHKVLLTTTPRDAYVKIPDGGGNQYDKLTHAGLYGVETSMKTLENLYDINLDYYARINFSSFLKLIDLLGGVTVYNDQAFTSKHGNFDFPVGQVTLNSEQALGFVRERYSLQGGDNDRGRNQEKVIAAIINKLASSQSVTKLNSITSQLQTSVQTNMTIDNINDLINNQLSTGQRFTVESQALTGHGSTGELPSYAMPGAQLYMMSIDQSSLSNAKSKIKNTMEE

SEQ ID NO: 11113 - DNA, 921 bp, Streptococcus agalactiae
atgagaattcaacaattacaatatgttattaagattgtagaaactggtagcatgaatgaagccgctaaacaactctacattacccaaccttcactttcaaacgctgttaggaaccttgagactgagatgggtatccaaatttttattcgaaatccaaaaggaataacgttaacaaaagatggtatggaatttctgtcatatgcgcgacaaattctagaacaaacagcacttcttgaagagcgttataagggtgataatacaagtcgtgagctgttcagcgtttcttcacaacactatgcatttgtggttaacgcttttgtagctctctttaatggcacagacatgacccaatacgaactttttttacgtgaaactaggacttgggaaattattgatgatgttaaaaatttccgttcagagattggtgttctgtttcttaatagctataatagagatgtattaaccaaattattcgacgataattccttaattgccacaactctttttactactacacctcatattttcgtgagcaaatccaatcccttagctaatagaaaaaaattaagtatgaaagatttagaagattatccttatctgagttatgatcaaggcctgcataattctttctacttttctgaggaaatgatgtctcaaattactcacccaaaatccattgttgtcagtgatagagcaactctgtttaatttaatgattggattagatggttatacagtggcaactggtatcctcaactcaaaattgaacggtgacgaaattgtcgcaatccctcttgacgtggatgatattattgatattgtctatatccgacacgacaaagcaaacctttcaaaaatgggacaaaaatttattgactatttattagaggaagtttcgtttaatcataaaaacaaacagtcc

SEQ ID NO: 11114 - protein, 307 aa, Streptococcus agalactiae
MRIQQLQYVIKIVETGSMNEAAKQLYITQPSLSNAVRNLETEMGIQIFIRNPKGITLTKDGMEFLSYARQILEQTALLEERYKGDNTSRELFSVSSQHYAFVVNAFVALFNGTDMTQYELFLRETRTWEIIDDVKNFRSEIGVLFLNSYNRDVLTKLFDDNSLIATTLFTTTPHIFVSKSNPLANRKKLSMKDLEDYPYLSYDQGLHNSFYFSEEMMSQITHPKSIVVSDRATLFNLMIGLDGYTVATGILNSKLNGDEIVAIPLDVDDIIDIVYIRHDKANLSKMGQKFIDYLLEEVSFNHKNKQS

SEQ ID NO: 11115 - DNA, 765 bp, Streptococcus agalactiae
atgacagatttttcaactgctcttaaagtattagtggatcagtattcttatcataatgctttcttattattacaaaaacatggtcctttaaactcagatttattatttttattggaaatgatgaaagagcgtcgagagttaaacattgattttctttttgctcatcaagaacaagttgttatattacaagaaaaatacaatataaagcttttgcataacccgtatgatttagagttgctggcaaattacatcatggatttagaagcaaaagtaaaaaatggattaatcatagattttgtccgtagtgttagtcctattttatatcgtctatttatgattttacttgcacaagaagtacctcacttgcatgattacattcataatgcaagagatgatcactacgatacttggaagtttaaagaattaaaggagtcaaaccacccagtccttttggcattctctgaaaggtggcacgatagtcgcttgacttctaaaagccttgcagaatgtttacaattaaccgacctggatgaagaagtgaaatcgaccatcattcaattaagacagttcgaaaaatcagtcagaaatcctttggctcacctgattaaaccttttgatgagcaagaactatatcgtacaactcaattttcttctcaagcatttttagaccagattatcttcttggcaaaggtaattggtgttgagtatgatactgttaattttcactacgatacggttaacaagcttattataaagatacttgag

SEQ ID NO: 11116 - protein, 255 aa, Streptococcus agalactiae
MTDFSTALKVLVDQYSYHNAFLLLQKHGPLNSDLLFLLEMMKERRELNIDFLFAHQEQVVILQEKYNIKLLHNPYDLELLANYIMDLEAKVKNGLIIDFVRSVSPILYRLFMILLAQEVPHLHDYIHNARDDHYDTWKFKELKESNHPVLLAFSERWHDSRLTSKSLAECLQLTDLDEEVKSTIIQLRQFEKSVRNPLAHLIKPFDEQELYRTTQFSSQAFLDQIIFLAKVIGVEYDTVNFHYDTVNKLIIKILE

SEQ ID NO: 11117 - DNA, 708 bp, Streptococcus agalactiae
atgtcaatccatattgaagcaaaacaaggtgaaattgcagataaaattttacttccaggagatccactccgtgcgaaatttattgccgagaattttttagaagatgcggtgtgttttaatacagttcgcaatatgtttggttatacaggtacctataaaggacatcgtgtttctgttatgggaactggtatgggtatgccttcaatttcaatttatgctcgcgaactaattgttgattatggggttaaaacattgattcgcgtaggaacggcaggtgctattaatcctgatatccatgttcgtgaacttgttttagcacaagcagcagcaacaaattctaatattatccgtaatgattggcctgaatttgattttccgcaaattgctgattttaaacttttggataaagcttatcacatcgcaaaggaaatggatattacaactcatgtaggcagtgtattatcttcagacgtgttttattcaaaccaaccagatcgtaatatggccttgggtaaactaggtgttcatgctattgagatggaagcagcagctctctactatcttgcagctcaacataatgttaatgctcttgctatgatgacgatttcagataacttgaataatccagaagaagatacaagtgcagaagagcgtcaaacaacatttactgatatgatgaaagttgggctcgaaacacttatttctgaa

SEQ ID NO: 11118 - protein, 236 aa, Streptococcus agalactiae; identical to SEQ ID NO: 2188

SEQ ID NO: 11119 - DNA, 1170 bp, Streptococcus agalactiae
atgcactatgtattaatgtttacagagtggttagcatttggtgatagtagagaaaatactctgtctttgttaaatagtgtcacaccaattaaaagagtgttatcacttactttagtctcctttttagcatcccttagttggtattacttacaaatcaaaccaaagcaaataactagtattaaacaacaggttgtttttaaggattcttctgtaaaaaaatcaccttactggctacatataggtcacgcatttttgcaattgatttatgtaggagctggtggtcctattggaaaagaaggagcgccacgagagtttggagccataaatgctgggaaaatatcggatttattagcacttaaagtgctggataaacgtttattaatcattagtggtgcagctgcaggtttgtcagcagtttatcaagtacccctagctagtgtattttttgcttttgaaactttagctttaggaatctcactgaaaaatattgtgacattgctagcctctacttttggtgcagctagtattgctcaattagttatttcgacagcccctctttatcatatttcaaagatgagtctgaattcacagtcattagcttttatgttcttgatcgttttatgtgtaactccgattgcgattagctttagatatttaaatcaaaaagtgacagagagacgtattaaaaatataaaaatattgttaagtttaccagtagtatcattgatagtatctgttttatcaatagtctatccccagattttaggaaatggtaatgcactagtccaagaagtctttaaagggacctcagttagcttaatcgctattttagttgttctcaagatgatagcaacattatccactctttacgctggtgcttatggcggtatactgacaccatctttttccattggtgcttgtttaggttttttgttagctagtatttctattcctttacttccccacatatcgatagtaaccagtatgttggttggtgcagctatttttttagctattacaatgagagcgccactgacagctgtcggtttagtcatatcttttactggtcaatccgttataactattgttcccttaactatagcagtactttttgctactgcctatgattattttataagaaaaatgaggagtttatatgtcaatccatat

SEQ ID NO: 11120 - protein, 390 aa, Streptococcus agalactiae
MHYVLMFTEWLAFGDSRENTLSLLNSVTPIKRVLSLTLVSFLASLSWYYLQIKPKQITSIKQQVVFKDSSVKKSPYWLHIGHAFLQLIYVGAGGPIGKEGAPREFGAINAGKISDLLALKVLDKRLLIISGAAAGLSAVYQVPLASVFFAFETLALGISLKNIVTLLASTFGAASIAQLVISTAPLYHISKMSLNSQSLAFMFLIVLCVTPIAISFRYLNQKVTERRIKNIKILLSLPVVSLIVSVLSIVYPQILGNGNALVQEVFKGTSVSLIAILVVLKMIATLSTLYAGAYGGILTPSFSIGACLGFLLASISIPLLPHISIVTSMLVGAAIFLAITMRAPLTAVGLVISFTGQSVITIVPLTIAVLFATAYDYFIRKMRSLYVNPY

SEQ ID NO: 11121 - protein, 807 aa, Streptococcus agalactiae
ATGACATTATTAGAAAAAATTAATGAGACTAGAGACTTTTTGCAAGCAAAAGGCGTCACAGCACCAGAATTCGGCCTTATTTTAGGCTCTGGTTTAGGAGAATTAGCTGAAGAAATCGAAAATCCCATTGTTGTGGATTATGCAGACATCCCAAATTGGGGACAGTCAACAGTAGTTGGTCATGCTGGAAAATTAGTGTATGGGGAACTATCAGGCCGTAAGGTATTAGCGCTTCAAGGTCGTTTTCACTTTTATGAAGGAAATACAATGGAAGTCGTTACTTTCCCAGTACGTATCATGAGAGCATTGGCTTGCCACAGTGTGCTTGTGACTAATGCAGCAGGTGGGATTGGATACGGACCAGGAACTTTAATGCTGATCAAAGACCACATCAATATGATTGGGACTAACCCTCTCATAGGTGAGAACCTTGAAGAATTTGGACCACGTTTCCCAGACATGTCGGATGCTTATACAGCAACATATCGACAAAAAGCTCACCAAATTGCTGAAAAACAGAATATCAAACTCGAAGAAGGTGTGTACTTGGGTGTATCAGGACCCACTTATGAAACACCTGCAGAAATTCGTGCATTCCAAACAATGGGCGCACAAGCGGTAGGTATGTCCACGGTTCCAGAGGTGATTGTTGCAGCTCACTCAGGGCTTAAAGTGTTAGGAATTTCAGCAATTACTAACTTTGCCGCTGGTTTCCAATCTGAGCTCAATCATGAGGAGGTCGTTGAAGTTACTCAGCGTATTAAAGAAGATTTCAAGGGATTAGTTAAATCATTAGTTGCTGAACTT

SEQ ID NO: 11122 - protein, 269 aa, Streptococcus agalactiae
MTLLEKINETRDFLQAKGVTAPEFGLILGSGLGELAEEIENPIVVDYADIPNWGQSTVVGHAGKLVYGELSGRKVLALQGRFHFYEGNTMEVVTFPVRIMRALACHSVLVTNAAGGIGYGPGTLMLIKDHINMIGTNPLIGENLEEFGPRFPDMSDAYTATYRQKAHQIAEKQNIKLEEGVYLGVSGPTYETPAEIRAFQTMGAQAVGMSTVPEVIVAAHSGLKVLGISAITNFAAGFQSELNHEEVVEVTQRIKEDFKGLVKSLVAEL

SEQ ID NO: 11123 - protein, 405 aa, Streptococcus agalactiae
ATGGAAAAAATTAGGATTTACCATAACCCAAATTGTGGGACATCAAGGAACGTACTTGCCATTATTCGTCATTGTGGTATTGAACCAGAAATTATTTATTATCTGAAAACACCACCTAGCAGGATGGAACTGGTTGAACTGTTGTTAGAAATGAAACTTTCTGCGAGGGAACTTCTAAGAACAGATGTTCCTGCTTATGAGAAATTCAATTTGGAATCTTCTAGCGTTACAGATGAAGAAATGATTGATGCGATGATACAAGATCCTATTCTTATCAATCGTCCCATAGTTGTTACGAGTAAAGGTGCAAAACTCTGCCGACCCTGTGAAGCAATTTTAACCATTTTACCTGTAAAGATGGAAAAAGATTTTGTTAAAGAAGATGGACAGATTATCCAAAGTTTA

SEQ ID NO: 11124 - protein, 135 aa, Streptococcus agalactiae
MEKIRIYHNPNCGTSRNVLAIIRHCGIEPEIIYYLKTPPSRMELVELLLEMKLSARELLRTDVPAYEKFNLESSSVTDEEMIDAMIQDPILINRPIVVTSKGAKLCRPCEAILTILPVKMEKDFVKEDGQIIQSL

SEQ ID NO: 11125 - protein, 1209 aa, Streptococcus agalactiae
ATGTCACAATTTGATCGCATTCACTTAGTTGTCTTAGATTCAGTGGGGATTGGAGCGGCACCAGATGCCAATGATTTTGTCAATGCAGGAGTTCCTGATGGTGCTTCAGACACGCTTGGCCACATTTCAAAAACAGTTGGACTTGCGGTGCCAAACATGGCTAAAATCGGACTTGGTAATATTCCTCGTCCCCAAGCGCTTAAGACCGTCCCTGCAGAAGAAAATCCAAGTGGCTACGCGACGAAGTTACAAGAAGTATCACTTGGTAAAGATACAATGACAGGGCATTGGGAGATCATGGGCTTAAATATTACAGAGCCATTTGATACTTTCTGGAATGGTTTTCCAGAAGATATTATTACAAAGATTGAGGATTTTTCAGGACGTAAAGTTATTCGTGAAGCGAATAAACCTTATTCAGGGACAGCTGTTATTGATGACTTCGGACCACGCCAAATGGAAACTGGTGAGCTCATCATCTATACCTCAGCTGATCCAGTCCTACAAATTGCAGCTCATGAGGATATCATTCCTCTAGAAGAACTCTACCGTATTTGTGAATATGCTCGTAGTATCACAATGGAGCGTCCAGCTCTCCTTGGTCGTATTATCGCTCGTCCATATGTAGGTGAACCAGGCAACTTTACGCGTACAGCCAACCGTCACGACTATGCAGTATCACCATTTGAAGATACCGTATTAAATAAACTAGATCAAGCTGGCATCGATACTTATGCTGTTGGTAAAATCAATGATATTTTCAATGGTTCAGGCATTAATCATGATATGGGACATAACAAATCAAATAGTCATGGTATTGATACTTTGATAAAAACAATGGGGTTATCAGAGTTTGAAAAAGGCTTCTCCTTTACTAATTTGGTTGACTTTGATGCTCTCTATGGTCACCGTCGTGATCCTCATGGTTATCGTGATTGTCTTCATGAGTTTGATGAGCGTCTTCCAGAGATCATTTCAGCGATGCGTGACAAAGACTTACTTTTGATCACTGCCGATCATGGTAATGACCCAACTTATGCAGGTACAGACCATACAAGAGAATACATTCCTCTCTTAGCCTATAGCCCATCTTTCACAGGAAACGGCCTTATCCCAGTAGGGCATTTCGCAGATATTTCAGCAACAGTTGCGGATAACTTTGGTGTTGATACTGCGATGATTGGAGAGAGCTTCTTGCAGGACTTGGTA

SEQ ID NO: 11126 - protein, 403 aa, Streptococcus agalactiae; identical to SEQ ID NO: 8444

SEQ ID NO: 11127 - protein, 669 aa, Streptococcus agalactiae
ATGGACGAACTAAAAAAACTTGCTGGAGTGACCGCTGCAAAATACGTTAAAAACGGTATGATTGTAGGTTTAGGGACAGGTTCTACAGCATATTTTTTTGTTGAAGAAATTGGACGCCGTGTCAAAGAAGAGGGATTGCAAGTCGTAGGCGTTACAACGTCAAACCGTACGACTGAGCAGGCAAGAGGATTAGGTATTCCGTTGAAATCAGCAGATGATATTGATGTCATTGATGTCACTGTGGATGGAGCAGATGAAGTAGACCCTGATTTTAATGGTATCAAGGGTGGCGGTGGTGCGCTGCTCATGGAAAAAATAGTAGCTACTCCAACTAAAGAATATATCTGGGTTGTCGATGAGAGCAAACTTGTTGAAACGTTAGGTGCATTTAAATTGCCTGTTGAGGTTGTTAGATATGGTTCTGAGCGTCTTTTTCGGGTTTTTAAATCAAAAGGTTACTGTCCTTCTTTCCGTGAAACAGAAGGTGACCGCTTTATCACTGATATGGGGAACTACATTATCGACCTAGATTTGAAAAAAATAGAGGATCCAAAGCAGTTAGCGAATGAACTTGACCATACAGTTGGTGTTGTTGAACATGGTTTATTTAATGGTATGGTTAATAAAGTTATAGTAGCAGGCAAAAACGGTCTTGACATACTTGAAAAA

SEQ ID NO: 11128 - protein, 223 aa, Streptococcus agalactiae
MDELKKLAGVTAAKYVKNGMIVGLGTGSTAYFFVEEIGRRVKEEGLQVVGVTTSNRTTEQARGLGIPLKSADDIDVIDVTVDGADEVDPDFNGIKGGGGALLMEKIVATPTKEYIWVVDESKLVETLGAFKLPVEVVRYGSERLFRVFKSKGYCPSFRETEGDRFITDMGNYIIDLDLKKIEDPKQLANELDHTVGVVEHGLFNGMVNKVIVAGKNGLDILEK

SEQ ID NO: 11129 - protein, 708 aa, Streptococcus agalactiae
ATGAGAACACTATTTAGAATGATATTTGCTATTCCAAAGTTTATCTTTAGATTGGTTTGGAATATCATTTGGGGAATATTCAAGACAGTTCTTGTTATTGCGATTATTTTATTTGGCTTGTATTACTATGCGAATCACAGTCAATCAGAATTTGCTAATCAACTTAGTGACATTATTCAGACAGGAAAAACATTTTTAAATTTTGCTGACACTAATCAGTTCAAAAATTCCTTTGCTAATCTAGCTACGGATAACGTTCACCATTCAGAAAATACCAGATGGGATAAAAATCAGGCAACTATCTATATAGCAACTAGAGATTCTGAGTTGGTCTCTGCTTACAAGCAAGCAATCTCCAATTGGAATGCAACAGGTGCTTTTGTGTTACAAACAACAGACAATCCTAATGCTGATATTATTGCTAAGGATTACTCAGATGCTAAAACACAAGCTGCGGGTGTAGCTGAAACCGAGAAAAATGCTTTAACTAATCGTATTTCAAAGGTAACAGTTAAATTAAACACATTTTACCTTAAGAATAAACAGTTTGGTTATGACCATACTAGGATTGTTAATACGGCCGAACATGAATTAGGACATGCTTTAGGTCTAGGACATAATGATCAACAACATTCCGTTATGCAGTCAAAAGGTTCGCATTATGGCATTCAAGAAGTTGATATTCAAACGCTAAAAAACTTATATGCA

SEQ ID NO: 11130 - protein, 236 aa, Streptococcus agalactiae
MRTLFRMIFAIPKFIFRLVWNIIWGIFKTVLVIAIILFGLYYYANHSQSEFANQLSDIIQTGKTFLNFADTNQFKNSFANLATDNVHHSENTRWDKNQATIYIATRDSELVSAYKQAISNWNATGAFVLQTTDNPNADIIAKDYSDAKTQAAGVAETEKNALTNRISKVTVKLNTFYLKNKQFGYDHTRIVNTAEHELGHALGLGHNDQQHSVMQSKGSHYGIQEVDIQTLKNLYA

SEQ ID NO: 11131 - DNA, 570 bp, Streptococcus agalactiae
gtgatgccatcaacagacttagcatggtataccaacacaaagtatgggttggattattttgatgcaatagctatcgagttaccaaaagttttgaaacgtttctttcctaatatgtctgataagagagagaaaaatttcattgctggattatctatggggggatatggagcatataaaatagctctactgactaatcgtttttctcatgctgcctctttgtcaggtgcactttcttttgactttgatttattattcaataatggcaacgataacattaactattggtcgggaatttttggcgatttgaataacactgataacatagagcgtcattcactaaggcgttacgttgagtcttttgatatgaagactaaattttatgcatggtgtggttatgaagattttctttttgaagctaatgaagtcgcaattgatgaacttcgtcaattaggtttaactattgactattccaatgatcatggtaaacatgaatggtattactggaatcaacaattagaaaaagtcttagaatggctccctgttgattatgtcaaagaagagcgcctttct

SEQ ID NO: 11132 - protein, 190 aa, Streptococcus agalactiae
MMPSTDLAWYTNTKYGLDYFDAIAIELPKVLKRFFPNMSDKREKNFIAGLSMGGYGAYKIALLTNRFSHAASLSGALSFDFDLLFNNGNDNINYWSGIFGDLNNTDNIERHSLRRYVESFDMKTKFYAWCGYEDFLFEANEVAIDELRQLGLTIDYSNDHGKHEWYYWNQQLEKVLEWLPVDYVKEERLS

SEQ ID NO: 11133 - DNA, 234 bp, Streptococcus agalactiae
gtgttaagaggttaccaaattttggtagcctttcttgctagaatggaggtttttatggcattttttaatattgaatatcactctaaggtactaggaacggaacgtcaagtcaatgttatttacccagatgcttttgagatgcctgatgataaaattgatgattgtgacattcctgttttgtatcttctccatggaatggggggaatgagaattcttggcaaaaacgcacaaata

SEQ ID NO: 11134 - protein, 78 aa, Streptococcus agalactiae
MLRGYQILVAFLARMEVFMAFFNIEYHSKVLGTERQVNVIYPDAFEMPDDKIDDCDIPVLYLLHGMGGMRILGKNAQI

SEQ ID NO: 11135 - DNA, 1659 bp, Streptococcus agalactiae
atgagcgacataaaaatcatggctcttggaggtgttcgtgaaaacggaaaaaacctatatgcagtagaagtcaatgattctatctttgttttggatgctggactcaaatatcctgaaaatgaacaactgggtgttgatgttgttattccaaatcttgattacttaattgaaaataaaaaacgtgttcaggggattttcttaacccatggacatgcggatgctattggtgcattgccttatattatcgccgaagtcaaagcacctgtgtttggctcacctctcacaattgaattagctaagttattcgttaaaaatagtacagcagtcaagaaattcaataatttccatgtgattgatagtgaaacggaaattgaatttcaagatgcggtgatttcgttctttaaaacgactcattcaattccagagtcaatgggaattgttatagggacgaaagagggaaatatcgtttacacaggtgactttaaatttgatcaagctgcaaggaaatattaccaaacagatctggcacgtttagctgaaattggtcgtgatggtgttttagcacttttatcagattctgcaaatgctacaagcaatgagcaagttgctagcgaatatgaggtcggtgatgaaattaagagcgttattgaagacgcagaaggtagagtcatcgtagcagcagttgcaagtaatctcattcgtattcaacaagtctttgatgcagcggcagaaaacggtcgtcgagtagttttaacgggttttgatattgaaaatattgttcgtacggccattcgtatgaaacgcattcatattgctgatgaaaatatgattataaaacctaaagatatgacacgttacgaagataacgaattattaatccttgaaactggacgtatgggagagccgataaatggtctccaaaaaatggcgattggacgtcatcgttatgttcaaattaaagatggtgatttagtatttatcgtaacaacaccaagtattgcaaaagaggcagttgtagcgcgtgttgaaaatctgatttataaagctggtggctcagttaaattgataacacagaatttgcgcgtatcaggtcatgcaaatggtcgcgaattacaattattaatgaatctattgaaacctaaataccttttcccaattcaaggagagtatagggatttgtcagcacatgcgggcttagctcaagaggtaggaatgtcagcagatgatatttatattgtgaagcgtggtgacatcatggttcttgaaaaagatggcttcttccatagtggatctgttcctgctggagatgttatgattgatggaaatgctattggtgacgttggtaatattgtacttcgtgaccgtaaggtattatctgaagatggaatttttattgttgttataactgtcagcaaaaaagaaaagaaaatcatttctaaagctcgtgttaatacgcgtggttttgtgtatgtgaaaaaaagcagagatattttgcgtgagagcgcagaattagttaatacaacggtagaagattacttaagcaaagatacatttgactggggtgaacttaaagggaaagtgcgtgatgaggtcagcaagttcttatttgaccaaacgaaacgtcgcccagcaatccttcctgtggttatggaagttcgt

SEQ ID NO: 11136 - protein, 553 aa, Streptococcus agalactiae
MSDIKIMALGGVRENGKNLYAVEVNDSIFVLDAGLKYPENEQLGVDVVIPNLDYLIENKKRVQGIFLTHGHADAIGALPYIIAEVKAPVFGSPLTIELAKLFVKNSTAVKKFNNFHVIDSETEIEFQDAVISFFKTTHSIPESMGIVIGTKEGNIVYTGDFKFDQAARKYYQTDLARLAEIGRDGVLALLSDSANATSNEQVASEYEVGDEIKSVIEDAEGRVIVAAVASNLIRIQQVFDAAAENGRRVVLTGFDIENIVRTAIRMKRIHIADENMIIKPKDMTRYEDNELLILETGRMGEPINGLQKMAIGRHRYVQIKDGDLVFIVTTPSIAKEAVVARVENLIYKAGGSVKLITQNLRVSGHANGRELQLLMNLLKPKYLFPIQGEYRDLSAHAGLAQEVGMSADDIYIVKRGDIMVLEKDGFFHSGSVPAGDVMIDGNAIGDVGNIVLRDRKVLSEDGIFIVVITVSKKEKKIISKARVNTRGFVYVKKSRDILRESAELVNTTVEDYLSKDTFDWGELKGKVRDEVSKFLFDQTKRRPAILPVVMEVR

SEQ ID NO: 11137 - DNA, 759 bp, Streptococcus agalactiae
atggtgatgaaaatcatagagttaaaagaagcaaccgtacaagtcagtaatggtttagcagaaatgaaaacgatattagaccatgttaatttgagtatttatgaacatgacttcattacaatattgggtggaaatggagctggaaaatcaacactttttaatgtaattgcaggtaccttgatgttaagtagtggaaatatttacatcatgggacaagatgttactaatttaccagcagaaaaacgagctaaatatttatcacgagtatttcaagatccgaaaatgggaacagcacctaggatgacagttgctgaaaatttattagttgctaaatttcgaggtgaaaagagaccgttagttcctagaaagattattaactataccgaagaatttcaaaaattgattgctagaactggtaatggacttgatcgccatttagagacacctacaggtttattatcaggtggacaaagacaagcacttagtttattaatggcaactttgaaaaaaccaaatctgttattattggacgaacacacagcagcgcttgatcctagaacaagtgtttcgcttatgggcttgactgatgagtttatcaaacaagattcgttgactgccttaatgattacacatcatatggaagatgctctcaaatatggaaatcgtgtattagtaatgaaagatggcaagattgtcagagatttaaatcaggcacaaaaaaacaagatggctatagctgactattatcaattatttgat

SEQ ID NO: 11138 - protein, 253 aa, Streptococcus agalactiae
MVMKIIELKEATVQVSNGLAEMKTILDHVNLSIYEHDFITILGGNGAGKSTLFNVIAGTLMLSSGNIYIMGQDVTNLPAEKRAKYLSRVFQDPKMGTAPRMTVAENLLVAKFRGEKRPLVPRKIINYTEEFQKLIARTGNGLDRHLETPTGLLSGGQRQALSLLMATLKKPNLLLLDEHTAALDPRTSVSLMGLTDEFIKQDSLTALMITHHMEDALKYGNRVLVMKDGKIVRDLNQAQKNKMAIADYYQLFD

SEQ ID NO: 11139 - DNA, 615 bp, Streptococcus agalactiae
atgattatttcatcagtttcacaaggtttattatgggggatattaggattagggatatacttaacctttagaatcttaaaatttccagacatgacaacagagggctccttccctctagggggagcggtttgtgttaccttaatgaatcaaggggttaatcctattttggcgacgattctaggcatgctatcagggatgttagcgggatttgttactggtttactttatactaaaggaaagataccgacgattttagcagggattttagtaatgacctcatgccactctattatgctaatggttatgaaaagagcaaatctaggtttaaatgagattcaaacattgaaagattttcttccgttttcaaatgatttaaatcttctcgtattaggcttgatagctattctcttggtgatttctgccttaatttattttctctatacacgcttggggcaagcttatattgcaacaggagataaccctgatatggcaaagagcttcggcattgataccgacaaaatggaaatgcttggcttaattgtatcaaatggcttaattgctttatcaggagctttagtaagtcaacaagatggatatgctgatgtatcaaaagta

SEQ ID NO: 11140 - protein, 205 aa, Streptococcus agalactiae
MIISSVSQGLLWGILGLGIYLTFRILKFPDMTTEGSFPLGGAVCVTLMNQGVNPILATILGMLSGMLAGFVTGLLYTKGKIPTILAGILVMTSCHSIMLMVMKRANLGLNEIQTLKDFLPFSNDLNLLVLGLIAILLVISALIYFLYTRLGQAYIATGDNPDMAKSFGIDTDKMEMLGLIVSNGLIALSGALVSQQDGYADVSKV

SEQ ID NO: 11141 - protein, 1002 aa, Streptococcus agalactiae
ATGAAAAATAAAGGGCTGATAGCTACGCTAATTCTATTGACTATATTAGTGGTTGGAGAATTATTTTATAACAAATCAGAAAAACGTCTTAATTTATCAGAAAAGCAAGTTGTTAAAATTGGTATTTTACAGTATGTAACCCATGATGCTTTGGATGCTATTGAAAAGGGAGTTGAAGATGGTCTAGCTCAAGAAGGATATAAAGGGAAAAAAGTTAAATTAACCGTTTTAAACGCCGAAGCTGATCAAAGTAAAATTCAAGCGATGAGTAAACAATTAGTTAATCATCACAATGATATTTTGATTGGAATTGCGACACCATCAGCACAAGGTTTAGCAGCTTCGACTAAGGACACTCCTATAATCATGGGAGCTGTTTCTGATCCTTTAGGGGCCAAGTTAGTAACGAATATGAAGAAACCAACAACTAATGTTACAGGATTATCAAACGTTGTTCCGACCAAGCAAACTGTGCAATTAATCAAGGATATAACTCCCAATGTTAAACGTATAGGAATTCTTTATGCTAGTAGCGAAGATAATTCTGTATCACAAGTAACTGAGTTTACAAAATATGCTCAAAAAGCAGGGCTAGAAGTTCTTAAATATTCTGTACCATCTACAAATGAAATTAAGACAAGTATGTCAGTCATGACCAAAAAAGTAGACGCTGTCTTTGTTCCACAAGATAATACTATTGCGAGTGCTTTTAGAACAGTTATCGTAGCAGCAAACCAAGCTAATATACCTGTGTATTCCAGTGTTGATACCATGGTTGAACAAGGAAGTATAGCATCAGTAGCGCAGAGTCAATATGGCTTAGGGTTAGAAACTGCAAAACAGGCCATTAAAGTCCTAAGAGGGAAGCCGGTTAAAGATGTACCAGTCAAAGTTATTGATACAGGGAAGCCAAGCCTCAATTTGAAAGCAGCCAAACACTTAGGAATTAAAATTCCTAAGAAGATTATGAAACAGGCAGAAATTACCGTTAAGGTTGACGAT

SEQ ID NO: 11142 - protein, 334 aa, Streptococcus agalactiae
MKNKGLIATLILLTILVVGELFYNKSEKRLNLSEKQVVKIGILQYVTHDALDAIEKGVEDGLAQEGYKGKKVKLTVLNAEADQSKIQAMSKQLVNHHNDILIGIATPSAQGLAASTKDTPIIMGAVSDPLGAKLVTNMKKPTTNVTGLSNVVPTKQTVQLIKDITPNVKRIGILYASSEDNSVSQVTEFTKYAQKAGLEVLKYSVPSTNEIKTSMSVMTKKVDAVFVPQDNTIASAFRTVIVAANQANIPVYSSVDTMVEQGSIASVAQSQYGLGLETAKQAIKVLRGKPVKDVPVKVIDTGKPSLNLKAAKHLGIKIPKKIMKQAEITVKVDD

SEQ ID NO: 11143 - protein, 1653 aa, Streptococcus agalactiae
ATGTCTTTTGATGGATTTTTTTTACATCACCTCACAAATGAATTACAAGAACAGATTGAAAAAGGACGTATCCAAAAAATTAACCAACCTTTTGACCATGAATTGGTATTAACAATACGCAATAATCGTCGCAACTATAAACTACTCCTATCTGCTCACCCTGTATTTGGACGTATCCAAACTACCGAAGCAAATTTCCAAAATCCTCAAAATCCAAATACTTTTACAATGATTATGAGAAAGTATTTGCAAGGTGCAGTGATTGAAACCATTCAACAAATTGAAAATGACCGTATATTAGAAATCGTCGTGTCTAATAAAAACGAAATCGGTGATCATATTAAAGCGACACTTGTTGTTGAAATCATGGGAAAACACAGTAACATTATCTTGATTGATAAAAATGAACATAAAATTATTGAATCAATTAAGCATGTTGGTTTCTCGCAAAACTCCTACCGTACTATCCTTCCTGGTTCGACTTACATTGCCCCACCCAAAACAAAAGCAATCAATCCTTTTGATATTTCTGATCAAACTCTATTTGAGCTGCTTCAAACCAATGATCTAAGCCCTAAAAACCTCCAACAACTCTTCCAAGGTTTAGGACGCGATACTGCGCTAGAATTATCTAACTGTTTGAAAGACAATAAACTTAACGATTTTCGTCAATTCTTTTCGAGAGAATATCATCCTAGCCTAACAGAAAAATCCTTTTCCGCTGTCCAATTCTCAAGCAGTCACGAAACATTTCAGTCTCTTGGACAATTGTTAGATTATTACTACCAAGAGAAAGCTGAAAAAGATCGCATAGCACAGCAAGCTAGTGACCTCATTCACCGTGTTCAAAGTGAGTTAGAGAAAAATATCAAAAAACTAGCTAAGCAACAAGACGAACTTCTAGCTACTGAAAATGCAGAGGAATTTCGCCAAAAAGGAGAGCTTCTAACTACCTATCTCTCTATAGTACCAAATAATCAAGATGTCGTTGTGCTTGATAATTATTACACCAACCAAACGATTGAGATTTCACTTGATCGAGCTTTAACACCCAACCAAAATGCCCAACGCTACTTTAAAAAATATCAAAAATTAAAAGAAGCTGTAAAACATTTAAAAGGAATTATTTCAGATACGGAAAATACAATCACCTACCTTGAATCTGTTGAAACATCGCTAAATCATGCTTCTATGGAAGATATCAATGATATTCGTGAAGAACTTGTTGAAACTGGATTTATTAAGCGACGCGCACATGATAAACAACATAAGCGCAAAAAACCTGAACAATATTTAGCATCCGATGGCAAGACTATTATTATGGTAGGACGTAATAATCTCCAAAATGACGAGTTAACATTTAAAATGGCTCGTAAAGGGGAGTTGTGGTTTCATGCCAAGGATATCCCCGGAAGTCATGTGTTAATTCGGGATAACCTCAATCCAAGTGACGAGGTTAAGACAGATGCCGCCGAGTTAGCTGCTTATTACTCTAAAGCTCGTCTCTCCAATCTTGTTCAAGTAGACATGATTGAAGTAAAAAAACTCAATAAACCAAGTGGTACTAAACCAGGTTTTGTAACTTACACTGGTCAAAAAACCTTACGAGTCACTCCCACACAAGAAAAAATAGATAGCCTTAAACTAAAAAAA

SEQ ID NO: 11144 - protein, 551 aa, Streptococcus agalactiae
MSFDGFFLHHLTNELQEQIEKGRIQKINQPFDHELVLTIRNNRRNYKLLLSAHPVFGRIQTTEANFQNPQNPNTFTMIMRKYLQGAVIETIQQIENDRILEIVVSNKNEIGDHIKATLVVEIMGKHSNIILIDKNEHKIIESIKHVGFSQNSYRTILPGSTYIAPPKTKAINPFDISDQTLFELLQTNDLSPKNLQQLFQGLGRDTALELSNCLKDNKLNDFRQFFSREYHPSLTEKSFSAVQFSSSHETFQSLGQLLDYYYQEKAEKDRIAQQASDLIHRVQSELEKNIKKLAKQQDELLATENAEEFRQKGELLTTYLSIVPNNQDVVVLDNYYTNQTIEISLDRALTPNQNAQRYFKKYQKLKEAVKHLKGIISDTENTITYLESVETSLNHASMEDINDIREELVETGFIKRRAHDKQHKRKKPEQYLASDGKTIIMVGRNNLQNDELTFKMARKGELWFHAKDIPGSHVLIRDNLNPSDEVKTDAAELAAYYSKARLSNLVQVDMIEVKKLNKPSGTKPGFVTYTGQKTLRVTPTQEKIDSLKLKK

SEQ ID NO: 11145 - protein, 717 aa, Streptococcus agalactiae
ATGTCAGAAACAGTTAAATTATTTCAATACAGTACCTTGAGTTCACTGATGGCAGGATTGTACAAAGGCAGTCTAACTATCGGAGAATTATTAACTCACGGTGACTTAGGAATCGGTACTGTTCATATGATTGATGGTGAATTGATTGTATTGGATGGGAAAGCTTATCAAGCTATTGGTACAGATGGTAAAGCAGAGATTATCCAATTATCAGATGATGTGACAGTACCCTATGCAGCGGTTTTACCACACCATATCCAAAAACAATTTGATATCAATGCTGAGACAGATAATAAGGATTTGGAAGAGATGATTCTAAAAAACTTTGAAGGTCAAAATCTCTTTAAGTCTTTAAAAATCAAAGGAACGTTTTCAAGAATGCACGTTCGTATGATTCCAAAATCTCCACAACATAAACGTTTTGCAGATATTGCATCTAATCAGCCAGAATTTACCAAAGAGAATGTATCTGGTACGTTGGTTGGGATTTGGACGCCGGAATTATTTCATGGTGTGGGGGTAAAAGGATTCCATGTCCACTTTATTTCAGACGATTTAACTTTCGGTGGGCATGTTATGGATTACTCGCTCACACAAGGAAAAGTTGAAATTGGGAAGGTTGACCAACTTGACCAATGTTTCCCAACTCAAGATCAAGAATTTTTGGAAGCTAACTTTGACCTACAAAAGCTTAGAGAAGATATTGATTTAAGTGAA

SEQ ID NO: 11146 - protein, 239 aa, Streptococcus agalactiae
MSETVKLFQYSTLSSLMAGLYKGSLTIGELLTHGDLGIGTVHMIDGELIVLDGKAYQAIGTDGKAEIIQLSDDVTVPYAAVLPHHIQKQFDINAETDNKDLEEMILKNFEGQNLFKSLKIKGTFSRMHVRMIPKSPQHKRFADIASNQPEFTKENVSGTLVGIWTPELFHGVGVKGFHVHFISDDLTFGGHVMDYSLTQGKVEIGKVDQLDQCFPTQDQEFLEANFDLQKLREDIDLSE

SEQ ID NO: 11147 - protein, 1680 aa, Streptococcus agalactiae
ATGACAGAATCACATAATCAATATGGGGCTGACTTAATTGTCGATAGCCTCATTAATCATGATGTCAAATATGTTTTTGGTATCCCAGGAGCTAAGATTGACCGCGTATTTGACACTCTAGAAGATAAAGGTCCAGAGTTAATTGTTGCTCGTCATGAGCAGAACGCGACTTTTATGGCTCAGGCTGTCGGGCGTATTACGGGAGAACCAGGAGTTGTTATTGCAACTAGTGGACCTGGGATCTCGAACTTGGCAACAGGGTTAGTTACTGCGACAGATGAAGGTGATGCTGTTCTTGCAATTGGTGGACAGGTTAAGCGAGGAGATTTATTGAAACGTGCTCATCAATCAATGAATAACGTTGCTATGCTGGAACCTATTACAAAATATTCTGCTGAGGTTCATGACCCTAATACTTTGTCAGAAACTGTTGCAAACGCCTATCGTCTTGCTAAATCTGGTAAACCAGGAGCAAGTTTTATCTCTATTCCTCAAGACGTTACAGACAGTCCAGTCTCAGTAAAAGCAATCAAACCTCTTAGTGCACCTAAATTGGGTTCGGCATCTGTTTTAGATATCAATTATTTAGCGCAGGCTATTAACAATGCTGTTTTACCGGTACTGTTATTAGGAAATGGCGCATCTTCAGAGGGAGTAACTGCTGCCGTACGTCGACTTCTTGATGCTGTTAAACTACCAGTAGTAGAAACTTTCCAAGGTGCGGGTATTGTGTCACGCGAGCTCGAGGATGAAACATTCTTTGGTCGTGTAGGTCTCTTCCGTAATCAACCTGGAGATATGCTTTTGAAGCGTGCAGACCTAGTTATTGCTATCGGGTATGACCCTATTGAATATGAAGCGCGTAACTGGAATGCTGAAATTTCTGCTCGTATTATTGTTATTGACGTTGAACAAGCAGAAATTGATACGTATTTCCAACCCGAGCGAGAACTGATTGGAGACATGGCACATACACTTGATTTACTTTTACCAGCTATTAAAGGATATGAATTGCCTGAAGGTTCAAAAGAGTATTTGAAAGGGCTTCGTAATAACATTGAAAATGTTAGCGATGTTAAATTTGATCGTGACTCAGCTCATGGACTTGTTCATCCTCTTGATCTCATTGATGTACTCCAAGAAAATACCACCGATGACATGACTGTTACAGTTGATGTGGGAAGCCATTATATTTGGATGGCTCGCTACTTTAAATCATATGAAGCGCGTCACTTGCTCTTCTCAAACGGAATGCAAACATTAGGAGTTGCTCTACCTTGGGCAATTTCTGCGGCTCTTTTGCGTCCCAACACAAAAGTTATTTCAGTTTCTGGTGATGGTGGCTTCTTATTCTCAGCTCAAGAGTTAGAAACTGCAGTTCGTCTTCATCTACCAATTGTTCACATTATTTGGAACGATGGAAAATATAACATGGTTGAATTCCAGGAAGAAATGAAGTATGGGCGTTCTTCAGGTGTTGACTTTGGACCAGTTGATTTTGTAAAATACGCTGAAAGTTTCGGTGCTAAAGGTTACCGTGTAGACAGCAAAGACAGTTTTGAAGAAACACTCAAACAAGCTCTAATCGATGCTGAAAATGGACCAGTGTTGATTGATGTGCCTATCGACTATAAAGATAATGTGACACTAGGTGAAACAATCTTACCCGACGAGTTCTAC

SEQ ID NO: 11148 - protein, 560 aa, Streptococcus agalactiae; identical to SEQ ID NO: 6874

SEQ ID NO: 11149 - protein, 1224 aa, Streptococcus agalactiae
ATGTTGAATAGTGAAAAAATGATTGTTTCTATCCAAAATCAGGATTTAGAACATGCTAACAAGTATTTCGAAAAAGCGTTGAAAAATGATCCTGAGGAAATCTTATTGGAACTAGGAGCTTATTTGGAGAGTATTGGTTTTTTACCCCAAGCAAAACGTCTCTATGATCAAATCCGACCAAATTATCCAGAAGTTGCTATCAATTTAGCTCAAATTGTTGCCGAAGATGGAGATATTGAACAAGCATTCTTATACTTAGATTATATCTCAGAAGATAGTCAAGAGTATGTTTCAGCCCTCCTCGTTATGGCTGACTTATATGATATGGAAGGCTTGACTGATGTTGCGCGTGAAAAGCTTTTGCTAGCCAGCAAACTTAGCGATGACCCATTGGTTACATTTGGTTTAGCTGAAATGAACCTTAGTTTGGAACATTATCAAGAAGCGATAGAAGGATATGCATCACTTGACAATCGAGAAATCTTAGAAACGACTGGAGTTTCAACTTATCAGCGTATTGGTAAATCCTACGCTATTATAGGGAAATTTGATGCAGCTATCGAATTTTTAGAAAAAGCCGTTGACATTGAGTATGATGATTTAACAGTTTTTGAGTTAGCAACAATCCTTTATGATCAAGAAGAATATCAAAAAGCTAACCTTTATTTTAAACAGTTGGATACTATTAATCCAGACTTTGATGGCTATGAATATATCTATGGTTTATCTCTTCGTGAGGAGCATAAATCTGAAGAAGCTTTACGTCTAGTTCAGCAAGGTCTTCGTAAAAATAGTTTTGATGGTCAACTTCTCTTACTAGCTTCACAATTATCGTATGAATTACATGATGTTCCTTCGTCGGAGTCTTATTTGAAACAAGCTGAAAAAGTTTCTGAAAACCAAGATGAAATTGTTATGAGATTGTCAAATTTGTATCTTGAAGAAGAGCGGTTTGAGGAAGTCTTGGAATTAGACAATGATGATTTAGAAAATATCCTTGCAAAATGGAATATCGCTAAAGCACACAAGGCTTTAGAAATGGATGATAGTGTAGACTATTATCAATCTTTGTATAATGATTTAAAAGATAATCCAGAATTTTTACAAGATTATGCTTACATTTTGAGAGAATTTGGTTACCTTGATAAGGCACAAGAAGTAGGAAAGGCTTATTTAAAATTAGTTCCAGACGATATAGAGATGTCAGAATGGGTGAATAACATT

SEQ ID NO: 11150 - protein, 408 aa, Streptococcus agalactiae
MLNSEKMIVSIQNQDLEHANKYFEKALKNDPEEILLELGAYLESIGFLPQAKRLYDQIRPNYPEVAINLAQIVAEDGDIEQAFLYLDYISEDSQEYVSALLVMADLYDMEGLTDVAREKLLLASKLSDDPLVTFGLAEMNLSLEHYQEAIEGYASLDNREILETTGVSTYQRIGKSYAIIGKFDAAIEFLEKAVDIEYDDLTVFELATILYDQEEYQKANLYFKQLDTINPDFDGYEYIYGLSLREEHKSEEALRLVQQGLRKNSFDGQLLLLASQLSYELHDVPSSESYLKQAEKVSENQDEIVMRLSNLYLEEERFEEVLELDNDDLENILAKWNIAKAHKALEMDDSVDYYQSLYNDLKDNPEFLQDYAYILREFGYLDKAQEVGKAYLKLVPDDIEMSEWVNNI

SEQ ID NO: 11151 - DNA, 1188 bp, Streptococcus agalactiae
atgaatcgaccatcagaaaaagaatttaaaaatagtttgttttttaaatggatcttaaataatcaagcagttattgctctcatgattacctttttggtatttttaacgatttttatttttaccaaaatctcttttatgtttaaacctgtgtttgattttcttgctgtgctgatattgccgcttgtaatttctggcttgctttattacctattaaaacctatggttacatttttagagaagcggggaattaagcgtgtaacagcgatattatcagtttttactattataatccttctgttaatttgggcaatgtctagttttattcccatgatgagtaatcaattacgccattttatggaagatctcccttcatatgtgaataaagtgcaaatggaaacaagttcgtttatagatcacaacccttggttaaaatcttataaaggggaaatatcgagcatgttatctaatatcagtagccaagcggtctcttatgctgaaaaattttcaaagaatgttttagattgggcaggaaatttagctagtacagttgcacgtgtgacagtagcaacaattatggctccctttattttgttttatcttttaagagatagccgcaaaatgaagaatggtttcttaatggttttaccaaccaaactacgccaaccaactgatcgtattttgcgagaaatgaatagtcaaatgtcagggtatgtgcaaggacaaatcattgttgctattactgttggtgttattttttcaataatgtatagtattataggtcttagatatggcgtgacattagggattattgccggtgtgttaaatatggttccctatttgggaagttttgtcgcccaaattccagtgtttatcttagcgcttgtcgcaggacctgttatggttgttaaagttgcgattgtttttgttattgagcaaactctagagggacgctttgtctcacccttggttttaggtaataaacttagcattcatccaattacaattatgtttattttattaacctctggagcgatgtttggtgtttggggagtattcctcagtattccgatttatgcatctatcaaagtcgttgttaaagaattgtttgattggtacaaagctgtcagtgggctatatacaatagatgttgttactgaagaaagaagtgaagaagttaaaaatgttgaa

SEQ ID NO: 11152 - protein, 396 aa, Streptococcus agalactiae
MNRPSEKEFKNSLFFKWILNNQAVIALMITFLVFLTIFIFTKISFMFKPVFDFLAVLILPLVISGLLYYLLKPMVTFLEKRGIKRVTAILSVFTIIILLLIWAMSSFIPMMSNQLRHFMEDLPSYVNKVQMETSSFIDHNPWLKSYKGEISSMLSNISSQAVSYAEKFSKNVLDWAGNLASTVARVTVATIMAPFILFYLLRDSRKMKNGFLMVLPTKLRQPTDRILREMNSQMSGYVQGQIIVAITVGVIFSIMYSIIGLRYGVTLGIIAGVLNMVPYLGSFVAQIPVFILALVAGPVMVVKVAIVFVIEQTLEGRFVSPLVLGNKLSIHPITIMFILLTSGAMFGVWGVFLSIPIYASIKVVVKELFDWYKAVSGLYTIDVVTEERSEEVKNVE

SEQ ID NO: 11153 - DNA, 480 bp, Streptococcus agalactiae
ttgaaaagacggttaatttttatgaaaaatagagattttagggtcagagaacagctcgaaacattcggagtcagagtttctgctttaatcataggaaatcaaaaactgctattaatatatgctcctcatctcgataaatactatttaccaggtggggcgcttcaagttggagaagatagcaataaggctgttgcgagagaagtacttgaggaaataggtcttcacagccaggttggtgatttagcctatattgttgagaatcagtttaatattaagagacatcattaccactcagttgaatttttatattttgttaatctcttgggtcaggcgccagaatctatcaaagaaggaacgcataagcgacattttgtatggcttccaataaaagaattaacaaaaattgattgtaatcctaattttttagcacaggatttgatagaatggccaggtcatgttgtgcataaaatcgttcaaaat

SEQ ID NO: 11154 - protein, 160 aa, Streptococcus agalactiae
MKRRLIFMKNRDFRVREQLETFGVRVSALIIGNQKLLLIYAPHLDKYYLPGGALQVGEDSNKAVAREVLEEIGLHSQVGDLAYIVENQFNIKRHHYHSVEFLYFVNLLGQAPESIKEGTHKRHFVWLPIKELTKIDCNPNFLAQDLIEWPGHVVHKIVQN

SEQ ID NO: 11155 - DNA, 480 bp, Streptococcus agalactiae
atgactaaattagcaacaatttgttacattgacaatggcaaggaattacttctattgcaccgcaacaaaaaagagaatgatgttcatgagggaaagtggatctcggtaggcggtaaactggaggcaggtgaaactcctgatgaatgtgctaagcgtgaaattctagaagaaacccatttaacagtaaaaaaaatggattttaaaggagtcatcacttttcctgaatttacgccaggtcatgattggtatacctatgtctttaaagtaacagattatgaaggagagttaatttcagatgatgaatcacgagaaggaactttagaatgggtaccatatgatcaagttctctctaagccaacgtggcaaggagattacgaaatttttaaatggattttagaagatgttcctttcttttctgctaagtttgtttatgatgaacaccaaaatttaattgaaaagacggttaatttttatgaaaaa

SEQ ID NO: 11156 - protein, 160 aa, Streptococcus agalactiae; identical to SEQ ID NO: 2228

SEQ ID NO: 11157 - DNA, 3216 bp, Streptococcus agalactiae
atggaaattaaaaagaaacatcgtattatgctttattcagcccttattttaggaacaatattggttaacaatagttaccaagctaaagctgaagagcttaccaaaactacctcaacgtcccaaataagagatactcaaactaataatattgaagttccccagactgaaagtaccactgtcaaagagactagcaccacaaccacacaacaagatctgtctaaccccacagcttcaaccacaactgcaacagccactcctagcacaatgaaacaagtagtagataatcaaactcaaaataaggagctggtgaaaaacggagattttaatcaaactaaccctgtatctggaagctggtcacatacaagcgctagggaatggtctgcttggattgataaaggaaacactgctgataaatcacctattatccaacgtaccgaacaaggccaagtaagtctatccagcgacaaaggctttagaggtgctgtaacacaaaaagtgaacattgatcccactaaaaaatatgaggtcaagtttgatattgaaacaagtaacaaggctggacaagctttccttcgtattatggagaaaaaagacaacaatacgcgactttggctttctgagatgaccagcggtactactaacaaacataccttaacaaagatatataacccaaagttagatgtctccgaggtgacacttgaactttattatgaaaaaggaacaggttctgttacttttgataatatatcaatgaaagcaaaaggccctaaagacgcagagcatccacaacccgtcacaacacaaattgaagaaagcgttaatacggctttaaacaaaaattacgtttttaataaagctgattaccagtacactctaaccaatccgtctcttgggaaaattgttggtggaatattgtatccaaacgctactggttcaacaactgttaaaatatctgataaatctggcaaaataattaaagaagtaccgttatcagttacagcttcaacagaagataagtttacaaaactcctcgacaaatggaacgacgtgactattggtaatcatgtttacgatactaatgattcgaacatgcaaaagcttaatcagaaattagatgaaactaacgccaaaaatatcgaagctatcaaactggattctaatcgcactttcctttgggaagacttgaaagatctcaataattcagcacagttaactgctacttatcgtcgtttggaagatttagctaaacaaatcaccaatccccactctactatttacaaaaatgaaaaagctattcgtactgtaaaagagagtctggcttggcttcatcaaaacttctacaatgttaataaagatatagaaggctctgccaattggtgggattttgaaatcggtgtccctcgctcaattacaggtaccctagctctcatgaataactacttcactgacgctgaaataaaaacttataccgacccaattgaacactttgttcctgatgcaggatatttccgtaaaacgcttgtcaatccatttaaagcccttggtggtaatctagtcgatatggggcgcgttaaaatcattgaaggtttacttcgtaaagacaatactattatcgaaaaaacttctcattctctaaaaaatctttttactactgctactaaagctgaaggcttctatgctgacggttcttacatcgaccatacaaatgttgcttatactggcgcctatggtaatgttctgatagatggtttgacacaattgctgcctatcattcaagaaactgactataaaatctctaatcaagaacttgatatggtttataaatggattaatcaatcatttttacctttaattgtaaaaggtgagttaatggatatgagtcgtggacgctcaattagtagagaggcagcttcttcgcatgcggctgcagttgaagttctcagaggtttcctcagattggctaacatatctaatgaagagcgaaacttagacctcaaatcaactattaaaacgattatcacttcaaataaattctacaatgtcttcaataacctcaaatcgtattccgatattgccaacatgaataagctgcttaatgacagtacagtcgctactaaacctttaaaaagtaatttatcaacctttaatagcatggaccgcttagcttattataatgccgagaaagactttggtttcgcgctttcattacattctaaacgtaccctcaactatgaaggaatgaatgatgaaaatacacgtggttggtataccggagatggtatgttctatctttataatagtgatcaatctcattatagtaatcatttttggccaaccgtcaatccttataaaatggctggaacaactgaaaaagatgctaagcgtgaagataccactaaggaattcatgagcaaacatagcaaagacgctaaagaaaaaaccggtcaagttacaggaacatctgactttgttggttccgtcaaacttaatgatcactttgctcttgccgctatggattttactaactgggatcgcaccttaacagcacaaaaaggttgggttatcttaaatgataagattgtctttttaggtagcaacatcaagaatactaacggcattggaaatgtttctacaacaattgatcaacgaaaagacgattctaaaacaccttatactacatacgtcaatggaaaaactattgatttaaaacaagcaagttctcaacaatttacagatacaaaaagtgtctttttagaatcaaaagaacctggtcgcaatattggttatatcttctttaaaaatagcactattgatattgaacgcaaagagcaaacaggtacttggaacagcattaatcgtacttctaaaaatacctcaatcgttagcaatccttttatcactataagccaaaagcatgacaacaaagatgatagctatggttacatgatggttccaaacattgatcgcacaagttttgataaattagccaacagcaaagaagtagaattactagaaaatagttcaaaacaacaggttatctatgataaaaacagtcaaacttggactgttatcaaacacgataatcaagagagtctcattaacaatcaattcaaaatgaataaagcgggactttacctagtacaaaaagttggtaatgactatcaaaatgtctattaccaacctcaaaccatgacaaaaacagaccaattagctatc

SEQ ID NO: 11158 - protein, 1072 aa, Streptococcus agalactiae
MEIKKKHRIMLYSALILGTILVNNSYQAKAEELTKTTSTSQIRDTQTNNIEVPQTESTTVKETSTTTTQQDLSNPTASTTTATATPSTMKQVVDNQTQNKELVKNGDFNQTNPVSGSWSHTSAREWSAWIDKGNTADKSPIIQRTEQGQVSLSSDKGFRGAVTQKVNIDPTKKYEVKFDIETSNKAGQAFLRIMEKKDNNTRLWLSEMTSGTTNKHTLTKIYNPKLDVSEVTLELYYEKGTGSVTFDNISMKAKGPKDAEHPQPVTTQIEESVNTALNKNYVFNKADYQYTLTNPSLGKIVGGILYPNATGSTTVKISDKSGKIIKEVPLSVTASTEDKFTKLLDKWNDVTIGNHVYDTNDSNMQKLNQKLDETNAKNIEAIKLDSNRTFLWEDLKDLNNSAQLTATYRRLEDLAKQITNPHSTIYKNEKAIRTVKESLAWLHQNFYNVNKDIEGSANWWDFEIGVPRSITGTLALMNNYFTDAEIKTYTDPIEHFVPDAGYFRKTLVNPFKALGGNLVDMGRVKIIEGLLRKDNTIIEKTSHSLKNLFTTATKAEGFYADGSYIDHTNVAYTGAYGNVLIDGLTQLLPIIQETDYKISNQELDMVYKWINQSFLPLIVKGELMDMSRGRSISREAASSHAAAVEVLRGFLRLANISNEERNLDLKSTIKTIITSNKFYNVFNNLKSYSDIANMNKLLNDSTVATKPLKSNLSTFNSMDRLAYYNAEKDFGFALSLHSKRTLNYEGMNDENTRGWYTGDGMFYLYNSDQSHYSNHFWPTVNPYKMAGTTEKDAKREDTTKEFMSKHSKDAKEKTGQVTGTSDFVGSVKLNDHFALAAMDFTNWDRTLTAQKGWVILNDKIVFLGSNIKNTNGIGNVSTTIDQRKDDSKTPYTTYVNGKTIDLKQASSQQFTDTKSVFLESKEPGRNIGYIFFKNSTIDIERKEQTGTWNSINRTSKNTSIVSNPFITISQKHDNKDDSYGYMMVPNIDRTSFDKLANSKEVELLENSSKQQVIYDKNSQTWTVIKHDNQESLINNQFKMNKAGLYLVQKVGNDYQNVYYQPQTMTKTDQLAI

SEQ ID NO: 11159 - DNA, 1044 bp, Streptococcus agalactiae
atgactgaatttaaaaacattatcgtaactggtggagctggtttcatcggatcaaactttgtacactatgtttacaataaccacccagatgttcatgtaactgtccttgataaattgacatatgcaggtaaccgtgctaacattgaagccattcttggtgatcgtgttgagttagttgttggtgatattgctgacgctgaattggtagacaaattggctgccaaagcggatgctattgttcactatgcggctgagagtcacaacgataactcattggaagatccaagtccatttatccatacaaactttatcggaacttacactttgcttgaagcagctcgtaaatacgatatccgtttccaccacgtgtcaactgatgaagtttatggagatcttccacttcgtgaagaccttccaggaaatggtgaaggaccaggtgaaaaattcactgctgaaacaaaatacaatccatcatcaccttactcatcaactaaggcagcttctgaccttatcgttaaggcatgggtacgttccttcggcgtaaaagcgaccatttcgaactgttcaaataactatggaccataccaacacatcgaaaaattcattccacgtcaaattacaaatatcttggcaggaatcaaaccgaaactttatggtgaaggtaaaaacgtccgtgactggatccacacaaatgaccattcaacaggtgtctgggctattttgactaagggtcgtattggtgaaacataccttattggtgccgacggtgagaaaaacaacaaggaagttcttgaacttatccttgagaaaatgggtcaaccaaaagacgcttacgatcacgtaactgaccgtgctggtcatgatcttcgttacgctatcgattctacaaaattgcgtgaagaactcggctgggaaccacaatttacaaacttttcagaaggtttggaagaaactattaaatggtatacagaaaatgagacatggtggaaagcagaaaaagatgctgtagaagccaagtatgctaaaactcaagaagtcattaag

SEQ ID NO: 11160 - protein, 348 aa, Streptococcus agalactiae
MTEFKNIIVTGGAGFIGSNFVHYVYNNHPDVHVTVLDKLTYAGNRANIEAILGDRVELVVGDIADAELVDKLAAKADAIVHYAAESHNDNSLEDPSPFIHTNFIGTYTLLEAARKYDIRFHHVSTDEVYGDLPLREDLPGNGEGPGEKFTAETKYNPSSPYSSTKAASDLIVKAWVRSFGVKATISNCSNNYGPYQHIEKFIPRQITNILAGIKPKLYGEGKNVRDWIHTNDHSTGVWAILTKGRIGETYLIGADGEKNNKEVLELILEKMGQPKDAYDHVTDRAGHDLRYAIDSTKLREELGWEPQFTNFSEGLEETIKWYTENETWWKAEKDAVEAKYAKTQEVIK

SEQ ID NO: 11161 - protein, 591 aa, Streptococcus agalactiae
ATGACTGAACAATTTTTTGATAAAGAATTAACTTGTCGCCCAATTGAAGCCATTCCTGGATTGTTGGAATTCGATATTCCCGTTCGTGGAGACAACCGTGGATGGTTCAAAGAGAACTTTCAAAAAGAAAAAATGATACCGCTTGGTTTCCCAGAAAGCTTCTTTGAGGCAGACAAACTACAAAATAATATTTCGTTTAACAAAAAAAATACTTTACGAGGTCTCCATGCAGAGCCTTGGGATAAATATGTTTCGATCGCTGATGAAGGACGTGTGATCGGTACTTGGGTTGACCTCCGTGAAGGTGACAGTTTTGGGAACGTTTACCAAACGATTATCGATGCCTCAAAAGGTATCTTTGTTCCACGCGGCGTTGCTAATGGTTTCCAAGTTCTTTCAGATAAAGCAGCTTATACTTATCTCGTTAACGATTATTGGGCACTTGAACTCAAACCAAAATATGCTTTCGTTAACTATGCAGATTCAAATCTAGGCATTCAGTGGGAAAACCTTGAAGAAGCAGAAGTCTCAGAAGCAGATAAGAATCACCCGCTTCTCAAAGATGTAAAACCTTTGAAGAAGGAAGATTTA

SEQ ID NO: 11162 - protein, 197 aa, Streptococcus agalactiae
MTEQFFDKELTCRPIEAIPGLLEFDIPVRGDNRGWFKENFQKEKMIPLGFPESFFEADKLQNNISFNKKNTLRGLHAEPWDKYVSIADEGRVIGTWVDLREGDSFGNVYQTIIDASKGIFVPRGVANGFQVLSDKAAYTYLVNDYWALELKPKYAFVNYADSNLGIQWENLEEAEVSEADKNHPLLKDVKPLKKEDL

SEQ ID NO: 11163 - protein, 867 aa, Streptococcus agalactiae
ATGAAAGGTATTATTTTAGCGGGAGGTTCAGGTACTCGCTTGTACCCATTAACTCGTGCTGCATCAAAACAATTGATGCCAATTTATGATAAACCAATGATTTATTATCCATTGTCAGTTTTGATGTTGGCAGGAATAAAAGAAATACTGATTATTTCTACTCCACAAGATTTGCCTCGCTTTGAAGATATGCTTGGAGATGGTTCAGAATTAGGAATCTCTCTTTCTTATGCTGAACAACCAAGCCCAGATGGGTTAGCACAGGCCTTCATTATCGGTGAAGATTTTATTGGCGATGATCACGTTGCCTTAGTATTAGGTGATAATATTTATCATGGACCAGGTTTATCTGCAATGCTACAACGTGCAGCCAGTAAAGAAAGTGGAGCAACCGTCTTTGGCTATCAAGTAAAAGATCCAGAACGTTTTGGTGTTGTCGAGTTTGATACTGATATGAATGCCATTTCTATTGAAGAAAAACCAGCGCAACCTAAGTCTAATTATGCTGTCACAGGTCTTTATTTCTATGATAACGATGTGGTTGAAATAGCTAAAAATATTAAGCCAAGTCCTCGTGGAGAACTTGAAATTACTGATGTTAACAAAGCCTACCTTGATAGAGGTGACTTATCAGTTGAGTTAATGGGACGTGGATTTGCGTGGTTAGACACTGGAACTCACGAAAGTCTTCTTGAAGCAGCACAATATATTGAAACAGTACAACGCATGCAAAACGTTCAAGTTGCTAACCTTGAGGAAATTGCTTACCGCATGGGCTACATCACTCGTGAACAAGTCCTTGAGTTGGCACAACCACTTAAGAAAAATGAGTATGGTCAATACCTACTTCGTTTGATTGGAGAAGCC

SEQ ID NO: 11164 - protein, 289 aa, Streptococcus agalactiae
MKGIILAGGSGTRLYPLTRAASKQLMPIYDKPMIYYPLSVLMLAGIKEILIISTPQDLPRFEDMLGDGSELGISLSYAEQPSPDGLAQAFIIGEDFIGDDHVALVLGDNIYHGPGLSAMLQRAASKESGATVFGYQVKDPERFGVVEFDTDMNAISIEEKPAQPKSNYAVTGLYFYDNDVVEIAKNIKPSPRGELEITDVNKAYLDRGDLSVELMGRGFAWLDTGTHESLLEAAQYIETVQRMQNVQVANLEEIAYRMGYITREQVLELAQPLKKNEYGQYLLRLIGEA

SEQ ID NO: 11165 - protein, 1101 aa, Streptococcus agalactiae
ATGAAAAAGATAGCAATTATTGGTGCAGGAGCAGTCGGAGCGACACTAGCCTATTACTTATCAAAAGAAAAGGATATTCAGGTTACTGTTTTTGATTATGGAGTTGGACAAGCAACTAAGGCTGCTGCGGGGATTATTAGCCCATGGTTTTCAAAACGTCGTAATAAAGCCTGGTATCGTATGGCGAGGTTGGGGGCTGATTTTTATTCAAAGCTAGTCACGGATTTACAAAAAGATGGTTTTGAAACAAAATTTTATCAGCAAACTGGTGTTTTCTTATTAAAAAAGGACGAGAGTCAGTTAGAGTCATTATTTGCACTAGCAGATAAACGTCGACTAGAATCTCCTCTAATAGGCGATTTACAAATACTAAATAAAAGTGAAGCAAATACTCACTTTCCTGAGTTAGATGGCTATGAACAGTTACTTTATGCGAGCGGAGGAGCACGAGTAGAAGGGGCGGACTTAACACGAATATTGTTAGAAGCAAGTGGTGTTAATGTCATCAAGGATGAAGTTCACTTTACGATAACTGATAATGGCTTTCGTGTTCAAGGAATTGATTTTGATAAACTTGTTTTAGCGAGTGGAGCCTGGCTAGCTAAGATATTAGATGAGCACAACTATCAGGTAGATGTTCGCCCTCAAAAAGGGCAATTGCGAGACTATTATTTTAGCAATATTAATACAGGAAAATATCCTGTTGTAATGCCAGAAAGTGAGCTAGATATTATCCCATTTGATAATGGTAAAGTCTCTATAGGTGCAAGTCACGAAAATGATATGGCTTTTGATTTAAGCATTGATTTTAAAGTCTTAGACAAGTTTGAAGAGCAAGCTATTGGCTATTTTCCGCAATTAAAAAAAGCAGATACGACTTCTGAACGTGTTGGAATTCGTGCCTATACAAGTGATTTTTCTCCATTTTTTGGCCCTGTCCCTTGTATGGAGGGTGCATATGCTGCAAGTGGATTAGGATCAACTGGCTTAACAGTAGGCCCATTAATTGGTTATGAATTATGTCAATTAATCTTAAATAAAGAAAATCAGCTAAATTTAGAGGATTACGATATTACGAAATACGTGAAAAAGATTAGTAGA

SEQ ID NO: 11166 - protein, 367 aa, Streptococcus agalactiae
MKKIAIIGAGAVGATLAYYLSKEKDIQVTVFDYGVGQATKAAAGIISPWFSKRRNKAWYRMARLGADFYSKLVTDLQKDGFETKFYQQTGVFLLKKDESQLESLFALADKRRLESPLIGDLQILNKSEANTHFPELDGYEQLLYASGGARVEGADLTRILLEASGVNVIKDEVHFTITDNGFRVQGIDFDKLVLASGAWLAKILDEHNYQVDVRPQKGQLRDYYFSNINTGKYPVVMPESELDIIPFDNGKVSIGASHENDMAFDLSIDFKVLDKFEEQAIGYFPQLKKADTTSERVGIRAYTSDFSPFFGPVPCMEGAYAASGLGSTGLTVGPLIGYELCQLILNKENQLNLEDYDITKYVKKISR

SEQ ID NO: 11167 - protein, 786 aa, Streptococcus agalactiae
ATGAAAGCTAGAGAACTTATTGATGTATATGAAACTTATTGTCCACAGGAATTATCTATGGAAGGAGATATTTCAGGTCTTCAAATTGGATCTTTAGATAAAGAAATAAAGACAGTCATGGTAGCTTTAGATGTTCGAGAGACCACAGTAGCTGAAGCAATTGAACGTCAAGTAGATCTTCTGATTGTAAAGCATGCTCCTATTTTTCGTCCATTAAAGGATTTGGTAGCAACACCGCAAAATAAGATTTATATAGACCTTCTTAAATCAGACATTGCTGTTTATGTGAGCCATACTAATATAGATATCGTTCCTAATGGACTTAACGACTGGTTTTGTGAATTATTAGATATTCAATATCCCGATATATTATCTGAAACAAGTAATGGTTATGGTATTGGTCGCATTGGTGATGTTAGACCCCAGAGTTTTGAATTTTTTGCATGGAAAATTAAAGATGTGTTTGGTTTAGATAGCGTTCGTTTAGTTTCATATGATAAATCTAATCCTGAAATTCAACGAGTTGCTATTTGTGGGGGTAGTGGGCAAAGTTTCTACAAAGAAGCTATTGCAAAAGGAGCAGATGTTTTTGTAACGGGAGATATTTATTATCATACTGCACAAGAAATGATCACAAATGGTTTGCTTGCGATTGACCCAGGTCATCATATTGAGGTTTTATTTGTTTCTAAAATAGCTACTATGATTGAGCAGTGGAAACTTGAAAAAGACTGGGATATTTCAGTTTTAGAGAGTAAAGCTCCAACAAATCCCTTTTACCATATG

SEQ ID NO: 11168 - protein, 262 aa, Streptococcus agalactiae; identical to SEQ ID NO: 6896

SEQ ID NO: 11169 - protein, 681 aa, Streptococcus agalactiae
ATGGATTTACAATTATCAAAACGATTACAAAAAGTTGCAAACTATGTTCCAAAAGGAGCTCGGTTATTAGATGTAGGAAGTGATCATGCTTACTTACCTATTTTTTTGTTGCAGATGGGATACTGTGATTTTGCCATTGCTGGTGAAGTGGTGAATGGACCGTATCAGTCTGCGTTGAAAAACGTTTCAGAACATGGTCTCACTTCAAAGATAGATGTTCGCTTAGCAAATGGTTTGTCAGCTTTTGAAGAAGCAGATAATATTGATACGATAACTATCTGTGGAATGGGTGGTCGTTTGATTGCTGATATTTTGAATAACGATATAGACAAACTTCAGCACGTTAAAACACTAGTCTTACAACCTAATAATCGGGAAGATGATTTAAGAAAATGGTTAGCTGCAAATGATTTTGAAATAGTAGCAGAAGATATCTTGACTGAAAATGACAAATGCTATGAAATTTTAGTTGTTAAGCATGGTCATATGAATTTAACTGCTAAAGAATTGCGATTTGGTCCATTTTTATTATCCAATAACACAACGGTTTTTAAAGAAAAATGGCAAAACGAGCTTAATAAATTAACTTTTGCTTTAAACTCTATTCCTAATAGTAAAATTGAAGAACGCGCTATTTTGGAAGATAAAATACAGGATATAAAGGAGGTTCTTGATGAAAGC

SEQ ID NO: 11170 - protein, 227 aa, Streptococcus agalactiae; identical to SEQ ID NO: 6898

SEQ ID NO: 11171 - DNA, 678 bp, Streptococcus agalactiae
atgacttatttggaacaatatcagtcagggcaattgactctaccaagtgctttattttttcactttaaatctatttttaagacagcagacgattttttagtttggcaatttttctatttacaaaatacaactaatttatccgatctaacaccgagccgtattgcgacatcacttgataaaacagtggcagatatcaatcgttctatatcgaatttaacaagtcaaggtttactagatgtcaaaacaattgagttgaatcatgaaatcgagattatctttgatacaagccctgtgtttgctaaattagataaacttttcgaagaggataatcaagtaataatagacaataaaacctctgattcgaatcgtctgaaagatttagtaggagacttcgaacgtgaattaggtcgcttattaagtccttttgaattagaagatttacaaaagacactgcaagaagatcagacagatcctgatattgttagggcagctcttagagaagcggttttcaatgggaaaacaagttggaattatatcaatgctatccttcgcaactggcggcgtgaaggattgacgacacttcgacaaattgaagagagaaaacaagcacgtgaagataaccaaatgaaagatttagcgatttcggatgattttaaaaatgcaatgaatttatgggaa

SEQ ID NO: 11172 - protein, 226 aa, Streptococcus agalactiae; identical to SEQ ID NO: 6900

SEQ ID NO: 11173 - DNA, 516 bp, Streptococcus agalactiae
atggatttaaataattacatcgcttcaattgaaaactatcctcaagaaggaattactttccgtgatatctccccattaatggctgatggtaaagcatacagctatgctgttcgtgaaattgtacaatatgctgctgataaagatattgatatgattgttggaccagaagctcgtggctttattgttggttgcccagttgcttatgctcttggtattggttttgctccagtccgtaaaccaggtaaattaccacgcgaagttatttcagctgactatgaaaaagaatatggtcttgatacattgacaatgcacgcagatgctattaaaccaggtcaacgtgttttaattgttgatgaccttttagctactggtggaacagtaaaagcgacaattgaaatgattgaaaaactcggtggcgttgtcgcaggctgtgctttcctagttgaacttgatggattaaatggtcgtaaagctattgaaggttatgatactaaggtattgatgaactttccagga

SEQ ID NO: 11174 - protein, 172 aa, Streptococcus agalactiae; identical to SEQ ID NO: 2246

SEQ ID NO: 11175 - DNA, 2562 bp, Streptococcus agalactiae
atgagacctatcgttagaaaaaagatgtacaaaaaaggtaaattttgggtcattgcaggtatcgttactattttaggtggtagtgcaattattggtcaagatgtcaaggcagaacaggcagaagcagtaacttcaacgatctcagagaaaattgatagcagtcagactatttcggatacttccaagttaacgttacctgttaattcctcggaggctatgaaaaatagtgcagagcctttaataaaaacaggctttgctacatctgtttcatctaatcctagagagatagcagctaccccagtcaaaacctttgatgctagctcaaaagttgttgtaaaagctagtactgctgagcactcagcaaatcaaacaaattctaatgttaatcaagtagctaatgatagtgaagttattactcaacaaaattcaacaaagcaattaccaacagtgacttactctgctcatgttcaagatattggatggcaaaagtcggttgataatgcaacagtttcaggaacagtaggacaggaaaagcaggttgaggcaataaaattgtctattaaagcacctgaaggaataacaggaaaacttagctataaaacttatgttaaaggacaaggttggcaatcttcagtagagagtggtcaagttagtggtactgttggtcagagtaaacctattgaagcactaagcattaaccttactgataatttacaaaaattatatgatgtctattatcgtgttcatgttcaagatatcgggtggatggcttgggctaaaaatggagcttacgctgggactttggaaatgtcaaagcgccttgaagcttacgaagtaaagtttacccttaaaggacaatctgttttaacaccaactatacttaaggaagagagacctgtcttaaattatcaggttaaggtaggccaaaatggttggcaatctaataaacttgaaggacaaatggcgggaactttaggagaatccaaagccctagatggagtaaaattcactcttagcaccttgaagtatggggacattctctatcgtactcatgtacaagataaaggttggggagaaattttaggtagtcaaacaagtaaggattatcaaggaaaaagactagaagctattcaattggacttaagtgggaatttaaaacaaaattatgatatttattatcgcgctcacgtccaagataaaggttggatggcttggcaaaaaaataatagtgtagcaggtacagtcggagaatcgaaacgtttagaggctttggaagtaaaactagtagctaaagcttcagattttagttcccaaacagatcattcattcttagaaatgaagcatcctggattaagttatcaaacttatcttcaaaaagatggttggaaaccaacggttttggaaggccaattaggaggtagtattggactttcaaaatctataaaagccatcaaacttaacttaggtagtacagctctaggaaatatagaatatagaacttttcttaatggttcaggttggcaaactgttgttaattcagggagagaaagtaatgtaccaaatgaatctcaacaagtagaagctattcagatgcgattgacaggtctgctatcgaaaacctatagtgtgatgtatcgagttcacatgcaagattatggttggcaggattggacttataacaatgacatcgctggtagtactaaccaaggaaaacgaattgaagcaatcgaaattaaattagttgagactgctaaaatacctataactgtccaaacgacctataagggaactggaaactataatgtacgagtgacaaatgttattagtcctgggaatttaaaaattgctatttggtcagataaaaacaatcaggatgaccttaagtggtataccgtcacacccaaaaatcatgacgctacattgacatttaatgttacaaatcatagagacaatggtaaatactttatccatgtttatcaggaaaatgcttctaatcaaaaacaattattggtaaaaacttctctacaagtcgcacattcaaattataatactccttactttagccaacgtgatggaaggtgggcaagtcgaagatatggtatggcaactttaggagaaactggttgtgtaccaacttctctagctatgattttgtcttctttgaaaggagaaactgttttaccaacgcaaattgcagattacctttaccataagacagttgaatttaatcgtggtgttcaaggaacaacttctagaggaattttaaaagcagccaaagaatggggtgtaactgcaactgcattaggaactcaagctaaccttgtacaagcgttgaaggatggttatcatgtcctagcggcagtacaaaataatgtttttgttcttcatggaagtcatgaaatcgttctcaaaggatataataacggactgacacatgtctctgacccttacacaccgtccttgtctggttggtatccaatttcacaactttggaaagaacagagctattatagtgaggatagaattgatattggagcaccttttgtcaaggtaacagatgcc

SEQ ID NO: 11176 - protein, 854 aa, Streptococcus agalactiae
MRPIVRKKMYKKGKFWVIAGIVTILGGSAIIGQDVKAEQAEAVTSTISEKIDSSQTISDTSKLTLPVNSSEAMKNSAEPLIKTGFATSVSSNPREIAATPVKTFDASSKVVVKASTAEHSANQTNSNVNQVANDSEVITQQNSTKQLPTVTYSAHVQDIGWQKSVDNATVSGTVGQEKQVEAIKLSIKAPEGITGKLSYKTYVKGQGWQSSVESGQVSGTVGQSKPIEALSINLTDNLQKLYDVYYRVHVQDIGWMAWAKNGAYAGTLEMSKRLEAYEVKFTLKGQSVLTPTILKEERPVLNYQVKVGQNGWQSNKLEGQMAGTLGESKALDGVKFTLSTLKYGDILYRTHVQDKGWGEILGSQTSKDYQGKRLEAIQLDLSGNLKQNYDIYYRAHVQDKGWMAWQKNNSVAGTVGESKRLEALEVKLVAKASDFSSQTDHSFLEMKHPGLSYQTYLQKDGWKPTVLEGQLGGSIGLSKSIKAIKLNLGSTALGNIEYRTFLNGSGWQTVVNSGRESNVPNESQQVEAIQMRLTGLLSKTYSVMYRVHMQDYGWQDWTYNNDIAGSTNQGKRIEAIEIKLVETAKIPITVQTTYKGTGNYNVRVTNVISPGNLKIAIWSDKNNQDDLKWYTVTPKNHDATLTFNVTNHRDNGKYFIHVYQENASNQKQLLVKTSLQVAHSNYNTPYFSQRDGRWASRRYGMATLGETGCVPTSLAMILSSLKGETVLPTQIADYLYHKTVEFNRGVQGTTSRGILKAAKEWGVTATALGTQANLVQALKDGYHVLAAVQNNVFVLHGSHEIVLKGYNNGLTHVSDPYTPSLSGWYPISQLWKEQSYYSEDRIDIGAPFVKVTDA

SEQ ID NO: 11177 - DNA, 96 bp, Streptococcus agalactiae
ttgcaaatattattaaaatataataaaattaagaaaataatggaatttttgataaagaatattaaaggtgaggataaaatctatgagacctatcgt

SEQ ID NO: 11178 - protein, 32 aa, Streptococcus agalactiae
MQILLKYNKIKKIMEFLIKNIKGEDKIYETYR

SEQ ID NO: 11179 - DNA, 2196 bp, Streptococcus agalactiae
atgatatctgctaagtatagttgggtcctcaataaccaaaagccagacgctggcttttttgaggcttcaaaaaaagaaaagataagtgaagcggtggcttccttaatttattcgcgaggtattaagacatcagcggaattacatcattttttacaaactaatttggaaaatctccatgatccttatttgttaaatgatatggataaagctgttaatcgtattagacgagctattgaaaataatgaaactattttagtttatggagactatgatgctgatggaatgacatcagcatcaatcatgaaagaagctttagatatgatgggagctgaagtccaggtttatctcccaaatcgttttacagatggttacggtcccaatgaaagtgtttataaatattttattgaacaacaagatgtttcattaatcattacggttgataatggtgtggcagggcatgaagcaattgcatatgctcaaaatcaaggtgtggacgtggtagttactgatcatcacagtatgccagcagatttaccttgtgcttatgctattattcacccagaacatcctgatgctaattatccatttccttatttagcagggtgtggtgttgcttttaaagtagcttgtgctctcttagaaacaatcccgacagaaatgttggatttggttgctattgggacgattgcagatatggttagcctaactgatgaaaatcgtatcatggtaaaagctggacttgaagttatgaaagatagtgaaagaataggcttacaggagctaatatctttatcaaatattgatttaaaaacactaaatgaagaaactattggatttaaaattgctccacaattaaacgctttaggaagactcgatgaccctaatccagctattgaattactgacagggtttgatgatgaagaatctcaagcaatagcccaaatgattgatcaaaaaaatgaagagcgcaaagaaatcgttcaaactatctttgaccaagctatgcaaatgcttgatcaaacaaagcctgtacaagttttagcaaaagaaaattggcatccaggggttttaggtattgtggcgggtcgtattttagagagaactggacaacctgttattgttttgaatattgaagatggtattgctaaaggaagtgccagaagtgtagaagcacttgatatttttcaagcttttgaccagcatcgagaattattcattgcttttggaggtcacagcggagcagcaggcatgactttagaggaaagtaaggtgggtgatctttctcaagttttatgtgactatatctctaaaaaacaattggacatgagtcagaaaaaaactctgacaattgatagtgagctacgttttgacgaacttagtttagacactgttagagattttgaaaagttagcgccatttggaatggataataaaaagccagtctttttgttaaaagattttaaagtgagtcaagctagagtcatggggcaaaacagtgctcatctgaaattaaaactagaacaagatggacaagcacttgatttggtagcatttaatatggggagtcaactacaagagttccaacaagcacaacatttggagttagctgtcactttatctgttaatcaatggaatggtgccacaaccctacaattaatgttggaggatgcgcgtgtagacggtattcaattatttgatattagaagcaaagcaagtagcttacctcatggagtgccaatcctatctcaagaagagcagagcaaagaagttattcttttgactgttcccgatcatccacaagaattaaaacaaatgactcaaggtaaacagtttgatgccatctattttaaaaatgagataccaaaaaattattttatatctggttatggtacacgtgatcagtttgctagtttatataaaacaatatatcaattcccagaatttgacgttcgttataagttaaaagagctcagttcctaccttcatatccctgatattttattaattaaaatgattcaaatttttgaagaactacattttgttacgattacagaagggattatgacagtcaataaagaagcagaaaagcgagatatctctgagagtcaaatttatcaagaattaaaagagacagttaagtttcaagaattaatggctttagggacacctaaagaaatatatgattttatgatgagt

SEQ ID NO: 11180 - protein, 732 aa, Streptococcus agalactiae
MISAKYSWVLNNQKPDAGFFEASKKEKISEAVASLIYSRGIKTSAELHHFLQTNLENLHDPYLLNDMDKAVNRIRRAIENNETILVYGDYDADGMTSASIMKEALDMMGAEVQVYLPNRFTDGYGPNESVYKYFIEQQDVSLIITVDNGVAGHEAIAYAQNQGVDVVVTDHHSMPADLPCAYAIIHPEHPDANYPFPYLAGCGVAFKVACALLETIPTEMLDLVAIGTIADMVSLTDENRIMVKAGLEVMKDSERIGLQELISLSNIDLKTLNEETIGFKIAPQLNALGRLDDPNPAIELLTGFDDEESQAIAQMIDQKNEERKEIVQTIFDQAMQMLDQTKPVQVLAKENWHPGVLGIVAGRILERTGQPVIVLNIEDGIAKGSARSVEALDIFQAFDQHRELFIAFGGHSGAAGMTLEESKVGDLSQVLCDYISKKQLDMSQKKTLTIDSELRFDELSLDTVRDFEKLAPFGMDNKKPVFLLKDFKVSQARVMGQNSAHLKLKLEQDGQALDLVAFNMGSQLQEFQQAQHLELAVTLSVNQWNGATTLQLMLEDARVDGIQLFDIRSKASSLPHGVPILSQEEQSKEVILLTVPDHPQELKQMTQGKQFDAIYFKNEIPKNYFISGYGTRDQFASLYKTIYQFPEFDVRYKLKELSSYLHIPDILLIKMIQIFEELHFVTITEGIMTVNKEAEKRDISESQIYQELKETVKFQELMALGTPKEIYDFMMS

SEQ ID NO: 11181 - protein, 759 aa, Streptococcus agalactiae
ATGGCAAGAACGATACTGATTACAGGTGCTTCTGGTGGTTTAGCACAGGCAATTATTAACCAATTACCTCAAGACGACCATTTAATTGTCACAGGGAGATCAAGAGAAAAACTTGAAAAGCTTTATGGAAAGAGACCAAATACCTTATGTTTATCACTAGACATAACTAATGACAATGCTGTAACGAACACGATTGAAAAAATTTATGGTGAATTTGGTCAAATTGATATTTTAATTAATAATGCTGGATTTGGTTCTTTTAAAGAATTTTGGGATTATAGTGATGAAGAAGTCAAAGACATGTTTGCTGTGAATACATTTGCAACGATGTCTATAGCTCGTCAGATAGGACATAAGATGTCTCTTGTAAAATCTGGTCATATCGTTAATATTGCAAGCATGGCTGGCCTCATAGCAACAAGTAAAGCTAGTGTTTATGGGGCTAGTAAGTTTGCTGTCGTTGGATTTTCGAATGCTCTTCGTTTAGAATTAGCAGAAAAAAATGTTTATGTGACAAGTGTAAACCCTGGACCAATCAAAACAGGATTTTTTGCTCAGGCTGATCCAAGTGGTGATTATTTAGCAAGTATAGGTCGTTTTGCTCTAACACCAGAAAAAGTAGCTAAAAAAGTAGTTTCTATTCTTGGAAAAAATAAGAGAGAATTAAATCTTCCTTTTATATTAGCTTTTGCGCATAAATGTTATAGTTTATTTCCAAAAACAGCTGATTATTTTGCCAGAAAGGTATTCAATTATAAA

SEQ ID NO: 11182 - protein, 253 aa, Streptococcus agalactiae
MARTILITGASGGLAQAIINQLPQDDHLIVTGRSREKLEKLYGKRPNTLCLSLDITNDNAVTNTIEKIYGEFGQIDILINNAGFGSFKEFWDYSDEEVKDMFAVNTFATMSIARQIGHKMSLVKSGHIVNIASMAGLIATSKASVYGASKFAVVGFSNALRLELAEKNVYVTSVNPGPIKTGFFAQADPSGDYLASIGRFALTPEKVAKKVVSILGKNKRELNLPFILAFAHKCYSLFPKTADYFARKVFNYK

SEQ ID NO: 11183 - protein, 927 aa, Streptococcus agalactiae
ATGGAAATTCAATTTTTAGGAACTGGAGCTGGTCAACCAGCGAAAGCTCGTAATGTTTCAAGTTTAGTCTTGAAATTATTAGATGAAATTAACGAGGTTTGGATGTTTGATTGTGGAGAGGGTACACAACGTCAAATTTTAGAAACCACGATTAAACCTCGTAAAGTCAAAAAAATTTTTATCACGCACATGCACGGAGACCATGTTTTTGGTCTTCCAGGTTTTTTATCCAGTCGGGCTTTTCAAGCCAATGAAGAACAGACAGATTTAGATATTTATGGACCGGTTGGTATAAAAAGTTTTGTTATGACTGGCTTAAGGACATCAGGTTCACGTTTACCTTATCGAATCCATTTTCACGAGTTTGATGAATCATCACTCGGAAAAATTATGGAAACAGATAAATTTACCGTTTATGCAGAAAAGCTAGATCATACTATCTTTTGTATGGGATATCGTGTTGTACAAAAAGACCTTGAGGGCACTTTAGATGCTGAAGCATTGAAACTAGCAGGTGTTCCATTTGGTCCTCTTTTTGGGAAAGTCAAAAATGGTGAGAATGTTACCTTAGAAGATGGTAGAGAAATTATTGCTAAAGATTATATTTCTGAACCGAAAAAGGGTAAAGTAATCACTATTTTGGGAGATACTAGAAAAACAGATGCAAGTATTAGGTTAGCTTTGGGCGCTGATGTTTTAGTTCACGAATCCACTTATGGTAAGGGTGATGAGCGAATTGCTAAATCGCATGGGCATTCAACCAATATGCAAGCAGCTGATATCGCTAAACAAGCAAATGCTAAACGATTATTATTAAATCATGTTAGTGCTCGTTTTATGGGGCGAGATTGTTGGCAAATGGAAGAAGATGCAAAGACGATTTTTTCAAATACCCATCTTGTTAGAGATTTGGAAGAAGTAGGTATA

SEQ ID NO: 11184 - protein, 309 aa, Streptococcus agalactiae; identical to SEQ ID NO: 2262

SEQ ID NO: 11185 - protein, 644 aa, Streptococcus agalactiae
ATGATTGATTATATTGATTTAGCTTTGACTTATGGTGGTTTTACGAGCTTAGATAAAGTTTATCTAGAGAAAAAACTAGATGGCCTCTCTAAGCAACAACGACTTGATTTTATCACCCCACCTCCTAGTGTGATTAATGCTTATTTTGCTGAAATATATCAAAAGCAAGGGCCAGAAGCGGCAACTGATTACTATTTTGAACTTTCCAAAGCCTTGGGCTTGTTTCCAAAACATTTATCGTTTGATGAAGAAAAACCTTTTATTCGTTTGAATTTATCAGGAAAATCATTTGGTTTTGCTTACCTAAATGATCAAGAAGAAGCGAGTGTTTTTTCTGAAGTTAAAGAAGTCATTACACCGCAGTTACTCTTAGAAATTGCACAGATTTTTCCTCAATATAAAGTCTATCAAGATCGGTCTGGTATCAGAATGGCAAAAATAGATTTTGACGAAACAGAATCTCAAAATATTACACCAGAAACAAGTTTACTAGGGAATGTCTTACAACTTAAAAAAGATATTATTAAAATAACTAGTTTCAATCAAGAAGAGCTATTAGAGTTGGTAAAACAAAGTCAGGTAAATACTATTATTCTAGTCAAGGACGTGAGTCAGTTATTTATATTGATACTAAATCTACTAAT

SEQ ID NO: 11186 - protein, 215 aa, Streptococcus agalactiae
MIDYIDLALTYGGFTSLDKVYLEKKLDGLSKQQRLDFITPPPSVINAYFAEIYQKQGPEAATDYYFELSKALGLFPKHLSFDEEKPFIRLNLSGKSFGFAYLNDQEEASVFSEVKEVITPQLLLEIAQIFPQYKVYQDRSGIRMAKIDFDETESQNITPETSLLGNVLQLKKDIIKITSFNQEELLELVKTKSGKYYYSSQGRESVIYIDTKSTN

SEQ ID NO: 11187 - protein, 1236 aa, Streptococcus agalactiae
GTGATAGAAACTAAAGAAGAGCAAGAACGTGTTATTTTAGTTGGGGTAGAACTTCAAGATACTGAGAATTTTGAAATGTCCATGGAAGAACTTGCTAGCTTAGCTAAGACAGCAGGAGCAAATGTTGTTAATCATTATTATCAAAAAAGAGATAAATATGATAGTAAATCATTTATCGGATCTGGTAAATTAGAGGAGATAAAAGCTATTGTAGAAGCAGATGAGATTGATACCGTTGTGGTTAATAATCGTTTGACTCCGAGACAAAACTCTAATTTGGAAGCTGAACTTGGTGTTAAAGTTATTGACCGTATGCAACTTATTTTAGATATCTTTGCTATGCGTGCTAGAAGTCATGAAGGAAAATTACAGGTTCATCTAGCGCAATTGAAATATATGTTACCACGCTTAGTTGGACAAGGTATTATGCTTAGTCGTCAAGCAGGGGGAATCGGAAGCCGAGGTCCAGGAGAATCTCAGTTAGAGTTGAATCGTCGTTCCATTCGTCATCAAATTTCTGATATCGAAAGACAATTGAAGATTGTAGAAAAAAATCGCGAGACAGTTCGAGAAAGACGTGTTGATTCGACAACCTTCAAAATTGGATTAATTGGATATACAAATGCTGGCAAGTCAACTATTATGAATGTTTTGACCGATGATAAGCAATATGAAGCCAATGAATTATTTGCAACGTTAGACGCTACAACCAAGCAGATCTATTTACAAAATCAATTTCAAGTCACTTTAACAGATACTGTTGGTTTTATTCAAGATTTACCTACAGAGTTAGTTGCGGCTTTCAAGTCTACCTTAGAAGAAAGTCGACATGTCGATTTATTACTTCATGTTATTGATGCTAGTGACCCTAATCATGAAGAACACGAAAAAGTTGTTATGGAGATTCTTAAAGACTTAGATATGATAGATATTCCTCGTTTAGCGATATACAACAAGATGGATGTCACTGAGCAGCTGAATGCAACAACTTTTCCTAATGTGAGAATTGCAGCCAAAAAACAAGGGAGTAGGGATTTATTACGCCGTCTTATTGTGGATGAAATACGACATATCTTTGATGAATTTTCGATTAGAGTGCATCAAAATCAAGCATATAAGCTCTATGATCTCAATAAAATAGCATTGCTTGACACCTACACCTTTGAAGAAGAATACGAGAATATTACAGGCTATATTTCTCCTAAACAAAAATGGAAGCTGGAAGAATTTTATGAT

SEQ ID NO: 11188 - protein, 412 aa, Streptococcus agalactiae
MIETKEEQERVILVGVELQDTENFEMSMEELASLAKTAGANVVNHYYQKRDKYDSKSFIGSGKLEEIKAIVEADEIDTVVVNNRLTPRQNSNLEAELGVKVIDRMQLILDIFAMRARSHEGKLQVHLAQLKYMLPRLVGQGIMLSRQAGGIGSRGPGESQLELNRRSIRHQISDIERQLKIVEKNRETVRERRVDSTTFKIGLIGYTNAGKSTIMNVLTDDKQYEANELFATLDATTKQIYLQNQFQVTLTDTVGFIQDLPTELVAAFKSTLEESRHVDLLLHVIDASDPNHEEHEKVVMEILKDLDMIDIPRLAIYNKMDVTEQLNATTFPNVRIAAKKQGSRDLLRRLIVDEIRHIFDEFSIRVHQNQAYKLYDLNKIALLDTYTFEEEYENITGYISPKQKWKLEEFYD

SEQ ID NO: 11189 - protein, 888 aa, Streptococcus agalactiae
ATGAGAAAAATCAAGCTTATAGCAGTTGTTGGTCCAACTGCGGTTGGGAAGACAGCATTAGGAATTGAATTAGCTAAAACTTTCAATGGCGAAATCATTAGTGGTGATAGTCAGCAAGTTTATCAGAAGTTAGATATCGGAACGGCTAAAGCTAGTAAAGAAGAGCAAGAACAAGCTTATCATCACTTGATTGATGTTCGTGAAGTAAATGAGAACTATTCGGTTTATGATTTTGTCAAAGAGGCAAAAGTAGCTATTGATACGATTATTTCTAAGGGGAAAATCCCTATTATTGTTGGAGGTACTGGCCTATATTTACAGAGTTTGTTTGAGGGCTATCATTTAGGAGGCGAAGTCAATCAAGAAACTCTTATGGCCTATCGTGAAAAATTAGAGTCTCTAAGTGATGAAGATTTATTTGAAAAGTTGACAGAACAATCCATTGTTATACCGCAAGTTAATCGTCGACGTGCCATCCGTGCATTAGAATTGGCGAAGTTTGGGAGTGATTTGCAAAATAGTGAAAGTCCGTATGATGTTTTATTAATTGGATTGAATGATGATCGTCAGGTGCTTTATGATCGTATCAATAGACGAGTTGATTTGATGATAGACAATGGTCTCTTAGATGAAGCTAAATGGCTATACGATAACTACCCTAGTGTTCAAGCAAGTAGAGGAATTGGCTATAAAGAATTATTTCCTTACTTTTCAAAGCAAATACCATTAGAAGAAGCTGTTGATAAACTAAAACAAAATACCAGACGTTTTGCAAAACGCCAATTAACGTGGTTTAGAAACCGTATGAATGTCGAATTTATTATGGTTGGTGAGGAAAATTATCAACAAAAAATCAAGCGAAAAGTCAGTGATTTTTTATCATCAAAG

SEQ ID NO: 11190 - protein, 296 aa, Streptococcus agalactiae
MRKIKLIAVVGPTAVGKTALGIELAKTFNGEIISGDSQQVYQKLDIGTAKASKEEQEQAYHHLIDVREVNENYSVYDFVKEAKVAIDTIISKGKIPIIVGGTGLYLQSLFEGYHLGGEVNQETLMAYREKLESLSDEDLFEKLTEQSIVIPQVNRRRAIRALELAKFGSDLQNSESPYDVLLIGLNDDRQVLYDRINRRVDLMIDNGLLDEAKWLYDNYPSVQASRGIGYKELFPYFSKQIPLEEAVDKLKQNTRRFAKRQLTWFRNRMNVEFIMVGEENYQQKIKRKVSDFLSSK

SEQ ID NO: 11191 - DNA, 174 bp, Streptococcus agalactiae
atggttaaaaaattcgcatttgctaaaggaatagcaacaggagtcgttgcaacagctgctactcttgcaggtgctgcatttgctatcaaaaaaacaattattgaacctgaggaagaaaaaatagcttttatcgaagaaaatcgtaaaaaagctgcacgtaaacgtgtctctcat

SEQ ID NO: 11192 - protein, 58 aa, Streptococcus agalactiae; identical to SEQ ID NO: 2270

SEQ ID NO: 11193 - DNA, 192 bp, Streptococcus agalactiae
gtgattttaccaccaggtttctcagcctttactttcccccttgttatctcagctacctcacttaaattaagtattcagcatctatcattatcagttgatatacaggggctagtccactttgaaattgggacaacaactcttattgttatgatagtaatggtacgttatattttctttttaaggcgaacaatt

SEQ ID NO: 11194 - protein, 64 aa, Streptococcus agalactiae
MILPPGFSAFTFPLVISATSLKLSIQHLSLSVDIQGLVHFEIGTTTLIVMIVMVRYIFFLRRTI

SEQ ID NO: 11195 - DNA, 726 bp, Streptococcus agalactiae
atgaaaaattgggaaaaaccaccattagtgatggcgggattagtattggggctattagctttggggaaccttctagagggatatggcacctattttcgctattgtttagggctagtagcgcttgttttttggatttttttaatcaaaggaatattaaaaaataaaaaagaaagcaggaaggagttgagcaatcctttgattgcttctgtctttactactttttttatggcaggtatgattttatcaacctatatcttattatttagaagtttaggaatatgggtagcagttctgtcaaaaggtgtatggtggttgtcatttattgcgttaatcattcatatggctgttttttcatggaaatatttgagacacttttcgatggctaatctttttccttcttggtctgtcctctatgttggtataggggtagctagcctgacagcaccaattagtggacaattcactattgggaaaatagtcttttggtatggttttattgcaactttagtattattaccatttctattcattaaagcatataaaatcgggctaccttcggcagttaagcctaatataactactatttgcgctccaatgtcgctaatcacagcgggatatgtcaatagttttgtgtcaccaaatagaggtttattattgctattaatcgtaatggcacaatttctttattttttcattctttttcaggtgcctaaattactgaatggg

SEQ ID NO: 11196 - protein, 242 aa, Streptococcus agalactiae
MKNWEKPPLVMAGLVLGLLALGNLLEGYGTYFRYCLGLVALVFWIFLIKGILKNKKESRKELSNPLIASVFTTFFMAGMILSTYILLFRSLGIWVAVLSKGVWWLSFIALIIHMAVFSWKYLRHFSMANLFPSWSVLYVGIGVASLTAPISGQFTIGKIVFWYGFIATLVLLPFLFIKAYKIGLPSAVKPNITTICAPMSLITAGYVNSFVSPNRGLLLLLIVMAQFLYFFILFQVPKLLNG

SEQ ID NO: 11197 - DNA, 3369 bp, Streptococcus agalactiae
gtggcaccatctacattgcaaaatactcccgacaaaacttctcaagctataggtgctccaagtccgaccttgaaagttgctaatcaagctccacagattgaaaatggttactttaggctacatcttaaagaattgcctcaaggtcatcctgtagaaagcactggactttggatatggggagatgttgatcaaccgtctagtaattggccaaatggtgctatccctatgactgatgctaagaaagatgattacggttattatgttgattttaaattatctgaaaaacaacgaaaacaaatatcttttttaattaataacaaagcaggaacaaatttaagcggcgatcatcatatttcattattacgacctgagatgaaccaagtttggattgatgaaaagtacggtatacatacttatcagcccctcaaagaagggtatgtccgtattaactatttgagttcctctggtaactatgaccacctatcagcatggctctttaaagatgttgcaaacccctcaacaacttggccagatggtagtaattttgtgaatcaaggactatatggaaggtatattgatgtaccactaaaaactaacgccaaagagattggttttctaatcttagatgaaagtaagacaggagatgcagtgaaagttcaacccaacgactatgtttttagagatttagctaaccataaccaaatttttgtaaaagataaggatccaaaggtttataataatccttattacattgatcaagtgcagctaaaggatgcccaacaaattgatttaacaagtattcaagcaagttttacaactctagatggggtagataaaactgaaattttaaaagaattgaaagtgactgataaaaatcaaaatgctatacaaatttctgatatcactctcgatactagtaaatctcttttaataatcaaaggcgactttaatcctaaacaaggtcatttcaacatatcttataatggtaacaatgtcatgacaaggcaatcttgggaatttaaagaccaactttatgcttatagtggaaatttaggtgcagttttcaatcaagatggttcaaaagttgaagccagcctctggtcaccgagtgctgatagtgtcactatgattatttatgacaaagataatcaaaacagggttgtagcgactacaccccttgtgaaaaataataaaggtgtttggcagacgatacttgatactaaattaggtattaaaaactatactggttactattatctttacgaaataaaaagaggtaaggataaggttaagattttagatccttatgcaaagtcattagcagagtgggatagtaatactgttaatgacgatataaaaacggctaaagcagcttttgtaaatccaagtcaacttggacctcaaaatttaagttttgctaaaattgctaattttaaaggaagacaagatgctgttatatacgaagcacatgtaagagacttcacttctgatcgatctttggacggaaaattaaaaaatcaatttggtacctttgcagccttttcagagaaactagattatttacagaaattaggagttacacacattcagcttttaccggtattgagttatttttatgttaatgaaatggataagtcacgctcaacagcttacacttcctcagacaataattacaattggggctatgacccacagagctattttgctctttctggaatgtattcagagaaaccaaaagatccatcagcacgtattgccgaattaaaacaattaatacatgatattcataaacgtggcatgggtgttatacttgatgtcgtctataatcacactgcaaaaacttatctctttgaggatatagaacctaattattatcactttatgaatgaagatggttcaccaagagaaagttttggagggggacgtttaggaaccactcatgcaatgagtcgtcgtgttttggttgattccattaaatatcttacaaatgaatttaaagttgatggtttccgttttgatatgatgggagatcatgatgcggctgcgattgaattagcttataaagaagctaaagctattaatcctaatatgattatgattggtgagggctggagaacattccaaggtgatcaaggtaagccggttaaaccagctgaccaagattggatgaagtcaaccgatacagttggcgtcttttcagatgacattcgtaatagcttgaaatctggttttccaaatgaaggtactccagctttcatcacaggtggcccacaatctttacaaggtatttttaaaaatatcaaagcacaacctgggaattttgaagcagattcgccaggagatgtggtgcagtatattgctgcacatgataaccttaccttgcatgatgtgattgcaaaatcaattaataaagaccctaaggtagctgaagaagagattcatagacgtctgcgtttaggaaatgtaatgattttaacatctcaagggacagcattcattcattctggtcaagagtatggtcgtacgaagcgtttacttaaccctgattacatgacaaaagtttcagatgacaaattgcctaataaagcaacacttattgaagctgttaaagaatacccatattttattcatgattcatatgattcttcagatgccattaatcattttgattgggcagcagccacagataataacaaacacccaatttcaacgaaaacacaggcctatacagcaggtttaatcacattaaggcgttcaacagatgctttccggaaattgagcaaagcaaaaattgatcttgaggttagcttgattacagaggtaggtcaaggtgatatcaaagaaaaagatttggttattgcttaccaaacaatagattctaaaggtgatatttacgcagtatttgttaatgctgatagtaaagctagaaacgttttactaggtgaaaaatataaacaccttttaaaagggcaagtaattgttgatgctgatcaggcggggattaaaccaatctcaactcctagaggtgttcattttgaaaaagatagcttgctgattgatccattaacagcaattgtgattaaagttggcaaagttgcccctagtcctaaggaggaattgcaagcagattaccccaaaacccaatctttcaaggaatctaaaacggtagaaaaagtaaatagaatagctaataagacctcaataattcctgtagtttctaagaaggccgattcatatctgacaaatgaagctaatttgccaaaaactggagataagtcatcaaaaatactaagtgtagtaggaataagcattctagcaagtctacttgctctactaggtctctctttaaagaggaatcgtcacttaaaa

SEQ ID NO: 11198 - protein, 1123 aa, Streptococcus agalactiae
MAPSTLQNTPDKTSQAIGAPSPTLKVANQAPQIENGYFRLHLKELPQGHPVESTGLWIWGDVDQPSSNWPNGAIPMTDAKKDDYGYYVDFKLSEKQRKQISFLINNKAGTNLSGDHHISLLRPEMNQVWIDEKYGIHTYQPLKEGYVRINYLSSSGNYDHLSAWLFKDVANPSTTWPDGSNFVNQGLYGRYIDVPLKTNAKEIGFLILDESKTGDAVKVQPNDYVFRDLANHNQIFVKDKDPKVYNNPYYIDQVQLKDAQQIDLTSIQASFTTLDGVDKTEILKELKVTDKNQNAIQISDITLDTSKSLLIIKGDFNPKQGHFNISYNGNNVMTRQSWEFKDQLYAYSGNLGAVFNQDGSKVEASLWSPSADSVTMIIYDKDNQNRVVATTPLVKNNKGVWQTILDTKLGIKNYTGYYYLYEIKRGKDKVKILDPYAKSLAEWDSNTVNDDIKTAKAAFVNPSQLGPQNLSFAKIANFKGRQDAVIYEAHVRDFTSDRSLDGKLKNQFGTFAAFSEKLDYLQKLGVTHIQLLPVLSYFYVNEMDKSRSTAYTSSDNNYNWGYDPQSYFALSGMYSEKPKDPSARIAELKQLIHDIHKRGMGVILDVVYNHTAKTYLFEDIEPNYYHFMNEDGSPRESFGGGRLGTTHAMSRRVLVDSIKYLTNEFKVDGFRFDMMGDHDAAAIELAYKEAKAINPNMIMIGEGWRTFQGDQGKPVKPADQDWMKSTDTVGVFSDDIRNSLKSGFPNEGTPAFITGGPQSLQGIFKNIKAQPGNFEADSPGDVVQYIAAHDNLTLHDVIAKSINKDPKVAEEEIHRRLRLGNVMILTSQGTAFIHSGQEYGRTKRLLNPDYMTKVSDDKLPNKATLIEAVKEYPYFIHDSYDSSDAINHFDWAAATDNNKHPISTKTQAYTAGLITLRRSTDAFRKLSKAKIDLEVSLITEVGQGDIKEKDLVIAYQTIDSKGDIYAVFVNADSKARNVLLGEKYKHLLKGQVIVDADQAGIKPISTPRGVHFEKDSLLIDPLTAIVIKVGKVAPSPKEELQADYPKTQSFKESKTVEKVNRIANKTSIIPVVSKKADSYLTNEANLPKTGDKSSKILSVVGISILASLLALLGLSLKRNRHLK

SEQ ID NO: 11199 - DNA, 342 bp, Streptococcus agalactiae
atgaaaagaaaagacttatttggtgataaacaaactcaatacacgattagaaagttaagtgttggagtagcttcagttgcaacagggatatgtatttttcttcatagtccacaggtatttgctgaagaagtaagtgtttctcctgcaactacagcgattgcagagtcaaatattaatcaggttgacaaccaacaatctactaatttaaaagatgacataaactcaaactctgagacggttgtgacaccctcagatatgccggataccaagcaattagtatcagatgaaactgacactcaaaagggagtgacagagccggataaggcaggcgacaagcctgct

SEQ ID NO: 11200 - protein, 114 aa, Streptococcus agalactiae
MKRKDLFGDKQTQYTIRKLSVGVASVATGICIFLHSPQVFAEEVSVSPATTAIAESNINQVDNQQSTNLKDDINSNSETVVTPSDMPDTKQLVSDETDTQKGVTEPDKAGDKPA

SEQ ID NO: 11201 - protein, 732 aa, Streptococcus agalactiae
ATGAGAGATAATCATCTACACACGCATTTTTCCTATGATTGTCAAACGGCATTTGAGGACTATATTAATGGTTTTACAGGTGAATTTATCACAACAGAACATTTTGATTTATCAAATCCTTACACCGGTCAAGACGATGTTCCTGATTATAGTGCTTATTGTCAAAAAATAGATTATCTTAATCAGAAATATGGAAATCGATTTAAAAAAGGAATTGAAATCGGTTATTTTAAAGATAGGGAATCAGATATTTTAGATTATTTAAAAAATAAAGAATTTGATTTAAAACTATTGTCAATCCATCATAATGGTAGGTATGATTATCTGCAAGAAGAAGCTCTGAAAGTACCAACAAAGGAGCTTTTAGCAGATTACTTTAATCGTATGGAATTTGCCATAGGCCGTGTGGAAGCGCACGTTTTAGCTCACTTTGATTATGGTTTTCGTAAGTTAAACTTAGATGTAGAAGATTTAAAGCCGTTTGAAACACAATTGAAGCGCATTTTCAGAAAGATGTTATCTAAGGGGTTAGCTTTTGAACTAAATACCAAATCCCTTTATCTATATGGGAATGAAAAACTTTATCGCTATGCTTTAGAGATACTAAAACAGCTTGGTTGTAAACAATACTCTATAGGCTCTGATGGTCATATTCCTGAACATTTTTGTTATGAATTTGATAGACTTCAAGGTCTGCTAAAGGACTATCAAATTGATGAAAATCATTTGATA

SEQ ID NO: 11202 - protein, 244 aa, Streptococcus agalactiae
MRDNHLHTHFSYDCQTAFEDYINGFTGEFITTEHFDLSNPYTGQDDVPDYSAYCQKIDYLNQKYGNRFKKGIEIGYFKDRESDILDYLKNKEFDLKLLSIHHNGRYDYLQEEALKVPTKELLADYFNRMEFAIGRVEAHVLAHFDYGFRKLNLDVEDLKPFETQLKRIFRKMLSKGLAFELNTKSLYLYGNEKLYRYALEILKQLGCKQYSIGSDGHIPEHFCYEFDRLQGLLKDYQIDENHLI

SEQ ID NO: 11203 - protein, 582 aa, Streptococcus agalactiae
ATGACTGACTTGGAAAAAATTATTAAAGCAATAAAAAGTGATTCACAAAATCAAAATTATACAGAAAATGGTATTGATCCTTTGTTTGCTGCTCCTAAAACAGCTAGGATCAATATTGTTGGCCAAGCACCTGGTTTAAAAACTCAAGAAGCAAGACTCTATTGGAAAGATAAATCTGGAGTTCGTCTACGCCAGTGGCTTGGAGTTGATGAAGAGACATTTTACCATTCTGGAAAATTTGCTGTTTTGCCTTTAGATTTTTATTACCCAGGCAAAGGAAAATCAGGAGATTTACCCCCTAGAAAAGGTTTTGCGGAGAAATGGCACCCTCTTATTTTAAAAGAAATGCCTAATGTTCAATTGACCTTGCTAGTTGGTCAATATGCTCAGAAATATTATCTTGGAAGCTCCGCACATAAAAATCTAACAGAAACAGTTAAAGCTTACAAAGACTATCTACCTGATTATTTACCCCTGGTTCACCCATCACCGCGAAATCAAATTTGGCTAAAGAAGAATCCATGGTTTGAAAAAGATCTAATCGTTGATTTACAAAAGATAGTAGCAGATATTTTAAAAGAT

SEQ ID NO: 11204 - protein, 194 aa, Streptococcus agalactiae
MTDLEKIIKAIKSDSQNQNYTENGIDPLFAAPKTARINIVGQAPGLKTQEARLYWKDKSGVRLRQWLGVDEETFYHSGKFAVLPLDFYYPGKGKSGDLPPRKGFAEKWHPLILKEMPNVQLTLLVGQYAQKYYLGSSAHKNLTETVKAYKDYLPDYLPLVHPSPRNQIWLKKNPWFEKDLIVDLQKIVADILKD

SEQ ID NO: 11205 - protein, 1404 aa, Streptococcus agalactiae
ATGACAATTGATTTTAGAGCAGAAGTAGACAAACGCAAAGACGCTTTGATGGACGATTTAATAAATCTTCTTCGCATTAACTCGGAGCGTGATGATTCACAAGCTGATGCAGAGCATCCATTTGGTCCTGGACCTGTAAAAGCCTTGGAATTTTTCCTTGAGATGGCTGAGCGAGATGGCTACGAAACAAAAAACGTAGATAATTATGCGGGACACTTTACATTTGGTCAAGGCGAAGAAGAACTAGGTATTTTTGGGCATTTAGATGTTGTTCCTGCAGGCAGCGGTTGGGATACAGACCCTTATGAACCAGTTATCAAGGATAACCGTTTATATGCTCGAGGCTCATCAGACGATAAGGGACCAACAATGGCATGTTATTATGCTCTAAAAATTATTAAAGAGCTTGGGCTACCAACATCTAAGAAAGTTCGTTTTGTTGTAGGAACTGATGAAGAATCTGGATGGGGAGATATGGATTACTACTTCGAACATGTTGGTCTTCCAAAACCTGATTTTGGTTTCTCTCCAGATGCAGAATTTCCAATTATAAATGGTGAAAAAGGTAATATCACTGAATATTTACATTTTTCAGGAGAAAATAAGGGAGCTGTTAGACTGCATAGCTTTTCTGGCGGACTTCGCGAAAACATGGTTCCAGAATCAGCCACAGCACGTTTCACAAGTCATTTAGATCAGACAACACTTGGAGCTAGTCTAGCTGATTTTGCAAGTAAACATAATTTGAAAGCAGAATTATCTGTAGAAGATGGGCAGTATATAGCTACAGTTTATGGTAAATCTGCTCATGGTTCAACACCACAAGAAGGTGTTAATGGGGCGACTTATTTAGCTCTTTATCTAAGTCAATTTGATTTTGAAGGTCCTGCTCGTGCTTTCTTAGATGTCACAGCCAACATTATTCACGAAGACTTCTCAGGTGAAAAACTTGGAGTAGCTTATGAAGATGACTGTATGGGATCGTTGAGCATGAATGCAGGTGTCTTCCAGTTTGATGAAACTAATGATGATAATACTATCGCTCTTAATTTCCGTTACCCACAAGGGACAGATGCTAAAACTATCCAAACTAAGCTTGAGAAACTTAACGGAGTTGAAAAAGTGACTCTTTCTGACCATGAACACACACCACACTATGTACCTATGTACGATGAATTAGTATCAACCTTAATAGCTGTCTATGAAAAGCAAACTGGTCTTAAAGGACATGAACAGGTTATTGGTGGTGGGACATTTGGTCGCTTACTTGAACGGGGTGTTGCATACGGTGCCATGTTCCCAGGAGATGAAAACACTATGCATCAAGCTAATGAGTACATGCCTTTAGAAAATATTTTCCGTTCGGCTGCTATCTACGCAGAAGCTATCTATGAATTAATCAAA

SEQ ID NO: 11206 - protein, 468 aa, Streptococcus agalactiae
MTIDFRAEVDKRKDALMDDLINLLRINSERDDSQADAEHPFGPGPVKALEFFLEMAERDGYETKNVDNYAGHFTFGQGEEELGIFGHLDVVPAGSGWDTDPYEPVIKDNRLYARGSSDDKGPTMACYYALKIIKELGLPTSKKVRFVVGTDEESGWGDMDYYFEHVGLPKPDFGFSPDAEFPIINGEKGNITEYLHFSGENKGAVRLHSFSGGLRENMVPESATARFTSHLDQTTLGASLADFASKHNLKAELSVEDGQYIATVYGKSAHGSTPQEGVNGATYLALYLSQFDFEGPARAFLDVTANIIHEDFSGEKLGVAYEDDCMGSLSMNAGVFQFDETNDDNTIALNFRYPQGTDAKTIQTKLEKLNGVEKVTLSDHEHTPHYVPMYDELVSTLIAVYEKQTGLKGHEQVIGGGTFGRLLERGVAYGAMFPGDENTMHQANEYMPLENIFRSAAIYAEAIYELIK

SEQ ID NO: 11207 - protein, 600 aa, Streptococcus agalactiae
ATGAAATTTCTAGAATTAAATAAGAAGCGCCATGCTGTGAAACATTTTAATGATAAACCAGTCGACTTTAAAGATGTTAGAACTGCTATTGAAATTGCGACATTAGCGCCATCTGCTAATAATATTCAGCCTTGGAAGTTTGTCGTTGTCCAAGAAAAAAAATCTGCTCTAGCAGAAGGTTTACCGGAAAGTAATTGTAACCAAATTAATCAAGCGCAGTATGTTATTGCTTTATTTACAGATACAGATTTAGGACAGAGATCACGGAAAATAGCTCGTATTGGTCGTAGATCTCTTCCTGATGATTTAATTGGTTATTACATGGAAACTCTACCACCACGCTATGCTTTATATAGTGAAAAACAAACTGGAGAGTATCTCTCTTTAAATGCAGGTATCGTTGCTATGAATTTAGTACTTGCCTTGACAGATCAAGGTATTAGTTCTAATATGATTTTAGGGTTCGATAAAGCGATTACCAATGATGTCTTAGAGATAGATAAACGTTTTAGACCAGAAATATTAATTACTGTTGGTTATAGTGATGAAAAGGTTGAGCCTAGTTATCGTTTGCCGGTTGATCATATTATTGAAAAACGT

SEQ ID NO: 11208 - protein, 200 aa, Streptococcus agalactiae; identical to SEQ ID NO: 2292

SEQ ID NO: 11209 - protein, 1779 aa, Streptococcus agalactiae
ATGCTACGAGCATTAAAAGAAGATTTTTTTCTAACCTTAACCTCTTTAAAAAATCAATTTTGGGTTTACATTGGAACTGGTATCTTAATCCAAACTTTAGTTGCTTATTTAGTAAAAGGAATTCTGAGTTTTATCTTTCGTCGGATATTGATATTGTCAAATACTCCCGCAGTGACTAAAGACAATTGGACTTTGCTTTTTAATCATCCCTTAGCTTTATTACTCTTTATACTTTATATCGTAATCCTAATTGGGTTCATCTATACTGAGTTCGCTATCTATACTATTGCCATACTGAAAACTGAATTTTCTCTCAGTATCAAAAAATGGCTAACAATCTTTCCTAAAAAAATAAAATCACTTTTAGGACCACAGCTAATTTGGGTATCAATCTACTTACTTTTGACAATTCCTCTAGCTAACCTTGGTCTAAGGTCAAGTATACTAGAGCATCTTAAAATCCCTGACTTTATTTCTGGCGAGTTAACAAAGACAGTCTTTGGAAAGATAGGTTACTCTACCCTTTTACTGCTTATTTGTTACTTAAACCTTCGATTAATTTATTTTCTCCCGCTGACCATTTTAACTGACTACAATGCTAAAGAAGCACTTTTAGAGAGTTGGAAACTTAGCCGCGGAAAGCGTCAGTGGCGTCTTCTAAGTAAAATTATTTTAACCAGTTTATTTATATCTGTAATTGGAACAGTTGCACTAGCTGTTGTTGCTGGTACATTTTCATTCATTGATCATTCTGGAAACAATTTTCCTCTTCAAGCCACTTTCTATAACCTTTTAAAATCAATACTTTTTGCCGTAACACTTCTTATTAAATGTTTAATCATAAGTCACCTATTAGCAGATATTAAACAAAATAAAAGTATTGTTCAACAATGGAGAGCTTGGAAAGGCGTCCACCATAAGCAAAAATTTAAACACATTGCTTGTGTTATTCTAGCTCTAGCTATTGGTACCACTGCCTTAAAAAATGCTATAGCTCTGGCTCTCTTACAAGATAACATTTCAATTAAAAAAGAATTAATAGCCCATCGTGGTGATACATCACATGGCGTTGAAAATTCTATTGAAGCATTAAAAGCAGCCCATAAAGCAAAAGCAGATTATTCAGAGATGGATGTTATCATGACAAAAGATCATAAATTAGTAGTCATTCATGATGATAATCTCAAACGACTCTCTGGTATGAACAAAGATGTTTCTAAACTAACTTTAGATCAAGTTACAAAAATCCCAATTCACCAAGGGCGTTTTGCTAGTTACATTCCATCATTTGCAGAATTTATGAAGACCGCTCAGTCACTAGATCAAAAAATCATGATTGAATTGAAACCGTATAATCAAAACCTCGATATCTATGCGGATGAATTTATCAAAGAATTTAAAGAGCTTCGTCTATCAACCAAGCATAAAGTAATGTCTCTCAACTTGACACTCATTGAAAAGGTTGAGAAAAAATTGCCACAACTTGATACAGGTTACCTAATCCCACTACATTGGGGAACGCTTCAAAATCATAACGTTGACTTTTATGGGATTGAGGAATTTTCATACAATGATTGGATTGCATATCTCGCCCAAGAATATAATAAACAGCTCTATGTTTGGACTATTAACCGTGATAACCTTATGATACGTTATTTACAAAGCCCAGTTAATGGAATCATCACAGATGAACTCAATCTTTTCAAGGTCATTAATAAAGATATCAAAAATAGCCCTAATTATTATCAAAGAGCTCTCCAACTTATTGATAGCGAGGGT

SEQ ID NO: 11210 - protein, 593 aa, Streptococcus agalactiae
MLRALKEDFFLTLTSLKNQFWVYIGTGILIQTLVAYLVKGILSFIFRRILILSNTPAVTKDNWTLLFNHPLALLLFILYIVILIGFIYTEFAIYTIAILKTEFSLSIKKWLTIFPKKIKSLLGPQLIWVSIYLLLTIPLANLGLRSSILEHLKIPDFISGELTKTVFGKIGYSTLLLLICYLNLRLIYFLPLTILTDYNAKEALLESWKLSRGKRQWRLLSKIILTSLFISVIGTVALAVVAGTFSFIDHSGNNFPLQATFYNLLKSILFAVTLLIKCLIISHLLADIKQNKSIVQQWRAWKGVHHKQKFKHIACVILALAIGTTALKNAIALALLQDNISIKKELIAHRGDTSHGVENSIEALKAAHKAKADYSEMDVIMTKDHKLVVIHDDNLKRLSGMNKDVSKLTLDQVTKIPIHQGRFASYIPSFAEFMKTAQSLDQKIMIELKPYNQNLDIYADEFIKEFKELRLSTKHKVMSLNLTLIEKVEKKLPQLDTGYLIPLHWGTLQNHNVDFYGIEEFSYNDWIAYLAQEYNKQLYVWTINRDNLMIRYLQSPVNGIITDELNLFKVINKDIKNSPNYYQRALQLIDSEG

SEQ ID NO: 11211 - protein, 1779 aa, Streptococcus agalactiae
ATGAATGAACTGATTAAACATAAGCTAGAATTGTTACCAGACAGTCCTGGTTGTTACCTTCATAAAGATAAGAATGGGACAATTATTTATGTAGGTAAGGCTAAAAATCTTAAGAATCGTGTGAAAAGTTATTTTCATGGGAGTCATAATACTAAGACAGAACTTTTGGTCTCTGAGATTGAAGACTTTGAATACATTGTGACAACATCTAATACCGAAGCTCTATTATTGGAAATTAATTTAATCCAAGAAAATATGCCGAAGTATAATATTCGATTGAAAGATGATAAGTCTTACCCATATATCAAAATAACAAATGAACGTTATCCTCGTCTTATGATTACACGTCAAGTAAAAAAATCAGATGGCACTTATTTTGGACCTTATCCGGATTCTGGGGCAGCAACTGAGATTAAGCGGTTACTAGATAGGCTCTTTCCTTTTAAGAAATGTACTAATCCAGCAAATAAAGTATGCTTTTATTATCATTTAGGGCAATGCAATGCACATACAGTTTGTCAAACTAATAAAGCTTATTGGGATAGTCTGAGAGAAGATGTAAAACAGTTTCTTAATGGTAAAGATAATAAAATTGTTAACGGATTAACTGAAAAAATGAAGAGCGCTGCTATGACTATGGAATTTGAGCGTGCGGCTGAATATCGAGATTTGATCGAAGCAATTAGTTTGTTGCGTACTAAGCAGCGTGTTATTCATCAAGATATGAAGGATAGAGATGTTTTTGGTTATTTCGTTGATAAGGGTTGGATGTGTGTACAGGTCTTTTTTGTTCGAAATGGAAAATTGATTCAGCGTGACGTGAATATGTTTCCTTATTATAATGAACCAGAGGAAGATTTTCTAACTTACATAGGGCAATTTTATCAAGATACAAAACATTTTCTACCCAAAGAAGTCTTTATTCCACAGGATATTGATGCTAAGTCGGTTGAAACAATTGTAGGCTGTAAGATTGTTAAACCACAACGTGGTGAAAAGAAACAGTTAGTAAATCTGGCAATAAAAAATGCTCGTGTCAGTTTACAACAGAAGTTTGACTTACTGGAAAAAGATATTCGTAAAACTCATGGGGCAATTGAAAATTTAGGTAATCTTCTTAATATCCCTAAACCAGTACGCATAGAAGCATTTGATAATTCCAATATTCAAGGGACAAGTCCAGTAGCTGCTATGGTGGTATTTGTGAATGGAAAGCCAAGTAAAAAAGACTATCGAAAGTTTAAAATTAAGACTGTTATCGGACCAGATGATTATGCTAGTATGAGAGAAGTCATTCATCGGCGTTATAGTAGGGTTTTAAAAGATGGCTTGACACCTCCGGACTTGATTGTAATTGATGGTGGTCAGGGGCAAGTAAATATAGCGCGTGATGTTATTGAGAACCAATTAGGTTTAGCCATACCTATTGCAGGTTTGCAAAAGAATGATAAACACCAAACACATGAATTACTTTTTGGAGATCCTTTAGAAGTAGTAGAACTACCGCGTAATTCAGAAGAATTTTTCTTACTTCACCGTATTCAAGATGAGGTACATCGTTTTGCTATTACTTTTCATCGTCAATTACGCTCCAAAAATTCCTTTTCTTCAAAATTAGATGGTATCACTGGGTTGGGACCCAAACGTAAACAATTGCTAATGAAACATTTTAAAAGCTTATCTAGTATCCAAAAAGCTGATATTGAGGACATTATTATGTGTGGTATTCCTAGGAATGTAGCAGAAAGTCTCCGAGATTCTCTTAATGATCCTCCTAAA

SEQ ID NO: 11212 - protein, 593 aa, Streptococcus agalactiae
MNELIKHKLELLPDSPGCYLHKDKNGTIIYVGKAKNLKNRVKSYFHGSHNTKTELLVSEIEDFEYIVTTSNTEALLLEINLIQENMPKYNIRLKDDKSYPYIKITNERYPRLMITRQVKKSDGTYFGPYPDSGAATEIKRLLDRLFPFKKCTNPANKVCFYYHLGQCNAHTVCQTNKAYWDSLREDVKQFLNGKDNKIVNGLTEKMKSAAMTMEFERAAEYRDLIEAISLLRTKQRVIHQDMKDRDVFGYFVDKGWMCVQVFFVRNGKLIQRDVNMFPYYNEPEEDFLTYIGQFYQDTKHFLPKEVFIPQDIDAKSVETIVGCKIVKPQRGEKKQLVNLAIKNARVSLQQKFDLLEKDIRKTHGAIENLGNLLNIPKPVRIEAFDNSNIQGTSPVAAMVVFVNGKPSKKDYRKFKIKTVIGPDDYASMREVIHRRYSRVLKDGLTPPDLIVIDGGQGQVNIARDVIENQLGLAIPIAGLQKNDKHQTHELLFGDPLEVVELPRNSEEFFLLHRIQDEVHRFAITFHRQLRSKNSFSSKLDGITGLGPKRKQLLMKHFKSLSSIQKADIEDIIMCGIPRNVAESLRDSLNDPPK

SEQ ID NO: 11213 - protein, 765 aa, Streptococcus agalactiae; identical to SEQ ID NO: 6937

SEQ ID NO: 11214 - protein, 255 aa, Streptococcus agalactiae; identical to SEQ ID NO: 6938

SEQ ID NO: 11215 - protein, 501 aa, Streptococcus agalactiae
ATGAATTTTTCATCATTAATGTATGCCTTTCCTTTAAGTATTTCCACTGCTCTAGCTATTACAATATCGTTTGAAGTAGGGGCAGAGCGCATTCAGGACGCAAACACTTATAGTAGGATAGGACGCTTAACAGCGGTAGGGATTACATCAGGAACCTTACTATTTTTATTTCTATTTCGTGAGAATGTAGCAGCAATGTATAATAGTGACCCTCACTTTGTCGCTATTACAGCTCAATTCCTAACTTATAGTCTCTTTTTCCAGTTTGCAGATGCTTATGCAGCTCCTGTACAGGGGATTTTACGAGGCTATAAGGATACAACAAAACCATTTATGATCGGTGCGGGCTCTTATTGGTTATGTGCTTTGCCATTAGCGGTTATCTTAGAAAAAAATAGCCAGTTAGGTCCGTTTGCCTATTGGATTGGTTTAATCACAGGTATTTTTGTTTGTGGTCTATTTCTAAACCAACGTCTGCAAAAGATTAAGAAGTTGTATTAT

SEQ ID NO: 11216 - protein, 167 aa, Streptococcus agalactiae
MNFSSLMYAFPLSISTALAITISFEVGAERIQDANTYSRIGRLTAVGITSGTLLFLFLFRENVAAMYNSDPHFVAITAQFLTYSLFFQFADAYAAPVQGILRGYKDTTKPFMIGAGSYWLCALPLAVILEKNSQLGPFAYWIGLITGIFVCGLFLNQRLQKIKKLYY

SEQ ID NO: 11217 - protein, 789 aa, Streptococcus agalactiae
TTGAAATTATTTATCCCAGTATTGATTTATCAATTTGCTAATTTTTCAGCTACTTTTATTGATTCGGTTATGACTGGACAGTATAGTCAGCTACATTTGGCAGGTGTATCAACTGCTAGTAATTTATGGACTCCGTTTTTCGCTTTATTAGTAGGTATGATTTCAGCATTAGTACCAGTAGTTGGTCAACATTTGGGTAGAGGAAATAAAGAACAAATTCGCACAGAATTTCATCAATTTCTATATTTAGGTTTGATACTGTCCTTAATATTATTTTTAATCATGCAATTTATTGCTCAACCTGTCTTGGGGAGTTTGGGTTTAGAAGATGAAGTTCTAGCAGTTGGTCGTGGTTATTTAAATTATATGTTGATTGGAATCATGCCGCTGGTGTTGTTTAGCATTTGCCGTTCATTCTTTGATGCATTGGGGTTAACAAGGTTATCTATGTATCTGATGCTTTTAATTCTACCCTTTAATTCATTTTTTAATTATATGCTTATCTACGGTAAATTTGGTATGCCTAGACTAGGAGGTGCGGGGGCAGGTCTTGGAACTTCTTTAACTTATTGGGCTATTTTTATTGTTATTATTATTGTGATGTCACTTCATCCTCAAATTAAAACATATCATATATGGACTCTGGAAAGAATAAAGCTCCTTTGATTATTGAAGATATTCGATTGGGATTACGATTGGTTTACAAATTTTTGCAGAAGTTGCAATTTTTGCAGTAGTAGGCTTATTCATGGCAAAATTTCTTATCATTATGCAGCACTCAGGCTGCTA

SEQ ID NO: 11218 - protein, 265 aa, Streptococcus agalactiae
MKLFIPVLIYQFANFSATFIDSVMTGQYSQLHLAGVSTASNLWTPFFALLVGMISALVPVVGQHLGRGNKEQIRTEFHQFLYLGLILSLILFLIMQFIAQPVLGSLGLEDEVLAVGRGYLNYMLIGIMPLVLFSICRSFFDALGLTRLSMYLMLLILPFNSFFNYMLIYGKFGMPRLGGAGAGLGTSLTYWAIFIVIIIVMSLHPQIKTYHIWTLERIKAPLIIEDIRLGLPIGLQIFAEVAIFAVVGLFMAKFSSSLLQHIRLL

SEQ ID NO: 11219 - protein, 408 aa, Streptococcus agalactiae; identical to SEQ ID NO: 6949

SEQ ID NO: 11220 - protein, 136 aa, Streptococcus agalactiae; identical to SEQ ID NO: 6950

SEQ ID NO: 11221 - protein, 262 aa, Streptococcus agalactiae
ATGTCTAGAAAAGTACGTCGTCACTTCACCGATGATTTTAAGCAACAAATTGTTGACCTTTACAATGTTGGTAGAAAGCGTAGCAGTCTCATCAAGGAATATGAGCTAACCCCTTCCACCTTCGATAAGTGGGTTAGACAAGCCAAAACAACTGGTTCATTCAAGTCTGTTGATAATCTGACAGATGAACAGCGGGAGCTAATTGAATTCAGAAAACACATAAAGAACTCGAAATGCAATTAGATATCCTAAAGAGCAGCGG

SEQ ID NO: 11222 - protein, 88 aa, Streptococcus agalactiae
MSRKVRRHFTDDFKQQIVDLYNVGRKRSSLIKEYELTPSTFDKWVRQAKTTGSFKSVDNLTDEQRELIEFRKHNKELEMQLDILKQQR

SEQ ID NO: 11223 - protein, 729 aa, Streptococcus agalactiae
GTGGAGTCAGTATCTGAAACGGAGTTTGAAGAAACTATTAAAAGAATTTTTCTCGATAGCGAGTCTAGATACGGATCCAGAAAAATCAAAATATGCTTGAATAACGAAGGTATCACACTTTCACGTCGTCGGATTCGACGCATTATGAAGCGACTCAATTTGGTTTCTGTTTATCAGAAAGCCACCTTCAAACCACATTCTAGAGGCAAGAATGAAGCCCCTATTCCCAACCACTTAGACAGGCAATTTAAGCAAGAAAGACCACTACAGGCCTTAGTCACTGACTTAACCTATGTTCGTGCAGGCAATCGTTGGGCTTATGTTTGCCTCATCATTGACCTATACAACCGTGAAATCATCGGCCTGTCTCTTGGTTGGCACAAGACCGCTGAACTCGTTAAGCAAGCCATACAAAGCATCCCTTACGCCCTGACCAAAGTCAAGATGTTCCATTCAGATCGTGGCAAAGAGTTTGATAATCAGTTAATTGATGAAATATTGGAAGCCTTTGGAATCACACGTTCGCTTAGTCAGGCTGGTTGTCCTTATGACAATGCCGTAGCTGAAAGTACGTATCGTGCTTTCAAAATTGAATTTGTTTATCAAGAAACCTTTCAATTGCTGGAAGAACTAGCTCTTAAGACTAAAGACTATGTTCATTGGTGGAATTACCACCGCATTCATGGTAGTCTCAACTACCAAACACCAATGACTAAAAGATTAATTGCC

SEQ ID NO: 11224 - protein, 243 aa, Streptococcus agalactiae
MESVSETEFEETIKRIFLDSESRYGSRKIKICLNNEGITLSRRRIRRIMKRLNLVSVYQKATFKPHSRGKNEAPIPNHLDRQFKQERPLQALVTDLTYVRAGNRWAYVCLIIDLYNREIIGLSLGWHKTAELVKQAIQSIPYALTKVKMFHSDRGKEFDNQLIDEILEAFGITRSLSQAGCPYDNAVAESTYRAFKIEFVYQETFQLLEELALKTKDYVHWWNYHRIHGSLNYQTPMTKRLIA

SEQ ID NO: 11225 - protein, 288 aa, Streptococcus agalactiae; identical to SEQ ID NO: 6955

SEQ ID NO: 11226 - protein, 96 aa, Streptococcus agalactiae; identical to SEQ ID NO: 2304

SEQ ID NO: 11227 - protein, 378 aa, Streptococcus agalactiae
ATGGAGAATCACTTTATTTATGGCTATCGTACCATTACACGATTGCTCAAAAAAATCCACGGATTGACTGTTAATACAAAGAAAGTCTATCGTATCATGAAAAATAATGGCTGGCTTTGTCGGACACGTACCAAGAAAGTTCCCAATTTGGGTAAAGCTTATTATTTAACAGATAATAAATTGAGTCGGGATTTCCATGCCGATAAGCCTAAGGAAAAGCTCGTAACAGATATTACCTACCTATATTTCGGTAACTGTAAATTGTATCTCTCATCAATTATGGATCTCTATAACCGAGAAATTATAGCTTACACTATCTCAGATTGTCAGGACACGGATTTTGTACTAGACACCCTTAATCAGTTAAAATTGCCTAAA

SEQ ID NO: 11228 - protein, 126 aa, Streptococcus agalactiae
MENHFIYGYRTITRLLKKIHGLTVNTKKVYRIMKNNGWLCRTRTKKVPNLGKAYYLTDNKLSRDFHADKPKEKLVTDITYLYFGNCKLYLSSIMDLYNREIIAYTISDCQDTDFVLDTLNQLKLPK

SEQ ID NO: 11229 - protein, 231 aa, Streptococcus agalactiae; identical to SEQ ID NO: 6959

SEQ ID NO: 11230 - protein, 77 aa, Streptococcus agalactiae; identical to SEQ ID NO: 6960

SEQ ID NO: 11231 - protein, 2466 aa, Streptococcus agalactiae
GTGAAGAAAACATATGGTTATATCGGCTCAGTTGCTGCCATTTTACTAGCTACTCATATTGGAAGTTACCAACTTGGTAAGCATCATATGGGTCTAGCAACAAAGGACAATCAGATTGCCTATATTGATGACAGCAAAGGTAAGGCAAAAGCCCCTAAAACAAACAAAACGATGGATCAAATCAGTGCTGAAGAAGGCATCTCTGCTGAACAGATCGTAGTCAAAATTACTGACCAAGGCTATGTGACCTCACACGGTGACCATTATCATTTTTACAATGGGAAAGTTCCTTATGATGCGATTATTAGTGAAGAGTTGTTGATGACGGATCCTAATTACCGTTTTAAACAATCAGACGTTATCAATGAAATCTTAGACGGTTACGTTATTAAAGTCAATGGCAACTATTATGTTTACCTCAAGCCAGGTAGTAAGCGCAAAAACATTCGAACCAAACAACAAATTGCTGAGCAAGTAGCCAAAGGAACTAAAGAAGCTAAAGAAAAAGGTTTAGCTCAAGTGGCCCATCTCAGTAAAGAAGAAGTTGCGGCAGTCAATGAAGCAAAAAGACAAGGACGCTATACTACAGACGATGGCTATATTTTTAGTCCGACAGATATCATTGATGATTTAGGAGATGCTTATTTAGTACCTCATGGTAATCACTATCATTATATTCCTAAAAAGGATTTGTCTCCAAGTGAGCTAGCTGCTGCACAAGCCTACTGGAGTCAAAAACAAGGTCGAGGTGCTAGACCGTCTGATTACCGCCCGACACCAGCCCCAGGTCGTAGGAAAGCCCCAATTCCTGATGTGACGCCTAACCCTGGACAAGGTCATCAGCCAGATAACGGTGGCTATCATCCAGCGCCTCCTAGGCCAAATGATGCGTCACAAAACAAACACCAAAGAGATGAGTTTAAAGGAAAAACCTTTAAGGAACTTTTAGATCAACTACACCGTCTTGATTTGAAATACCGTCATGTGGAAGAAGATGGGTTGATTTTTGAACCGACTCAAGTGATCAAATCAAACGCTTTTGGGTATGTGGTGCCTCATGGAGATCATTATCATATTATCCCAAGAAGTCAGTTATCACCTCTTGAAATGGAATTAGCAGATCGATACTTAGCTGGCCAAACTGAGGACAATGACTCAGGTTCAGAGCACTCAAAACCATCAGATAAAGAAGTGACACATACCTTTCTTGGTCATCGCATCAAAGCTTACGGAAAAGGCTTAGATGGTAAACCATATGATACGAGTGATGCTTATGTTTTTAGTAAAGAATCCATTCATTCAGTGGATAAATCAGGAGTTACAGCTAAACACGGAGATCATTTCCACTATATAGGATTTGGAGAACTTGAACAATATGAGTTGGATGAGGTCGCTAACTGGGTGAAAGCAAAAGGTCAAGCTGATGAGCTTGCTGCTGCTTTGGATCAGGAACAAGGCAAAGAAAAACCACTCTTTGACACTAAAAAAGTGAGTCGCAAAGTAACAAAAGATGGTAAAGTGGGCTATATGATGCCAAAAGATGGTAAGGACTATTTCTATGCTCGTGATCAACTTGATTTGACTCAGATTGCCTTTGCCGAACAAGAACTAATGCTTAAAGATAAGAAGCATTACCGTTATGACATTGTTGACACAGGTATTGAGCCACGACTTGCTGTAGATGTGTCAAGTCTGCCGATGCATGCTGGTAATGCTACTTACGATACTGGAAGTTCGTTTGTTATCCCACATATTGATCATATCCATGTCGTTCCGTATTCATGGTTGACGCGCGATCAGATTGCAACAGTCAAGTATGTGATGCAACACCCCGAAGTTCGTCCGGATGTATGGTCTAAGCCAGGGCATGAAGAGTCAGGTTCGGTCATTCCAAATGTTACGCCTCTTGATAAACGTGCTGGTATGCCAAACTGGCAAATTATCCATTCTGCTGAAGAAGTTCAAAAAGCCCTAGCAGAAGGTCGTTTTGCAACACCAGACGGCTATATTTTCGATCCACGAGATGTTTTGGCCAAAGAAACTTTTGTATGGAAAGATGGCTCCTTTAGCATCCCAAGAGCAGATGGCAGTTCATTGAGAACCATTAATAAATCTGATCTATCCCAAGCTGAGTGGCAACAAGCTCAAGAGTTATTGGCAAAGAAAAATACTGGTGATGCTACTGATACGGATAAACCCAAAGAAAAGCAACAGGCAGATAAGAGCAATGAAAACCAACAGCCAAGTGAAGCCAGTAAAGAAGAAAAAGAATCAGATGACTTTATAGACAGTTTACCAGACTATGGTCTAGATAGAGCAACCCTAGAAGATCATATCAATCAATTAGCACAAAAAGCTAATATCGATCCTAAGTATCTCATTTTCCAACCAGAAGGTGTCCAATTTTATAATAAAAATGGTGAATTGGTAACTTATGATATCAAGACACTTCAACAAATAAACCCT

SEQ ID NO: 11232 - protein, 822 aa, Streptococcus agalactiae; identical to SEQ ID NO: 6962

SEQ ID NO: 11233 - protein, 918 aa, Streptococcus agalactiae
ATGAAAAAAGGTTTTTTTCTCATGGCTATGGTTGTGAGTTTAGTAATGATAGCAGGGTGTGATAAGTCAGCAAACCCCAAACAGCCTACGCAAGGCATGTCAGTTGTAACCAGCTTTTACCCAATGTATGCGATGACAAAAGAAGTATCTGGAGACCTCAATGATGTGAGGATGATCCAATCAGGTGCAGGCATTCATTCCTTTGAACCGTCTGTAAATGATGTGGCAGCTATTTATGACGCGGATTTGTTTGTTTACCATTCACATACCTTAGAAGCTTGGGCAAGGGATCTAGACCCTAATTTAAAAAAATCAAAGGTTGATGTGTTTGAAGCGTCAAAACCTTTGACACTAGATAGAGTCAAAGGGCTAGAAGATATGGAAGTCACACAAGGCATTGACCCTGCGACACTTTATGACCCACATACCTGGACGGATCCCGTTTTAGCTGGTGAGGAAGCTGTTAATATCGCTAAAGAGCTAGGACGTTTGGATCCTAAACACAAAGACAGTTACACTAAAAAGGCTAAGGCTTTCAAAAAAGAAGCAGAGCAACTAACTGAAGAATACACTCAAAAATTTAAAAAGGTGCGCTCAAAAACATTCGTGACGCAACACACGGCATTTTCTTATCTGGCTAAACGATTCGGCTTGAAACAACTTGGTATCTCGGGTATTTCTCCAGAGCAAGAGCCCTCTCCTCGCCAATTGAAAGAAATTCAAGACTTTGTCAAAGAATACAACGTCAAGACTATTTTTGCAGAAGACAACGTCAATCCCAAAATTGCTCATGCTATTGCGAAATCAACAGGAGCTAAAGTAAAGACATTAAGTCCACTTGAAGCTGCTCCAAGCGGAAACAAGACATATCTAGAAAATCTTAGAGCAAATTTGGAAGTGCTCTATCAACAGTTGAAG

SEQ ID NO: 11234 - protein, 306 aa, Streptococcus agalactiae
MKKGFFLMAMVVSLVMIAGCDKSANPKQPTQGMSVVTSFYPMYAMTKEVSGDLNDVRMIQSGAGIHSFEPSVNDVAAIYDADLFVYHSHTLEAWARDLDPNLKKSKVDVFEASKPLTLDRVKGLEDMEVTQGIDPATLYDPHTWTDPVLAGEEAVNIAKELGRLDPKHKDSYTKKAKAFKKEAEQLTEEYTQKFKKVRSKTFVTQHTAFSYLAKRFGLKQLGISGISPEQEPSPRQLKEIQDFVKEYNVKTIFAEDNVNPKIAHAIAKSTGAKVKTLSPLEAAPSGNKTYLENLRANLEVLYQQLK

SEQ ID NO: 11235 - protein, 2211 aa, Streptococcus agalactiae
TTGATCTATGACAATCAGGACAAGGGCTTCCCGATTGAATTGCCAAATGTTGATCAGATGCCTGCGGCCTTTATCAGTCGAAAAGATGGTCTCTTATTAAAAGACAATCCCCAAAAAACCATCACCTTCAATGCGACACCTAAGGTATTGCCAACAGCAAGTGGCACCAAACTAAGCCGCTTCTCAAGCTGGGGTCTGACAGCTGACGGTAATATTAAGCCAGATATTGCAGCACCCGGCCAAGATATTTTGTCATCAGTGGCTAACAACAAGTATGCCAAACTTTCTGGAACTAGTATGTCTGCGCCATTAGTAGCGGGTATCATGGGACTGTTGCAAAAGCAGTATGAGACACAGTATCCTGATATGACACCATCAGAGCGTCTTGATTTAGCTAAAAAAGTATTGATGAGCTCAGCAACTGCCTTATATGATGAAGATGAAAAAGCTTATTTTTCTCCTCGCCAACAAGGAGCAGGAGCAGTCGATGCTAAAAAAGCTTCAGCAGCAACGATGTATGTGACAGATAAGGATAATACCTCAAGCAAGGTTCACCTGAACAATGTTTCTGATAAATTTGAAGTAACAGTAACAGTTCACAACAAATCTGATAAACCTCAAGAGTTGTATTACCAAGCAACTGTTCAAACAGATAAAGTAGATGGAAAACACTTTGCCTTGGCTCCTAAAGCATTGTATGAGACATCATGGCAAAAAATCACAATTCCAGCCAATAGCAGCAAACAAGTCACCGTTCCAATCGATGCTAGTCGATTTAGCAAGGACTTGCTTACCCAAATGAAAAATGGCTATTTCTTAGAAGGTTTTGTTCGTTTCAAACAAGATCCTAAAAAAGAAGAGCTTATGAGCATTCCATATATTGGTTTCCGAGGTGATTTTGGCAATCTGTCAGCCTTAGAAAAACCAATCTATGATAGCAAAGACGGTAGCAGCTACTATCATGAAGCAAATAGTGATGCCAAAGACCAATTAGATGGTGATGGATTACAGTTTTACGCTCTGAAAAATAACTTTACAGCACTTACCACAGAGTCTAACCCGTGGACGATTATTAAAGCTGTCAAAGAAGGGGTTGAAAACATAGAGGATATCGAATCTTCAGAGATCACAGAAACCATTTTTGCAGGTACTTTTGCAAAACAAGACGATGATAGCCACTACTATATCCACCGTCACGCTAATGGCAAGCCATATGCTGCGATCTCTCCAAATGGGGACGGTAACAGAGATTATGTCCAATTCCAAGGTACTTTCTTGCGTAATGCTAAAAACCTTGTGGCTGAAGTCTTGGACAAAGAAGGAAATGTTGTTTGGACAAGTGAGGTAACCGAGCAAGTTGTTAAAAACTACAACAATGACTTGGCAAGCACACTTGGTTCAACCCGTTTTGAAAAAACGCGTTGGGACGGTAAAGATAAAGACGGCAAAGTTGTTGCTAACGGAACCTACACCTATCGTGTCCGCTACACTCCGATTAGCTCAGGTGCAAAAGAACAACACACTGATTTTGATGTGATTGCAGACAATACGACACCTGAAGTCGCAACATCGGCAACATTCTCAACAGAAGATCGTCGTTTGACACTTGCATCTAAACCAAAAACCAGCCAACCGGTTTACCGTGAGCGTATTGCTTATACTTACATGGATGAGGATCTGCCAACAACAGAGTATATTTCTCCAAATGAAGATGGTACCTTTACTCTTCCTGAAGAGGCTGAAACAATGGAAGGCGCTACTGTTCCATTGAAAATGTCAGACTTTACTTATGTTGTTGAAGATATGGCTGGTAACATCACTTATACACCAGTGGCTAAGCTATTGGAGGGCCACTCTAATAAGCCAGAACAAGACGGTTCAGATCAAGCACCAGACAAAAAACCAGAAGCTAAACCAGAACAAGACGGTTCAGGTCAAACACCAGATAAAAAAACAGAAACTAAACCAGAAAAAGATAGTTCAGGTCAAACACCAGGTAAAACTCCTCAAAAAGGTCAACCTTCTCGTACTCTAGAGAAACGATCTTCTAAGCGTGCTTTAGCTACAAAAGCATCAACAAGAGATCAGTTACCAACGACTAATGACAAGGATACAAATCGTTTACATCTCCTTAAGTTAGTTATGACCACTTTCTTCTTGGGATTAGTAGCTCATATATTTAAAACAAAACGCCAAAAAGAAACTAAAAAA

SEQ ID NO: 11236 - protein, 737 aa, Streptococcus agalactiae
MIYDNQDKGFPIELPNVDQMPAAFISRKDGLLLKDNPQKTITFNATPKVLPTASGTKLSRFSSWGLTADGNIKPDIAAPGQDILSSVANNKYAKLSGTSMSAPLVAGIMGLLQKQYETQYPDMTPSERLDLAKKVLMSSATALYDEDEKAYFSPRQQGAGAVDAKKASAATMYVTDKDNTSSKVHLNNVSDKFEVTVTVHNKSDKPQELYYQATVQTDKVDGKHFALAPKALYETSWQKITIPANSSKQVTVPIDASRFSKDLLTQMKNGYFLEGFVRFKQDPKKEELMSIPYIGFRGDFGNLSALEKPIYDSKDGSSYYHEANSDAKDQLDGDGLQFYALKNNFTALTTESNPWTIIKAVKEGVENIEDIESSEITETIFAGTFAKQDDDSHYYIHRHANGKPYAAISPNGDGNRDYVQFQGTFLRNAKNLVAEVLDKEGNVVWTSEVTEQVVKNYNNDLASTLGSTRFEKTRWDGKDKDGKVVANGTYTYRVRYTPISSGAKEQHTDFDVIADNTTPEVATSATFSTEDRRLTLASKPKTSQPVYRERIAYTYMDEDLPTTEYISPNEDGTFTLPEEAETMEGATVPLKMSDFTYVVEDMAGNITYTPVAKLLEGHSNKPEQDGSDQAPDKKPEAKPEQDGSGQTPDKKTETKPEKDSSGQTPGKTPQKGQPSRTLEKRSSKRALATKASTRDQLPTTNDKDTNRLHLLKLVMTTFFLGLVAHIFKTKRQKETKK

SEQ ID NO: 11237 - protein, 1068 aa, Streptococcus agalactiae
TTGCGTAAAAAACAGAAACTACCATTTGATAAACTTGCCATTGCGCTTATGTCTACGAGCATCTTGCTCAATGCACAATCAGACATCAAAGCAAATACTGTGACAGAAGACACTCCTGCTACCGAACAAACCGTAGAAACTCCACAACCAACAGCGGTTTCTGAGGAAGCACCATCATCAAAGGAAACTAAAACCCCACAAACTCCTAGTGATGCAGGAGAAACAGTAGCAGATGACGCTAATGATCTAGCCCCTCAAGCTCCTGCTAAAACTGCTGATACACCAGCAACCTCAAAAGCGACTATTAGGGATTTGAACGACCCTTCTCAGGTCAAAACCCTGCAGGAAAAAGCAGGCAAGGGAGCTGGGACTGTTGTTGCAGTGATTGATGCTGGTTTTGATAAAAATCATGAAGCGTGGCGCTTAACAGACAAAGCCAAAGCACGTTACCAATCAAAAGAAGATCTTGAAAAAGCTAAAAAAGAGCACGGTATTACCTATGGCGAGTGGGTCAATGATAAGGTTGCTTACTACCATGACTATAGTAAAGATGGTAAAACCGCTGTCGATCAAGAGCACGGCACACACGTGTCAGGAATCTTGTCAGGAAATGCTCCATCTGAAACGAAAGAACCTTACCGCCTAGAAGGTGCGATGCCTGAGGCTCAATTGCTTTTGATGCGTGTCGAAATTGTAAATGGACTAGCAGACTATGCTCGTAACTACGCTCAAGCTATCAGAGATGCTATCAACTTGGGAGCTAAGGTGATTAATATGAGCTTTGGTAATGCTGCACTAGCTTACGCCAACCTTCCAGACGAAACCAAAAAAGCCTTTGACTATGCCAAATCAAAAGGTGTTAGCATTGTGACCTCAGCTGGTAATGATAGTAGCTTTGGGGGCAAGACCCGTCTACCTCTAGCAGATCATCCTGATTATGGGGTGGTTGGGACACCTGCAGCGGCAGACTCAACATTGACAGTTGCTTCTTACAGCCCAGATAAACAGCTCACTGAAACTGCTACGGTCAAAACAGCCGATCAGCAAGATAAAGAAATGCCTGTTCTT

SEQ ID NO: 11238 - protein, 356 aa, Streptococcus agalactiae
MRKKQKLPFDKLAIALMSTSILLNAQSDIKANTVTEDTPATEQTVETPQPTAVSEEAPSSKETKTPQTPSDAGETVADDANDLAPQAPAKTADTPATSKATIRDLNDPSQVKTLQEKAGKGAGTVVAVIDAGFDKNHEAWRLTDKAKARYQSKEDLEKAKKEHGITYGEWVNDKVAYYHDYSKDGKTAVDQEHGTHVSGILSGNAPSETKEPYRLEGAMPEAQLLLMRVEIVNGLADYARNYAQAIRDAINLGAKVINMSFGNAALAYANLPDETKKAFDYAKSKGVSIVTSAGNDSSFGGKTRLPLADHPDYGVVGTPAAADSTLTVASYSPDKQLTETATVKTADQQDKEMPVL

SEQ ID NO: 11239 - protein, 1026 aa, Streptococcus agalactiae
ATGATGCCTTATCGTCAAGTTTGCAAAGTAATAGATAGCACTTTGCAAACAATCATAACAAAAGACTGTGTTTTAAAAGCAGTAAAATTTGTAGAAAAATTGTTAAAAGAAAAAGAACGCTATCGTTTTTATTTGGAAGAGCCACCCGAACGTAAAAAAGTGAAAAAACTGTATGTTGAGGGTGATGGAGTCATGATTAAAAGCACAGATTCTAGAGAGGAAAGAAGGTATTTAGATTTAACACATTTTGTTATTCATACAGGCTCAAAAAAAGTTTCTACTAAAAGATATGAATTGCAGGACAAGCACGAAATATTACAGCTTAATTATGATAAAGCTAAATATAATCTTTTAGATTATATTTATAATAACTATGAAGTAGATGACGATACTATTTTAATCACTAACTCTGATATGGGTAAAGGCTATACTAGTAGAGTTTTTAAGGAATTAGGAAAAGCACTTAAGGTAAAGAAACATGAGCATTTTTGGGATATCTATCATGTTAAAGAAAAGTTAAGTTCATACCTTAGAAAATATCCAATTGAATTAACCGATTTTGCTTTAGATGCGGTAAAAAAATATAATTCTGATAAGCTTGAATTAGTTTTTGATACTGTTGAATCACTGATTTGTGATGAACTTGAAGATCAAGAATTTCAGAAGTTTAAGAAAAAAGTATTAAATAATTTCAAATATATAAAACCAGCTCATCTTAGAAATCTTTCAAATCGTGGTATTGGTATCATGGAATCACAACACAGAAAGATAACGTATAGAATGAAGCGACGTGGCATGTATTGGTCAAAGTGGGGAATCTCCACAATGGCAAATATGATTATACTTGAAAGAGCTAACGGTTTACGAGAATTATTTTTCGGTTCTTGGAGAAAGGTATACAGTGAGTATAAAGAAGGTTCATTTAGTGCAGGGCGACTTTTTAAAAAGACAGATGAATTAGATAAATTTTCTAAGCCCCTTCTAAAAAATGGCAGAAAATGGAGTATAACAGGAATCAAAACAAAA

SEQ ID NO: 11240 - protein, 342 aa, Streptococcus agalactiae
MMPYRQVCKVIDSTLQTIITKDCVLKAVKFVEKLLKEKERYRFYLEEPPERKKVKKLYVEGDGVMIKSTDSREERRYLDLTHFVIHTGSKKVSTKRYELQDKHEILQLNYDKAKYNLLDYIYNNYEVDDDTILITNSDMGKGYTSRVFKELGKALKVKKHEHFWDIYHVKEKLSSYLRKYPIELTDFALDAVKKYNSDKLELVFDTVESLICDELEDQEFQKFKKKVLNNFKYIKPAHLRNLSNRGIGIMESQHRKITYRMKRRGMYWSKWGISTMANMIILERANGLRELFFGSWRKVYSEYKEGSFSAGRLFKKTDELDKFSKPLLKNGRKWSITGIKTK

SEQ ID NO: 11241 - protein, 288 aa, Streptococcus agalactiae
ATGTCTAGAAAAGTACGTCGTCACTTCACCGATGATTTTAAGCAACAAATTGTTGACCTTTACAATGTTGGTAGAAAGCGTAGCAGTCTCATCAAGGAATATGAGCTAACCCCTTCCACCTTCGATAAGTGGGTTAGACAAGCCAAAACAACTGGTTCATTCAAGTCTGTTGATAATCTGACAGATGAACAGCGGGAGCTAATTGAATTCAGAAAACACAATAAAGAACTCGAAATGCAATTAGATATCCTAAAGCAAGCAGCGGTGATTATGGCACAAAAAGGGAAA

SEQ ID NO: 11242 - protein, 96 aa, Streptococcus agalactiae
MSRKVRRHFTDDFKQQIVDLYNVGRKRSSLIKEYELTPSTFDKWVRQAKTTGSFKSVDNLTDEQRELIEFRKHNKELEMQLDILKQAAVIMAQKGK

SEQ ID NO: 11243 - protein, 711 aa, Streptococcus agalactiae
GTGGAGTCAGTATCTGAAACGGAGTTTGAAGAAACTATTAAAAGAATTTTTCTCGATAGCGAGTCTAGATACGGATCCAGAAAAATCAAAATATGCTTGAATAACGAAGGTATCACACTTTCACGTCGTCGGATTCGACGCATTATGAAGCGACTCAATTTGGTTTCTGTTTATCAGAAAGCCACCTTCAAACCACATTCTAGAGGCAAGAATGAAGCCCCTATTCCCAACCACTTAGACAGGCAATTTAAGCAAGAAAGACCACTACAAGCCTTAGTCACTGACTTAACCTATGTTCGTGTAGGCAATCGTTGGGCTTATGTTTGCCTCATCATTGACCTATACAACCGTGAAATCATCGGCCTGTCTCTTGGTTGGCACAAGACCGCTGAACTCGTTAAGCAAGCCATACAAAGCATCCCTTACGCCCTGACCAAAGTCAAGATGTTCCATTCAGATCGTGGCAAAGAGTTTGATAATCAGTTAATTGATGAAATATTGGAAGCCTTTGGAATCACACGTTCGCTTAGTCAGGCTGGTTGTCCTTATGACAATGCCGTAGCTGAAAGTACGTATCGTGCTTTCAAAATTGAATTTGTTTATCAAGAAACCTTTCAATCGCTGGAAGAACTAGCTCTTAAGACTGAAAAGGCAACACTTTTCTGTACAACATTTATAAAGTGTTGCCTTTTCAGGTTTTTACCAATGCTA

SEQ ID NO: 11244 - protein, 237 aa, Streptococcus agalactiae
MESVSETEFEETIKRIFLDSESRYGSRKIKICLNNEGITLSRRRIRRIMKRLNLVSVYQKATFKPHSRGKNEAPIPNHLDRQFKQERPLQALVTDLTYVRVGNRWAYVCLIIDLYNREIIGLSLGWHKTAELVKQAIQSIPYALTKVKMFHSDRGKEFDNQLIDEILEAFGITRSLSQAGCPYDNAVAESTYRAFKIEFVYQETFQSLEELALKTEKATLFCTTFIKCCLFRFLPML

SEQ ID NO: 11245 - protein, 1812 aa, Streptococcus agalactiae; identical to SEQ ID NO: 6977

SEQ ID NO: 11246 - protein, 604 aa, Streptococcus agalactiae; identical to SEQ ID NO: 6978

SEQ ID NO: 11247 - protein, 1002 aa, Streptococcus agalactiae
ATGGTAAACCAATTAATAATTTTAGAAAATGGATTTGATAGAGCTTCGGATTTAAAGTCAGGATATATGGATTTTTTCAATTTTAGATTTAAAGATTCAGACAGTACTAGTAGTTTTTGGTATTATATTTTGAGATCATGTTATAATAAAAAATGGTCTAGCGATTTATGGAGTGATATTGAGAAATTAATTTCAGTACATCTAAAAAACATTATAACACTATATAATAACGAAACAATTTTAAGTGGCAAAGATATTGAGAGTATATATATCGAAACATTAAGCACTGATTACTCAAGAAATGATTACTCTACCAGTGAGGAGCTAACGCAAAAAGCACTCCATAATTTTTTGTGGAATCATAATGGTATACCTATTGTTCCAGAACTAGATAATTTATTATTACTAATTCAAAAAGATTTAAAAATAGTCGAAGATGAGTTTTGTTCTTATTTAACTAATCAAATAGAGATCCAGGAACAATCAAAAGATGATTATTTTAAAGATATAACTAATTTGGGAAATAATTACTTATTAAAATCTCGAATTATTTTTGAACTCTTGTATAAAAGTAATATTTCTAGTGCATTCACATGTAATTCTTTTGTTGCACTACATGATTTTCATAACGAAAATTGTTTCAATTCCTATGAAGGATTTCTTAGCTACATTTATGACTTAGAAAGTAATAATGAATTTAATGTTGAAACATCAATATTGAATTTTAATTATACATTACCTAGAATAGATAAATTACAACGTAATATTCATGGAACCCTGAATGATAAAAATATTATTTTTGGAATAGATTATGATTCTTTAATTGATATACAAAAAGATAAAAATGTTACCCTGCCTGTTGAATTTACCAAATCATACAGGATATTACAGAACGGAAATATATTTCAATATCCAATTCCCTCTGAATTAACTTTTATAAAATTTATGGTCATGGTCTGGGTGAAGCAGACTATTCTTATTTTTCATCATTTTTTGACTCAT

SEQ ID NO: 11248 - protein, 334 aa, Streptococcus agalactiae
MVNQLIILENGFDRASDLKSGYMDFFNFRFKDSDSTSSFWYYILRSCYNKKWSSDLWSDIEKLISVHLKNIITLYNNETILSGKDIESIYIETLSTDYSRNDYSTSEELTQKALHNFLWNHNGIPIVPELDNLLLLIQKDLKIVEDEFCSYLTNQIEIQEQSKDDYFKDITNLGNNYLLKSRIIFELLYKSNISSAFTCNSFVALHDFHNENCFNSYEGFLSYIYDLESNNEFNVETSILNFNYTLPRIDKLQRNIHGTLNDKNIIFGIDYDSLIDIQKDKNVTLPVEFTKSYRILQNGNIFQYPIPSELTFIKFMVMVWVKQTILIFHHFLTH

SEQ ID NO: 11249 - protein, 1875 aa, Streptococcus agalactiae
TTGACTAAATTAGGAACTAATTTAACCGATCAAGCACGTCAGCATTTGCTAGATCCAGTTATTGGACGAAACAAAGAAATTCAGGAAACTGCAGAAATTCTAGCTCGTCGTACTAAAAATAATCCTGTTCTAGTTGGTGATGCAGGTGTTGGTAAAACAGCTGTTATTGAAGGTTTGGCACAAGCAATTATAAATGGTGATGTCCCTGCTGCTATCAAAAATAAAGAAATCATTTCGATAGATATCTCTAGCCTTGAAGCTGGCACCCAATATAGGGGTAGTTTTGAAGAAAATATTCAAAATATCATAAAAGAAGTTAAGGAAACAGGAAATATTATTCTCTTCTTTGATGAAATACACCAAATATTAGGAGCCGGTTCAACTGGTGGTGATAGTGGCTCTAAGGGGCTCGCAGATATACTTAAGCCTGCACTTTCACGTGGTGAATTAACGGTTATAGGTGCAACTACTCAAGATGAATATCGTAACACCATTCTCAAGAATGCTGCCTTAGCACGCCGCTTTAACGAAGTTAAAGTCAATGCACCTTCTGCACAAGATACTTTCAATATCCTTATGGGGATAAGAAACCTCTATGAGCAACATCATAATGTTGTTTTACCTGACTCTGTTTTGAAAGCAGCTGTAGATTTATCTATTCAATACATACCACAAAGAAGTCTCCCTGATAAAGCAATTGACCTTATTGATATGACTGCTGCACACCTAGCTGCGCAACATCCCGTAACTGACCTTAAATCCTTAGAAAAAGAAATCGCTGCGCAAAGAGACAAGCAAGAAAAAGCTGTCAATACTGAAGATTTTGAAGAAGCTCTTAAGGTCAAGACACGCATTGAAGAGTTACAAAACCAGATTGATAATCATACCGAAGGACAAAAAGTCACTGCAACTATCAATGATATCGCTATGTCAATTGAGCGTCTAACTGGAGTTCCTGTATCAAATATGGGTGCTAGTGATATTGAACGCTTAAAAGAACTTGGCAATCGTCTAAAAGGTAAAGTCATTGGTCAAAATGATGCTGTTGAGGCAGTTGCAAGAGCTATTCGCCGAAATCGTGCTGGTTTCGATGATGGTAATCGTCCGATTGGTAGCTTTCTATTTGTTGGACCAACTGGAGTTGGTAAAACTGAGCTAGCAAAGCAATTAGCTTTTGATATGTTCGGATCAAAGGATGCTATCGTTAGACTTGATATGTCTGAATATAATGATCGTACAGCAGTTTCTAAGCTAATTGGAGCGACTGCTGGTTACGTTGGTTATGACGACAATAGTAATACACTAACAGAACGTATCCGTCGAAATCCTTATTCTATTGTTCTTCTTGATGAAATCGAAAAAGCTGACCCGCAAGTTATCACGCTTCTCCTTCAAGTTCTAGATGATGGCCGTTTAACTGATGGTCAAGGAAACACTATTAACTTTAAAAATACTGTTATCATTGCAACCTCAAATGCAGGTTTTGGAAACGAAGCATTTACAGGTGACAGCGATAAAGACTTGAAAATTATGGAACGAATTTCTCCATATTTCCGTCCAGAATTTCTAAATCGTTTCAATGGTGTTATTGAATTCTCTCACCTAAGCAAAGATGACTTAAGCGAAATTGTAGATTTGATGCTTGATGAAGTTAACCAAACAATTGGCAAAAAAGGAATTGACCTTGTGGTAGATGAAAATGTTAAATCACACTTAATTGAACTGGGTTATGACGAAGCAATGGGAGTACGTCCATTGCGCCGTGTCATCGAGCAAGAAATTCGAGATCGCATCACAGACTACTATCTCGATCATACAGACGTTAAACACCTAAAAGCTAATTTGCAAGATGGCCAAATCGTCATTTCTGAAAGA

SEQ ID NO: 11250 - protein, 625 aa, Streptococcus agalactiae
MTKLGTNLTDQARQHLLDPVIGRNKEIQETAEILARRTKNNPVLVGDAGVGKTAVIEGLAQAIINGDVPAAIKNKEIISIDISSLEAGTQYRGSFEENIQNIIKEVKETGNIILFFDEIHQILGAGSTGGDSGSKGLADILKPALSRGELTVIGATTQDEYRNTILKNAALARRFNEVKVNAPSAQDTFNILMGIRNLYEQHHNVVLPDSVLKAAVDLSIQYIPQRSLPDKAIDLIDMTAAHLAAQHPVTDLKSLEKEIAAQRDKQEKAVNTEDFEEALKVKTRIEELQNQIDNHTEGQKVTATINDIAMSIERLTGVPVSNMGASDIERLKELGNRLKGKVIGQNDAVEAVARAIRRNRAGFDDGNRPIGSFLFVGPTGVGKTELAKQLAFDMFGSKDAIVRLDMSEYNDRTAVSKLIGATAGYVGYDDNSNTLTERIRRNPYSIVLLDEIEKADPQVITLLLQVLDDGRLTDGQGNTINFKNTVIIATSNAGFGNEAFTGDSDKDLKIMERISPYFRPEFLNRFNGVIEFSHLSKDDLSEIVDLMLDEVNQTIGKKGIDLVVDENVKSHLIELGYDEAMGVRPLRRVIEQEIRDRITDYYLDHTDVKHLKANLQDGQIVISER

SEQ ID NO: 11251 - protein, 1044 aa, Streptococcus agalactiae
TTGCTTGGGATAGCTCACAACGTGCTGGGCTTTACTTCGGTGTTCCATTTATTATTTTCTGCTATATTTATCACAAACTACGTTACAAGAAATGGTGATCTTATGGGAAGATTTAAAGAACTTTTAGAGAGTAAAAAAACTCTCATCCTACATGGTGCCTTGGGGACCGAGCTTGAGAGTAGAGGTTGTGATGTTTCTGGGAAACTTTGGTCAGCCAAATATCTGATTGAGGATCCAGCAGCTATTCAGACCATTCATGAAGATTATATTCGTGCTGGCGCTGATATTGTGACGACATCAACTTATCAGGCGACTTTACAAGGACTAGCTCAAGTTGGTGTCTCTGAAAGTCAGGCAGAAGATTTGATTCGCTTGACTGTTCAGTTGGCAAAAGCTGCGCGTGAGCAAGTTTGGAAAAGTTTGACAAAAGAAGAAAAATCAGAGAGAATCTATCCTTTGATTTCTGGGGATGTTGGTCCCTACGCTGCCTTTTTAGCGGATGGCTCTGAGTACACTGGACTCTACGATATTGATAAGCAAGGTCTTAAAAACTTCCATCGCCATCGTATTGAGCTTCTTTTAGATGAGGGTGTTGACATTCTGGCACTTGAAACCATTCCAAACGCTCAGGAGGCTGAGGCTCTTATTGAGCTACTTGCCGAGGATTTCCCTCAGGTTGAGGCTTATATGTCATTCACCTCTCAAGATGGTAAGACCATCTCAGATGGTAGTGCTGTTGCAGACTTGGCGAAATCTATTGATGTTAGCCCACAGGTCGTGGCGCTGGGCATTAACTGTTCAAGTCCATCGTTAGTTGCTGATTTCTTGCAAGCAATAGCAGAGCAGACTAACAAGCCTCTTGTGACCTATCCAAACTCTGGAGAGGTTTATGATGGGGCAAGCCAATCTTGGCAATCTAGCCCTGATCATTCACACACCCTACTTGAAAATACAAGTGACTGGCAAAAACTTGGCGCCCAAGTTGTCGGAGGTTGTTGCCGAACTAGACCAGCTGATATTGCTGACCTCTCTGCACATTTAAAA

SEQ ID NO: 11252 - protein, 348 aa, Streptococcus agalactiae
MLGIAHNVLGFTSVFHLLFSAIFITNYVTRNGDLMGRFKELLESKKTLILHGALGTELESRGCDVSGKLWSAKYLIEDPAAIQTIHEDYIRAGADIVTTSTYQATLQGLAQVGVSESQAEDLIRLTVQLAKAAREQVWKSLTKEEKSERIYPLISGDVGPYAAFLADGSEYTGLYDIDKQGLKNFHRHRIELLLDEGVDILALETIPNAQEAEALIELLAEDFPQVEAYMSFTSQDGKTISDGSAVADLAKSIDVSPQVVALGINCSSPSLVADFLQAIAEQTNKPLVTYPNSGEVYDGASQSWQSSPDHSHTLLENTSDWQKLGAQVVGGCCRTRPADIADLSAHLK

SEQ ID NO: 11253 - protein, 1374 aa, Streptococcus agalactiae
ATGGAAAATCATCGTTATGAAGATGAAGGTAAATTCCAGCGTAAGATGACCAGTCGTCATCTCTTTATGTTATCTCTAGGTGGTGTTATCGGGACTGGGCTTTTCTTGAGTTCAGGTTATACCATTGCACAGGCTGGTCCGCTTGGAGCTGTGCTGTCTTATTTGATTGGTGCCGTTGTGGTTTATTTGGTCATGCTATCACTTGGTGAATTGGCAGTTGCCATGCCGGTGACGGGGTCATTCCACACTTATGCCACTAAGTTTATCAGTCCTGGCACAGGTTTTACTGTTGCCTGGCTATATTGGATTTGTTGGACGGTCGCCTTGGGAACTGAATTTTTAGGTGCTGCCATGCTCATGCAGCGCTGGTTCCCAGATGTGCCGGCTTGGACATTTGCTTCTTTCTTTGCCCTTGTGATTTTTGGCTTAAATGCTCTCAGTGTGCGCTTTTTTGCAGAAGCAGAGTCTTTCTTCTCAAGTATTAAGGTTATTGCTATCATTATCTTTATTATCTTGGGCTTAGGTGCTATGTTTGGTCTAGTTTCCTTTGAAGGTCAGCACAAAGCTATTCTTTTCACTCATCTGACTGCCAATGGTGACTTTCCAAATGGTATCGTTGCAGTTGTCTCAGTCATGTTGGCTGTTAACTATGCCTTCTCTGGTACTGAGTTGATTGGTATTGCGGCAGGTGAAACGGATAATCCAAAAGAAGCTGTGCCAAGGGCTATTAAAACGACAATCGGTCGCTTGGTTGTTTTCTTTGTACTGACAATTGTTGTCCTAGCTTCGCTATTGCCAATGAAAGAGGCAGGCGTATCCACAGCACCATTCGTTGATGTCTTTGACAAGATGGGAGTCCCTTTTGCGGCGGATATCATGAACTTTGTTATCTTGACAGCCATCCTGTCTGCTGGTAACTCAGGTCTCTACGCATCAAGCCGTATGCTCTGGTCCCTTGCCAATGAAGGTATGTTGTCAAAATCTGTCGTGAAAATCAATAAATACGGTGTCCCAATGCGTGCTCTTCTCTTGTCAATGGCAGGAGCAGTGCTGTCGCTCTTTTCAAGTATTTACGCTGCAGACACAGTTTATCTAGCCTTGGTTTCAATCCCGGGCTTTGCTGTTGTTGTCGTATGGCTAGCCATTCCAGTCGCACAAATCAATTTCCGCAAGGAATTCTTGAAAGAGAATCAACTAGAAGATTTGTCTTACAAAACACCTTTTACACCAGTTCTCCCTTATATCACAATCATTTTGCTCTTGATTTCGATTGTAGGGATTGCTTGGGATAGCTCACAACGTGCTGGGCTTTACTTCGGTGTTCCATTTATTATTTTCTGCTATATTTATCACAAACTACGTTACAAGAAATGG

SEQ ID NO: 11254 - protein, 458 aa, Streptococcus agalactiae
MENHRYEDEGKFQRKMTSRHLFMLSLGGVIGTGLFLSSGYTIAQAGPLGAVLSYLIGAVVVYLVMLSLGELAVAMPVTGSFHTYATKFISPGTGFTVAWLYWICWTVALGTEFLGAAMLMQRWFPDVPAWTFASFFALVIFGLNALSVRFFAEAESFFSSIKVIAIIIFIILGLGAMFGLVSFEGQHKAILFTHLTANGDFPNGIVAVVSVMLAVNYAFSGTELIGIAAGETDNPKEAVPRAIKTTIGRLVVFFVLTIVVLASLLPMKEAGVSTAPFVDVFDKMGVPFAADIMNFVILTAILSAGNSGLYASSRMLWSLANEGMLSKSVVKINKYGVPMRALLLSMAGAVLSLFSSIYAADTVYLALVSIPGFAVVVVWLAIPVAQINFRKEFLKENQLEDLSYKTPFTPVLPYITIILLLISIVGIAWDSSQRAGLYFGVPFIIFCYIYHKLRYKKW

SEQ ID NO: 11255 - protein, 648 aa, Streptococcus agalactiae; identical to SEQ ID NO: 6999

SEQ ID NO: 11256 - protein, 216 aa, Streptococcus agalactiae; identical to SEQ ID NO: 7000

SEQ ID NO: 11257 - protein, 321 aa, Streptococcus agalactiae
ATGCTAGTTGAACTTAAATCGGTTGAAACTGATACTAGTAAGTGGGACTTAAACCATCTATTAGCCTTTTTCGGGAATCAGTGGTTTGCAGTGATTGTTTATCTTTTGCCGATTTTTTGTCCCAATATACCATTTTTAACACTTGCAGTCATGATTTTTGCATTTGCAGAACTTGCCATGCATCTTTTCTTTTTTAATCTTTCCTTGAAGAAGTGGTATAATCCAGGACTTCTTACGACCTTAGTAGGTCTTGTCCCTGTTTCTGTCTATTATTTAGCTCATGATTGGAAGTTGTATTCTGGACTTGATTGGTTTTTAGGC

SEQ ID NO: 11258 - protein, 107 aa, Streptococcus agalactiae
MLVELKSVETDTSKWDLNHLLAFFGNQWFAVIVYLLPIFCPNIPFLTLAVMIFAFAELAMHLFFFNLSLKKWYNPGLLTTLVGLVPVSVYYLAHDWKLYSGLDWFLG

SEQ ID NO: 11259 - protein, 162 aa, Streptococcus agalactiae
ATGGTATCAAATGTCACAAATCTTGGAGGTCATCTTATGAAAACATTGATAACAAAATGGTACCTCTTTTGTCCCTATCTTGCCTCTCTTTTTGCCTTAGCATTATTTTTTGGAAATTGGGATTTACGAGTGCAGTCACTACTTATATCGGGACTTTTTATT

SEQ ID NO: 11260 - protein, 54 aa, Streptococcus agalactiae; identical to SEQ ID NO: 7004

SEQ ID NO: 11261 - protein, 90 aa, Streptococcus agalactiae
GTGCATAAAACCTCCAAAGGTATTGATATTATAGGTTCACTTGATTATACTATATGGTATCAAATGTCACAAATCTTGGAGGTCATCTTA

SEQ ID NO: 11262 - protein, 30 aa, Streptococcus agalactiae
MHKTSKGIDIIGSLDYTIWYQMSQILEVIL

SEQ ID NO: 11263 - protein, 627 aa, Streptococcus agalactiae; identical to SEQ ID NO: 7005

SEQ ID NO: 11264 - protein, 209 aa, Streptococcus agalactiae; identical to SEQ ID NO: 7006

SEQ ID NO: 11265 - protein, 594 aa, Streptococcus agalactiae; identical to SEQ ID NO: 7007

SEQ ID NO: 11266 - protein, 198 aa, Streptococcus agalactiae; identical to SEQ ID NO: 2448

SEQ ID NO: 11267 - protein, 1224 aa, Streptococcus agalactiae; identical to SEQ ID NO: 7009

SEQ ID NO: 11268 - protein, 408 aa, Streptococcus agalactiae; identical to SEQ ID NO: 7010

SEQ ID NO: 11269 - protein, 168 aa, Streptococcus agalactiae; identical to SEQ ID NO: 7011

SEQ ID NO: 11270 - protein, 56 aa, Streptococcus agalactiae; identical to SEQ ID NO: 7012

SEQ ID NO: 11271 - protein, 492 aa, Streptococcus agalactiae; identical to SEQ ID NO: 7013

SEQ ID NO: 11272 - protein, 164 aa, Streptococcus agalactiae; identical to SEQ ID NO: 2452

SEQ ID NO: 11273 - protein, 837 aa, Streptococcus agalactiae; identical to SEQ ID NO: 7015

SEQ ID NO: 11274 - protein, 279 aa, Streptococcus agalactiae; identical to SEQ ID NO: 7016

SEQ ID NO: 11275 - protein, 1275 aa, Streptococcus agalactiae
GTGAGAAACAAGACTTTGAAGGTTAAAGCTTTTTTTCATATTTTTAGCTTCTTTATGGTAAAATGGAATTTAGCAAAAATGACTTTTATTCAGAAAGGTTTACCAATGAAAATAGGAATTGATAAGATTGGTTTTGCAACCAGTCAATATGTCCTTGAAATGACTGATTTGGCTATTGCTCGCCAAGTTGACCCTGAAAAATTCAGCAAGGGATTATTGTTAGATTCACTTAGTATTACGCCAGTTACAGAAGATATCGTTACACTTGCAGCCTCTGCAGCTAATGATATTTTATCTGATGAGGACAAAGAAACTATTGATATGGTGATTGTCGCTACAGAATCAAGTATCGATCAGAGTAAGGCGGCTTCTGTCTATGTACATCAACTTTTAGAGATTCAACCTTTCGCAAGGTCATTCGAGATGAAAGAAGCATGCTATAGCGCAACTGCTGCTCTTGATTACGCTAAATTACATGTAGAAAAACATCCAGATTCTAAAGTATTAGTGATAGCTTCAGATATTGCTAAATATGGCATTAAATCTACTGGAGAATCCACTCAAGGTGCAGGCAGTATCGCTATGCTTATTAGTCAAAACCCATCCATTCTAGAGCTAAAAGAGGACCGTCTAGCGCAAACCCGTGATATTATGGACTTTTGGCGACCAAATTATTCTGATGTTCCTTATGTTAATGGCATGTTTTCAACAAAACAATATCTAGATATGCTAAAAACTACTTGGAAAGAATATCAAAAACGTTTTAATACTAGTCTAAGTGACTATGCTGCTTTTTGTTTCCATATCCCTTTTCCAAAATTAGCTTTAAAGGGCTTTAATAAAATTCTAGATAATAACCTAGATGAACAAAAGAAAGCTGAACTACAAGAAAATTTTGAGCACTCTATTACTTATAGTAAGAAAATTGGAAATTGCTATACTGGCTCATTGTATCTAGGACTTCTATCGTTACTAGAAAATAGTCAAAATTTAAAAGCAGGTGATCAAATTGCCTTCTTTTCATACGGTAGCGGAGCTGTTGCTGAAATTTTTACCGGTCAGTTAGTAGACGGCTACCAAAATAAACTTCAGAGCGATCGTATGGATCAACTCAATAAACGTCAAAAAATTACAGTAACTGAGTATGAGAAACTCTTCTTTGAAAAAACAATCCTAGACGAAAATGGAAATGCCAACTTCAACACCTACCGTACTGGCACTTTTTCTCTAGACTCTATTTGCGAACATCAACGTATCTACAAGAAAATTAATAAT

SEQ ID NO: 11276 - protein, 425 aa, Streptococcus agalactiae; identical to SEQ ID NO: 7018

SEQ ID NO: 11277 - protein, 1281 aa, Streptococcus agalactiae
ATGACAAAAATTTCCTGGACAGGATTTTCAAAAAAATCCCCTGAAGAACGCATTCATTACCTTGAAGAACAAGATTTTTTAGCTGATTCTTCCCTAGAAATAGTGACGAATCAGGACTTACTCTCTTTATCACTAGCCAATCAAATGGCTGAAAATGTCATCGGTAGAATAGCCTTACCGTTTTCACTTGTCCCAGATGTTTTGGTTAACGGTAAAGTCTATCAAGTCCCATATGTCACTGAAGAACCGTCAGTTGTTGCTGCTGCAAGTTTTGCTGCTAAAATTATAAAACGATCTGGTGGTTTTCTGACAACCGTCCATAATCGTAAAATGATTGGACAAGTAGCCCTTTATGATGTACAAGATAGTCAACACGCTAAAGAATCTATATTAAATCAAAAACAGCAATTATTAGAAATAGCCAACGCTGCTCATCCATCAATAGTCAAGCGTGGAGGCGGTGCTTGCGATCTAACTATTGAGATTAAAGAAGGCTTTTTGATTGTTTATCTTATGGTCGATACAAAAGAAGCCATGGGTGCTAATATGGTTAACACCATGATGGAAGCATTATCTTCGCCATTAGAAGACATTTCAAAAGGCAAAAGCTTAATGTCAATTTTATCTAACTATGCTACTGAATCTTTAGTGACTGCTACATGCCGAGTTGATTTAAGATTTCTAAGTCGCCAAAAAGAGGAGGCCATCAAGTTAGCTCAAAAAATGACGATGGCAAGTCAATTAGCTCAAGTAGACCCTTATCGTGCTAGCACACATAATAAAGGTATTTTTAATGGCATTGATGCTATCGTCTTAGCTACTGGAAATGATTGGCGAGCTATTGAAGCTGGAGCGCATACCTATGCTGTCAAAGATGGACAATATCGAGGATTATCTAAATGGTCTTATAAGGTTGATGATAATTTTCTAGAAGGTACTCTGACGCTACCGATGCCTGTTGCAACAAAAGGTGGATCCATCGGTATTAACCCTAGTGTCCAACTAGCTCACGATCTACTAGGTCGTCCTAATGCTAAAGAGTTGGCAAGTATTGTTCTTTCGATTGGACTAGCTCAAAATTTTGCGGCTCTTAAGGCATTGGTTAGCACAGGAATTCAAGCTGGTCACATGAAACTTCAAGCAAAGTCGTTGGCACTACTTGCTGGAGCTAAAGAAGAACAAATTTCAGAAGTCGTTAAACAGCTTCTAGACTCTAAACACATGAATCTAGAGACAGCACAGAAAATTGTCAATAAACTTACTAAAAGTAAAAAAAGAATT

SEQ ID NO: 11278 - protein, 427 aa, Streptococcus agalactiae
MTKISWTGFSKKSPEERIHYLEEQDFLADSSLEIVTNQDLLSLSLANQMAENVIGRIALPFSLVPDVLVNGKVYQVPYVTEEPSVVAAASFAAKIIKRSGGFLTTVHNRKMIGQVALYDVQDSQHAKESILNQKQQLLEIANAAHPSIVKRGGGACDLTIEIKEGFLIVYLMVDTKEAMGANMVNTMMEALSSPLEDISKGKSLMSILSNYATESLVTATCRVDLRFLSRQKEEAIKLAQKMTMASQLAQVDPYRASTHNKGIFNGIDAIVLATGNDWRAIEAGAHTYAVKDGQYRGLSKWSYKVDDNFLEGTLTLPMPVATKGGSIGINPSVQLAHDLLGRPNAKELASIVLSIGLAQNFAALKALVSTGIQAGHMKLQAKSLALLAGAKEEQISEVVKQLLDSKHMNLETAQKIVNKLTKSKKRI

SEQ ID NO: 11279 - protein, 447 aa, Streptococcus agalactiae; identical to SEQ ID NO: 7021

SEQ ID NO: 11280 - protein, 149 aa, Streptococcus agalactiae; identical to SEQ ID NO: 7022

SEQ ID NO: 11281 - protein, 561 aa, Streptococcus agalactiae; identical to SEQ ID NO: 7023

SEQ ID NO: 11282 - protein, 187 aa, Streptococcus agalactiae; identical to SEQ ID NO: 7024

SEQ ID NO: 11283 - protein, 912 aa, Streptococcus agalactiae
ATGAAAAGTGCTTATATCTTTTTTAATCCAAAATCTGGTAAAGATGAACAAGCATTGGCACAAGAAGTAAAATCTTATTTAATAGAACATGATTTTCAAGACGATTATGTTCGTATCATTACACCTTCATCTGTTGAGGAAGCTGTCGCCTTAGCAAAAAAAGCATCAGAAGACCATATCGACTTGGTTATTCCTTTAGGGGGAGATGGCACTATTAATAAAATCTGTGGTGGTGTCTACGCTGGTGGTGCTTATCCTACTATCGGACTAGTACCTGCCGGGACCGTCAATAACTTTTCAAAAGCTTTGAACATCCCACAAGAGAGGAATCTCGCTCTTGAAAACCTTCTAAACGGTCATGTAAAGTCCGTAGATATCTGTAAAGTTAACGACGATTACATGATTAGCAGTTTAACACTTGGGCTCCTTGCTGATATTGCTGCTAATGTCACTTCTGAAATGAAGCGTAAATTAGGACCTTTTGCTTTCGTAGGTGATGCCTACCGTATATTAAAGCGTAATCGATCATATTCTATTACTCTTGCTTACGATAATAATGTACGGTCTTTACGCACGCGGTTACTACTTATTACCATGACCAATTCGATTGCCGGTATGCCAGCCTTCTCTCCAGAAGCAACAATTGATGATGGACTTTTTAGAGTCTACACTATGGAACATATTCACTTCTTCAAATTATTGTTGCATCTAAGACAATTTCGTAAGGGAGATTTTAGTCAAGCAAAGGAGATAAAACATTTTCATACCAATAATCTGACTATTTCAACTTTTAAACGTAAAAAATCAGCTATCCCTAAAGTTCGTATTGATGGCGATCCAGGTGACCAATTGCCTGTAAAAGTTGAAGTCATCCCTAAAGCCTTAAAGTTTATCATTCCTAACTCATTACCA

SEQ ID NO: 11284 - protein, 304 aa, Streptococcus agalactiae; identical to SEQ ID NO: 7026

SEQ ID NO: 11285 - protein, 852 aa, Streptococcus agalactiae
ATGACAACATTTACTGCTAAATTTATTGACCAAGAGTGGGAAGTCCCAGTAGAATCAGGTCGCTACCATATGATTGTTGGGGAATTTTGTCCTTATGCACAACGTCCGCAGATTGCACGCCAACTGCTTGGTTTGGATAAACATATTTCTATCAGTTTTGTGGATGATGTTCCAAGTGATATAGGACTTATTTTTAGCCAACCAGAACAGGTTACTGGTGCTAAGTCGCTTCGTGATATTTATCATTTGACTGACCCGACCTACAAAGGTCCTTATACTATCCCAATTTTAATTGACAAGACTGATAATCGTATTGTCTGTAAGGAATCTGCAGATATGCTTCGACTTTTTACTACAGATTTCTCTGATTTGCATCAAGAGGATGCTCCTGTCCTTTTCAGCCAAGAAACTGCTTCACTTATTGATAATGATATTAAAGACATTAATAATAACTTCCAAAGCTTAATGTATAAGTTAGCTTTTCTTGATAAACAAGCAGATTATGATACTTATAGTAAGGAATTCTTCACTTTTCTAGATCAAAAAGAACACTTACTAGGACAACGTCCTTTCTTGCTCGGAGATAATCTAAGTGAGGTTGATATTCATTTCTTTACACCATTAGTCCGCTGGGATATTGCTGGGCGTGATCTTCTACTACTTAATCAGAAAGCGCTAGAAGACTACCCAAATATTTTTTCTTGGGCTAAAACTTTATACAATGACTTTAATTTAAAAACATTAACCAATCCACAATCCATAAAAAATAACTATTACTTAGGCAAATTTGGAAGAGCTGTTCGTCATCATACCATCGTACCAACAGGTCCAAATATGGTAAAATGGGAAAAA

SEQ ID NO: 11286 - protein, 284 aa, Streptococcus agalactiae
MTTFTAKFIDQEWEVPVESGRYHMIVGEFCPYAQRPQIARQLLGLDKHISISFVDDVPSDIGLIFSQPEQVTGAKSLRDIYHLTDPTYKGPYTIPILIDKTDNRIVCKESADMLRLFTTDFSDLHQEDAPVLFSQETASLIDNDIKDINNNFQSLMYKLAFLDKQADYDTYSKEFFTFLDQKEHLLGQRPFLLGDNLSEVDIHFFTPLVRWDIAGRDLLLLNQKALEDYPNIFSWAKTLYNDFNLKTLTNPQSIKNNYYLGKFGRAVRHHTIVPTGPNMVKWEK

SEQ ID NO: 11287 - protein, 216 aa, Streptococcus agalactiae; identical to SEQ ID NO: 7029

SEQ ID NO: 11288 - protein, 72 aa, Streptococcus agalactiae; identical to SEQ ID NO: 7030

SEQ ID NO: 11289 - protein, 993 aa, Streptococcus agalactiae
ATGACAAATCGAAAAGATGATCACATAAAATATGCTCTTAAATATCAGTCGCCTTATAATAGTTTTGACGATATTGAGTTAATACATTCATCCTTACCAAAATATAATGTCAACGATATCGATTTATCAACACATTTTGCTGGTCAAAGCTTTGAATTTCCTTTTTATATCAATGCTATGACAGGAGGTAGTGAAAAAGGGAAAGCAGTCAATCATAAATTGGCACAGGTTGCTCAAGCTACAGGGATTGTTATGGCGACAGGTTCATATTCGGCAGCTCTCAAAAACGATGAAGATGATTCCTACCCAACAACAGACTTGTATCCTGATTTAAAACTGGCGACAAATATAGGGTTAGACAAGCCTTTACCAGCAGCAGAGTCAACCGTTAAGGCTATGAACCCCATTTTTTTACAAGTTCATGTTAATGTGATGCAAGAACTTTTGATGCCTGAAGGAGAGCGTGAATTTCACATGTGGCGTTCTCACTTAAAAGAATACGTCGACAATATCCAATGCCCACTTATCTTAAAAGAGGTTGGTTTTGGGATGGATTTACAATCAATAAAGGATGCTTACGATATAGGTATCACAACTGTAGATATTTCGGGGCGTGGGGGGACTAGTTTTGCTTACATCGAAAATCAACGTGGACGCGACCGTTCGTATCTCAATACCTGGGGGCAAACAACAGCTCAATCTTTAATAAACGCTCAATCTATGATGGACAAAATGGATATCCTAGCATCTGGTGGCATTCGTCATCCTTTAGATATGGTAAAATGTTTAGTGTTGGGTGCTAAAGCTGTTGGACTTTCTAGAACAGTTTTAGAATTAGTTGAGCGTTATCCTGTAGATGATGTTATTGCAATTCTCAATTCTTGGAAAGAAGATTTAAGAATGATAATGTGTGCACTGAATTGTAAAAAAATAACTGATTTACGACAAGTCAATTATATATTGTATGGTCAATTGAAGGAAGCCAATGCTAAA

SEQ ID NO: 11290 - protein, 331 aa, Streptococcus agalactiae
MTNRKDDHIKYALKYQSPYNSFDDIELIHSSLPKYNVNDIDLSTHFAGQSFEFPFYINAMTGGSEKGKAVNHKLAQVAQATGIVMATGSYSAALKNDEDDSYPTTDLYPDLKLATNIGLDKPLPAAESTVKAMNPIFLQVHVNVMQELLMPEGEREFHMWRSHLKEYVDNIQCPLILKEVGFGMDLQSIKDAYDIGITTVDISGRGGTSFAYIENQRGRDRSYLNTWGQTTAQSLINAQSMMDKMDILASGGIRHPLDMVKCLVLGAKAVGLSRTVLELVERYPVDDVIAILNSWKEDLRMIMCALNCKKITDLRQVNYILYGQLKEANAK

SEQ ID NO: 11291 - protein, 990 aa, Streptococcus agalactiae; identical to SEQ ID NO: 7033

SEQ ID NO: 11292 - protein, 330 aa, Streptococcus agalactiae; identical to SEQ ID NO: 7034

SEQ ID NO: 11293 - protein, 942 aa, Streptococcus agalactiae; identical to SEQ ID NO: 7035

SEQ ID NO: 11294 - protein, 314 aa, Streptococcus agalactiae; identical to SEQ ID NO: 7036

SEQ ID NO: 11295 - protein, 876 aa, Streptococcus agalactiae; identical to SEQ ID NO: 7037

SEQ ID NO: 11296 - protein, 292 aa, Streptococcus agalactiae; identical to SEQ ID NO: 7038

SEQ ID NO: 11297 - protein, 1227 aa, Streptococcus agalactiae; identical to SEQ ID NO: 7039

SEQ ID NO: 11298 - protein, 409 aa, Streptococcus agalactiae; identical to SEQ ID NO: 7040

SEQ ID NO: 11299 - protein, 684 aa, Streptococcus agalactiae
ATGAGAGTATTAATTGCAGAAGATGAAGAACAGATGTCACGTGTCCTTAGTACGGCAATTAGTCACCAAGGTTATGTTGTTGATGTCGCCTACGATGGTCAGACTGCTATTGATTTAGCTAATCAAAATGCATATGATGTCATGGTTATGGATGTCATGATGCCTGTTAAAACAGGTGTTGAGGCTGTCAAAGAAATTAGACAATCAGGAAATAAATCTCACATTATTATGCTAACAGCCATGGCAGAAATTGATGATAGAGTAACAGGTCTAGATGCTGGTGCAGATGATTATTTAACAAAACCCTTCTCTCTAAAAGAATTATTAGCAAGGCTTCGCTCTATGTCCCGAAGATTGGAAGATTTCACACCTAATGTATTGTCATTGGGAAGAGTAACCTTATCAGTCGGTGAACAAGAGTTGCAATGTGAAAACACTATTCGTCTAGCGGGTAAAGAAGCTAAAATGTTAGCATTTTTCATGTTGAACCATGATAAAGAATTATCTACACAACAACTTTTCGAACATGTCTGGGGAGCAGATAAGGACCAAGAAGATGTAGATGAGGGATACGTCTTTATCTATGTTTCTTATTTGAGACAAAAATTGCAGGCAATTAGTGCTAACTTGGAGATTATTGGTCAAGAAGGTAGTAGCTATAAATTAAGTGAAATAAATGGTGGC

SEQ ID NO: 11300 - protein, 228 aa, Streptococcus agalactiae
MRVLIAEDEEQMSRVLSTAISHQGYVVDVAYDGQTAIDLANQNAYDVMVMDVMMPVKTGVEAVKEIRQSGNKSHIIMLTAMAEIDDRVTGLDAGADDYLTKPFSLKELLARLRSMSRRLEDFTPNVLSLGRVTLSVGEQELQCENTIRLAGKEAKMLAFFMLNHDKELSTQQLFEHVWGADKDQEDVDEGYVFIYVSYLRQKLQAISANLEIIGQEGSSYKLSEINGG

SEQ ID NO: 11301 - protein, 624 aa, Streptococcus agalactiae
ATGGAAACAAATATTTATGGAGATTATGGTCGATATCTACCATTAATTTTAGAAGATTTCAGCCAGCGTATACAATTAGAAAATGATAAAGCTAAGGTTGAAACAGGCTATAAATTGTACGAACATATCATTGGTCGTATTAAGACATCAGATAGTATGATAGAGAAATGTCGTCGTAAACAGTTACCTGTAACAGTAGATTCTGCACTAAAAGCTATTAGAGATAGTATTGGAGTCCGTATTATTTGTGGTTTTGTTAACGATATTTATCAAATTGTAGAACGTATTAAGTCATTTGATGATTGTCGTATTGTAGTTGAAAAAGACTATATCCAGCATGTTAAGCCAAATGGGTATCGCTCTTACCATGTGATTTTAGAAATTGATACTCCCTATCCAGACTGTTTGGGTAATTCAGAAGGTAAATATTACATTGAGATTCAGTTGCGTACAATTGCGCAAGATTCTTGGGCTAGTTTAGAACATCAGATGAAATACAAGCATGATATTGAAAATCCCGAACGAATTGTAAGAGAATTAAAACGTTGTGCTGATGAAATGGCATCTGTTGATTTAACGATGCAAACGATTCGTCAATTGATAGAGAGTGGAACAAAGAAGGAA

SEQ ID NO: 11302 - protein, 208 aa, Streptococcus agalactiae; identical to SEQ ID NO: 8662

SEQ ID NO: 11303 - protein, 1752 aa, Streptococcus agalactiae
ATGAAAACTAAATCACAAAAAACGTCTTTTTTCTCTAATTTGTCTCCGTACCTCAAAGGTTACAAACTTCTTTTTGCGTTAGCAATTGTGTTAGCAACTTTATCAAGCTTGACAACAGTTATAGGACCAGACCGTCTTAAAGAGATGACGGATCTTATGGTAAAAGGCTTGGCTGGTAATATTGACTTAGCCAAAATCGGTCATATTGCAGGGCAATTGGCAGTATTATATGTTTTAGGTGCATTAGTATCCTATCTAGCAAGTTTTATTGTAACGACTATTATTCAAAAATTTGCTCAAGGCATGCGCAATGCTATTGCTGATAAAATCAATAAAATACCTTTGAGTTATTTTGATAGCCATACTCAAGGTGATACTTTATCTCGTGTTACAAATGATGTGGATTTGATGACACAGTCTTTTAACCAAAGTTTAGTTACTATGGTTGCATCTACAGTATTATTGATTGGTTCATTAATTATGATGTTCAAAACAGATTGGCATTTAGCAACAACGGCGATTATATCGGTATTTTCAGGATTCGCTCTTTCTTCAATCATTATGGTGAAGAGTCAGCCTTTATTTAAAAAGCAACAGATGAATTTGGCTAATATATCTGGATATGTAGAAGAAATTTACTCAGGACATAACATTGTTACTAGTCATAACGCAAGACAGCAGGCTAAGTCAGATTTTCAACTATTAAATGATAAAATTCACAGTTCCATGTGGAAATCACAATTTTTCTCTGGAATTATGATGCCTCTGATGCAGTTTATTGGTAATTTTGGTTATGTGATGGTGTGTGTGGTTGGTGCCATGTTAGCTATCAAAGGAACAATTACTATGGGTACAATTGTTGCTTTTATGACCTATGTTCGTATTTTTACACAGCCTATTGGTCAGATTGCTCAAGGAATTACACAATTACAGTCTGCTAGTGCAGCCATGGGACGTGTTTTTGAATTTTTAAATGAAACAAATATGCAAGAGGATAAGCACAAAGTGTTAAATCTTCCTAAGTTTAAGGGGTATGTGTCCTTTGAACATGTCAAGTTTGGTTATAGTGATAACAAGACTATTATTCATGACTTTACTTCGGAGGCACAGCCTGGTCAGAAAGTTGCTATTGTAGGACCAACTGGCGCAGGTAAAACGACAATTGTTAATTTATTGATGCGTTTTTATGATGTTAATTCAGGTAGTATTTCCATAGATGACATCAATATCCAAGACATGAAACGTAGTCAAGTTCATGATGCTTTCTCGATGGTTCTTCAAGATATATGGTTGTTTGAGGGAACTATTAAAGAAAATTTGATTTTTAATCAGACGACAATCAGTGACGATGAGGTTCAAGAAGCTGCTAAGGCAGTCGGTGTACATCATTTTATAATGACACTACCTAAAGGGTATGATACTGTCCTTGATGACGCTGTGACATTGTCAGTTGGACAAAAGCAATTATTAACCATTGCTCGAGCTCTTTTGAAAAATTCTCCCTTACTTATCTTAGATGAAGCAACTTCATCTGTTGATACACGTACAGAAGAGTTAATTCAAAAAGCTATGGACAAACTTATGGAAGGAAGAACATCATTTGTTATCGCACATCGTTTATCAACGATTAAAAACGCAGATTTGATTTTGGTCATGAAAGATGGGAATATCATTGAGCAAGGCAGTCATGATGTTTTGATGTCTCAAAGTGGTTTTTATGCTGATCTGTATAATTCTCAATTCGAATCAGCT

SEQ ID NO: 11304 - protein, 584 aa, Streptococcus agalactiae
MKTKSQKTSFFSNLSPYLKGYKLLFALAIVLATLSSLTTVIGPDRLKEMTDLMVKGLAGNIDLAKIGHIAGQLAVLYVLGALVSYLASFIVTTIIQKFAQGMRNAIADKINKIPLSYFDSHTQGDTLSRVTNDVDLMTQSFNQSLVTMVASTVLLIGSLIMMFKTDWHLATTAIISVFSGFALSSIIMVKSQPLFKKQQMNLANISGYVEEIYSGHNIVTSHNARQQAKSDFQLLNDKIHSSMWKSQFFSGIMMPLMQFIGNFGYVMVCVVGAMLAIKGTITMGTIVAFMTYVRIFTQPIGQIAQGITQLQSASAAMGRVFEFLNETNMQEDKHKVLNLPKFKGYVSFEHVKFGYSDNKTIIHDFTSEAQPGQKVAIVGPTGAGKTTIVNLLMRFYDVNSGSISIDDINIQDMKRSQVHDAFSMVLQDIWLFEGTIKENLIFNQTTISDDEVQEAAKAVGVHHFIMTLPKGYDTVLDDAVTLSVGQKQLLTIARALLKNSPLLILDEATSSVDTRTEELIQKAMDKLMEGRTSFVIAHRLSTIKNADLILVMKDGNIIEQGSHDVLMSQSGFYADLYNSQFESA

SEQ ID NO: 11305 - protein, 1815 aa, Streptococcus agalactiae
ATGTTTAATATTTTCAAGCGACTCAATGGTAAAGAATGGTTGATGATTGTGGCGAGTACTATATTAGTGTGTCTAGCGGTTTGGATGGACCTAAAGACTCCAGAATATATGTCTGATATCACACGTATGTTGCAAACTAAAGGTACAAAGTTAGAGGCTCTTTGGGATCCTGGACTAAAAATGCTTGCCTTTTCATTTGGTAGTTTTTTAGTAGCAGTAATGGTAGGTTTTTTAGGTGCTAGGACAGCAGCTAGTTTTACTAGTCGATTACGTTCAGATATTTTTAACCATGTGATGGATTATTCTGATGCAGAAATTAAGCGATTTTCTATCCCCTCTCTATTAACGCGCACAACTAACGACTTGACTCAGCTACAGATCCTTATTGTAATGGGAATGCAGGTTGTTACCCGTGGACCAATTATGGCAATATGGGCTTTGACTAAAATTTGGGGTAAAAGCGATCAATGGACTGGGGCAGTTGGAGTAGCGGTTATTATCGTTATGATATTACTTAGCGTTCTACTCTTACTCGCTTTTCCGAGACAACGTCAAATCCAAGGTTTTACAGATGCGCTTAATGCAACTACTAGAGAGGCACTCTCTGGTGTTAGAGTTATTCGTGCCTACAATGCTGAAAAGTATCAAACAGATAAGTTCAAACGTGAAAATGACGATTTAACAAAATTGAACCTTTTTGTTTATAGATTGATGTCGCTTATGAATCCTGTGATGACAGTGGTTTCATCTGGATTGACTTTAGCTATTTATTGGATTGGCTCTTATTTGATTAATGATATCTCTGTGCCTAAAGTTACAGGAACAAGTGTATCTGTATTGGCTGCTAAATCAGCTATCACTGATCGAGTGGATCTTTTTTCAAACATGGTTGTTTTTTCATCTTATGCTATGCAAGTTGTTATGGGATTTATGATGATGGTAGCTATTTTTATCATCATGCCTCGTGCTTTAGTATCGGTTAGACGTATTAATGAGGTACTAACTTTAGCCCCAACAGTAACTTTTAAAGAAAATAGTCATATTCAAAGTGCACAAAAAGGTCAAATTGAGTTTCAAGATGTGTCATTTCATTATAGTAAAGATTCTGAAGCGGTTATTGAACATGTATCTTTCAAAGCAGATACTGGTCAGACAGTGGCATTTATTGGGTCTACAGGTTCTGGAAAATCCACTTTAGTCAATTTAGTTCCACGTTTTTATGACGCCACAGAGGGGGCAATTAAACTTGATGGCATTGATATAAAGGAATACTCTCACAATGATTTGAATAATAAAATTGGCTATATTCCACAGAAAGCTGTTCTCTTTAGTGGGACAGTACGTTCTAATATGATTTTGGGAGAGAGTGGCAGGGAGGAACTTAGTGATGAAGAAATTTGGCAAGCACTCGAATTAGCGCAAGCTAAAGAATTTATCGAGGCTAAAGAAAAAGGATTAGATACAGAAGTCGCTCAAGGTGGTAGTAACTTTTCAGGAGGACAAAAACAACGCTTGGCAATTGCACGTGCTTTAGCACGTCACCCTGAAATTCTCATTTTTGATGACTCATTTTCAGCGTTAGATTATAAAACAGATCATATTTTACGCCATGAGCTGAAAGAAAAAACAGCTGCTATGACGAAATTAATTGTCGCTCAACGCATTTCAACTATCATGGATGCTGATCTCATTTTAGTGCTAGATCAAGGTAAAGTTGTTGGGCAAGGAACACATAAGGAATTGTTATCAAATAATGAAGTGTATCAAGAGATAGCCTATTCTCAATTGTCTAAGGAGGAATTGGAAAATGAAAAC

SEQ ID NO: 11306 - protein, 605 aa, Streptococcus agalactiae
MFNIFKRLNGKEWLMIVASTILVCLAVWMDLKTPEYMSDITRMLQTKGTKLEALWDPGLKMLAFSFGSFLVAVMVGFLGARTAASFTSRLRSDIFNHVMDYSDAEIKRFSIPSLLTRTTNDLTQLQILIVMGMQVVTRGPIMAIWALTKIWGKSDQWTGAVGVAVIIVMILLSVLLLLAFPRQRQIQGFTDALNATTREALSGVRVIRAYNAEKYQTDKFKRENDDLTKLNLFVYRLMSLMNPVMTVVSSGLTLAIYWIGSYLINDISVPKVTGTSVSVLAAKSAITDRVDLFSNMVVFSSYAMQVVMGFMMMVAIFIIMPRALVSVRRINEVLTLAPTVTFKENSHIQSAQKGQIEFQDVSFHYSKDSEAVIEHVSFKADTGQTVAFIGSTGSGKSTLVNLVPRFYDATEGAIKLDGIDIKEYSHNDLNNKIGYIPQKAVLFSGTVRSNMILGESGREELSDEEIWQALELAQAKEFIEAKEKGLDTEVAQGGSNFSGGQKQRLAIARALARHPEILIFDDSFSALDYKTDHILRHELKEKTAAMTKLIVAQRISTIMDADLILVLDQGKVVGQGTHKELLSNNEVYQEIAYSQLSKEELENEN

SEQ ID NO: 11307 - protein, 438 aa, Streptococcus agalactiae; identical to SEQ ID NO: 8655

SEQ ID NO: 11308 - protein, 146 aa, Streptococcus agalactiae; identical to SEQ ID NO: 8656

SEQ ID NO: 11309 - protein, 2070 aa, Streptococcus agalactiae
ATGAAAAAGAAAATTATTTTGAAAAGTAGTGTCCTTGGTTTAGTCGCTGGGACTTCTATTATGTTCTCAAGCGCATTCGCTGACCAAGTCGGCGTCCAAGTTATAGGCGTCAATGACTTTCATGGTGCACTTGACAATACTGGAACAGCAAATATGCCTGACGGAAAAGTTACTAATGCTGGCACTGCTGCTCAATTAGATGCTTATATGGATGATGCTCAAAAAGATTTCAAACAAACTAACCCTAATGGTGAAAGCATTAGAGTTCAAGCTGGTGATATGGTTGGAGCAAGTCCAGCTAACTCAGGGCTTCTTCAAGATGAACCAACCGTTAAAACATTTAATGCAATGAATGTTGAGTATGGCACATTAGGTAACCATGAATTTGATGAAGGTTTGGCAGAATACAATCGTATCGTTACTGGAAAGGCCCCTGCTCCAGATTCTAATATAAATAATATTACGAAATCATACCCACACGAAGCTGCAAAACAAGAAATTGTAGTGGCAAACGTTATTGATAAAGTTAACAAACAAATCCCTTACAATTGGAAACCTTACGCTATTAAAAATATTCCTGTAAATAACAAAAGTGTGAACGTTGGCTTTATCGGAATCGTTACCAAAGACATCCCAAACCTTGTCTTACGTAAAAATTATGAACAATATGAATTTTTAGATGAAGCTGAAACAATCGTTAAATACGCCAAAGAATTACAAGCTAAAAATGTCAAGGCTATTGTAGTCCTTGCTCATGTACCTGCAACAAGCAAGGATGATATTGCTGAAGGTGAAGCAGCAGAAATGATGAAAAAAGTCAATCAACTCTTCCCTGAAAATAGCGTAGATATTGTCTTTGCTGGACACAATCATCAATATACAAATGGTCTTGTTGGTAAAACTCGCATTGTACAAGCGCTCTCTCAAGGAAAAGCCTATGCTGACGTACGTGGTGTCCTAGATACTGATACACAAGATTTCATTGAAACCCCTTCAGCTAAAGTAGTTGCAGTTGCTCCTGGTAAAAAAACAGGTAGTGCCGATATTCAAGCCATTGTTGACCAAGCTAATACTATCGTTAAACAAGTAACAGAAGCTAAAATTGGTACTGCCGAGGTAAGTGGCATGATTACGCGTTCTGTTGATCAAGATAATGTTAGTCCAGTAGGCAGCCTCATCACAGAGGCTCAACTAGCAATTGCTCGAAAAAGCTGGCCAGATATCGATTTTGCCATGACAAATAATGGTGGCATTCGTGCTGACTTACTCATCAAACCAGATGGAACAATCACCTGGGGAGCTGCACAAGCAGTTCAACCTTTTGGTAATATCTTACAAGTCGTCGAAATTACTGGTAGAGATCTTTATAAAGCACTCAACGAACAATACGACCAAAAACAAAATTTCTTCCTTCAAATAGCTGGTCTGCGATACACTTACACAGATAATAAAGAGGGCGGAGAAGAAACACCATTTAAAGTTGTAAAAGCTTATAAATCAAATGGTGAAGAAATCAATCCTGATGCAAAATACAAATTAGTTATCAATGACTTTTTATTCGGTGGTGGTGATGGCTTTGCAAGCTTCAGAAATGCCAAACTTCTAGGAGCCATTAATCCCGATACAGAGGTATTTATGGCCTATATCACTGATTTAGAAAAAGCTGGTAAAAAAGTGAGCGTTCCAAATAATAAACCTAAAATCTATGTCACTATGAAGATGGTTAATGAAACTATTACACAAAATGATGGTACACATAGCATTATTAAGAAACTTTATTTAGATCGACAAGGAAATATTGTAGCACAAGAGATTGTATCAGACACTTTAAACCAAACAAAATCAAAATCTACAAAAATCAACCCTGTAACTACAATTCACAAAAAACAATTACACCAATTTACAGCTATTAACCCTATGAGAAATTATGGCAAACCATCAAACTCCACTACTGTAAAATCAAAACAATTACCAAAAACAAACTCTGAATATGGACAATCATTCCTTATGTCTGTCTTTGGTGTTGGACTTATAGGAATTGCTTTAAATACAAAGAAAAAACATATGAAA

SEQ ID NO: 11310 - protein, 690 aa, Streptococcus agalactiae
MKKKIILKSSVLGLVAGTSIMFSSAFADQVGVQVIGVNDFHGALDNTGTANMPDGKVTNAGTAAQLDAYMDDAQKDFKQTNPNGESIRVQAGDMVGASPANSGLLQDEPTVKTFNAMNVEYGTLGNHEFDEGLAEYNRIVTGKAPAPDSNINNITKSYPHEAAKQEIVVANVIDKVNKQIPYNWKPYAIKNIPVNNKSVNVGFIGIVTKDIPNLVLRKNYEQYEFLDEAETIVKYAKELQAKNVKAIVVLAHVPATSKDDIAEGEAAEMMKKVNQLFPENSVDIVFAGHNHQYTNGLVGKTRIVQALSQGKAYADVRGVLDTDTQDFIETPSAKVVAVAPGKKTGSADIQAIVDQANTIVKQVTEAKIGTAEVSGMITRSVDQDNVSPVGSLITEAQLAIARKSWPDIDFAMTNNGGIRADLLIKPDGTITWGAAQAVQPFGNILQVVEITGRDLYKALNEQYDQKQNFFLQIAGLRYTYTDNKEGGEETPFKVVKAYKSNGEEINPDAKYKLVINDFLFGGGDGFASFRNAKLLGAINPDTEVFMAYITDLEKAGKKVSVPNNKPKIYVTMKMVNETITQNDGTHSIIKKLYLDRQGNIVAQEIVSDTLNQTKSKSTKINPVTTIHKKQLHQFTAINPMRNYGKPSNSTTVKSKQLPKTNSEYGQSFLMSVFGVGLIGIALNTKKKHMK

SEQ ID NO: 11311 - DNA, 408 bp, Streptococcus agalactiae
atgataaaaccaattgttagagatactttctttttacaacaaaaatcacaaatggctagtagagcagatgtgagcttagcaaaagatttacaggatactttgcatgctaatcaaaattattgtgtaggtatggcagcaaatatgattggtagtctgaagcgtgtcattatcatcaatgtgggtattacaaatttagtaatgtttaaccctgtattagttgcaaaatcggatccatatgagacagaagaatcctgcctttctctcgtaggttgcagaagtacacaacgatatcgtcacattacgatttcttatcgtgatatcaattggaaagaacagcaaatcaagttgacagattttccagctcaaatttgtcaacacgagttagatcatttggaaggcatattgata

SEQ ID NO: 11312 - protein, 136 aa, Streptococcus agalactiae
MIKPIVRDTFFLQQKSQMASRADVSLAKDLQDTLHANQNYCVGMAANMIGSLKRVIIINVGITNLVMFNPVLVAKSDPYETEESCLSLVGCRSTQRYRHITISYRDINWKEQQIKLTDFPAQICQHELDHLEGILI

SEQ ID NO: 11313 - DNA, 1347 bp, Streptococcus agalactiae
atgacaagcggaaagacatatgtagcaagtgttttagagaaagtgaagaagcaaaatgagcatgaggaagaatttctacaagcggttgaagaggtttttgagtcactagtaccagtttttgatagataccctcagtacattgaagaaaatcttttagaacgtttggttgagcctgagcgcgtgatttcttttagagttccatgggtagatgataaaggtcaggttcaagttaaccgaggatatcgtgtacaattttcatcagctattggtccttataaaggtggtttacgttttcaccctacagtaacacaatctattgtcaaatttttaggatttgaacaaatttttaagaattcactgacaggtctaccaattggtggtggcaaaggagggtcgaactttgatccaaaagggaaatcagataatgaagtgatgcgtttcacacaaagttttatgaccgaacttcaaaaatacattggaccagatttagatgtgccggctggcgatattggagtaggtggacgtgaaattggttacctttatggtcaatataagcgtttaaatggttatcaaaatggtgttttaaccggaaaaggtctgacttatggtggctctttggttcgtacagaagcaactggttatggggcagtctattttgctaaagaaatgctagcagcgcgtggtcaagatttaactggcaaagttgcactggtttcgggatctggtaacgtggctatttatgctactgaaaaattacaagagttgggtgcaactgttgtagctgtgtcagattcttcaggttatgtttatgatccagatggtattgaccttgaaactttgaaacagataaaagaggttgaaagagcacgtattgtcaaatatacagagaaacatccaaaagctaatttcacaccagcagatcaaggtagtatctggtctattaaagcagatttagctttcccgtgtgctactcaaaacgaattagacgaagaagacgctaagttattagttgaaaatggtgtcttggcagtaacagaaggagcaaatatgccatctaccttgggtgctattaaagttttccaaaaggcaggggttgcttttggtcctgctaaagctgccaatgcaggaggagtagctgtttcagcgcttgaaatggcacaaaattctagtcgtagggcatggacttttgaagaagttgatcaagaattgcaacgtattatgaaaactatttttgtgaatgcttccgaagcgactgatgaatttggcgatagtggtaacctggttctaggtgctaacattgcaggctttttaaaagttgctcaagctatgtctgcacaaggtattgtt

SEQ ID NO: 11314 - protein, 449 aa, Streptococcus agalactiae
MTSGKTYVASVLEKVKKQNEHEEEFLQAVEEVFESLVPVFDRYPQYIEENLLERLVEPERVISFRVPWVDDKGQVQVNRGYRVQFSSAIGPYKGGLRFHPTVTQSIVKFLGFEQIFKNSLTGLPIGGGKGGSNFDPKGKSDNEVMRFTQSFMTELQKYIGPDLDVPAGDIGVGGREIGYLYGQYKRLNGYQNGVLTGKGLTYGGSLVRTEATGYGAVYFAKEMLAARGQDLTGKVALVSGSGNVAIYATEKLQELGATVVAVSDSSGYVYDPDGIDLETLKQIKEVERARIVKYTEKHPKANFTPADQGSIWSIKADLAFPCATQNELDEEDAKLLVENGVLAVTEGANMPSTLGAIKVFQKAGVAFGPAKAANAGGVAVSALEMAQNSSRRAWTFEEVDQELQRIMKTIFVNASEATDEFGDSGNLVLGANIAGFLKVAQAMSAQGIV

SEQ ID NO: 11315 - DNA, 564 bp, Streptococcus agalactiae
ttgacttttactgactttcgttctataatgagacaaatatttgattggagtatctatatgaaatggttcccacttgttggaggtataattgccttattagctggcttctatctctttataaatcctgtaacggttgtagcaactctgggttggttcattgctttatttatctttatttatggcatttcaaatttagtacgctacttgcaagctgattcttatcaccgtagcccttggtatctggttcagagtatccttgctattatttttggtatcattttactatccagctcagcaatgtcactttcaaatactgtcatgactattttagcatactggctactggtatctggtattttacgacttttgggtggtttccaaatgcaaaaaattaatttcccaggtgccaaatcctataaacgttcggcttatattgcactcattttaggtattattttactgattcaacctaccttatcagcagccatcattggaagatttgtagcctttatattaatagcaattggagcttcggctatttacacttttactcgtattaattat

SEQ ID NO: 11316 - protein, 188 aa, Streptococcus agalactiae
MTFTDFRSIMRQIFDWSIYMKWFPLVGGIIALLAGFYLFINPVTVVATLGWFIALFIFIYGISNLVRYLQADSYHRSPWYLVQSILAIIFGIILLSSSAMSLSNTVMTILAYWLLVSGILRLLGGFQMQKINFPGAKSYKRSAYIALILGIILLIQPTLSAAIIGRFVAFILIAIGASAIYTFTRINY

SEQ ID NO: 11317 - DNA, 1767 bp, Streptococcus agalactiae
atgagaaaaaaatctgtttttttgagattatggtcttacctaactcgctacaaagctactcttttcttagcgatttttttgaaagttttatctagttttatgagcgttctggagccttttattttagggttagcgataacagagttgactgctaaccttgttgatatggctaagggagtttctggggcagaattgaacgttccttatattgctggtattttgattatttattttttcagaggtgttttctatgaattaggttcttatggctcaaattattttatgactactgtcgttcaaaaaagtatccgtgatatccgtcatgatttgaatcataaaatcaataaagttcctgtatcgtattttgataagcaccaatttggagatatgttgggacgttttacaagtgatgttgaaacggtctcaaatgctttacaacagagctttttacagattatcaatgcttttttaagtattattttagtagtcgttatggtactttatctaaatgtaccattagccatgattatcattgcttgtattcctgtaacttattttagtgcacaagcgatactaaaaagatcccaaccttactttaaagaacaggcaaagattctgggagaactgaatggttttgtacaagagaaattaactggtttcaatatcataaaattatatggtagagaagaggcgtctagtcaagaatttcgtgatataacggataatctacgtcatgtaggtttcaaagctagcttcatttcaggaattatgatgccagtattgaatggtatctctgattttatttaccttatcattgcatttgttggcggtttacaagttattgctggtaccttaacaattggtaacatgcaggcatttgtgcagtatgtttggcaaattagtcaacccgttcaaaccattacacaattagcaggtgttttgcaaagtgcaaaatcttccttagaacgtatttttgaagtcttagatgaagaagaggaagccaatcaagtcactgaaaaattgagccatgacttaaccggtcaagtcagctttcatggtgtcgattttcactattctccggataagccacttatccgcgactttaacttaaacgtagaaccagggcaaatgattgcaattgtagggccaacaggtgcaggtaagacaacacttataaacttactcatgagattctacgatgttagtgaaggtgctatcaccgtagatggtcacgatattagacacctatcacgccaagatttccggcaacaatttggcatggtgttgcaagatgcttggttatatgaaggtacaataaaagaaaatcttagattcggtaatcttgaagccagtgatgaggatatagttgctgctgccaaagctgcgaatgttgaccactttattcgaacgttacctggtggctacaatatggtgatgaatcaagaatcaagcaatatctccttaggacaaaagcaactgttgactattgcacgtgctttattagcagatcctaaaattttaattttagatgaagcgacttcatctgttgatacaaggttggaattgcttattcaaaaagctatgaaaaaattgatggaaggaagaactagttttgtcattgcacaccgtctatcaacgattcaagaggcagacaacattttagttctaaaggatggtcaaatcatcgaacaaggtaatcaccagcacctcctagcagataaaggattttattacgaattatataatagccaattttcaaatagtaaa

SEQ ID NO: 11318 - protein, 589 aa, Streptococcus agalactiae
MRKKSVFLRLWSYLTRYKATLFLAIFLKVLSSFMSVLEPFILGLAITELTANLVDMAKGVSGAELNVPYIAGILIIYFFRGVFYELGSYGSNYFMTTVVQKSIRDIRHDLNHKINKVPVSYFDKHQFGDMLGRFTSDVETVSNALQQSFLQIINAFLSIILVVVMVLYLNVPLAMIIIACIPVTYFSAQAILKRSQPYFKEQAKILGELNGFVQEKLTGFNIIKLYGREEASSQEFRDITDNLRHVGFKASFISGIMMPVLNGISDFIYLIIAFVGGLQVIAGTLTIGNMQAFVQYVWQISQPVQTITQLAGVLQSAKSSLERIFEVLDEEEEANQVTEKLSHDLTGQVSFHGVDFHYSPDKPLIRDFNLNVEPGQMIAIVGPTGAGKTTLINLLMRFYDVSEGAITVDGHDIRHLSRQDFRQQFGMVLQDAWLYEGTIKENLRFGNLEASDEDIVAAAKAANVDHFIRTLPGGYNMVMNQESSNISLGQKQLLTIARALLADPKILILDEATSSVDTRLELLIQKAMKKLMEGRTSFVIAHRLSTIQEADNILVLKDGQIIEQGNHQHLLADKGFYYELYNSQFSNSK

SEQ ID NO: 11319 - DNA, 1737 bp, Streptococcus agalactiae
atggcatatatttggtcttatttgaaaaggtaccccaattggttatggcttgatttactaggagctatgctttttgtgacggttatcctaggaatgcccacagccttagcgggtatgattgataatggcgttacaaaaggtgatcggactggagtttatctgtggacgttcatcatgtttatatttgttgtactaggtattattgggcgtattacgatggcttacgcatctagtcgcttaacgacaacaatgattagagatatgcgtaatgatatgtatgctaagcttcaagaatactcccatcatgaatatgaacagataggtgtatcttcactagtgacacgtatgacaagcgatacttttgttttgatgcaatttgctgaaatgtctttacgtttaggcctagtaactcctatggtaatgatttttagcgtggttatgatactaattacgagtccatctttggcttggcttgtagcggttgcgatgcctcttttggtaggagtcgttttatatgtagctataaaaacaaaacctttatctgaaagacaacagactatgcttgataaaatcaatcaatatgttcgtgaaaatttaacagggttacgcgttgttagagcctttgcaagagagaattttcaatcacaaaaatttcaagtcgctaaccaacgttacacagatacttcaactggtctttttaaattaacagggctaacagaaccacttttcgttcaaattattattgcaatgattgtggctatcgtttggtttgctttggatcccttacaaagaggtgctattaaaataggggatttagttgcttttatcgaatatagcttccatgctctcttttcatttttgctatttgccaatctttttactatgtatcctcgtatggtggtatcaagccatcgtattagagaggtgatggatatgccaatctctatcaatcctaatgccgaaggtgttacggatacgaaacttaaagggcatttagaatttgataatgtaacattcgcttatccaggagaaacagagagtcccgttttgcatgatatttcttttaaagctaagcctggagaaacaattgcttttattggttcaacaggttcaggaaaatcttctcttgttaatttgattccacgtttttatgatgtgacacttggaaaaatcttagtagatggagttgatgtaagagattataaccttaaatcacttcgccaaaagattggatttatcccccaaaaagctcttttatttacagggacaataggagagaatttaaaatatggaaaagctgatgctactattgatgatcttagacaagcggttgatatttctcaagctaaagagtttattgagagtcaccaagaagcctttgaaacgcatttagctgaaggtgggagcaatctttctgggggtcaaaaacaacggttatctattgctagggctgttgttaaagatccagatttatatatttttgatgattcattttctgctctcgattataagacagacgctactttaagagcgcgtctaaaagaagtaaccggtgattctacagttttgatagttgctcaaagggtgggtacgattatggatgctgatcagattattgtccttgatgaaggcgaaattgtcggtcgtggtacccacgctcaattaatagaaaataatgctatttatcgtgaaatcgctgagtcacaactgaagaaccaaaacttatcagaaggagag

SEQ ID NO: 11320 - protein, 579 aa, Streptococcus agalactiae; identical to SEQ ID NO: 7052

SEQ ID NO: 11321 - protein, 471 aa, Streptococcus agalactiae; identical to SEQ ID NO: 7053

SEQ ID NO: 11322 - protein, 157 aa, Streptococcus agalactiae; identical to SEQ ID NO: 2500

SEQ ID NO: 11323 - protein, 1866 aa, Streptococcus agalactiae
ATGAGCGATTTTTTAGTAGATGGATTGACTAAGTCGGTTGGTGATAAGACGGTCTTTAGTAATGTTTCATTTATCATCCATAGTTTAGACCGTATTGGGATTATTGGTGTCAATGGAACTGGAAAGACAACACTATTAGATGTTATTTCGGGTGAATTAGGTTTTGATGGTGATCGTTCCCCTTTTTCATCAGCTAATGATTATAAGATTGCTTATTTAAAACAAGAACCAGACTTTGATGATTCTCAGACAATTTTGGACACCGTACTTTCTTCTGACTTAAGAGAGATGGCTTTAATTAAAGAATATGAATTATTGCTTAATCACTACGAAGAAAGTAAGCAATCACGTCTAGAGAAAGTAATGGCAGAAATGGATTCTTTAGATGCTTGGTCTATTGAGAGCGAAGTCAAAACAGTATTATCCAAATTAGGTATTACTGATTTGCAGTTGTCGGTTGGTGAATTATCAGGAGGATTACGAAGACGTGTTCAATTAGCGCAAGTATTATTAAATGATGCAGATTTATTGCTCTTAGACGAACCTACTAACCACTTAGATATTGACACTATTGCATGGTTAACGAATTTTTTGAAAAATAGTAAAAAGACAGTGCTTTTTATAACTCATGATCGTTATTTTCTAGACAATGTTGCAACACGTATTTTTGAATTAGATAAGGCACAGATTACAGAATATCAAGGCAATTATCAGGATTATGTCCGACTTCGTGCAGAACAAGACGAGCGTGATGCTGCTAGTTTACATAAAAAGAAACAGCTTTATAAACAGGAACTAGCTTGGATGCGTACTCAGCCACAAGCTCGTGCAACGAAACAACAGGCTCGTATTAATCGTTTTCAAAATCTAAAAAACGATTTACACCAAACAAGCGATACAAGCGATTTGGAAATGACATTTGAAACAAGTCGAATTGGGAAAAAGGTTATTAATTTTGAAAATGTCTCTTTTTCTTACCCAGATAAATCTATCTTGAAAGACTTTAATTTGTTAATTCAAAATAAAGACCGTATTGGCATCGTTGGAGATAATGGTGTTGGAAAGTCAACCTTACTTAATTTAATTGTTCAAGATTTACAGCCGGATTCGGGTAATGTCTCTATTGGTGAAACGATACGTGTAGGTTACTTTTCACAACAACTTCATAATATGGATGGCTCAAAACGTGTTATTAATTATTTGCAAGAGGTTGCAGATGAGGTTAAAACTAGTGTCGGTACAACAAGTGTGACAGAACTATTGGAACAATTTCTCTTTCCACGTTCGACACATGGAACACAAATTGCAAAATTATCAGGTGGTGAGAAAAAACGACTTTACCTTTTAAAAATCCTGATTGAAAAGCCTAACGTGTTACTACTTGATGAGCCGACAAATGACTTAGATATTGCTACATTAACTGTTCTTGAAAATTTTTTACAAGGCTTTGGTGGTCCTGTGATTACAGTTAGTCACGATCGTTACTTTTTAGATAAAGTGGCTAATAAAATTATTGCGTTTGAAGATAACGATATCCGTGAATTTTTTGGTAATTATACTGATTATTTAGATGAAAAAGCATTTAATGAGCAAAATAATGAAGTTATCAGTAAAAAAGAGAGTACCAAGACAAGTCGTGAAAAGCAAAGTCGTAAAAGAATGTCTTACTTTGAAAAACAAGAATGGGCGACAATTGAAGACGATATTATGATATTGGAAAATACTATCACTCGTATAGAAAATGATATGCAAACATGTGGTAGTGATTTTACAAGGTTATCTGATTTACAAAAGGAATTAGATGCAAAAAATGAAGCACTTCTAGAAAAGTATGACCGTTATGAGTACCTTAGTGAGTTAGACACA

SEQ ID NO: 11324 - protein, 622 aa, Streptococcus agalactiae
MSDFLVDGLTKSVGDKTVFSNVSFIIHSLDRIGIIGVNGTGKTTLLDVISGELGFDGDRSPFSSANDYKIAYLKQEPDFDDSQTILDTVLSSDLREMALIKEYELLLNHYEESKQSRLEKVMAEMDSLDAWSIESEVKTVLSKLGITDLQLSVGELSGGLRRRVQLAQVLLNDADLLLLDEPTNHLDIDTIAWLTNFLKNSKKTVLFITHDRYFLDNVATRIFELDKAQITEYQGNYQDYVRLRAEQDERDAASLHKKKQLYKQELAWMRTQPQARATKQQARINRFQNLKNDLHQTSDTSDLEMTFETSRIGKKVINFENVSFSYPDKSILKDFNLLIQNKDRIGIVGDNGVGKSTLLNLIVQDLQPDSGNVSIGETIRVGYFSQQLHNMDGSKRVINYLQEVADEVKTSVGTTSVTELLEQFLFPRSTHGTQIAKLSGGEKKRLYLLKILIEKPNVLLLDEPTNDLDIATLTVLENFLQGFGGPVITVSHDRYFLDKVANKIIAFEDNDIREFFGNYTDYLDEKAFNEQNNEVISKKESTKTSREKQSRKRMSYFEKQEWATIEDDIMILENTITRIENDMQTCGSDFTRLSDLQKELDAKNEALLEKYDRYEYLSELDT

SEQ ID NO: 11325 - protein, 1206 aa, Streptococcus agalactiae
ATGAGATTAAATTATTTGCCTTCTGAGTTTCAGAAGGCTTTACCAATATTAAAAAAGATAAAAAAAGCCGGTTATGAAGCATACTTTGTAGGTGGTAGTGTTCGGGATGTTTTACTTGACCGTCCAATTCATGATGTTGATATAGCAACGTCATCTTATCCAGAAGAAACAAAGCAGATTTTTAAAAGGACAGTTGATGTTGGTATTGAACATGGAACAGTCTTAGTATTGGAAAAAGGTGGTGAATATGAGATTACCACTTTTAGGACTGAGGAGGTTTATGTTGATTATAGGCGTCCGAGTCAGGTCAATTTTGTTAGGTCGCTAGAAGAAGATCTAAAACGTCGAGATTTCACAGTTAATGCCTTTGCTTTAAATGAAGATGGAGAAGTTATTGATCTCTTTCATGGATTGGATGATTTAGATAATCACCTTCTTAGAGCAGTAGGACTCGCCAGTGAGCGTTTTAATGAAGATGCTCTTCGAATTATGCGAGGTTTGCGTTTTTCTGCTAGTCTAAATTTTGATATCGAAACAACAACTTTTGAGGCAATGAAAAAGCACGCGTCATTATTGGAGAAAATATCTGTTGAGCGTTCTTTTATTGAATTTGATAAACTTCTATTAGCACCTTATTGGCGTAAAGGAATGCTGGCACTAATAGATAGTCATGCTTTTAATTATCTACCATGCTTAAAAAATAGGGAATTACAATTAAGCGCCTTTTTGTCCCAGTTAGATAAAGATTTTTTATTTGAGACATCAGAACAAGCTTGGGCATCACTCATCTTGAGTATGGAAGTTGAACACACAAAGACTTTTTTAAAAAAATGGAAGACATCAACTCACTTTCAAAAAGATGTTGAGCATATAGTGGATGTTTATCGTATTCGTGAACAAATGGGATTGACTAAAGAACATCTTTATCGTTATGGAAAAACTATAATAAAACAAGCGGAAGGTATTCGCAAAGCAAGAGGCTTGATGGTTGATTTCGAAAAAATAGAACAACTAGATAGTGAGTTAGCAATCCATGATAGGCATGAGATAGTTGTCAATGGTGGCACCTTAATCAAGAAATTAGGAATAAAACCTGGTCCACAGATGGGAGATATTATCTCTCAAATTGAATTAGCCATTGTTTTAGGACAACTGATTAATGAAGAAGAGGCTATTTTACATTTTGTTAAGCAGTACTTGATGGAT

SEQ ID NO: 11326 - protein, 402 aa, Streptococcus agalactiae
MRLNYLPSEFQKALPILKKIKKAGYEAYFVGGSVRDVLLDRPIHDVDIATSSYPEETKQIFKRTVDVGIEHGTVLVLEKGGEYEITTFRTEEVYVDYRRPSQVNFVRSLEEDLKRRDFTVNAFALNEDGEVIDLFHGLDDLDNHLLRAVGLASERFNEDALRIMRGLRFSASLNFDIETTTFEAMKKHASLLEKISVERSFIEFDKLLLAPYWRKGMLALIDSHAFNYLPCLKNRELQLSAFLSQLDKDFLFETSEQAWASLILSMEVEHTKTFLKKWKTSTHFQKDVEHIVDVYRIREQMGLTKEHLYRYGKTIIKQAEGIRKARGLMVDFEKIEQLDSELAIHDRHEIVVNGGTLIKKLGIKPGPQMGDIISQIELAIVLGQLINEEEAILHFVKQYLMD

SEQ ID NO: 11327 - protein, 846 aa, Streptococcus agalactiae
ATGAAATTAGCACTTATTACGGATACCTCAGCTTACTTGCCTGAGGCTATCGAAAATCATGAAGATGTCTATGTTTTAGATATTCCAATTATCATTGATGGTAAAACTTATATTGAGGGACAAAATCTGACATTAGACCAATATTATGATAAGCTAGCGGCATCAAAAGAATTACCTAAAACAAGTCAGCCTAGCTTAGCTGAACTAGATGATCTCTTATGTCAATTGGAGAAAGAAGGGTATACACACGTCCTTGGTTTATTCATTGCAGCGGGGATATCAGGTTTCTGGCAGAATATTCAGTTTCTTATTGAAGAACATCCAAATTTGACAATTGCTTTTCCGGATACTAAAATAACTTCAGCACCACAGGGCAATTTAGTTAGAAATGCTTTGATGTGTTCACGTGAAGGGATGGATTTTGATGTCATAGTTAACAAGATACAATCACAAATTGAAAAAATTGAAGGATTTATTGTTGTTAATGATTTGAATCATCTAGTAAAAGGTGGTAGATTGTCAAACGGTTCAGCTATCATTGGTAACCTTTTAAGTATCAAGCCGGTCTTACATTTTAATGAAGAAGGTAAAATCGTTGTCTATGAGAAAGTGCGTACAGAGAAAAAAGCCTTAAAACGCTTGGCTGAGATTGTCAAAGAAATGACAGCAGATGGTGAATATGATATTGCTATTATTCACTCTAGAGCACAAGATAAGGCAGAACAATTATATAATTTGTTAGCTAAAGCTGGTCTTAAAGACGATTTAGAAATTGTATCATTTGGTGGCGTTATTGCAACTCATCTTGGTGAAGGTGCGGTTGCCTTTGGTATTACCCCAAAAAAT

SEQ ID NO: 11328 - protein, 282 aa, Streptococcus agalactiae; identical to SEQ ID NO: 2506

SEQ ID NO: 11329 - protein, 378 aa, Streptococcus agalactiae; identical to SEQ ID NO: 7063

SEQ ID NO: 11330 - protein, 126 aa, Streptococcus agalactiae; identical to SEQ ID NO: 2508

SEQ ID NO: 11331 - DNA, 531 bp, Streptococcus agalactiae
atgactatgaaaactattgaagaaatttacaaaaattatcctaatatcccctatatctcacctgaaagagacttggctgaaattaattttagtaaagttgttcctaggaaaaatatggaagaaactagtgaaggactcttgcctggagatattatcttattatggcgtatacagtttggaactttcacaactgaaacaagtttttcaaaatattttgaatacatttatggtataaatggaaaagaacacctagaatttttaataaaaaatggatttgtaagaatggagtcaccgcttgattctttagatcacttatctgctccacttttaaaactattcttaaaagaaaaaaacgtaaaaggcttgtcaaagatgaaacgctctgatttagatcaggcaatagctattgcttttacagaagaggaattagggaagttgtttgttgtcagagggttggcacttacagaaaaaggtttagcagccttgagtaacaatcaagaagtgattgatagacatcctaagaagaagttc

SEQ ID NO: 11332 - protein, 177 aa, Streptococcus agalactiae; identical to SEQ ID NO: 2510

SEQ ID NO: 11333 - DNA, 492 bp, Streptococcus agalactiae
atgattaaatggaatgaaaaagaaacaaaactagttgatacaagtttttcaattatgttgtatctaaaaacgctatttgcagtcggacaagtagtagctggcgttttattatattattttaaacctacacaaataaaacatctcctatttcttttaactgaaggtgaagttcacggtgggattcatggttttatttctgctcatttcttgaaaataagcagttatattaatgattcggctagtcatttagccgctatctatctattaattcatggcggtatcaaattagtagcacttattttattacataaagagaaattatttgcttaccctttatcaattttagttttcgttgggtttatcattttccaactaagggaatatttttctagtcatagcattttaatgatttttctatgtgtatttgatgttatcatgataattttaacatggttagaatatcagaaaatgaaattgaatttttcaaaaagg

SEQ ID NO: 11334 - protein, 164 aa, Streptococcus agalactiae; identical to SEQ ID NO: 2512

SEQ ID NO: 11335 - DNA, 1923 bp, Streptococcus agalactiae
atggatttaaaagcaaccagtaaagaggctgcaattgatgaaatgattacaaaattagttgacacaggtgttgtgacaaactttgctatttttaaagatggtatcatgaagcgtgaggcacaaacatcaactggattaggtgatggtatcgctatgccacatagtaaaaatgctgccgttaaagaagctactgtcctttttgcaaaatctgcatcaggtgttgattacgaagcacttgatggacagccaactgatttattctttatgattgctgcgccagatggtgctaatgatacgcatttagctgccttggcagaactatctaaatatcttttaaaagaagggttcgctgatcaattacgtcaagcaaaaacgccagatgacattattgctacttttgatagtaatagcatttctcaagaaacagtagctccacaaacagtacaatcaacaagtaaaggttcagattatattgttgcagtaacagcttgcactacgggaattgcccacacgtatatggcagaagaagctttaaagaaaaaagcagctgaaatgggtgtaggtattaaagttgaaacaaatggcgcttctggtgtaggaaataagttgacttcaagtgatattgcaagggctaagggtgttattattgcagcagataaggctgtagagatggatcgttttgatggcaaacctttggtatcacgtccggtagctgatggtattaaaaaaagtgaagacttaattaacattattctcgataataaggcacaaacctatcatgcaaaaaatcaaaatgataaacaatcaggtgaatctgatggaaaatcaggcttaggctctgctttttataaacaccttatgggtggtgtatcacaaatgttaccattcgttattggtggtggtattatgattgcgattgctttcctttttgataacatacttggtgtaccaaaagaccaattaagtaatttaggttcataccatgaaattgcagccttattcaaaaatatcggtggcgcagcatttgcatttatgttaccagtattggcaggttatatcgcttattcaatagctgaaaaaccaggactagtagctggcttcgtagctggttcaattgcatcaagtggactggcattcggtaaagtaccttttgcagaaggtgggaaagcaaccttagcattagcaggtgtgccatcaggtttcttaggggctttagtaggtggtttcttagctggtggagttatcctactacttagaaaattactttcaggtctcccaaaatcgcttgaaggtattaaatcaattcttctatacccattgttaggtgttttgattacaggtttcttgatgttgctcgtaaacattccaatggcagctatcaacacagctcttaacactttcttacaaggtttatctggtagttcagcagtcttgatgggcttactagttggtggtatgatggctgtagatatgggtgggcctgttaataaagcagcttatgtttttggtacaggtactcttgcagcaactgttgcaaatggcggctctgttgttatggcagctgtaatggctggaggaatggttccaccgttagcagtatttgtggcaactttattatttaaagataaatttaataatgaagaacgtcaatctggtctaacaaatatcgttatggggttatcttttatcactgaaggtgctattccgtttggtgctgctgacccagctcgtgcaatccctagctttattgtaggttcagccttaactggagcacttgttggtttagctggtatcaagttgatggctcctcatggagggatttttgtcatcgcattaacaagtaatcctttactttatattctatttattctaattggagcggtagtctcaggtgtactctttggcttgttccgtaaaacaaaa

SEQ ID NO: 11336 - protein, 641 aa, Streptococcus agalactiae
MDLKATSKEAAIDEMITKLVDTGVVTNFAIFKDGIMKREAQTSTGLGDGIAMPHSKNAAVKEATVLFAKSASGVDYEALDGQPTDLFFMIAAPDGANDTHLAALAELSKYLLKEGFADQLRQAKTPDDIIATFDSNSISQETVAPQTVQSTSKGSDYIVAVTACTTGIAHTYMAEEALKKKAAEMGVGIKVETNGASGVGNKLTSSDIARAKGVIIAADKAVEMDRFDGKPLVSRPVADGIKKSEDLINIILDNKAQTYHAKNQNDKQSGESDGKSGLGSAFYKHLMGGVSQMLPFVIGGGIMIAIAFLFDNILGVPKDQLSNLGSYHEIAALFKNIGGAAFAFMLPVLAGYIAYSIAEKPGLVAGFVAGSIASSGLAFGKVPFAEGGKATLALAGVPSGFLGALVGGFLAGGVILLLRKLLSGLPKSLEGIKSILLYPLLGVLITGFLMLLVNIPMAAINTALNTFLQGLSGSSAVLMGLLVGGMMAVDMGGPVNKAAYVFGTGTLAATVANGGSVVMAAVMAGGMVPPLAVFVATLLFKDKFNNEERQSGLTNIVMGLSFITEGAIPFGAADPARAIPSFIVGSALTGALVGLAGIKLMAPHGGIFVIALTSNPLLYILFILIGAVVSGVLFGLFRKTK

SEQ ID NO: 11337 - DNA, 909 bp, Streptococcus agalactiae
atgatttatacagtaacattaaatccatcgattgattttattgttcgtctagatacactattgttgggtagtgttaaccgtatgactagcgatgataaatatgtaggtggtaaaggaattaatgttagtcgcatattaaaacgcttaaaaattgacaatactgctacaggttttatcggtggatttacaggacattttgttgaagatggacttgtatcagaaggtatcaaaactgactttgtttctgttaatgaagatacacgtatcaacgttaaagtaaaagcaaaaattgaaactgaaatcaatggcgggggtcctaggataacaaatgaacaacttcatcgtctagagaaacttctttcgagactaacacctgaggacacagtagttttcgcaggttcagcaccagctagccttggaaataaggtctataatacattgattccaattgctaaaaagacaggagcggaagttgtttgcgattttgaaggtcagacacttttagacgctcttgcttatcagcctcttttagtaaaaccgaataaccatgaattagcagatatttttggcgtagagctagaaggtctgcctgatatcgaaaaatatgcacataagattctagataaaggagctaagaatgttatcgtttctatggcaggggatggtgcattgttagtaactccagaagcttcatattttgcaaaaccgattaagggtgaagtgaaaaattccgttggggctggtgattcaatggtagctggctttacaggagaatttgttaagtcaaaaaatccagtagaagcactaaaatggggcgtagcttgtggtacagcaaccactttctcagatgatttagcaacagctgagtttatccaagatatttataataaagttgaggtagaaaaatta

SEQ ID NO: 11338 - protein, 303 aa, Streptococcus agalactiae; identical to SEQ ID NO: 7078

SEQ ID NO: 11339 - DNA, 741 bp, Streptococcus agalactiae
atgctaaagtcaaagagaaaagaaattatcttatcacgacttgagcaaaataagagtgttactttagatgaattaacgtctatcttagagacttctgaatctacagttcgcagggatttagatgaacttgaatctgaaggttttttaaaaagggtgcatggtggtgctgaattaccatactcacttggccaggaattaagtaatcaagaaaaagctatcaaaaacgttcaaaaaaaattggatattgctagacaaactgcaaagctgatagcaaagcaagatgttatatttattgatgccggaactacgacagaattattaattgattttctccctcacgagcaattaacggtggtgacgaattctattcatcatgctgcaaagttagttgatagagggataaaaacaatcattatcggaggagcggttaaacattcaacagatgctagtattggccaggtagccattaatcagattaggcagataacggttgacaaagcttttctggggatgaatggtatagatgaagtttatttaactacaccagatttagaagaagctgctattaaagaagctattattaataatagtcaacaaacctttattctaatggattcatctaaaattggacaagttacatttgctaaagtgaaagagataaatgacattaatttagtaactaataagactgattcagaacttatgacaataataaaagagaaaatgaaggtgattcaagta

SEQ ID NO: 11340 - protein, 247 aa, Streptococcus agalactiae; identical to SEQ ID NO: 7080

SEQ ID NO: 11341 - protein, 1233 aa, Streptococcus agalactiae
ATGACGCTTCGAGAATTAACAATAGAAGAATTTAAAGAACATTCAGGAAATTATGATTCACAATCATTTTTACAAACACCTGAGATGGCTAAACTTTTAGAAAAACGCGGCTATGATGTTAGGTATTTGGGATATCAAGTAGAAAATAAACTAGAGATAATCAGTTTATCTTATATTATGCCAGTCACTGGTGGTTTTCAAATGAAAATTGATTCAGGACCAGTTCATTCAAATTCTAAGTATCTAAAACAATTTTATAAAGCATTGCAAGGCTATGCCAAATCCAACGGTGTTCTAGAATTAATAGTTGAGCCTTATGATGATTACCAATTATTCACTAGTTCGGGAGTTCCTAGTAATCAGGGAAATGATAATCTGATTGAAGATTTTACCAGTTCAGGTTATCACCATGATGGTTTAACAACTGGTTTTACTGGTAAATATTTATCTTGGCACTATGTTAAAAATTTAGAAGGTGTCACTTCTGAAACGTTACTATCTTCATTCTCTAAGACAGGACGAGCTTTGGTTAAGAAAGCAATGTCTTTTGGAATCAAGGTTCGCGTTCTTAAACGTGATGAGCTACATTTATTTAAAGAGATAACAACTTCTACGTCAAATAGACGTGATTATATGGATAAGTCCTTAGATTATTATCAAGATTTTTACGATAGCTTTGAAGGCAAGGCTGAATTTGTGATTGCCACTTTAAATTTTAGAGAATACGACCATAACTTGCAAATAAAAGCTGAAGCATTGGAAAATAAGCTTAAATTGCTTGATGAACGTTTTAGGGAAAATGCAGACTCTCCTAAGTATCATAGGCAACGCTCTGAAATAATTAATCAACTGGCTAGTTTTGAAACACGACGACAAGAAGTTCAGTCATTTATTCAAAAGTATGATAACCAAGACGTTGTTTTAGCTGGTAGTCTATTTGTTTATAGTCTTAAGGAGACAGTTTATTTCTTTTCAGGATCCTACACAGAATTTAATAAATTTTATGCACCAGCAGTTCTTCAGGAATATGTTATGCAAGAGGCTCTCAAAAGAGGTTCTACTTTCTATAACCTCCTAGGTATTCAGGGAACTTTTGATGGTTCAGATAGTATTCTTCGCTTTAAACAGAATTTTAATGGTTATATCATTCGTAAAATGGGAACTTTTAACTATTATCCAAGTCCTTTTAAATACAAAGGAATTCAGCTTCTTAAAAAGGTTTTGAAGAGAAAT

SEQ ID NO: 11342 - protein, 411 aa, Streptococcus agalactiae
MTLRELTIEEFKEHSGNYDSQSFLQTPEMAKLLEKRGYDVRYLGYQVENKLEIISLSYIMPVTGGFQMKIDSGPVHSNSKYLKQFYKALQGYAKSNGVLELIVEPYDDYQLFTSSGVPSNQGNDNLIEDFTSSGYHHDGLTTGFTGKYLSWHYVKNLEGVTSETLLSSFSKTGRALVKKAMSFGIKVRVLKRDELHLFKEITTSTSNRRDYMDKSLDYYQDFYDSFEGKAEFVIATLNFREYDHNLQIKAEALENKLKLLDERFRENADSPKYHRQRSEIINQLASFETRRQEVQSFIQKYDNQDVVLAGSLFVYSLKETVYFFSGSYTEFNKFYAPAVLQEYVMQEALKRGSTFYNLLGIQGTFDGSDSILRFKQNFNGYIIRKMGTFNYYPSPFKYKGIQLLKKVLKRN

SEQ ID NO: 11343 - protein, 1632 aa, Streptococcus agalactiae
ATGATGAAAAAAGGACAAGTAAATGATACTAAGCAATCTTACTCTCTACGTAAATATAAATTTGGTTTAGCATCAGTAATTTTAGGGTCATTCATAATGGTCACAAGTCCTGTTTTTGCGGATCAAACTACATCGGTTCAAGTTAATAATCAGACAGGCACTAGTGTGGATGCTAATAATTCTTCCAATGAGACAAGTGCGTCAAGTGTGATTACTTCCAATAATGATAGTGTTCAAGCGTCTGATAAAGTTGTAAATAGTCAAAATACGGCAACAAAGGACATTACTACTCCTTTAGTAGAGACAAAGCCAATGGTGGAAAAAACATTACCTGAACAAGGGAATTATGTTTATAGCAAAGAAACCGAGGTGAAAAATACACCTTCAAAATCAGCCCCAGTAGCTTTCTATGCAAAGAAAGGTGATAAAGTTTTCTATGACCAAGTATTTAATAAAGATAATGTGAAATGGATTTCATATAAGTCTTTTTGTGGCGTACGTCGATACGCAGCTATTGAGTCACTAGATCCATCAGGAGGTTCAGAGACTAAAGCACCTACTCCTGTAACAAATTCAGGAAGCAATAATCAAGAGAAAATAGCAACGCAAGGAAATTATACATTTTCACATAAAGTAGAAGTAAAAAATGAAGCTAAGGTAGCGAGTCCAACTCAATTTACATTGGACAAAGGAGACAGAATTTTTTACGACCAAATACTAACTATTGAAGGAAATCAGTGGTTATCTTATAAATCATTCAATGGTGTTCGTCGTTTTGTTTTGCTAGGTAAAGCATCTTCAGTAGAAAAAACTGAAGATAAAGAAAAAGTGTCTCCTCAACCACAAGCCCGTATTACTAAAACTGGTAGACTGACTATTTCTAACGAAACAACTACAGGTTTTGATATTTTAATTACGAATATTAAAGATGATAACGGTATCGCTGCTGTTAAGGTACCGGTTTGGACTGAACAAGGAGGGCAAGATGATATTAAATGGTATACAGCTGTAACTACTGGGGATGGCAACTACAAAGTAGCTGTATCATTTGCTGACCATAAGAATGAGAAGGGTCTTTATAATATTCATTTATACTACCAAGAAGCTAGTGGGACACTTGTAGGTGTAACAGGAACTAAAGTGACAGTAGCTGGAACTAATTCTTCTCAAGAACCTATTGAAAATGGTTTAGCAAAGACTGGTGTTTATAATATTATCGGAAGTACTGAAGTAAAAAATGAAGCTAAAATATCAAGTCAGACCCAATTTACTTTAGAAAAAGGTGACAAAATAAATTATGATCAAGTATTGACAGCAGATGGTTACCAGTGGATTTCTTACAAATCTTATAGTGGTGTTCGTCGCTATATTCCTGTGAAAAAGCTAACTACAAGTAGTGAAAAAGCGAAAGATGAGGCGACTAAACCGACTAGTTATCCCAACTTACCTAAAACAGGTACCTATACATTTACTAAAACTGTAGATGTGAAAAGTCAACCTAAAGTATCAAGTCCAGTGGAATTTAATTTTCAAAAGGGTGAAAAAATACATTATGATCAAGTGTTAGTAGTAGATGGTCATCAGTGGATTTCATACAAGAGTTATTCCGGTATTCGTCGCTATATTGAAATT

SEQ ID NO: 11344 - protein, 544 aa, Streptococcus agalactiae; identical to SEQ ID NO: 7084

SEQ ID NO: 11345 - protein, 921 aa, Streptococcus agalactiae; identical to SEQ ID NO: 7085

SEQ ID NO: 11346 - protein, 307 aa, Streptococcus agalactiae; identical to SEQ ID NO: 2520

SEQ ID NO: 11347 - protein, 1068 aa, Streptococcus agalactiae; identical to SEQ ID NO: 7087

SEQ ID NO: 11348 - protein, 356 aa, Streptococcus agalactiae; identical to SEQ ID NO: 2522

SEQ ID NO: 11349 - protein, 408 aa, Streptococcus agalactiae
GTGGATATACTAAAGGCATCAGGTGTTAGAATTTTAACCCCTTATGTCCCAATTTGTTTAAATGGAGATAGTCAGAGAGTTAGCAGCTTGGTCGTTCAAAAAGTTAAAGGTGATGAAGTAATTGAATTACCTTTAGACAACTTGATTGTTAGTTTTGGCTTTTCTACTTCTAATAAAAATTTACGTTATTGGAATTTGGATTATAAACGGTCTAGTATCAATGTTTCTTCACTTTTTGAGACGACTCAAGAAGGCGTGTATGCTATTGGAGATGCTGCTAATTATCCAGGAAAGGTAGAATTGATTGCAACAGGATATGGGGAAGCACCAGTCGCTATAAACCAAGCTATCAATTATATTTATCCTGATCGAGATAACCGTGTAGTCCATTCAACATCATTGATAAAA

SEQ ID NO: 11350 - protein, 136 aa, Streptococcus agalactiae
MDILKASGVRILTPYVPICLNGDSQRVSSLVVQKVKGDEVIELPLDNLIVSFGFSTSNKNLRYWNLDYKRSSINVSSLFETTQEGVYAIGDAANYPGKVELIATGYGEAPVAINQAINYIYPDRDNRVVHSTSLIK

SEQ ID NO: 11351 - DNA, 726 bp, Streptococcus agalactiae
  misc_feature 717, 718, 719, 720, 721: n = A,T,C or G
atgctcttagacgaccttactacccacttagatattgacactattgcatggttaacgaattttttgaaaaatagtaaaaagacagtgctttttataactcatgatcgttattttctagacaatgttgcaacacgtatttttgaattagataaggcacagattacagaatatcaaggcaattatcaggattatgtccgacttcgtgcagaacaagacgagcgtgatgctgctagtttacataaaaagaaacagctttataaacaggaactagcttggatgcgtactcagccacaagctcgtgcaacgaaacaacaggctcgtattaatcgttttcaaaatctaaaaaacgatttacaccaaacaagcgatacaagcgatttggaaatgacatttgaaacaagtcgaattgggaaaaaggttattaattttgaaaatgtctctttttcttacccagataaatctatcttgaaagactttaatttgttaattcaaaataaagaccgtattggcatcgttggagataatggtgttggaaagtcaaccttacttaatttaattgttcaagatttacagccggattcgggtaatgtctctattggtgaaacgatacgtgtaggttacttttcacaacaacttcataatatggatggctcaaaacgtgttattaattatttgcaagaggttgcagatgaggttaaaaatagtgtcggtacaacnnnnnttaat

SEQ ID NO: 11352 - protein, 242 aa, Streptococcus agalactiae
  VARIANT 240, 241: Xaa = Any Amino Acid
MLLDDLTTHLDIDTIAWLTNFLKNSKKTVLFITHDRYFLDNVATRIFELDKAQITEYQGNYQDYVRLRAEQDERDAASLHKKKQLYKQELAWMRTQPQARATKQQARINRFQNLKNDLHQTSDTSDLEMTFETSRIGKKVINFENVSFSYPDKSILKDFNLLIQNKDRIGIVGDNGVGKSTLLNLIVQDLQPDSGNVSIGETIRVGYFSQQLHNMDGSKRVINYLQEVADEVKNSVGTTXXN

SEQ ID NO: 11353 - DNA, 270 bp, Streptococcus agalactiae
  misc_feature 257, 258, 259, 260, 261: n = A,T,C or G
atgaacaaaacaatttatgatatcactattgtaggaggcggaccagtaggtctctttgctgctttttatgctggactacgcggagtatccgttaaaattattgaaagcctttcggaattaggaggccagccagctatcctttatcctgagaaaaaaatctatgatattcctggttatccggtgattactggacgtgaattaattgataaacatattgaacaattagagagatttaaagattctattaaaatctgttnnnnnttaattaat

SEQ ID NO: 11354 - protein, 90 aa, Streptococcus agalactiae
  VARIANT 86, 87: Xaa = Any Amino Acid
MNKTIYDITIVGGGPVGLFAAFYAGLRGVSVKIIESLSELGGQPAILYPEKKIYDIPGYPVITGRELIDKHIEQLERFKDSIKICXXLIN

SEQ ID NO: 11355 - DNA, 753 bp, Streptococcus agalactiae
atgatgaagattgatattttaactttatttcctgaaatgtttgcccctctggaacattctatagttggtaaggcaaaagaaagaggacttcttgaaattaattatcacaatttcagagaaaatgctgagaagtctcgacatgttgatgatgagccttacggtggggggcaagggatgcttttacgtgctcaacctatttttgatacaattgataaaatagatgctcaaaaagcacgtgttattttgctagacccagcgggcagaacatttgatcaggattttgcagaagaactatccaaagaagatgaattaatttttatttgtggtcactatgaaggttatgatgaacgtataaaatcattagtaacagacgaagtatctttgggagattttgttcttacgggaggagaattggcggctatgacaatggtcgatgctaccgttcgtctgattccagaagttataggtaaagaaacaagtcatcaggatgattcattttcatcgggcctattagaatatcctcagtatacgcgcccatatgattatttaggcatgacagttcctgatgttctcatgagtggtcatcatgaaaatatccgaaaatggcgtttagaacaaagtttgcgaaaaacactagaacgtcgaccagatttgttagaaaattatgcaatgacggatgaagagagacttatcttagagaaaattaaaacagaaatagaaagaacagatacagtaaatgaacaaaacaattta

SEQ ID NO: 11356 - protein, 251 aa, Streptococcus agalactiae; identical to SEQ ID NO: 2526

SEQ ID NO: 11357 - DNA, 297 bp, Streptococcus agalactiae
atgatatttgaaaaatataaaggtttcacactgaaggtggcagaggatcaactgagcgaccttaaagatggtgaattttattatcatgaaattattggcttagatgtctatgaagggraagagctgattggaaaaatcaaagaawttttacaaccaggagcaaatgacgtttgggttgtggaacgtcatggaaaacgtgatcttttattaccctatatcccgccagtagtattagaagtggacctttctaatcagcgtgttcaagttgaattgatggaaggtttagatgatgaagat

SEQ ID NO: 11358 - protein, 99 aa, Streptococcus agalactiae
  VARIANT 40, 49: Xaa = Any Amino Acid
MIFEKYKGFTLKVAEDQLSDLKDGEFYYHEIIGLDVYEGXELIGKIKEXLQPGANDVWVVERHGKRDLLLPYIPPVVLEVDLSNQRVQVELMEGLDDED

SEQ ID NO: 11359 - DNA, 399 bp, Streptococcus agalactiae
atgcgttggttcgaatccagctaccccagtttcacatggtccgttggtcaaggggttaagacaccgccttttcacggcggtaacacgggttcgaatcccgtacggactatcgtggccagttgcattttagcggctggtttttcttttattttcaaaaatatcggagttactatggaatactttaacgttggaaaaattgtcaatacacaaggattacaaggcgaaatgcgtgtattaagcgtgactgactttgtagaagaacgctttaaaaaaggtcaagtgttagctttattcgatgaaaagaatcagtttgttatggatattgaaattgctagtcattgtaagcagaagaattttgacattataaaattcaaaggaatgtatcatattaatgatatt

SEQ ID NO: 11360 - protein, 133 aa, Streptococcus agalactiae
MRWFESSYPSFTWSVGQGVKTPPFHGGNTGSNPVRTIVASCILAAGFSFIFKNIGVTMEYFNVGKIVNTQGLQGEMRVLSVTDFVEERFKKGQVLALFDEKNQFVMDIEIASHCKQKNFDIIKFKGMYHINDI

SEQ ID NO: 11361 - protein, 1401 aa, Streptococcus agalactiae
TTGAGTGAAAAGATTTTACAAGGTCTTATTTCGGAACTACAAATACTTTATTCTGATTTCTACCTTGTTGTCAAAAGTAGAACAATGGTATTGTTCCATTACGAAACACTTTCTAAGCTAGAGACTTTGCATACCATTTATCGAGAGTCTAATATGTTACAGTTTTTGGCATATTTTATTGCTCCTCAAAATGTCAGTTTTTCTGAATTCACGGCTAAGAAATTCATATCCGTCGCAAGTGCCTACCGAATAAAGAAAAACTGTAAACTTTATTTGGAGAGTGTTAAGTTATCAATACAAAAAAATAAAGTGACAGGTCCAGAATATCAGATTAGACTGCTGATTGCTTTGTTACAGTATCATTTTGGTTTTATTATTTATCCTTTTGATGCTACAAGTGAGGTAATGATAAGGGATTTTATTGAATACTCGAATTTTAAAGGGTGTGACTACGACCTTAAAGACTTATCTGAAGAATATTACTATTTTTATATTTTGGTGAATTTAGTTTGGAAAAGAAAAGAATATAAAGTAGAAATTCCTCAAACAGAATCCTTTAATCAACTAAAAAAATCTATTCTCTACATGGAGTTATCCAAAGCAGCTCAAAAGAGTATTGCTATACATCTTGATATAGAGTTGAATGAAGGTTTACTTGATTATCTATATTTAGTGTTTTGTATTAGTGATGGTCCTCTATTTAGCAATCGAGATGATATCAATGTCAACGAAGAATTTATTTTTGCTTCTTATAAGATATCAAAGTCAAAAGCCTTTAAGAATTTTTGTGGTCGATTATTGGGTAGAGAATTTATTGACTCGCAGCATTTTAAAGATATTAATGCCTATTTTTTGAGACATTTTATTTGTTATTGTTATTATTTTATTCCTGATTTTTATTTTTTAAATACATCAAGGCTGAGCTATTCTAAGGATTTATATCACCTATTAGATAAAGGTCTGGCTGATATTTTTAACCTGAAGGGAGGGAATTTAACTTTTTCAAAACATGAGACAGTGCTACTAACAATGCAATTATCTAACTTAATAGAGACTTTCTTAGCTCCTCTTTCTGTATATGTAATTTCATCTAGTAATATTAGATTACAAACCTATCAAGTAATGTTAAACCAATATTTTACATCTAAGATAGCGGAATTCTTTTTTGTAAACTATCAAACGACTCAGATAGATGAAAAATTACTAAAAAAAGCAGATATCATTATTGCTGAGAGACGCTATATATCTTCTTTAAAAAATGACTCAGGTGTGGCTATACAAGATATATTAGAAATTGGGATGAATAATAAGCAGTACCATGAACTACTTTTACAAGCTATTATCGAAAAAAGGGACCAAAAAGTTTTTGAATATATTTCAAAAATGAAACATAAAATACTT

SEQ ID NO: 11362 - protein, 467 aa, Streptococcus agalactiae
MSEKILQGLISELQILYSDFYLVVKSRTMVLFHYETLSKLETLHTIYRESNMLQFLAYFIAPQNVSFSEFTAKKFISVASAYRIKKNCKLYLESVKLSIQKNKVTGPEYQIRLLIALLQYHFGFIIYPFDATSEVMIRDFIEYSNFKGCDYDLKDLSEEYYYFYILVNLVWKRKEYKVEIPQTESFNQLKKSILYMELSKAAQKSIAIHLDIELNEGLLDYLYLVFCISDGPLFSNRDDINVNEEFIFASYKISKSKAFKNFCGRLLGREFIDSQHFKDINAYFLRHFICYCYYFIPDFYFLNTSRLSYSKDLYHLLDKGLADIFNLKGGNLTFSKHETVLLTMQLSNLIETFLAPLSVYVISSSNIRLQTYQVMLNQYFTSKIAEFFFVNYQTTQIDEKLLKKADIIIAERRYISSLKNDSGVAIQDILEIGMNNKQYHELLLQAIIEKRDQKVFEYISKMKHKIL

SEQ ID NO: 11363 - protein, 249 aa, Streptococcus agalactiae
ATGGATACCATTGAAAATCTCATTATTGCTATTGTGAAACCTTTGATTTCACAACCAGATCAGTTAACCATAAAAATTCAGGATGGCCCAGAATTTTTAGAGTACCATCTTGATTTAGATACCCAAGACATCGGTCGTGTTATCGGCAAAAAGGGTCGTACAATTACAGCGATAAGGTCGATTGTCTATTCGGTACCAACACAAGGGAAAAAAGTAAGACTCATCATTGATGAGAAAGAATATTTATTC

SEQ ID NO: 11364 - protein, 83 aa, Streptococcus agalactiae
MDTIENLIIAIVKPLISQPDQLTIKIQDGPEFLEYHLDLDTQDIGRVIGKKGRTITAIRSIVYSVPTQGKKVRLIIDEKEYLF

SEQ ID NO: 11365 - protein, 270 aa, Streptococcus agalactiae
ATGGCAGTAAAAATCCGTTTAACTCGTATGGGTTCTAAGAAGAAACCTTTCTACCGTATCAATGTTGCAGATTCACGTGCACCACGTGACGGACGTTTTATTGAAACTGTTGGAACATACAACCCATTAGTTGCAGAAAACCAAGTTACAATCAAAGAAGAACGTGTTCTTGAATGGTTATCAAAAGGTGCACAACCTTCAGATACAGTTCGTAACCTTCTTTCAAAAGCTGGAGTTATGACTAAATTCCACGATCAAAAATTCTCAAAA

SEQ ID NO: 11366 - protein, 90 aa, Streptococcus agalactiae; identical to SEQ ID NO: 2534

SEQ ID NO: 11367 - protein, 1245 aa, Streptococcus agalactiae
ATGGAAAATTGGAAATTTGCCCTATCATCGATTCTAGGGCACAAGATGCGTGCTTTTCTGACCATGTTAGGGATTATCATTGGGGTTGCATCAGTTGTGTTAATTATGGCCTTAGGTAAGGGCATGAAAGATTCGGTTACAAATGAGATTACAAAGTCTCAGAAGAACCTTCAGATTTATTATAAAACAAAAGAAGACCAAAAAAATGAGGATAACTTTGGAGCTCAAGGGGCTTTCATGCAAAGTAGTGATACCAACCGTAAGGAACCAATTATTCAAGAATCATGGTTAAAAAAGATTGCTAAGGAAGTAGATGGTGTTAGTGGCTACTATGTAACTAATCAAACAAATGCTCCAGTAGCTTACCTTGAAAAAAAGGCAAAGACGGTTAATATAACAGGAATTAACCGCACTTACCTTGGTATCAAAAAGTTCAAAATTAAAAGTGGTCGTCAATTCCAAGAGGAGGATTATAACCAATTCTCGAGAGTTATTTTACTAGAAGAAAAATTAGCTCAGAGATTATTTCAGACAAATGAAGCAGCGTTAAATAAAGTGGTGACTGTAAAAAATAAATCTTACTTAGTAGTGGGGGTTTATTCGGATCCAGAAGCTGGTTCAGGTTTATATGGAAGTAATTCTGATGGGAATGCTATTTTAACCAATACACAGTTAGCTTCGGAGTTTGGTGCTAAAGAAGCAGAAAACATATATTTTCATCTTAATGATGTATCGCAATCCAATCGCATTGGTAAAGAAATAGGCAAACGTTTAACAGACATTAGTCATGCTAAGGATGGGTACTATGATAATTTTGACATGACATCTATAGTTAAATCTATCAATACCCAAGTTGGTATTATGACAGGTGTTATTGGAGCGATTGCAGCAATTTCTCTCCTAGTTGGTGGTATCGGAGTGATGAATATTATGTTAGTCTCTGTAACTGAGCGCACGAGAGAAATTGGCCTTCGTAAAGCCCTTGGGGCAACTCGACGTAAAATTTTAGCTCAATTTTTAATTGAATCAATGGTCTTAACGATTTTGGGTGGGTTAATTGGGTTATTACTAGCCTATGGAGGTACGATGTTAATTGCTAATGCGCAAGATAAGATTACTCCTTCTGTGTCACTTAACGTGGCTATAGGCAGTTTAATTTTCTCAGCATTTATTGGAATTATATTTGGTTTATTACCTGCTAATAAAGCTAGCAAATTAAACCCAATTGATGCTTTACGATATGAA

SEQ ID NO: 11368 - protein, 415 aa, Streptococcus agalactiae
MENWKFALSSILGHKMRAFLTMLGIIIGVASVVLIMALGKGMKDSVTNEITKSQKNLQIYYKTKEDQKNEDNFGAQGAFMQSSDTNRKEPIIQESWLKKIAKEVDGVSGYYVTNQTNAPVAYLEKKAKTVNITGINRTYLGIKKFKIKSGRQFQEEDYNQFSRVILLEEKLAQRLFQTNEAALNKVVTVKNKSYLVVGVYSDPEAGSGLYGSNSDGNAILTNTQLASEFGAKEAENIYFHLNDVSQSNRIGKEIGKRLTDISHAKDGYYDNFDMTSIVKSINTQVGIMTGVIGAIAAISLLVGGIGVMNIMLVSVTERTREIGLRKALGATRRKILAQFLIESMVLTILGGLIGLLLAYGGTMLIANAQDKITPSVSLNVAIGSLIFSAFIGIIFGLLPANKASKLNPIDALRYE

SEQ ID NO: 11369 - protein, 708 aa, Streptococcus agalactiae
GTGACAACTAATCGAAAAGAACTGATTAGATTGCATCAGATTGTTAAAAGTTATCAAAATGGGGATCAAAAACTTCAAGTCTTAAAGAACATTGATTTGACGGTTTATGAAGGTGAATTTCTTGCAATCATGGGGCCATCTGGTTCGGGGAAATCCACACTAATGAATATTATTGGCTTGTTGGATTCCCCAACTTCAGGAGATTATAGTTTAAATGGTAAACGTGTCGAAGAACTAAGTCAAACAAAATTAGCTCAAGTTCGAAATAAGGAAATCGGTTTTGTCTTTCAACAATTTTTCTTGTTATCTAAACTAACGGCTTTGCAAAATGTTGAATTACCCTTAATTTATGCGGGTGTAGCTCCTAAAAAGCGTAAAAATTTAGCAAAACAATTTTTAGATAAAGTTGAATTAAGAGAGCGTATGAACCATCTGCCAACAGAATTATCTGGGGGACAGAAGCAACGTGTAGCAATCGCGCGTGCTTTGGTGAATAGCCCATCTATTATTCTAGCAGATGAGCCGACTGGTGCCTTGGATACAAAGACGGGTGAGCAAATTATGCAGTTCCTAACGGAATTAAATCAAGAAGGTAAAACCATTATCATGGTAACTCATGAACCAGAAATCGCCGATTATGCGACACGTAAAATTGTTATTCGTGATGGCGAAATTACAGCAGATACTACTGATAGTATTAGAATTGAT

SEQ ID NO: 11370 - protein, 236 aa, Streptococcus agalactiae
MTTNRKELIRLHQIVKSYQNGDQKLQVLKNIDLTVYEGEFLAIMGPSGSGKSTLMNIIGLLDSPTSGDYSLNGKRVEELSQTKLAQVRNKEIGFVFQQFFLLSKLTALQNVELPLIYAGVAPKKRKNLAKQFLDKVELRERMNHLPTELSGGQKQRVAIARALVNSPSIILADEPTGALDTKTGEQIMQFLTELNQEGKTIIMVTHEPEIADYATRKIVIRDGEITADTTDSIRID

SEQ ID NO: 11371 - DNA, 234 bp, Streptococcus agalactiae
gtgacaaacaaagataataaacactttgtttgggtatacaatgattctaatcgtaaaatttccaaagttgaagtcaaaattggtaaagctgatgctaagacacaagaaattttatcaggtttgaaagcaggacaaatcgtggttactaatccaagcaaaactttcaaggatgggcaaaaaattgataatattgaatcaatagatcttaagtctaataagaaatcagaggtgaaa

SEQ ID NO: 11372 - protein, 78 aa, Streptococcus agalactiae
MTNKDNKHFVWVYNDSNRKISKVEVKIGKADAKTQEILSGLKAGQIVVTNPSKTFKDGQKIDNIESIDLKSNKKSEVK

SEQ ID NO: 11373 - DNA, 732 bp, Streptococcus agalactiae
atgagtaaacgacaaaatttaggaattagtaaaaaaggagcaattatatcagggctctcagtggcactaattgtagcagtaggtggctttttatgggtacaatctcaacctaataagagtgcagtaaaaactaactacaaagtttttaatgttagagaaggaagtgtttcgtcctcaactcttttgacaggaaaagctaaggctaatcaagaacagtatgtgtattttgatgctaataaaggtaatcgagcaactgttacagttaaagtgggtgataaaatcacagctggtcagcagttagttcaatatgatacaacaactgcacaagcagcctacgacactgctaatcgtcaattaaataaagtagcgcgtcagattaataatctaaagacaacaggaagtcttccagctatggaatcaagtgatcaatcttcatcatcatcacaaggacaaggggctcaatcgactagtggtgcgacgaatcgtctacagcaaaattatcaaagtcaagctaatgcttcatacaaccaacaacttcaagatttgaatgatgcttatgcagatgcacaggcagaagtaaataaagcacaaaaagcattgaatgatactgttattacaagtgacgtatcagggacagttgttgaagttaatagtgatattgatccagcttcaaaaactagtcaagtacttgtccatgtagcaactgagggtaaactcccagtacaggaacga

SEQ ID NO: 11374 - protein, 244 aa, Streptococcus agalactiae
MSKRQNLGISKKGAIISGLSVALIVAVGGFLWVQSQPNKSAVKTNYKVFNVREGSVSSSTLLTGKAKANQEQYVYFDANKGNRATVTVKVGDKITAGQQLVQYDTTTAQAAYDTANRQLNKVARQINNLKTTGSLPAMESSDQSSSSSQGQGAQSTSGATNRLQQNYQSQANASYNQQLQDLNDAYADAQAEVNKAQKALNDTVITSDVSGTVVEVNSDIDPASKTSQVLVHVATEGKLPVQER

SEQ ID NO: 11375 - DNA, 1596 bp, Streptococcus agalactiae
atgctaaatacaaaggataaacagcctattttgcttattattttcggacagaaaatgaaagaatatgacgatttaattagatcaactgttgagaggttatctaaaagggatagacctgttagtattcttatctcgaaggagctaaaccatgtgattcaccattatgatgcacaatttgaaaatcttgagacgcttgtggggtatataaatacacatgaagatagtttgatttaccccctttgcttagataaaaatcatgagctatttcaagagtttttagtgtggcagagtcattattcaaggcagtatatcagtgataatttatcagaaaaaagtgttcaggcaatagacaataatcaagacttcgtgcaagtagattgtttagtaatgagagactctttgaataattgtttatatgtttctgatttagaatatattgaatctaataaaacaactgggaagtctctagcgattgtaccaagtcaaactttatccgatgctgctaggcaaacaattcgagatgttgcatttgatgtgtgtcgaaaagcaaacattattggagtatgttactttagtttcttaatagatttgaacagtttggattatcatataattagcttatcatctggtttgtcttatcaaagcattttatttgagactattacgacctatcctgttttagagatagcaactaaattgacagtgggatatacttttagtcaactgaagcattcttattacccaaatacctctgcctttttagagccacaattagactatgtagctgccgtatcttttagttttgaaaaagttgattatatcttttttgctcgtaatatagagcaattatttttaaatttactcgaggctagcagttatgatcattttccatttctgagtgatattagcgaggaagatttgatgtttgctttgattcagaaaaaagaaaatcgtctagcttatcttttagaggcttttagacgtggctttgatttgtatgatttatcctcagttactaaaatcaaccctttttacttagataaatgtttacatattgtagagttgtatgaaaacctgaataaaagccaatataatgtagatatttacaaggaagctaaaaggtatggtttttcggatgactatattgctaatagttggcaaatctctttgatagacatgttagaatatcgaaaaaaacatagtgttgcacctgttctaaagcaagtcgaacaaagttctggtgttctaactggccatcaaattcagtattttcgaagctatgattggcattcagactacatttctagcggttgtcaaaaggctttgataatggtagacaagggttattccctagtaaaattaaatgagttaattaagcaaatcaaacaaactcgtttagaattattaattgttaccaatcaacctctcctcatagaacaattaaatgatacatctataatttttgacactataggtattgagaccatattaacaattatgggtatagaagaggtggaagaagtgtatttattgggagaaagtcaagcagacatgttttcaaaaatgaaaaatttttctatctcttgtcagtctatt

SEQ ID NO: 11376 - protein, 532 aa, Streptococcus agalactiae
MLNTKDKQPILLIIFGQKMKEYDDLIRSTVERLSKRDRPVSILISKELNHVIHHYDAQFENLETLVGYINTHEDSLIYPLCLDKNHELFQEFLVWQSHYSRQYISDNLSEKSVQAIDNNQDFVQVDCLVMRDSLNNCLYVSDLEYIESNKTTGKSLAIVPSQTLSDAARQTIRDVAFDVCRKANIIGVCYFSFLIDLNSLDYHIISLSSGLSYQSILFETITTYPVLEIATKLTVGYTFSQLKHSYYPNTSAFLEPQLDYVAAVSFSFEKVDYIFFARNIEQLFLNLLEASSYDHFPFLSDISEEDLMFALIQKKENRLAYLLEAFRRGFDLYDLSSVTKINPFYLDKCLHIVELYENLNKSQYNVDIYKEAKRYGFSDDYIANSWQISLIDMLEYRKKHSVAPVLKQVEQSSGVLTGHQIQYFRSYDWHSDYISSGCQKALIMVDKGYSLVKLNELIKQIKQTRLELLIVTNQPLLIEQLNDTSIIFDTIGIETILTIMGIEEVEEVYLLGESQADMFSKMKNFSISCQSI

SEQ ID NO: 11377 - DNA, 1068 bp, Streptococcus agalactiae
atggcaaaaaaattgttaattctagaggatggtacggtttttgaaggactatcctttggttcatctcttgatgtaactggcgaattagttttttgtacggggaataccggctatcaggaaataataacgaatccttcacataatggaaaaattttagtttttacctcaccgctaataggaaattatggtattcatcgcagttactctgaagccattattcccacttgtttaggagttgttgttgcagagtattccagatgtgtaagtagcgatactagcaagatgaatctagatgaatttttgaaaatgaaaaaggttcctgcaatgtcgggggtcgatacaaggtatttgatgcaagttattaaagaaaaaggatttgtaaaagctactttagcagaagcaggtgatgttttatcacatttacaagatcaattaatagcgacagtattaccgacaaataatgtggaacaagtttcgacaaaaacagcttatccgtcgcctgctagcggccgaaatattgttgtacttgattttggccttaaacattctattttgagagaattgtctaaacgtcagtgtgacgtgactgtcattccctacaatacgtctttagaaggtattaaaaatctatacccagaaggtatcatattatctaatggtccggggaatccagaaaagcttcaggaagtcttaaacactattaaagaattacaaaaatctgttcctatgttaggcattggtttggggcatcaattaattgccatggcaaatggtgcagaaattatgagactcccagttgctaagaaggggccaaattatcccatgagagatattgctacgggtcgtttagaaacagttagtcagtttaatcattttaccgttaaccggctaaatcttccgcatgatttactggtaacacacgaaggtttgaatgatcaagagattgttgctctaaggcaccgctcatttccagtgatgtctgtgcaattttacccagaggctgctccaggccctcatgatgtgacctatttttttgatgaatttttagaaatgattggatcacgcgct

SEQ ID NO: 11378 - protein, 356 aa, Streptococcus agalactiae
MAKKLLILEDGTVFEGLSFGSSLDVTGELVFCTGNTGYQEIITNPSHNGKILVFTSPLIGNYGIHRSYSEAIIPTCLGVVVAEYSRCVSSDTSKMNLDEFLKMKKVPAMSGVDTRYLMQVIKEKGFVKATLAEAGDVLSHLQDQLIATVLPTNNVEQVSTKTAYPSPASGRNIVVLDFGLKHSILRELSKRQCDVTVIPYNTSLEGIKNLYPEGIILSNGPGNPEKLQEVLNTIKELQKSVPMLGIGLGHQLIAMANGAEIMRLPVAKKGPNYPMRDIATGRLETVSQFNHFTVNRLNLPHDLLVTHEGLNDQEIVALRHRSFPVMSVQFYPEAAPGPHDVTYFFDEFLEMIGSRA

SEQ ID NO: 11379 - DNA, 519 bp, Streptococcus agalactiae
atgaaaagaaaagaaattattgatgatgtgaccatgaaacgtgctattacacgtattacctacgaaattatagaacgtaacaaaaatttagataatattgtcttagcaggcattaaaacaagaggtgtttttttagccaaacgcattcaagaacgcttgaagcaattagaaaatttagatattcccgttggagaattggatactaaacctttccgtgatgatatgaaagttgaagttgacaccacaactatgccagttgacatcactgataaagatattatattaattgatgatgttctctatacaggtcgcactattcgagctgctattgataatcttgttagtttggggcgtccgagtcgtgtcagtttagctgtattaattgaccgtgggcatcgtgaactacccattcgtgcagattatgtggggaaaaatattccaacaagtcaatttgaagaaattctagttgaagtgatggaacatgatggttacgatcgtgtgagtattattgatccgagt

SEQ ID NO: 11380 - protein, 173 aa, Streptococcus agalactiae; identical to SEQ ID NO: 2546

SEQ ID NO: 11381 - protein, 888 aa, Streptococcus agalactiae
ATGGAAATCACAATTAAAATAGCAGGAGTTAGGCTAGATAAAGCTTTAGCTGATAATTCTGAACTGTCGCGTAGTCAAGCTAATGAAGAAATTAAAAAAGGGATTGTGTTAGTAAATGGACAAGTAAAAAAAGCGAAATATACTGTTCAAGAAGGAGATCGGATTACTTTTGATATTCCTAAAGAGGAAGTACTAGATTATCAAGCTGAGAATATCCCTTTAGATATTATCTATCAAGATGATGACGTTGCTGTGGTTAATAAGCCGCAAGGAATGGTTGTTCACCCTTCTGCAGGCCACAGTTCGGGCACCTTAGTTAACGCCTTGATGTATCATATTAAGGATTTATCATCAATTAATGGCGTTGTTCGCCCAGGGATCGTTCATCGTATTGATAAAGATACTTCTGGTTTATTGATGGTTGCAAAAAATGATAGAGCTCACCAAGTGTTGGCTGAAGAGTTAAAAGATAAAAAATCGCTTCGTAAATATTTAGCAATTGTGCATGGTAATTTACCAAATGATCGAGGTGTGATTGAGGCTCCGATTGGTAGAAGCGATAAAGATCGTAAGAAGCAAGCAGTGACTGCTAAAGGTAAGCCAGCAATAACTCGTTTTCATGTTTTAGAACGTTTTGGTGATTATACCTTAGTTGAATTGTCATTGGAGACAGGTCGAACACACCAAATTCGGGTTCATATGGCTTATATTGGCCATCCTCTAGCCGGTGATCCTGTCTACGGTCCCCGTAAGACTTTAGGGGGTAAAGGACAGTTTTTGCATGCACAAACACTAGGTTTTACGCACCCAAGTAACGGAGAGAATTTGATTTTTTCAGTAGAGGTTCCGGAAATTTTTCAGACAACCTTAGACAAGTTGAGAAAAAAT

SEQ ID NO: 11382 - protein, 296 aa, Streptococcus agalactiae
MEITIKIAGVRLDKALADNSELSRSQANEEIKKGIVLVNGQVKKAKYTVQEGDRITFDIPKEEVLDYQAENIPLDIIYQDDDVAVVNKPQGMVVHPSAGHSSGTLVNALMYHIKDLSSINGVVRPGIVHRIDKDTSGLLMVAKNDRAHQVLAEELKDKKSLRKYLAIVHGNLPNDRGVIEAPIGRSDKDRKKQAVTAKGKPAITRFHVLERFGDYTLVELSLETGRTHQIRVHMAYIGHPLAGDPVYGPRKTLGGKGQFLHAQTLGFTHPSNGENLIFSVEVPEIFQTTLDKLRKN

SEQ ID NO: 11383 - protein, 462 aa, Streptococcus agalactiae
ATGAGAAAGATTATTATACCAATAATAACTATTTTGTTGATTGCTTTAGATCAACTATCTAAGTTATGGATTGTTAAACATATTGAACTAAACCAAATTAAGGAATTCATTCCAAATATCGTTAGTCTAACTTATCTGAGAAATTATGGTGCTGCATTTTCTATTTTGCAAAATCAACAATGGCTTTTTACCTTAATTACAATCTTTGTTGTTTGTGTTGCTATTATTTATTTGATGAAACATATTAATGGAAGTTATTGGTTATTAATTTCTCTAACCTTAATCATCTCTGGTGGATTAGGAAACTTTATAGATCGCTTAAGATTGGGTTATGTCGTTGATATGGTGCATTTAGATTTTATTAATTTTGCTATCTTTAATGTAGCAGACTCATATCTGACAATTGGTATTATTTGCTTAATGATTGCACTTTGGAAAGAGGAAAGTAATGGAAATCACAAT

SEQ ID NO: 11384 - protein, 154 aa, Streptococcus agalactiae
MRKIIIPIITILLIALDQLSKLWIVKHIELNQIKEFIPNIVSLTYLRNYGAAFSILQNQQWLFTLITIFVVCVAIIYLMKHINGSYWLLISLTLIISGGLGNFIDRLRLGYVVDMVHLDFINFAIFNVADSYLTIGIICLMIALWKEESNGNHN

SEQ ID NO: 11385 - protein, 903 aa, Streptococcus agalactiae
ATGAATATTCAACAACTGCGTTATGTTGTTGCTATCGCAAATAGTGGTACTTTTCGTGAAGCAGCTGCAAAACTATTTGTTAGTCAGCCAAGTTTATCTGTTGCCGTTCGTGATTTGGAAACAGAATTAGGGTTTCAGATTTTTACGCGTACAACTACTGGTGCAGTGTTGACCAATCAAGGCATGACTTTTTATGAGAATGCTTTAGAAGTTGTGAAAAGCTTTGATTCATTCGAAAAACAGTTTTCGCAATCTGAAGCTACAGAGCAAGAATTCTCAATAGCAAGTCAACATTATGATTTTCTACCTCCTTTAATCACAGCGTTTTCAAAATGTAATGATAATTTTAGCTATTTCCGTATTTTCGAATCAACAACAATACGTATCTTAGATGAAGTTGCTCAAGGGAATAGCGAAATAGGTATCATTTATATCAATAGTCAAAATAAAAAAGGTTTACTTCAGCGGTTGGACAAATTGGGGTTAGAGTTTGTAGAGCTTATTCCTTTTAAAACTCATATTTATCTTGGGAAAGACCATCCCTTGGCTAGTAAAACATCTCTGATAATGACAGATTTAGAAGGATTACCAACCGTACGTTTTACACAGGATAGAGATGATTATCGGTATTACTCGGAGAATTTTGTGGAAGTACTTGATAGTTCTGTTACCTATAATGTTACTGATAGAGCAACATTAAATGGTATTTTAGAAAGAACCCAAGCTTATGCGACGGGCTCAGGATTCTTGGATAGCCGCAGTGTGAATGGTATCACTGTTATTCCATTAGAAGATCATCTAGATAACCAAATGATTTATATCAAACGAAAAGATCGTAATTTATCTCAGATGGCTTTAAAATTTGTTGCTGTTATGGAAGAGTATTTTAAGGGATTTAATTCA

SEQ ID NO: 11386 - protein, 301 aa, Streptococcus agalactiae; identical to SEQ ID NO: 2552

SEQ ID NO: 11387 - protein, 291 aa, Streptococcus agalactiae; identical to SEQ ID NO: 7127

SEQ ID NO: 11388 - protein, 97 aa, Streptococcus agalactiae; identical to SEQ ID NO: 2554

SEQ ID NO: 11389 - protein, 336 aa, Streptococcus agalactiae
ATGATTAAAGCAACTTTTACTCGTAATCAATCAGGCTATCTTTATAGTGCTGAAATCAGCGGTCATGCTGGTAGTGGCGAGTACGGCTTTGATGTGATTTGTGCAGCTGTTAGTACTTTATCAATTAATTTTATTAATTCATTAGAGGCTTTAACGACCTGCCAAGCGCAATTGATTATCAATGACGTTGAAGGTGGTTATATGAAGATAGATTTATCTTCTATACCACAACATAAAGAGGATAAGGTTCAATTATTATTTGAGTCTTACCTTCTTGGAATGACTAATCTGTCTAAAGATTCTTCTGAATTTGTTAGTACAATAGTCATGACACAC

SEQ ID NO: 11390 - protein, 112 aa, Streptococcus agalactiae
MIKATFTRNQSGYLYSAEISGHAGSGEYGFDVICAAVSTLSINFINSLEALTTCQAQLIINDVEGGYMKIDLSSIPQHKEDKVQLLFESYLLGMTNLSKDSSEFVSTIVMTH

SEQ ID NO: 11391 - DNA, 312 bp, Streptococcus agalactiae; identical to SEQ ID NO: 7131

SEQ ID NO: 11392 - protein, 104 aa, Streptococcus agalactiae; identical to SEQ ID NO: 2558

SEQ ID NO: 11393 - DNA, 1176 bp, Streptococcus agalactiae
atggcaagaatcccttatcagaaaacacttattttttgtgtagccgttattattgctatttttattttgggattatctagggatttagcacaatctaaagggcaaaaggttgcaaataacaatactgtaaaaacagcacgtgtggttgcaaacggagatattttactacacgatgtactatatgccagtgcgcgccaacccgacggcacttataattttactccttattttaaagaggtaaaatcttggattgagagcgctgatttagcgattggtgattatgaagggacgattagttcagaatatcctttagcgggctatcctttatttaatgctcctaatgagattgcaactactatgaaagaaactggatatgatgtcgttgacttagcacataatcatattctggattcacaactggcaggtgctatcaatactgtcaagacttttaatcgtctgggattggatactattggggtttatttaaaggatagaaataaagaagatatcttaattaagcatgtaaatggtattaaaattgctattttaggttattcgtatggctacaatggtatggaagctaatgtttcaaagagtgactatgaaaaacatatgtctgatttagatactaaaaagattaagcaagatattaaaaaggctgaaaaagaagcagatatcaccattgtcatgccacagatggggatagaatatcaaaaaaaacctactacagaacaagtaatgctttatcacagtatgattaaatggggggcagacattatattcggaggacaccctcacgttgttgaaccgtctgaagtgataaaaaaagatggccagaaaaaatttattatttactctatgggaaattttatttcaaatcagcgtttagaaacagttgatgatatctggacagaaagaggattattaatggatgtaacaatagagaaaaaaggtcaaaaaacagtaattaaaaaagttaaggcgcatccaacactagtagaagcaaaagcaaatggccgttatgttgaagaaggctttccagcttatgattataggacgctagttttagaggattatattgaaggtggtaagaaacgttctacgattgatcagactatgaaagataaagttgataaagcatataaggagatgaatgagttagttaatttgaagtgg

SEQ ID NO: 11394 - protein, 392 aa, Streptococcus agalactiae
MARIPYQKTLIFCVAVIIAIFILGLSRDLAQSKGQKVANNNTVKTARVVANGDILLHDVLYASARQPDGTYNFTPYFKEVKSWIESADLAIGDYEGTISSEYPLAGYPLFNAPNEIATTMKETGYDVVDLAHNHILDSQLAGAINTVKTFNRLGLDTIGVYLKDRNKEDILIKHVNGIKIAILGYSYGYNGMEANVSKSDYEKHMSDLDTKKIKQDIKKAEKEADITIVMPQMGIEYQKKPTTEQVMLYHSMIKWGADIIFGGHPHVVEPSEVIKKDGQKKFIIYSMGNFISNQRLETVDDIWTERGLLMDVTIEKKGQKTVIKKVKAHPTLVEAKANGRYVEEGFPAYDYRTLVLEDYIEGGKKRSTIDQTMKDKVDKAYKEMNELVNLKW

SEQ ID NO: 11395 - DNA, 1152 bp, Streptococcus agalactiae
atgcgcttcatcaataagttaaaaaataatatggagcatgtactctccatttatccagatgtttcagtaaaaacagatcgtgatagaggacatgtatatctcaatggtacagattatcatgaagttgcagagtccttaaaagagatttttggtatccaagctttttctccatcttttaaagtagaaaaaaatgttgatacattggtaaaagctgtccaggaaattatgacttccgtttataaagatgggatgacttttaaaattaccgcaaaacgtagtgaccactcatttgaattggatagccgtgctctaaatcatactttaggagatgccgttttttcagtcttgccaaatattaaggctcagatgaagcaaccagatatcaatcttaaagtcgagatacgagatgaggctgcttatatttcatatgagaatattaggggtgcaggaggattaccggtaggaacatctggaaaagggatgctgatgttgtctggtgggattgattctccggtggcaggttacctagcgttaaaacgtggtgtagatatagaagcagtccattttgcaagtcctccttatactagcccaggtgcattgaaaaaagcacatgatttaacacgtaaattgacaaaatttggtggtaatattcaatttattgaagttccattcacagaaattcaagaggaaattaaggaaaaagctcctgaagcttacttgatgacgttaacacgtaggtttatgatgcgtattacagatcgtattcgtgagaaccgaaatggtcttgttattattaacggtgaaagtttagggcaggtggcaagccaaacgctagaaagtatgcaagccattaatgctgtcactgcaacaccgattattcgtcctgtggtcacgatggataagctagaaattattgatattgctcaaaaaatagatacttttgatatttcaattcaaccatttgaggattgctgtacgatttttgcaccagatcgcccaaaaactaaccctaaaattaagaatacagaacagtatgagaaacgtatggatgtagaaggtctggtagagagagcagttgcagggattatggtaactactattcaacctcaagcagatagtgatgatgttgatgacttgattgacgatttatta

SEQ ID NO: 11396 - protein, 384 aa, Streptococcus agalactiae
MRFINKLKNNMEHVLSIYPDVSVKTDRDRGHVYLNGTDYHEVAESLKEIFGIQAFSPSFKVEKNVDTLVKAVQEIMTSVYKDGMTFKITAKRSDHSFELDSRALNHTLGDAVFSVLPNIKAQMKQPDINLKVEIRDEAAYISYENIRGAGGLPVGTSGKGMLMLSGGIDSPVAGYLALKRGVDIEAVHFASPPYTSPGALKKAHDLTRKLTKFGGNIQFIEVPFTEIQEEIKEKAPEAYLMTLTRRFMMRITDRIRENRNGLVIINGESLGQVASQTLESMQAINAVTATPIIRPVVTMDKLEIIDIAQKIDTFDISIQPFEDCCTIFAPDRPKTNPKIKNTEQYEKRMDVEGLVERAVAGIMVTTIQPQADSDDVDDLIDDLL

SEQ ID NO: 11397 - DNA, 1143 bp, Streptococcus agalactiae
atgatttattttgataattcggcaactactattccctatccagaagttttaaggacttatcaagaagtagctagtaaaatctatggaaacccctcaagtttacatgagctaggaacaacatcttctcggattttagaggctagccgtaaacaaattgctagtttacttgagcttaaagtaaatgaaattttctttacatctggcggtacagaggccgataattgggttattaagggccttgcgtttgagaaacaacattttggaaatcatattattgtttctgatatcgaacacccagctgttaaagagtctgctaaatggcttggagagtatgggtttgagattgattatgcgccagtagatgataaaggatttgtagacgtagaagcactggtcaaattaattaaaccagaaacgattcttatttcaattatggcaataaacaatgaaattggttctattcagccaataaaagctatttcagacttgttgtcagataaacctactatatcgtttcatgttgatgctgttcaagcaataggtaagataccgactaaagattatttgactgagcgagttgattttgcatctttttctagtcataaatttcacggcgttcgtggggttggctttctatatattaaagaaggaaaacgtatttcaccattactaacaggtggtggacaagaatctgatttacgttcaactactgagaatgtcgcagggattgcagctactgctaaagctttacgaatggttatggacaaggaagtagtagctattcctaaaataagtaaaatgaaaaccattattcatgatgaattagccaaatatgaggatattacgttattttcgggtaaggaagatttttcacctaacattatcacgtttggtatcaagggtgtccgaggagaagttcttgtccatgcctttgagggacatgatatttttatctcgacaactagcgcttgctcttctaaagcaggtaaaccagcaggaactcttatagcaatgggaatttcaactaagttagcccaaactgctgtacgtatcagcttagatgatgacaatgatatgggacaagtagagcaatttttaactatttttaaacaagtttatgaaaaaaccaagaaagttagagga

SEQ ID NO: 11398 - protein, 381 aa, Streptococcus agalactiae
MIYFDNSATTIPYPEVLRTYQEVASKIYGNPSSLHELGTTSSRILEASRKQIASLLELKVNEIFFTSGGTEADNWVIKGLAFEKQHFGNHIIVSDIEHPAVKESAKWLGEYGFEIDYAPVDDKGFVDVEALVKLIKPETILISIMAINNEIGSIQPIKAISDLLSDKPTISFHVDAVQAIGKIPTKDYLTERVDFASFSSHKFHGVRGVGFLYIKEGKRISPLLTGGGQESDLRSTTENVAGIAATAKALRMVMDKEVVAIPKISKMKTIIHDELAKYEDITLFSGKEDFSPNIITFGIKGVRGEVLVHAFEGHDIFISTTSACSSKAGKPAGTLIAMGISTKLAQTAVRISLDDDNDMGQVEQFLTIFKQVYEKTKKVRG

SEQ ID NO: 11399 - DNA, 450 bp, Streptococcus agalactiae
atgtcaaaaggatattcaagacaacagaaaaagtctactaagactaatactgattcaactcaatcacccgctaagcatataaaaacaggtttttctgcacttcaaaaaacaattgcattagtcggtagtgttttaagtattattgttgcctctattactattactaatgcgattaataatcacaaagactctagtaagactgattcttctacttcaaaaaccgtcattataagagaaagtggacaaaattctagtaaccaagtttctactgaaaaagatgagacaagggcatcatccagccaaacactagaaaattcctctgctagtagtactccgagtagcagttcaaattctgctgccaataatgatcaaacatcatctagtactaacaatgatcaaacaaataatactactaccgatacctcaactattggaaatacaacaacacct

SEQ ID NO: 11400 - protein, 150 aa, Streptococcus agalactiae
MSKGYSRQQKKSTKTNTDSTQSPAKHIKTGFSALQKTIALVGSVLSIIVASITITNAINNHKDSSKTDSSTSKTVIIRESGQNSSNQVSTEKDETRASSSQTLENSSASSTPSSSSNSAANNDQTSSSTNNDQTNNTTTDTSTIGNTTTP

SEQ ID NO: 11401 - protein, 1347 aa, Streptococcus agalactiae
ATGTCAAAACAATATGATTATATCGTTATTGGTGGAGGTAGTGCAGGCAGTGGTACCGCTAATAGGGCAGCCATGTATGGAGCAAAAGTCCTGTTAATTGAAGGTGGACAAGTAGGTGGAACTTGTGTTAACTTAGGTTGTGTACCGAAGAAAATCATGTGGTATGGTGCACAAGTTTCTGAGACACTCCATAAGTATAGTTCAGGTTATGGTTTTGAAGCCAATAATCTTAGTTTTAATTTTACTACTCTAAAAGCTAATCGCGATGCTTACGTGCAGCGGTCTAGACAGTCGTATGCCGCTAATTTTGAGCGTAATGGGGTCGAAAAGATTGATGGATTTGCTCGTTTTATTGATAACCATACTATTGAAGTGAATGGTCAGCAATATAAAGCTCCTCACATTACTATTGCAACAGGTGGACACCCTCTTTACCCTGATATTATTGGAAGTGAACTTGGTGAGACTTCTGATGATTTTTTTGGATGGGAGACCTTACCAAATTCTATATTGATTGTTGGGGCGGGCTATATCGCGGCGGAACTTGCTGGAGTGGTTAATGAATTAGGCGTTGAAACCCATCTTGCATTTAGAAAAGACCATATTCTACGCGGATTTGATGACATGGTAACAAGTGAGGTTATGGCTGAAATGGAGAAATCAGGTATCTCTTTGCATGCTAAACATGTACCTAAATCTCTTAAACGCGATGAAGGTGGCAAGTTGATTTTTGAAGCTGAAAATGGGAAAACGCTTGTCGTTGATCGTGTAATATGGGCTATCGGCCGTGGACCAAATGTAGACATGGGACTTGAAAATACCGATATTGTTTTAAATGATAAAGGTTATATCAAAACAGATGAATTTGAGAATACTTCTGTAGATGGCGTGTATGCTATTGGAGATGTTAATGGGAAAATTGCCTTGACACCGGTAGCAATTGCAGCAGGTCGTCGCTTATCAGAAAGACTTTTTAATCATAAAGATAACGAAAAATTAGATTACCATAACGTACCTTCAGTTATTTTTACTCACCCTGTAATTGGGACGGTAGGACTTTCAGAAGCAGCAGCTATCGAGCAATTTGGAGAAGATAATATCAAAGTCTATACATCAACTTTTACCTCTATGTATACGGCTGTTACCACTAATCGCCAAGCAGTTAAGATGAAGCTCGTAACCCTAGGAAAAGAGGAAAAAGTTATTGGGCTTCATGGTGTTGGTTATGGTATTGATGAAATGATTCAAGGTTTTTCAGTTGCTATCAAAATGGGGGCTACTAAAGCAGACTTTGATGATACCGTTGCTATTCACCCAACTGGATCTGAGGAATTTGTTACAATGCGC

SEQ ID NO: 11402 - protein, 449 aa, Streptococcus agalactiae
MSKQYDYIVIGGGSAGSGTANRAAMYGAKVLLIEGGQVGGTCVNLGCVPKKIMWYGAQVSETLHKYSSGYGFEANNLSFNFTTLKANRDAYVQRSRQSYAANFERNGVEKIDGFARFIDNHTIEVNGQQYKAPHITIATGGHPLYPDIIGSELGETSDDFFGWETLPNSILIVGAGYIAAELAGVVNELGVETHLAFRKDHILRGFDDMVTSEVMAEMEKSGISLHAKHVPKSLKRDEGGKLIFEAENGKTLVVDRVIWAIGRGPNVDMGLENTDIVLNDKGYIKTDEFENTSVDGVYAIGDVNGKIALTPVAIAAGRRLSERLFNHKDNEKLDYHNVPSVIFTHPVIGTVGLSEAAAIEQFGEDNIKVYTSTFTSMYTAVTTNRQAVKMKLVTLGKEEKVIGLHGVGYGIDEMIQGFSVAIKMGATKADFDDTVAIHPTGSEEFVTMR

SEQ ID NO: 11403 - protein, 333 aa, Streptococcus agalactiae
ATGGCTAATGTATATGATTTAGCAAATGAATTAGAACGTGCTGTTCGTGCTTTACCAGAATACCAAGCAGTTTTAACTGCAAAAGCAGCTATTGAAAGTGATGCGGATGCACAAGTGCTTTGGCAAGACTTTTTGGCTACCCAATCAAAAGTTCAAGAAATGATGCAATCTGGCCAAATGCCAAGTCAAGAAGAACAAGATGAAATGTCTAAACTTGGGGAAAAAATTGAATCCAATGACCTTTTAAAAGTTTATTTTGACCAACAACAACGGTTGTCTGTCTATATGTCTGATATCGAAAAAATTGTCTTTGCACCCATGCAGGACTTAATG

SEQ ID NO: 11404 - protein, 111 aa, Streptococcus agalactiae
MANVYDLANELERAVRALPEYQAVLTAKAAIESDADAQVLWQDFLATQSKVQEMMQSGQMPSQEEQDEMSKLGEKIESNDLLKVYFDQQQRLSVYMSDIEKIVFAPMQDLM

SEQ ID NO: 11405 - protein, 1164 aa, Streptococcus agalactiae
ATGAGATATTTAACTGCTGGTGAGTCACATGGACCGAGTTTAACAGCTATTATCGAAGGGATTCCTGCGGGACTGAAATTATCTGCTAAAGATATTAATGAAGATTTAAAACGCCGCCAAGGTGGTTATGGTCGTGGGAATCGAATGAAAATTGAAACTGATCAAGTGATCATTAGTTCTGGTGTGCGCCATGGAAAAACCTTGGGTTCACCTATTACACTGACAGTAACTAATAAGGATCATAGCAAATGGCTGGACATCATGTCAGTCGAAGACATTGAAGAACGTCTAAAGCAAAAACGTCGTATTAAGCATCCTAGACCTGGGCACGCAGATTTAGTAGGTGGAATCAAATACCGTTTTGATGATTTGAGAAATGCTTTAGAGCGTTCTTCGGCTCGTGAGACCACAATGCGAGTAGCTATTGGTGCGATTGCTAAACGTATCTTGAAAGAAATTGGTATCGAAATTGCTAACCATATTGTAGTTTTCGGTGGCAAAGAGATTACTGTCCCTGATAAGCTAACAGTTCAACAAATCAAAGTGTTATCTAGTCAATCGCAAGTAGCTATCGTCAATCCATCATTTGAACAAGAAATTAAGGATTATATTGACAGTGTGAAAAAGGCTGGAGATACTATCGGAGGAGTGATTGAAACTATCGTTGGAGGAGTTCCCGTTGGTTTAGGCTCTTATGTACACTGGGATAGAAAGTTAGATGCTAAGATAGCGCAAGCAGTTGTATCTATCAATGCTTTTAAAGGTGTTGAATTTGGTCTAGGTTTTAAGTCAGGTTTTTTAAAAGGAAGTCAAGTAATGGACTCCATATCATGGACAAAGGACCAAGGTTATATACGTCAGTCAAATAATTTAGGCGGTTTTGAAGGCGGTATGACTAATGGAGAGCCTATTGTCGTTAGGGGAGTAATGAAGCCAATTCCTACGCTTTACAAGCCACTAATGTCAGTTGATATTGATACTCACGAGCCTTATAGAGCTACAGTGGAACGTTCTGATCCCACGGCACTTCCGGCTGCAGGTGTCGTTATGGAAGCTGTAGTAGCCACCGTCCTGGTGACAGAAGTGCTAGAAAAATTTTCTTCAGACAACATGTATGAACTAAAAGAAGCTGTAAAACTATATCGCAATTATGTTAATCATTTT

SEQ ID NO: 11406 - protein, 388 aa, Streptococcus agalactiae
MRYLTAGESHGPSLTAIIEGIPAGLKLSAKDINEDLKRRQGGYGRGNRMKIETDQVIISSGVRHGKTLGSPITLTVTNKDHSKWLDIMSVEDIEERLKQKRRIKHPRPGHADLVGGIKYRFDDLRNALERSSARETTMRVAIGAIAKRILKEIGIEIANHIVVFGGKEITVPDKLTVQQIKVLSSQSQVAIVNPSFEQEIKDYIDSVKKAGDTIGGVIETIVGGVPVGLGSYVHWDRKLDAKIAQAVVSINAFKGVEFGLGFKSGFLKGSQVMDSISWTKDQGYIRQSNNLGGFEGGMTNGEPIVVRGVMKPIPTLYKPLMSVDIDTHEPYRATVERSDPTALPAAGVVMEAVVATVLVTEVLEKFSSDNMYELKEAVKLYRNYVNHF

SEQ ID NO: 11407 - protein, 1065 aa, Streptococcus agalactiae
ATGCAGGTTGAAGTTGACTTACCGAATCACTCTTATCATATCAAAATTGAAGAAGGATGTTTTTCTGAGGCTGGTGACTGGGTATCACATTTATGGCAGAAACAAATGATAACTATTATCACAGATAGTAACGTAGAAATATTATACGGGGAGTCGCTTGTCAACCAGTTAAAAAAACAAGGTTTTACAGTACATGTTTTTAGTTTTGCTGCGGGTGAAGCTAGTAAAACTTTGGAAGTTGCTAATCGTATTTATGGTTTTTTAGCAAAGCATCATATGACCAGAAGCGATGGGATCATTGCACTTGGTGGAGGCGTTGTCGGAGATTTAGCAGCGTTTGTTGCTTCTACTTATATGCGGGGAATCCATTTTCTTCAAATTCCAACTAGTTTAACAGCACAGGTTGATTCTTCCATTGGCGGAAAAACAGGAGTCAACACTTCATTCGCTAAAAATATGGTAGGTACTTTTGCACAACCTGATGGTGTACTGATAGATCCTGTTACTCTAAAAACATTGGGCAATCGTGAATTAGTTGAAGGTATGGGAGAAGTCATCAAATATGGCTTGATTGATGATATAAAACTCTGGCATATCTTAGAAGAGATGGATGGGTCTATTGATAGTATCCTTGATAATGCATTAGCTATTATTTATCACTCTTGTCAAGTTAAACGAAAGCATGTTTTAGCTGATCAATACGATAAAGGGTTAAGGATGCATTTAAATTTTGGCCACACTATCGGTCATGCTATCGAAGTACATGCTGGCTATGGAGAAATAATGCATGGAGAAGCTGTTGCAATTGGAATGATCCAGCTTTCCCGTGTGGCTGAGCGTAAAAATCTTATGCCAAGAGGTATCAGTCAAGATATTTATAATATGTGTTTAAAATTTGGCCTTCCGGTCCACTATGCGGAATGGGATAAGGACGTCTTATTTGACATATTGAGTCATGATAAAAAAGCAAGTGGACAATTTATTAAAATTGTTATACTGCCTCAATTAGGTAGTGCAACAGTCCACCAAATACCTTTAGAAGAAATGAGAGATTATTTGGAGAAA

SEQ ID NO: 11408 - protein, 355 aa, Streptococcus agalactiae
MQVEVDLPNHSYHIKIEEGCFSEAGDWVSHLWQKQMITIITDSNVEILYGESLVNQLKKQGFTVHVFSFAAGEASKTLEVANRIYGFLAKHHMTRSDGIIALGGGVVGDLAAFVASTYMRGIHFLQIPTSLTAQVDSSIGGKTGVNTSFAKNMVGTFAQPDGVLIDPVTLKTLGNRELVEGMGEVIKYGLIDDIKLWHILEEMDGSIDSILDNALAIIYHSCQVKRKHVLADQYDKGLRMHLNFGHTIGHAIEVHAGYGEIMHGEAVAIGMIQLSRVAERKNLMPRGISQDIYNMCLKFGLPVHYAEWDKDVLFDILSHDKKASGQFIKIVILPQLGSATVHQIPLEEMRDYLEK

SEQ ID NO: 11409 - protein, 654 aa, Streptococcus agalactiae
ATGCCTCGCAGTCTTGAAGAGGCTCAAGAAATAGATTTATCAAAATTTGATAGTGTTGATATTATTGAATGGCGAGCTGATGCCTTACCAAAGGATGACATTATTAATGTAGCTCCAGCTATTTTTGAGAAATTCGCAGGTCATGAAATTATTTTTACTCTTCGTACAACGCGTGAAGGTGGTAATATTGTCTTATCTGATGCTGAGTATGTTGAGCTAATCCAGAAAATTAATTCTATCTACAATCCAGATTATATTGATTTTGAGTATTTTTCACATAAAGAAGTTTTTCAAGAAATGCTAGAATTTCCAAATTTAGTCCTGTCTTATCACAATTTTCAAGAGACACCGGAGAATATTATGGAGATATTTTCAGAATTAACAGCCCTAGCACCACGAGTTGTGAAAATCGCAGTAATGCCAAAGAATGAACAAGATGTCTTAGACGTTATGAATTACACTCGCGGTTTCAAGACTATTAATCCTGATCAAGTTTATGCGACGGTATCTATGAGTAAAATTGGACGTATTTCTCGTTTTGCTGGTGATGTAACTGGATCTAGTTGGACATTTGCATATTTAGATTCATCTATCGCACCCGGACAAATTACTATTTCAGAGATGAAGCGTGTCAAAGCATTGCTTGACGCTGAC

SEQ ID NO: 11410 - protein, 218 aa, Streptococcus agalactiae; identical to SEQ ID NO: 2578

SEQ ID NO: 11411 - protein, 1155 aa, Streptococcus agalactiae
ATGAATAAACTTAAAGTGAATTCTGTCGTTGAAAGAAAAATCAAATCAGGTGCTCAGTTACTGGAAAAAAAAGATTTTGATACCAGTTTAGTTAACCAGTTGGTTCAACTTTTTTCACAGTCAAATCAATTCTTAGGGATGGCCTATCTTTCACCACAAAATAAAGGTATTGGTTGGTTACTATCAAGACAAGTTTTTGATTTTAACCATGATTACTTTGTATCGCTATTCGAAAAATCTAGAGAGAAGCGTCAAAAATTTGAAAAATCCAGTCAAACAACAGCCTACCGCTTGTTTAATCAGGATGGAGATAACTTTGGTGGCCTAACTATAGATTTTTATAGTGACTATGCTCTTTTTTCGTGGTACAATGAATTTGTTTATACTAATCGACAAATGATTGTTGCAGCCTTTAAGCAGGTCTATCCTAATATTAAAGGGGCATATGAAAAAATTCGTTTCAAAGGTTTAGACTTTGAAAGTGCTCATTTGTACGGTCAAGAGGCTCCTGAATCATTTTTGATTTTAGAAAATAATATCAAATATAGTGTCTTTTTGAATGATGGATTAATGACAGGTATTTTCCTTGACCAACATGATGTCAGAAAAGCCTTAGCAACTAATCTATCAGAAGGTAAAAAAGTTCTAAATATGTTTTCATACACTGCGGCTTTTTCTGTAGCTGCAGCTGTTGGAGGAGCATTAGAGACAACTTCTGTTGATTTAGCAAAACGCTCGCGTGAACTTTCAAAAGCACACTTTGATGCTAATCAGATTGTCACAGATAACCATCGATTTATCGTTATGGATGTTTTTGAATATTATAAGTATGCCAAAAGAAAACATCTATCATATGATGTGATTGTTATTGATCCACCAAGTTTTGCTCGAAATAAAAAACAAACTTTTTCGGTTACTAAAGATTACTATAAATTAATTGAACAAGCTTTAGATATTTTAACCCCTGGTGGAACTATCATTGCATCAACTAACGCAGCTAATCTAACCGTATCACAATTTAAGAAACAATTGGAAAAGGGGTTTGGTAAAGCTTCACATAATTACATTAGCTTACAGCAGTTGCCTGAAGATTTCACTGTAAATGATAAGGACCAACAAAGTAATTATTTAAAAGTATTTACAATAAAGGTAAAA

SEQ ID NO: 11412 - protein, 385 aa, Streptococcus agalactiae; identical to SEQ ID NO: 7154

SEQ ID NO: 11413 - protein, 2142 aa, Streptococcus agalactiae
GTGAAAAAAATTAAAGATTTTGCTAGCCGTGCGATCAATACACGACTCGGCTTTATTTTATTGTTAGTAGTTATATATTGGTTAAAGACAATTTGGGCTTACCATACTGATTTTAATTTAGGTTTAGAAAATTCCTATCAGTTGTTTTTGACCATTATAAACCCCATCCCCTTAGGACTCTTAATCATAGGTTTGGCCTTATATGTTAAGCGAACCAAAGCTTTTTATATTACCGCTTTTATCACCTATGCTATCGTAAATATCCTTCTAATTGCAAACGCAATCTACTATAGAGAGTTTTCCGATTTCATTACAGTTAGCGCCGTCTTGGCTAGTAGTAAAACTTCGGCTGGCCTTGGAGACTCTGCTCTTAATCTATTGAGAATTTGGGATCTTGTCTACGTTTTCGATTTCATTATCCTTATTTTCTTGTTTGCAACCAAGAAAATCCACTTAGATGATCGTCCATTTAATAAACGTGCTAGTTTTTCTATCACAGCTTTGTCTGGTTTACTCTTTTCAATTAACTTATTCTTAGCTGAAATTGATCGTCCAGAACTACTAAGTCGTGGTTTTTCAAACACCTATATTGTTAAAGCTCTTGGCTTGCCATCATTTTCGATTTATAGTGGTAATCAAACTTATCAAGCACAGAAAGAAAGAAATGGTGCCACTGCACAAGAATTAGCGACTGCCAAAAAATATGTAGCAGAGCATTATGCCAAACCCAATCCAGAATATTATGGTATCGGAAAAGGGCGAAACGTTATCATGATTCACTTGGAGAGTTTTCAACAATTCTTGATTGACTATAAATTAAATGTTGATGGTAAAGAACATGTGGTTACTCCATTTATTAACAGCCTTTATCATTCGAAAGAGACTATTTCCTTCTCTAACTTCTTCCATCAAGTCAAAGCTGGTAAGACATCCGATGCTGAAACACTCATGGAAAACTCACTTTTTGGTCTAAGTAGTGGTTCATTCATGGTTAATTATGGTGGTGAAAATACACAATTTGCTGCTCCACATATCTTAGCTCAAAATGGTGGTTACAGTAGTGCGGTCTTCCACGGAAACGTCGGAACATTTTGGAATAGAAATAATGCTTACAAACAGTGGGGTTATGACTACTTCTTTGACTCTAGCTACTTCTCAAAACAAACCAAAGATAATTCATTCCAATACGGTTTGAATGATAAATATATGTTTGCTGACTCTATCAAATATCTAGAGCACATGCAACAACCGTTTTATACTAAATTTATTACAGTAAGTAACCATTACCCTTACACAAGTTTGAAGGGAGAGTCTGACGAAGAGGGATTCCCACTTGCAAAGACTAACGATGAAACGATTAACGGTTATTTCGCCACAGCAAACTACCTTGATACAGCTCTTAAATCATTTTTTGAATATCTAAAAGCTGCTGGTGTGTATGATAATTCTATTATTGTAATGTATGGGGATCACTACGGTATTTCTAATACACGCAATCCTAGCTTAGCTGAATTATTAGGTAAAGACCCTGAAACATGGTCTGAATACGACAACGCTATGTTACAACGTGTTCCATATATGATCCACATTCCTGGCTATTCAAAAGGTTTTATCAGTAATACATACGGTGGTGAGGTAGATAATTTACCAACTTTACTTCATATTCTAGGAATAGATACGTCTAAATATACTCAGTTAGGACAAGACTTATTATCTAAAGATAATAAACAAATGGTCGCTATGAGAACAACTGGTCAGTATATTACTCCTAAATACACTAACTATAGTGGACATCTCTATTACACTGATTCAGGACAAGAAATCACAAATCCTGATGAAACAACTAAAGCTGAAATAAAAGCTATTCGAGATGCTACTAATAAACAATTATCTACAAGTGATTCGATTCAAACTGGAGATTTACTACGATTTGATGAAAACAATGGTTTGAAAACTGTAGAAGTTGAAAAATTCAATTACACACATTCTCTTAAAGCACTCAAAGCTAAAGAACGTAAATTGAAAGATCGTTCAACAAGCATATACAGCAAACATAACAACAAATCAACAGTTGATCTCTTCCATGCTCCAAGTTACTTGGAATTGCAAGATCCTAATAAGACACATAAAACATCTAAAAAA

SEQ ID NO: 11414 - protein, 714 aa, Streptococcus agalactiae; identical to SEQ ID NO: 7156

SEQ ID NO: 11415 - protein, 357 aa, Streptococcus agalactiae
ATGGCTCGTGTTAAAGGTGGAGTTGTTTCACGTAAACGTCGTAAACGCGTACTTAAATTAGCTAAAGGTTACTATGGTGCAAAACATATCTTGTTCCGTACTGCAAAAGAACAAGTAATGAATTCTTACTACTATGCATACCGTGACCGTCGTCAGAAAAAACGTGACTTCCGTAAATTATGGATCACTCGTATCAATGCGGCTGCTCGTATGAATGGTTTATCATATTCACAATTGATGCACGGTTTGAAATTAGCTGAAATCGAAGTTAACCGTAAAATGCTTGCTGATTTAGCAGTTAACGATGCAGCAGCTTTCACAGCTCTTGCAGATGCAGCTAAAGCTAAACTTGGTAAA

SEQ ID NO: 11416 - protein, 119 aa, Streptococcus agalactiae; identical to SEQ ID NO: 2584

SEQ ID NO: 11417 - protein, 525 aa, Streptococcus agalactiae
ATGGCGAAAAAACCATGGGAAAAAAAAGTTGTGGAAAACAATAGTCATAGAAAAGACAAAATTACAAGAACGAGTAGAGGTGTGGTGTCAAGTACTCCTTGGATTACCGCTTTCTTGAGTGCATTCTTTGTTATTGTCGTTGCTATTTTATTTATAGTATTTTATACTTCAAATAGAGGAGAAGACAGAGCAAAAGAAACTTCTGGTTTTTATGGTGCTTCAAGTCAAAAAGTTAATAGTTCTAAAACGAAAAAAGCATCTACAAGTAAGAAAACAACCTCATCATCAAAAACTAAAACTAGTGATAAATCAACAACATCTTCTAGTACAGTAGCAAGTTCGAGTGAGACATCGACATCATCTTCAGTAAACGGTGGAACAATCGTAGTTCAACCAGGTGAGGGAGCAGCCTCCATAGCTGCTCGTGCAGGTATCTCAGTTGCTCGTTTACAAGAACTTAATCCTGGTCATATGACCTCAGGGTATTGGTATGCTAATCCCAGGCCTTCCANNNNNTTAATTAAT

SEQ ID NO: 11418 - protein, 175 aa, Streptococcus agalactiae
  VARIANT 171, 172: Xaa = Any Amino Acid
MAKKPWEKKVVENNSHRKDKITRTSRGVVSSTPWITAFLSAFFVIVVAILFIVFYTSNRGEDRAKETSGFYGASSQKVNSSKTKKASTSKKTTSSSKTKTSDKSTTSSSTVASSSETSTSSSVNGGTIVVQPGEGAASIAARAGISVARLQELNPGHMTSGYWYANPRPSXXLIN

SEQ ID NO: 11419 - protein, 193 aa, Streptococcus agalactiae
ATGAAAGTTGCACTAATTCCAGAAAAATGTATTGCCTGCGGGCTTTGCCAAACATATTCAAATATTTTTGATTATCAGATGATGGTATCGTTAAATTTTCCGATACAGATAACCTAGAAAAAGAAATTCCAAATTCGATCAAGATACTGTTTTAGCAGTTAAATCATGTCCCACCAAAGCTCTTACGATTTTG

SEQ ID NO: 11420 - protein, 65 aa, Streptococcus agalactiae
  VARIANT 26: Xaa = Any Amino Acid
MKVALIPEKCIACGLCQTYSNIFDYXDDGIVKFSDTDNLEKEIPNSDQDTVLAVKSCPTKALTIL

SEQ ID NO: 11421 - protein, 144 aa, Streptococcus agalactiae
ATGCGAAAATGGCCTAAAAAATATTTTTTAGATGCACTAGCTATTGAACCTAAATCTAAGGGAGAAGTGGAGCTTCTCGATAATTTGATTAAAATGGATTATTTTGAATGTTATCGCTACGATAAAAAAGCTCTTACAAAATCG

SEQ ID NO: 11422 - protein, 48 aa, Streptococcus agalactiae
MRKWPKKYFLDALAIEPKSKGEVELLDNLIKMDYFECYRYDKKALTKS

SEQ ID NO: 11423 - protein, 141 aa, Streptococcus agalactiae
ATGATAAAATTATTTGGGAAGATACGTTATCACTGGCAACCTGAACTTTCTTGGGCTATTATTTATTGGTCAATAGCCATTGCACCAATTTTTATTGGTTTATATCTGCTATATGAAAGAACTGAGANNNNNTTAATTAAT

SEQ ID NO: 11424 - protein, 47 aa, Streptococcus agalactiae
  VARIANT 43, 44: Xaa = Any Amino Acid
MIKLFGKIRYHWQPELSWAIIYWSIAIAPIFIGLYLLYERTEXXLIN

SEQ ID NO: 11425 - protein, 1217 aa, Streptococcus agalactiae
ATGTCTTACGAAAAGCTTTTAGAACGATTTTTAACATACGTCAAAATAAATACAAGAAGTAATCCTAATAGTACACAAACGCCAACAACTCAAAGTCAAGTTGACTTTGCTTTAACAGTTTTAAAACCAGAAATGGAAGCAATTGGTTTAAAAGATGTTCATTATTTACCTTCTAATGGGTATTTGGTTGGAACCTTACCTGCTACAAGCGACCGCTTACGCCATAAAATAGGTTTTATATCCCATATGGATACAGCTGATTTTAATGCTGAAAATATTACTCCACAATTGTTGACTATAAAGGTGGAGATATTGAACTTGGAGACTCAGGTTACATTTTAAGTCCAAAAGATTTTCCAAATTTAAATAATTACCATGGGCAAACATTGATTACAACAGATGGTAAAACCTTACTGGGAGCAGACGATAAGTCTGGTATAGCAGAAATCATGACAGCTATGGAATATTTGGCTTCGCATCCAGAAATTGAGCACTGTGAAATTAGAGTTGGCTTTGGACCAGATGAAGAAATTGGTATAGGTGCAGATAAATTTGATGTTAAAGATTTTGATGTTGATTTTGCCTATACAGTGGATGGTGGACCACTAGGAGAATTACAGTATGAAACCTTTAGTGCAGCTGGTTTAGAGCTTACATTTGAAGGACGAAACGTTCACCCTGGAACTGCAAAAAATCAAATGATTAATGCTTTACAGCTTGCTATGGATTTTCATAGTCAATTACCAGAAAATGAACGTCCTGAACAAACAGATGACTATCAAGGATTTTATCACTTATATGATTTAAGTGGAACAGTTGATCAAGCTAAAAGTTCATATATCATTCGAGATTTTGAGGAAGTTGATTTCTTAAAACGTAAGCAATTGGCTCAAGATATCGCTGATAATATGAATGAAGCATTACAATCTGAACGTGTAAAGGTTAAACTATACGATCAATATTACAACATGAAGAAAGTTATTGAAAAAGACATGACACCTATCAACATTGCTAAAGAAGTAATGGAAGAGTTAGACATCAAGCCAATCATAGAACCGATTCGTGGTGGTACAGATGGCTCTAAAATTTCCTTTATGGGAATCCCTACTCCTAATCTTTTTGCAGGTAGTGAAAACATGCATGGACGCTTTGAATTTGTTAGTCTACAAACAATGGAAAAAGCAGTTGATGTTATTTTAGGCATCGTTGCTAAGGAT

SEQ ID NO: 11426 - protein, 406 aa, Streptococcus agalactiae
MSYEKLLERFLTYVKINTRSNPNSTQTPTTQSQVDFALTVLKPEMEAIGLKDVHYLPSNGYLVGTLPATSDRLRHKIGFISHMDTADFNAENITPQIVDYKGGDIELGDSGYILSPKDFPNLNNYHGQTLITTDGKTLLGADDKSGIAEIMTAMEYLASHPEIEHCEIRVGFGPDEEIGIGADKFDVKDFDVDFAYTVDGGPLGELQYETFSAAGLELTFEGRNVHPGTAKNQMINALQLAMDFHSQLPENERPEQTDDYQGFYHLYDLSGTVDQAKSSYIIRDFEEVDFLKRKQLAQDIADNMNEALQSERVKVKLYDQYYNMKKVIEKDMTPINIAKEVMEELDIKPIIEPIRGGTDGSKISFMGIPTPNLFAGSENMHGRFEFVSLQTMEKAVDVILGIVAKD

SEQ ID NO: 11427 - protein, 1632 aa, Streptococcus agalactiae
ATGTCACAAAAAACAACAAAAGTTAGTCAGCAAGAACAAATGGTCAAAGGGACGGCTTGGTTAACAGCAGGGAATTTCATTAGTCGCTTGCTGGGAGCCATCTATATTATCCCTTGGTATGCTTGGATGGGAAAGCATGCTGCCGAAGCAAATGCTTTATTTGGGATGGGATATGAAATCTATGCTTTATTTCTTTTGATATCAACTGTTGGAATTCCAGTAGCAGTTGCAAAACAGGTATCTAAGTATAACACTTTAGGTAAAGAAGAGATGAGCATTTACCTGGTTCGGAAAATCTTGCAGTTTATGCTGATTTTAGGTGGAGTTTTTGCATTAATTATGTATATTGGTTCACCTCTATTTGCTTCACTTAGTAAAGGAGGACAAGAACTCGTTCCAATATTGCGTAGTCTAACTCTAGCTGTTTTAGTTTTTCCTTCAATGAGTGTTTTACGTGGTTTTTTTCAAGGTTTTAATAATTTAAAACCGTATGCCATTAGTCAAGTCGCTGAGCAGATTATACGTGTCATATGGATGTTATTAACTGCTTTCTATATTATGCGTCTAGGATCAGGAGATTATATTGCCGCTGTGACACAGTCAACATTCGCCGCCTTTGTCGGTATGTTTGCTAGTATAGCTGTGCTGCTTTATTTCTTATGGCGTTATAATATGCTATCTGCCTTGATCGGTAAAACTCCAGAGCACATTAAATTAGATACTAAAGAAATACTAATTGAGACTGTTAAGGAAGCAATCCCTTTTATTATTACTGGTGCAGCAATTCAAATTTTCAAATTGATTGATCAGTTTTCATTTGGGAATACGATGGCGCTCTTTACGAATTATTCAAGTGAAGAATTACGGGTTATGTTTGCTTACTTTTCAAGCAACCCTGGTAAAGTTACGATGATTCTAATTGCTGTTGCTACCGCAATTGCTGGAGTTGGTATTCCATTGTTAACAGAGAATTTTGTTAAGAATGATAAAAAAGCCGCCGCTCGTTTGGTTGTTAATAATTTACAAATGTTACTAATGTTTTTACTGCCAGCTGTTGCAGGATCCGTTATTTTAGCAAAACCTTTGTATACAGTCTTTTATGGGTTACCGCAGGGACAAGCTTTAGGGCTTTTTGTCATATCTCTTATTCAAACAATTATTTTATCTATTTATACTGTTTTAGCACCAATGCTACAAGCATTGTTTGAAAATCGTAAAGCTATTATTTACTTCCTATATGGTCTGGCGGCAAAAGTTATTTTACAAGTTCCCTCCATTTTCCTTTTCCATGCCTATGGACCACTTTTCTCAACGACAGTAGCTCTTTGTATCCCAGTAATTCTTATGTATTTGAAAATACATGAAATTACAGGATTTAAACGCCAAGCTATTCGTCGTACAAGTGCTTTAGTCCTTATTCTAACGCTATTAATGAGCTTTATTATTTCTATGATAATATGGTTAATGAACCTGGTTATTGTACCCGATAGTAGACTGGTAAGTCTAGTTTACATTATCGTTATCGGTGCAATAGGTTTAGGGGTATATGGCTTTATGGCACTGGCCACCCATCTACTTGATAAGATGATTGGCAGTCGTGCTCAAGACTTACGCCGAAAGTTGCACCTTAAC

SEQ ID NO: 11428 - protein, 544 aa, Streptococcus agalactiae
MSQKTTKVSQQEQMVKGTAWLTAGNFISRLLGAIYIIPWYAWMGKHAAEANALFGMGYEIYALFLLISTVGIPVAVAKQVSKYNTLGKEEMSIYLVRKILQFMLILGGVFALIMYIGSPLFASLSKGGQELVPILRSLTLAVLVFPSMSVLRGFFQGFNNLKPYAISQVAEQIIRVIWMLLTAFYIMRLGSGDYIAAVTQSTFAAFVGMFASIAVLLYFLWRYNMLSALIGKTPEHIKLDTKEILIETVKEAIPFIITGAAIQIFKLIDQFSFGNTMALFTNYSSEELRVMFAYFSSNPGKVTMILIAVATAIAGVGIPLLTENFVKNDKKAAARLVVNNLQMLLMFLLPAVAGSVILAKPLYTVFYGLPQGQALGLFVISLIQTIILSIYTVLAPMLQALFENRKAIIYFLYGLAAKVILQVPSIFLFHAYGPLFSTTVALCIPVILMYLKIHEITGFKRQAIRRTSALVLILTLLMSFIISMIIWLMNLVIVPDSRLVSLVYIIVIGAIGLGVYGFMALATHLLDKMIGSRAQDLRRKLHLN

SEQ ID NO: 11429 - protein, 1452 aa, Streptococcus agalactiae
ATGATTACAATAGATAAAATTTTAGAAATTTTAAAAAATGACCATAATTTCAGAGAGATTTTGTTTCATGAGCATTATTATTATAACTGGACACAAAATGTAACTTTTAATGCCTTATCATATGATAGTCGTCAAATTTCATCTGATACTTTATTTTTCGCTAAGGGTGCTACTTTTAAAAAAGAATATCTAGATTCTGCAATCACAGCAGGCCTTTCTTTTTACGTTTCTGAGATAGATTACGGCGCCGATATTCCAGTGATATTAGTCAATGATATCAAAAAAGCCATGAGTTTGATATCTATGTCTTTCTATAATAACCCACAAAACAAACTTAAACTTCTAGCTTTTACTGGAACAAAAGGAAAAACAACTGCGGCTTACTTTGCTTATCATATGTTAAAAGTAAACCATCGTCCTGCTATGCTCTCAACTATGAACACAACATTAGATGGTAAATCTTTCTTTAAATCACATCTCACAACCCCCGAGAGTCTTGATTTATTTCGGATGATGGCTACAGCTGTTGAGAATCAAATGACACACTTAGTTATGGAAGTATCAAGCCAAGCATACCTAACCAAACGTGTTTATGGTTTAACCTTTGACGTTGGCGTTTTCTTAAATATTAGTCCCGATCATATTGGTCCTATCGAGCACCCTACATTCGAAGATTATTTTTTCCACAAACGGCTCTTGATGGAGAATAGCAATGCTGTTGTTGTAAATAGTCAGATGGATCATTTTAATATTGTCAAAGAACAGGTAGAATATATTCCTCATGATTTCTATGGAGATTATTCTGAAAATGTTATCACAGAATCACAGGCCTTTTCTTTCCATGTCAAAGGAAAGTTGGAGAACACCTACGATATCAAGCTGATTGGAAAATTCAATCAAGAAAATGCTATCGCAGCTGGACTTGCTTGTCTCCGACTTGGTGTTTCAATTGAAGATATAAAAAACGGAATTGCACAAACTACCGTTCCTGGCCGCATGGAAGTCCTAACACAAACCAACGGCGCAAAGATTTTCGTTGACTATGCCCACAACGGAGACAGTTTGAAGAAATTATTAGCTGTTGTTGAGGAACACCAAAAAGGGGATATTATATTAGTGCTCGGAGCTCCTGGTAATAAAGGTCAAAGCCGTCGTAAAGACTTCGGAGATGTCATTAATCAACATCCTAATCTACAAGTGATACTCACTGCAGATGATCCTAATTTTGAAGATCCCTTAGTTATCTCACAAGAAATAGCAAGCCATATTAATCGTCCGGTTACTATCATCATTGATCGAGAAGAAGCAATTGCTAATGCCAGTACTCTTACTAATTGCAAACTAGATGCAATTATTATCGCTGGTAAAGGGGCAGATGCTTATCAAATTATCAAAGGAAATCATGACAATTACTCTGGAGATTTAGAAGTTGCGAAAAAATACCTTAAACGA

SEQ ID NO: 11430 - protein, 484 aa, Streptococcus agalactiae
MITIDKILEILKNDHNFREILFHEHYYYNWTQNVTFNALSYDSRQISSDTLFFAKGATFKKEYLDSAITAGLSFYVSEIDYGADIPVILVNDIKKAMSLISMSFYNNPQNKLKLLAFTGTKGKTTAAYFAYHMLKVNHRPAMLSTMNTTLDGKSFFKSHLTTPESLDLFRMMATAVENQMTHLVMEVSSQAYLTKRVYGLTFDVGVFLNISPDHIGPIEHPTFEDYFFHKRLLMENSNAVVVNSQMDHFNIVKEQVEYIPHDFYGDYSENVITESQAFSFHVKGKLENTYDIKLIGKFNQENAIAAGLACLRLGVSIEDIKNGIAQTTVPGRMEVLTQTNGAKIFVDYAHNGDSLKKLLAVVEEHQKGDIILVLGAPGNKGQSRRKDFGDVINQHPNLQVILTADDPNFEDPLVISQEIASHINRPVTIIIDREEAIANASTLTNCKLDAIIIAGKGADAYQIIKGNHDNYSGDLEVAKKYLKR

SEQ ID NO: 11431 - protein, 792 aa, Streptococcus agalactiae
ATGTCTCACATAAAAGCAGAAAACATTATTGTATCTTACGATCAGAAAGAAATCATCAATAATCTTTCCCTCAGTATACTTAACCAAAAAATAACAACGATTATTGGTGCCAATGGATGTGGAAAGTCTACTCTTTTGAAGGCTCTCACACGCATCCATAAAATAAAAGATGGTACTATCACTATTGATGGTCATGATATTGCACATTTACCCACAAAGGAAATTGCTAAGAAGATTGCACTTCTCCCACAGGTGTTAGAAGCAACTGAAGGGATAACAGTTTATGAACTAATATCTTATGGACGGTTCCCACACCAAAAATACCTTGGCAATTTGACAAATGACGATCGTAGTAAAATCCATTGGGCGATGGAAATGACTAACGTAGCGCAATTTGCTAATAGAGATGTTGATGACCTTTCAGGAGGTCAGAGGCAAAAAGTATGGATTGCTATGGCTTTAGCACAAGATACAGATACTATCTTTTTAGACGAACCTACAACTTATCTTGACATGAATCATCAATTAGAAGTCTTAGAATTGCTCAAAAAACTTAATAACGAAACGCAAAAAACAATTATTATGGTCCTACACGACCTAAACCTGTCTGCGCGCTATTCTGATTATCTAGTTGCAATGAAAACCGGTAAAATTATCTATGAAGGTAGTCCTAGTCAGATCATGACTAAAGATATTATCAAAGATATTTTTAAGATTGATGCTCATATCATTCAGGACCCTATTAGTAAACAACCTGTTTTGTTATCTTATCAATTATCAACTGATCAAAAT

SEQ ID NO: 11432 - protein, 264 aa, Streptococcus agalactiae; identical to SEQ ID NO: 7178

SEQ ID NO: 11433 - protein, 930 aa, Streptococcus agalactiae
ATGAAAAAAATTGGAATTATTGTCCTCACACTACTGACCTTCTTTTTGGTATCTTGCGGACAACAAACTAAAGAAGAAAGCACTAAAACAACTATTTCTAAAATGCCTAAAATTGAAGGCTTCACCTATTATGGAAAAATTCCTGAAAATCCGAAAAAAGTAATTAATTTTACATATTCTTACACTGGATATTTATTAAAACTAGGAGTTAATGTTTCAAGTTACAGTTTAGACTTAGAAAAAGATAGCCCCGTTTTTGGTAAGCAACTGAAAGGAGCTAAAAAATTAACTGCTGATGATACAGAAGCTATTGCCGCACAAAAACCTGATTTAATCATGGTTTTTGATCAAGATCCAAACATCAATACTCTGAAAAAAATTGCACCAACTTTAGTTATTAAATATGGTGCACAAAATTATTTAGATATGATGCCAGCTTTGGGGAAAGTATTCGGTAAAGAAAAAGAAGCTAATCAGTGGGTTAGCCAATGGAAAACTAAAACTCTCGCTGCCAAAAAAGATTTACACCATATCTTAAAACCTAACACTACTTTTACCATTATGGATTTTTATGATAAAAATATCTATTTATATGGTAATAATTTTGGACGCGGTGGAGAACTAATCTATGATTCACTAGGTTATGCTGCCCCAGAAAAAGTCAAAAAAGATGTCTTTAAAAAAGGGTGGTTTACCGTTTCGCAAGAAGCAATCGGTGATTACGTTGGAGATTATGCCCTTGTTAATATAAACAAAACGACTAAAAAAGCAGCTTCATCACTTAAAGAAAGTGATGTCTGGAAGAATTTACCAGCTGTCAAAAAAGGGCACATCATAGAAAGTAACTACGACGTGTTTTATTTCTCTGACCCTCTATCTTTAGAAGCTCAATTAAAATCATTTACAAAGGCTATCAAAGAAAATACAAAT

SEQ ID NO: 11434 - protein, 310 aa, Streptococcus agalactiae
MKKIGIIVLTLLTFFLVSCGQQTKEESTKTTISKMPKIEGFTYYGKIPENPKKVINFTYSYTGYLLKLGVNVSSYSLDLEKDSPVFGKQLKGAKKLTADDTEAIAAQKPDLIMVFDQDPNINTLKKIAPTLVIKYGAQNYLDMMPALGKVFGKEKEANQWVSQWKTKTLAAKKDLHHILKPNTTFTIMDFYDKNIYLYGNNFGRGGELIYDSLGYAAPEKVKKDVFKKGWFTVSQEAIGDYVGDYALVNINKTTKKAASSLKESDVWKNLPAVKKGHIIESNYDVFYFSDPLSLEAQLKSFTKAIKENTN

SEQ ID NO: 11435 - protein, 1023 aa, Streptococcus agalactiae
ATGTTTAAAGCTTCAAAAAAACTCGTTCAAAAAAATAAGTCAAATCATTTTTGGCTTGTTTTTTTCATAACACTTATACTATTTCTTATTGGTTGTTACGCTAGCTTACGATTTGGTGCTATCAATTTCAAGACTAGTGATTTAATAACCGTTTTAAAAAATCCCTTAAAAAACTCTAATGCTCAGGATGTTATTTTTGACATTAGACTACCACGCATAATTGCAGCTATCTTAGTAGGTGCAGCTATGTCACAAGCAGGTGCTATTATGCAGGGAGTCACTCGAAACGCCATTGCTGATCCTGGACTACTAGGTATTAACGCCGGAGCTGGGTTAGCCCTTGTTGTTGCATATGCTTTTTTAGGGAGCATGCACTATAGTACGATTCTCATAGTCTGCTTACTAGGGTCTGTCATTTCTTGTCTTTTAGTCTTCACACTCTCTTATACAAAGCAAAAGGGTTACCACCAACTACGACTCATTTTAGCCGGAGCGATGTTCTCCACACTTTTTACGTCTGTCGGACAAGTGGTTACATTATACTTTAAACTCAATCGAACTGTTATCGGTTGGCAAGCAGGTGGTTTATCCCAAATTAACTGGAAAATGCTAATCATAATAGCACCTATCATTATTTTAGGTTTACTTATTTCACAACTCCTAGCACATCAATTAACTATCTTGAGCCTTAATGAATCTGTGGCTAAAGCATTAGGACAAAAAACTCAATTAATGACTGCGTTTCTATTACTTATTGTTTTGTTTTTATCGGCTTCATCAGTCGCTTTGATAGGAACCGTTTCTTTCATTGGATTGATTATTCCACATTTTATTAAGCTTTTTATTCCCAAAGATTATCGTCTGTTATTGCCTTTAATAGGATTTTCAGGGGCTACTTTCATGATCTGGGTAGACTTATCATCTCGTATTATAAATCCCCCTTCAGAGACACCAATTAGTTCTATAATCAGTATCGTAGGGCTTCCATGTTTCCTATGGTTAATTAGAAAAGGGAAAAATCTA

SEQ ID NO: 11436 - protein, 341 aa, Streptococcus agalactiae
MFKASKKLVQKNKSNHFWLVFFITLILFLIGCYASLRFGAINFKTSDLITVLKNPLKNSNAQDVIFDIRLPRIIAAILVGAAMSQAGAIMQGVTRNAIADPGLLGINAGAGLALVVAYAFLGSMHYSTILIVCLLGSVISCLLVFTLSYTKQKGYHQLRLILAGAMFSTLFTSVGQVVTLYFKLNRTVIGWQAGGLSQINWKMLIIIAPIIILGLLISQLLAHQLTILSLNESVAKALGQKTQLMTAFLLLIVLFLSASSVALIGTVSFIGLIIPHFIKLFIPKDYRLLLPLIGFSGATFMIWVDLSSRIINPPSETPISSIISIVGLPCFLWLIRKGKNL

SEQ ID NO: 11437 - protein, 999 aa, Streptococcus agalactiae
ATGATTCAAAAAAATAAAGCTCCTTTTGTTTTAATATCATCTGTCATTATCCTACTATTATTAATACTAGTATCAATTTCACTTGGCTATGCTAATACTTCCGTTATTGACGTTTTAAAACTAATAAGTGGAAAATCTGATGATGCCTTCCTTTTTATCATTACTAACATTCGTTTACCTCGTATTATTGTCTGTATCTTTGGGGGAGCTTCTTTAGGAATTGCTGGGTTGCTATTACAGACATTAACCAAAAATCCACTAGCTGATTCCGGTATTCTTGGTATCAATGCTGGAGCTGGATTAGTAATCGCTCTAACCATAGGAACATTTAATGTTAGTAATCCGACTATCTTATACTTTTTACCCCTACTTGCTATGTTTGGAGGGTTGGTAACTATTTTTCTTGTCTATCTTATGTCATACAGAAGAAATCACAATATTAGCCCTACACGATTAATCGTCACTGGTATCGGTATATCTACAATGATTTCAGGCATTATGATTTCTATTATTAGTCAGTCTAATAATCAAAAAATGGATATGATCGTTGAATGGCTTAGTGGAAAAATTACAATTAGTTCCTGGACTACCATTATCACTTTTATCCCGATTCTCATTTTGTTATGGGGATTAGCATATAGTCACAGTCGCCACCTTAATATTATGAACTTAAACGAGCAGACTGCTCTCGCTCTAGGACTTCATTTAAAAAAGGAAAGAATATATACTTTGGTGCTGGCAAGTAGCCTTGCTGCTATTAGCGTCGTCTTAATTGGTAATATTACTTTTATAGGCTTACTCGCTGGGCACTTAAGTAGACGACTATTAGGAAATAACCATAAAATTATACTACCTAGCTGTCTTCTTATTGGTGCTATTATCCTATTGGTATCAGATACTATAGGTCGTCTCCTCTTAGTTGGTACAGGTATTCCCACTGGATTGGTTGTATCAATAATTGGTGCCCCCTATTTTCTCTGGTTGATGACAAAAGTTGAC

SEQ ID NO: 11438 - protein, 333 aa, Streptococcus agalactiae
MIQKNKAPFVLISSVIILLLLILVSISLGYANTSVIDVLKLISGKSDDAFLFIITNIRLPRIIVCIFGGASLGIAGLLLQTLTKNPLADSGILGINAGAGLVIALTIGTFNVSNPTILYFLPLLAMFGGLVTIFLVYLMSYRRNHNISPTRLIVTGIGISTMISGIMISIISQSNNQKMDMIVEWLSGKITISSWTTIITFIPILILLWGLAYSHSRHLNIMNLNEQTALALGLHLKKERIYTLVLASSLAAISVVLIGNITFIGLLAGHLSRRLLGNNHKIILPSCLLIGAIILLVSDTIGRLLLVGTGIPTGLVVSIIGAPYFLWLMTKVD

SEQ ID NO: 11439 - protein, 651 aa, Streptococcus agalactiae
ATGATATTAACGTTTAATCCAGGAAAGTTAGAAAGACAAGAGTTTTTTAAGGAGCTTATTAACTATCTTTGGATACATGATGATGTAACACTAAGACAAATAAAGTCCCACTTTACAGACTATTCTAAAATTGACCGTTTGTTAGAAGAATATATTAATCATGGATATATCCTTCGCCAAAATAAACGCTACAGTCTTAACCTTCCTTTTCTGAGTTCGCTGGATGGATTAGCATTAGATGATTTGGTTTTCATAGATTCTGATAGTCAAATCTATCAGTTATTACAGAAGCGAAAATTTGTGACAAATTTAGATAACCAAACCAATCACTTGGTATTTGTAGAAGAGACAGATTTTGAAAGAAACACTTTGACTCTTTCTAATTATTTCTATAAACTAACTAACGGTTATCCACTTTCAAGAGAACAAAAAAAGCTTTATCAACTTTTAGGAGATGTTAATTCGGAATATGCTTTAAAATATATGTCAAGCTTTATATTGAAATTTCTTCGCAAGGATAGTGTTAAGCAAAAACGTACAGATATTTTTATCCAAGCTTTAGAATTACTTGGATATATTAGCTTAAACCAAGATACTACCTATCGTTTAAATGCTAAACTTGATGTTGAAGCTTTAAAGATTTACTTAACA

SEQ ID NO: 11440 - protein, 217 aa, Streptococcus agalactiae
MILTFNPGKLERQEFFKELINYLWIHDDVTLRQIKSHFTDYSKIDRLLEEYINHGYILRQNKRYSLNLPFLSSLDGLALDDLVFIDSDSQIYQLLQKRKFVTNLDNQTNHLVFVEETDFERNTLTLSNYFYKLTNGYPLSREQKKLYQLLGDVNSEYALKYMSSFILKFLRKDSVKQKRTDIFIQALELLGYISLNQDTTYRLNAKLDVEALKIYLT

SEQ ID NO: 11441 - protein, 933 aa, Streptococcus agalactiae
ATGTCTAAAATTTTAGTCTTTGGTCACCAAAATCCAGATTCAGATGCTATTGGATCATCAGTTGCTTTTGCATATCTAGCTAAAGAAGCTTGGGGGCTTGACACAGAGGCCGTTGCTTTAGGAACTCCAAATGAAGAAACAGCATATGTTTTAGATTATTTTGGTGTTCAAGCACCTCGAGTAGTAGAATCTGCAAAAGCAGAGGGTGTAGAGACAGTCATTTTAACTGACCATAACGAATTCCAACAATCTATTTCTGATATTAAAGATGTGACAGTTTATGGTGTTGTTGATCATCATCGTGTTGCTAACTTTGAGACTGCCAATCCGTTATATATGCGTTTGGAACCAGTTGGCTCAGCATCATCGATTGTTTACCGTATGTTTAAGGAAAATGGAGTATCAGTACCCAAAGAGTTGGCTGGTTTATTATTATCAGGTTTGATTTCAGATACTCTTCTTTTGAAATCACCAACAACTCATGCTTCAGATATTCCAGTTGCAAAAGAACTAGCAGAGCTTGCAGGTGTAAACTTAGAAGAATATGGTTTAGAAATGCTTAAAGCAGGTACTAACCTCTCAAGTAAGACTGCAGCGGAGTTGATTGATATTGATGCTAAAACATTTGAATTAAATGGAGAAGCTGTTCGTGTTGCACAAGTTAATACTGTGGACATTAACGATATTTTAGCACGTCAAGAAGAGATTGAAGTTGCTATTCAAGAAGCAATTGTCACAGAAGGTTATTCTGATTTTGTATTGATGATTACTGACATTGTTAATTCAAATTCAGAGATTTTAGCTCTCGGTTCAAATATGGCTAAAGTTGAAGCAGCTTTTGAATTTACACTTGAAAATAACCACGCTTTTCTTGCTGGGGCAGTATCACGCAAAAAACAAGTTGTTCCTCAATTGACAGAAAGCTACAATGCT

SEQ ID NO: 11442 - protein, 311 aa, Streptococcus agalactiae; identical to SEQ ID NO: 2608

SEQ ID NO: 11443 - protein, 786 aa, Streptococcus agalactiae
ATGGCAGAAATAGACTATAAAAAAGTAACAGGAATGATCCATTCTACAGAAAGTTTCGGCTCTGTGGATGGGCCAGGTATTCGTTTTATCATTTTTATGCAAGGATGTAAAATGCGTTGTCAATACTGTCATAATCCTGATACTTGGGAAATGGAAACTAACAATTCAAAGGAACGTACCGTTGAGGATGTTCTAAAGGAAGCTCTCCGTTATAAACATTTTTGGGGAAAAGATGGAGGTATCACAGTTTCAGGTGGTGAAGCAATGCTGCAAATTGACTTTATTACAGCACTCTTTATTGAGGCTAAGAAACTAGGTATTCATACGACGCTAGATACTTGTGGTTTTGCTTATCGAGCAACACCAGAATACCATGTTATCCTTGAAAAATTGTTAGATGTTACTGATTTGGTACTCCTTGACTTAAAAGAAATTGATCCAGAACAACATAAAATTGTAACTCGTCAGTCTAACAAAAATATTTTACAGTTTGCTAGATATTTATCTGATAGAGGTACTCCGGTATGGATTCGTCATGTTTTAGTTCCCGGATTGACTGATATCGATGACCATTTAAAACGTTTGGGTGAATTTGTCCAAACACTTGATAATGTCGATAAATTTGAAGTATTGCCTTATCATACCATGGGAGAGTTCAAATGGCGTGAATTAGGAATTCCGTATCCATTAGCTGGTGTGAAACCACCAACTCCAGAACGTGTTAAAAACGCTAAAGATATCATGAAAACAGAATCCTATACAGAATATCTAAAAAGAATTCAAAAT

SEQ ID NO: 11444 - protein, 262 aa, Streptococcus agalactiae
MAEIDYKKVTGMIHSTESFGSVDGPGIRFIIFMQGCKMRCQYCHNPDTWEMETNNSKERTVEDVLKEALRYKHFWGKDGGITVSGGEAMLQIDFITALFIEAKKLGIHTTLDTCGFAYRATPEYHVILEKLLDVTDLVLLDLKEIDPEQHKIVTRQSNKNILQFARYLSDRGTPVWIRHVLVPGLTDIDDHLKRLGEFVQTLDNVDKFEVLPYHTMGEFKWRELGIPYPLAGVKPPTPERVKNAKDIMKTESYTEYLKRIQN

SEQ ID NO: 11445 - protein, 1332 aa, Streptococcus agalactiae
ATGGAAGACCCTGGCAGTCAGAGTTTGTTACTACAATTTGTTATTTTATTAATATTAACCCTATTTAACGCCTTCTTTTCAGCATCTGAAATGGCTTTAGTATCGCTAAACCGCTCTAAAGTAGAACAGAAAGCTGAAGAAGGGGACAAAAGGTATCGACGTCTTTTGGACGTTCTTGAAAATCCCAATAATTTTTTATCAACAATTCAAGTTGGTATTACTTTTATTAGCCTTTTGCAAGGGGCTAGTTTATCTGCCTCACTAGGACATGTGATTTCAGGGTGGCTAGGAAATTCAGCAACAGCCCGTACAGCAGGGAGTATTATTGCGCTAATCTTTTTAACATATGTCTCTATTGTTCTAGGAGAATTATATCCTAAGCGTATTGCTATGAATTTGAAAGATCGTCTAGCAATTGTTTCAGCTCCCATTATTATCTTTCTAGGAAAAATAGTAAGCCCCTTTGTATGGTTGCTCTCAGCTTCAACTAACTTATTGAGTAGAATCACTCCGATGACTTTTGATGATGCTGACGAGAAGATGACACGTGATGAAATTGAATATATGTTGACGAATAGTGAAGAAACTTTGGATGCTGAAGAAATTGAGATGCTGCAAGGGATTTTCTCGCTAGATGAAATGATGGCGCGTGAAGTTATGGTTCCGCGTACTGATGCTTTCATGATTGACATCAACAATGATGCACAATCAAATATTGAAGGAATTTTATCACAAAACTTTTCTCGTGTCCCTGTTTATGATGACGATAAAGATAGAGTTGTAGGTGTTTTACATACCAAGCGCTTATTGGAAGCGGGATTTAAAACTGGTTTTGATACTATCGACTTGCGAAAAATACTTCAGGAACCTCTTTTTGTTCCAGAAACGATTTTTGTAGATGATCTTTTAAAAGCATTGCGCAACACTCAAAATCAAATGGCCATTTTACTAGATGAATATGGTGGCGTTGCTGGTTTAGTAACTCTAGAAGATTTATTGGAAGAAATTGTCGGCGAAATTGATGATGAAACAGATACAGCTGAACAATTTGTCAGGGAAATCGATGAGAATATCTATATTGTTCTAGGAACTATGACGCTTAATGAATTTAATGATTATTTTGAGACAGAGTTAGAAAGTGATGATGTTGATACAATTGCGGGTTATTATTTAACTGGTGTGGGTAGTATTCCAAACCAAGAGGAAAAAGTAGCTTACGAAGTAGACAGTAAAGATAAACACATCACTTTGATTAATGATAAAGTTAAAGATGGTCGTATAACAAAATTGAAGGTGCTATTGTCTGATATAGAACAGAATATTGAAAAAGAC

SEQ ID NO: 11446 - protein, 444 aa, Streptococcus agalactiae
MEDPGSQSLLLQFVILLILTLFNAFFSASEMALVSLNRSKVEQKAEEGDKRYRRLLDVLENPNNFLSTIQVGITFISLLQGASLSASLGHVISGWLGNSATARTAGSIIALIFLTYVSIVLGELYPKRIAMNLKDRLAIVSAPIIIFLGKIVSPFVWLLSASTNLLSRITPMTFDDADEKMTRDEIEYMLTNSEETLDAEEIEMLQGIFSLDEMMAREVMVPRTDAFMIDINNDAQSNIEGILSQNFSRVPVYDDDKDRVVGVLHTKRLLEAGFKTGFDTIDLRKILQEPLFVPETIFVDDLLKALRNTQNQMAILLDEYGGVAGLVTLEDLLEEIVGEIDDETDTAEQFVREIDENIYIVLGTMTLNEFNDYFETELESDDVDTIAGYYLTGVGSIPNQEEKVAYEVDSKDKHITLINDKVKDGRITKLKVLLSDIEQNIEKD

SEQ ID NO: 11447 - protein, 564 aa, Streptococcus agalactiae
ATGATTAAAAGACCAATTCATCTTTCTCATGATTTTTTAGCAGAAGTTATTGATAAAGAAGCAATAACGCTTGATGCAACTATGGGAAATGGGAATGATACTGTTTTTTTAGCGAAAAGTTCTAAAAAAGTTTATGCATTTGATATTCAAGAAGAAGCAATAGCAAAAACGAAAGCAAAGCTCACGGAGCAAGGGATCTCTAACGCTGAACTTATCTTGGATGGGCATGAAAATTTGGAACAGTATGTTCATACACCTTTAAGAGCAGCTATATTTAATCTGGGATACTTACCCTCAGCGGATAAAACAGTTATTACAAAACCTCACACAACTATCAAGGCAATCAAAAACGTTTTAGATATTTTAGAAGTAGGTGGACGTCTATCGCTTATGGTTTATTATGGTCATGATGGTGGAAAAAGTGAGAAAGATGCGGTGATAGCATTCGTGGAACAATTACCACAGAATAATTTCGCTACAATGCTTTATCAACCACTCAATCAAGTTAACACGCCCCCCTTTTTAATTATGGTAGAAAAGTTACAATCATATGAAAATGAGGTG

SEQ ID NO: 11448 - protein, 188 aa, Streptococcus agalactiae; identical to SEQ ID NO: 2614

SEQ ID NO: 11449 - protein, 933 aa, Streptococcus agalactiae
ATGAAAAAACGTTATCGTGCGATTAATGATTATTATCGAGAACTCTTTGGAGAAAAAATATTTAAATTACCTATAGATGCTGGTTTTGACTGTCCTAACAGAGATGGAACAGTTGCTAGAGGAGGGTGCACTTTTTGCACAGTTTCTGGTTCAGGGGATGCTATAGTTGCTCCAGAAGCTCCTATTCGTGAACAATTCTATAAAGAAATTGATTTCATGCATAGAAAGTGGCCTGAGGTTAATAAATACTTAGTCTATTTTCAAAATTTTACCAATACCCATGCTAAGTTAGAGATAATTAAAGAGCGTTACGAACAGGCTATTAATGAGCCAGGAGTTATCGGGATCAACATCGGAACAAGGCCGGATTGCTTACCTGATGAAACTATATACTATCTCGCTGAACTTTCTGAAAGAATGCATGTGACTTTAGAATTAGGTCTTCAGACAACTTATGAAGTAACTTCTGCATTAATAAATAGAGCACATTCATATGACCTTTACAAAAAAACTGTTAAGAGAATACGAGAATTAGCTCCTAAAGTAGAAATCGTTTCTCACCTAATAAATGGTCTCCCAGGGGAGACACATGATATGATGGTGGAAAATGTTCGTCGATGTGTTACGGATAATGATATTCAGGGTATAAAATTACACCTTCTGCATCTTATGACTAATACAAGAATGCAGAGAGATTACCATGAAGGTCGTTTACGTTTGTTAAGTCAAGAAGACTATATTTCGATTATTTGTGACCAACTGGAGATTATTCCAAAACATATTGTTATTCACCGAATTACTGGTGATGCGCCACGTCATATGTTAATTGGACCGATGTGGAGCCTTAATAAATGGGAAGTGCTTAATGCCATTGACAAAGAAATGGAGAAAAGACAGTCATATCAAGGATGTAAAGTTGAGGTAAAACATGAT

SEQ ID NO: 11450 - protein, 311 aa, Streptococcus agalactiae
MKKRYRAINDYYRELFGEKIFKLPIDAGFDCPNRDGTVARGGCTFCTVSGSGDAIVAPEAPIREQFYKEIDFMHRKWPEVNKYLVYFQNFTNTHAKLEIIKERYEQAINEPGVIGINIGTRPDCLPDETIYYLAELSERMHVTLELGLQTTYEVTSALINRAHSYDLYKKTVKRIRELAPKVEIVSHLINGLPGETHDMMVENVRRCVTDNDIQGIKLHLLHLMTNTRMQRDYHEGRLRLLSQEDYISIICDQLEIIPKHIVIHRITGDAPRHMLIGPMWSLNKWEVLNAIDKEMEKRQSYQGCKVEVKHD

SEQ ID NO: 11451 - protein, 639 aa, Streptococcus agalactiae
ATGTTATCTCGTCAAAATAGTAAACTTATTCAAGCATTTATTGCTATTATCTTATTTTTCAGTTTAGGATTGGTCATCAAATATTGGCCCGACACTGTAATTTCATTTGACCAAACTATTCAAGAAAGTGTTAGAGGACAGTTGCCAAATCTTTCTACAAGATTTTTCAAGTTAATCACTGTGATTGGTAATACTGTAAGCCAGATAGCTATTGCGATTATGAGCGTCACTTTCTGTTACCTTAAGAAGTGGTATCCTCAAGCTAGATTTATCGCAGTAAATGCTATTATCTCTGGTATATGTATACTTTCTTTAAAACTTATTTTTCAAAGAGTAAGACCAACTTTAACCCATTTAGTATTTGCAGGTGGCTATTCGTTTCCCAGTGGGCACTCGATGGGAACATTTATGATATTTGGGAGTATTATTATCTTATTGCAGTACTATATGCCTAAGAGTATATGGAAACTGTTGTACCAAGGTATTTTGGGTTTGCTCATTTTTTTAATTGGGTTATCTCGTATTTACCTAGGGGTTCATTTTCCGACAGATGTTTTAGCTGGTTTTATACTTGCTTATGGTATTTTGAATCTAACTGCGTATATCTTTTTAGCCAAGGATTGGTTAAAGAAAGTGAAG

SEQ ID NO: 11452 - protein, 213 aa, Streptococcus agalactiae
MLSRQNSKLIQAFIAIILFFSLGLVIKYWPDTVISFDQTIQESVRGQLPNLSTRFFKLITVIGNTVSQIAIAIMSVTFCYLKKWYPQARFIAVNAIISGICILSLKLIFQRVRPTLTHLVFAGGYSFPSGHSMGTFMIFGSIIILLQYYMPKSIWKLLYQGILGLLIFLIGLSRIYLGVHFPTDVLAGFILAYGILNLTAYIFLAKDWLKKVK

SEQ ID NO: 11453 - protein, 582 aa, Streptococcus agalactiae
ATGACAAATACACGTAAAATGGTGACAATCGCCATTCTTTCTGCCTTATCTTTTGTATTGATGATGGTTTCATTTCCATTAATACCAGGAGCAGAATTTTTAAAGGTTGATTTTTCAATCCTTCCGATGTTAGTTGCTTTTATTTTATTTGATTTGAAATCAAGTTATGGTGTACTCTTATTAAGATCACTTTTAAAAGTTATACTTGCTAATCGTGGTCCAGAAACGTTTATTGGTTTACCGATGAATATGGTTGCTCTAGCTTTATTTTTAGCAAGTTTCGCTATTTTCTGGAAAAATAGAGAGAGTGCAAAAGATTTTATTAAAGCTAGTCTATTTGGTACAGTTAGCTTGACCGTATCTATGGTAGCTCTCAACTATGTCTTTGCGATTCCTTTGTATGCTATATTTGCTAACTTTGATATCAGAACATTTATTGGTGTAGGCAATTACCTTTTAACAATGGTTATTCCATTTAATATCGTTGAGGGAATTTTAATTTCGATTGTTTTCTATCTAACTTACGTGGCTTGTTTGCCAATATTAGAAAGATATAAAAAGACTAATGTTATCTCGTCAAAA

SEQ ID NO: 11454 - protein, 194 aa, Streptococcus agalactiae; identical to SEQ ID NO: 2620

SEQ ID NO: 11455 - protein, 924 aa, Streptococcus agalactiae
ATGAAAAAGATTAGAAAAAGTTTAGGACTTCTACTATGTTGCTTTTTAGGATTGGTACAATTAGCGTTTTTTTCGGTAGCCAGTGTAAATGCTGATACCCCTAATCAACTAACAATCACACAGATAGGACTTCAGCCAAATACTACAGAGGAGGGGATTTCTTATCGTTTATGGACTGTGACTGACAACTTAAAAGTTGATTTATTGAGCCAAATGACAGATAGCGAATTGAACCAGAAGTATAAGAGTATCTTGACTTCTCCTACTGATACTAATGGTCAGACAAAGATAGCACTCCCAAATGGTTCGTACTTTGGTCGTGCTTATAAAGCTGATCAAAGCGTTTCAACAATAGTACCTTTTTATATTGAATTACCAGATGATAAGTTATCAAATCAATTACAGATAAATCCTAAGCGAAAAGTTGAAACAGGCCGATTAAAACTTATTAAATATACAAAAGAAGGAAAGATAAAGAAAAGGCTATCCGGAGTAATATTTGTATTATACGATAACCAGAATCAGCCAGTTCGCTTTAAAAATGGACGATTTACGACCGATCAAGATGGGATTACTTCATTAGTAACTGATGATAAGGGAGAAATTGAGGTTGAAGGTTTATTACCTGGTAAGTATATTTTTCGAGAAGCAAAAGCACTAACTGGTTACCGTATATCTATGAAGGATGCTGTAGTTGCTGTAGTTGCTAATAAAACACAGGAAGTAGAGGTAGAAAACGAAAAAGAAACTCCTCCACCAACAAATCCTAAACCATCACAACCGCTTTTTCCACAATCATTTCTTCCTAAAACAGGAATGATTATTGGTGGAGGACTGACAATTCTTGGTTGTATTATTTTGGGAATTTTGTTTATCTTTTTAAGAAAAACTAAAAATAGCAAATCTGAAAGAAACGATACAGTA

SEQ ID NO: 11456 - protein, 308 aa, Streptococcus agalactiae; identical to SEQ ID NO: 2622

SEQ ID NO: 11457 - protein, 882 aa, Streptococcus agalactiae
ATGGGAGGAAAATTTCAGAAAAACCTTAAGAAATCGGTCGTTTTAAATCGATGGATGAATGTAGGCCTGATACTATTGTTCTTAGTTGGTCTTTTGATAACCTCATATCCTTTTATTTCAAATTGGTACTATAATATTAAAGCTAATAATCAAGTAACTAACTTTGATAATCAAACCCAAAAATTAAATACTAAAGAGATTAATAGACGATTTGAGTTAGCAAAAGCTTATAATAGAACACTGGACCCAAGCCGCCTATCAGATCCCTATACTGAAAAAGAAAAAAAAGGTATTGCTGAATACGCCCACATGCTTGAGATTGCTGAAATGATTGGATATATTGATATACCGTCTATCAAGCAAAAATTACCTATCTATGCGGGGACTACCAGTAGTGTTCTTGAAAAAGGAGCAGGACACCTTGAAGGAACCTCCTTGCCAATTGGTGGAAAAAGTTCACATACTGTTATCACAGCTCATCGCGGCTTACCTAAAGCTAAGTTATTTACAGATTTAGATAAACTTAAAAAAGGAAAAATTTTTTATATTCATAATATCAAAGAAGTTTTAGCCTATAAGGTTGATCAAATAAGTGTTGTAAAGCCAGATAATTTTTCTAAATTATTGGTTGTTAAAGGTAAGGATTATGCGACTTTGCTAACATGTACACCTTATTCGATTAATTCACATCGTTTACTAGTTAGAGGGCATCGAATCAAGTATGTACCTCCTGTTAAAGAAAAGAACTATTTAATGAAAGAATTGCAAACACACTATAAACTTTATTTCCTCTTATCAATCCTAGTTATTCTTATATTAGTCGCTTTACTATTATATTTAAAACGAAAATTTAAAGAGAGAAAGAGAAAGGGAAATCAAAAA

SEQ ID NO: 11458 - protein, 294 aa, Streptococcus agalactiae; identical to SEQ ID NO: 2624

SEQ ID NO: 11459 - protein, 876 aa, Streptococcus agalactiae
GTGAAGACTAAAAATATCAACAAAAAAACTAAAAAGAAGAAGTCAAATCTTCCTTTTATCATTCTTTTTCTAATAGGTCTATCTATTTTATTGTATCCAGTGGTATCACGTTTTTACTATACGATAGAATCTAATAATCAAACACAGGATTTTGAGAGAGCTGCTAAAAAACTTAGTCAGAAAGAAATCAATCGTCGTATGACTCTAGCACAAGCTTATAATGATTCTTTAAATAATGTCCATCTTGAAGATCCTTATGAGAAGAAACGAATTCAAAAGGGGGTAGCAGAGTACGCCCGTATGTTAGAGGTAAGTGAAAAAATCGGCACAATTTCAGTTCCTAAGATAGGTCAAAAACTCCCTATATTTGCAGGTTCAAGTCAAAAAGTTCTATCTAAAGGAGCAGGGCATTTAGAAGGTACTTCTCTTCCAATTGGAGGAAATAGCACACATACCGTTATAACAGCGCACTCAGGAATTCCAGATAAAGAACTCTTTTCTAACCTTAAAAAGTTAAAAAAAGGAGATAAGTTTTATATTCAAAACATAAAAGAAACGATAGCATATCAAGTAGATCAGATAAAAGTCGTTACACCCGATAACTTTTCAGATTTGTTGGTTGTTCCTGGACATGATTATGCAACCTTATTAACTTGCACCCCGATTATGGTCAATACACACAGACTTTTAGTAAGGGGACATCGTATTCCTTATAAAGGTCTTATTGATGAAAAATTAATGAAAGAAGGTCATTTAAACACGATTTATAGATATCTTTTCTATATATCTTTAGTTATTATTGCTTGGTTACTTTGGTTAATAAAACGTCAACGTCAAAAAAATCGTTTAGCAAGTGTTAGAAAAGGAATTGAATCA

SEQ ID NO: 11460 - protein, 292 aa, Streptococcus agalactiae
MKTKNINKKTKKKKSNLPFIILFLIGLSILLYPVVSRFYYTIESNNQTQDFERAAKKLSQKEINRRMTLAQAYNDSLNNVHLEDPYEKKRIQKGVAEYARMLEVSEKIGTISVPKIGQKLPIFAGSSQKVLSKGAGHLEGTSLPIGGNSTHTVITAHSGIPDKELFSNLKKLKKGDKFYIQNIKETIAYQVDQIKVVTPDNFSDLLVVPGHDYATLLTCTPIMVNTHRLLVRGHRIPYKGLIDEKLMKEGHLNTIYRYLFYISLVIIAWLLWLIKRQRQKNRLASVRKGIES

SEQ ID NO: 11461 - protein, 2022 aa, Streptococcus agalactiae
ATGAAAAAAATCAACAAATGTCTTACAATGTTCTCGACACTGCTATTGATCTTAACGTCACTATTCTCAGTTGCACCAGCGTTTGCGGACGACGCAACAACTGATACTGTGACCTTGCACAAGATTGTCATGCCACAAGCTGCATTTGATAACTTTACTGAAGGTACAAAAGGTAAGAATGATAGCGATTATGTTGGTAAACAAATTAATGACCTTAAATCTTATTTTGGCTCAACCGATGCTAAAGAAATCAAGGGTGCTTTCTTTGTTTTCAAAAATGAAACTGGTACAAAATTCATTACTGAAAATGGTAAGGAAGTCGATACTTTGGAAGCTAAAGATGCTGAAGGTGGTGCTGTTCTTTCAGGGTTAACAAAAGACAATGGTTTTGTTTTTAACACTGCTAAGTTAAAAGGAATTTACCAAATCGTTGAATTGAAAGAAAAATCAAACTACGATAACAACGGTTCTATCTTGGCTGATTCAAAAGCAGTTCCAGTTAAAATCACTCTGCCATTGGTAAACAACCAAGGTGTTGTTAAAGATGCTCACATTTATCCAAAGAATACTGAAACAAAACCACAAGTAGATAAGAACTTTGCAGATAAAGATCTTGATTATACTGACAACCGAAAAGACAAAGGTGTTGTCTCAGCGACAGTTGGTGACAAAAAAGAATACATAGTTGGAACAAAAATTCTTAAAGGCTCAGACTATAAGAAACTGGTTTGGACTGATAGCATGACTAAAGGTTTGACGTTCAACAACAACGTTAAAGTAACATTGGATGGTGAAGATTTTCCTGTTTTAAACTACAAACTCGTAACAGATGACCAAGGTTTCCGTCTTGCCTTGAATGCAACAGGTCTTGCAGCAGTAGCAGCAGCTGCAAAAGACAAAGATGTTGAAATCAAGATCACTTACTCAGCTACGGTGAACGGCTCCACTACTGTTGAAATTCCAGAAACCAATGATGTTAAATTGGACTATGGTAATAACCCAACGGAAGAAAGTGAACCACAAGAAGGTACTCCAGCTAACCAAGAAATTAAAGTCATTAAAGACTGGGCAGTAGATGGTACAATTACTGATGCTAATGTTGCAGTTAAAGCTATCTTTACCTTGCAAGAAAAACAAACGGATGGTACATGGGTGAACGTTGCTTCACACGAAGCAACAAAACCATCACGCTTTGAACATACTTTCACAGGTTTGGATAATGCTAAAACTTACCGCGTTGTCGAACGTGTTAGCGGCTACACTCCAGAATACGTATCATTTAAAAATGGTGTTGTGACTATCAAGAACAACAAAAACTCAAATGATCCAACTCCAATCAACCCATCAGAACCAAAAGTGGTGACTTATGGACGTAAATTTGTGAAAACAAATCAAGCTAACACTGAACGCTTGGCAGGAGCTACCTTCCTCGTTAAGAAAGAAGGCAAATACTTGGCACGTAAAGCAGGTGCAGCAACTGCTGAAGCAAAGGCAGCTGTAAAAACTGCTAAACTAGCATTGGATGAAGCTGTTAAAGCTTATAACGACTTGACTAAAGAAAAACAAGAAGGCCAAGAAGGTAAAACAGCATTGGCTACTGTTGATCAAAAACAAAAAGCTTACAATGACGCTTTTGTTAAAGCTAACTACTCATATGAATGGGTTGCAGATAAAAAGGCTGATAATGTTGTTAAATTGATCTCTAACGCCGGTGGTCAATTTGAAATTACTGGTTTGGATAAAGGCACTTATGGCTTGGAAGAAACTCAAGCACCAGCAGGTTATGCGACATTGTCAGGTGATGTAAACTTTGAAGTAACTGCCACATCATATAGCAAAGGGGCTACAACTGACATCGCATATGATAAAGGCTCTGTAAAAAAAGATGCCCAACAAGTTCAAAACAAAAAAGTAACCATCCCACAAACAGGTGGTATTGGTACAATTCTTTTCACAATTATTGGTTTAAGCATTATGCTTGGAGCAGTAGTTATCATGAAAAAACGTCAATCAGAGGAAGCT

SEQ ID NO: 11462 - protein, 674 aa, Streptococcus agalactiae
MKKINKCLTMFSTLLLILTSLFSVAPAFADDATTDTVTLHKIVMPQAAFDNFTEGTKGKNDSDYVGKQINDLKSYFGSTDAKEIKGAFFVFKNETGTKFITENGKEVDTLEAKDAEGGAVLSGLTKDNGFVFNTAKLKGIYQIVELKEKSNYDNNGSILADSKAVPVKITLPLVNNQGVVKDAHIYPKNTETKPQVDKNFADKDLDYTDNRKDKGVVSATVGDKKEYIVGTKILKGSDYKKLVWTDSMTKGLTFNNNVKVTLDGEDFPVLNYKLVTDDQGFRLALNATGLAAVAAAAKDKDVEIKITYSATVNGSTTVEIPETNDVKLDYGNNPTEESEPQEGTPANQEIKVIKDWAVDGTITDANVAVKAIFTLQEKQTDGTWVNVASHEATKPSRFEHTFTGLDNAKTYRVVERVSGYTPEYVSFKNGVVTIKNNKNSNDPTPINPSEPKVVTYGRKFVKTNQANTERLAGATFLVKKEGKYLARKAGAATAEAKAAVKTAKLALDEAVKAYNDLTKEKQEGQEGKTALATVDQKQKAYNDAFVKANYSYEWVADKKADNVVKLISNAGGQFEITGLDKGTYGLEETQAPAGYATLSGDVNFEVTATSYSKGATTDIAYDKGSVKKDAQQVQNKKVTIPQTGGIGTILFTIIGLSIMLGAVVIMKKRQSEEA

SEQ ID NO: 11463 - protein, 2703 aa, Streptococcus agalactiae
ATGAGAAAATACCAAAAATTTTCTAAAATATTGACGTTAAGTCTTTTTTGTTTGTCGCAAATACCGCTTAATACCAATGTTTTAGGGGAAAGTACCGTACCGGAAAATGGTGCTAAAGGAAAGTTAGTTGTTAAAAAGACAGATGACCAGAACAAACCACTTTCAAAAGCTACCTTTGTTTTAAAAACTACTGCTCATCCAGAAAGTAAAATAGAAAAAGTAACTGCTGAGCTAACAGGTGAAGCTACTTTTGATAATCTCATACCTGGAGATTATACTTTATCAGAAGAAACAGCGCCCGAAGGTTATAAAAAGACTAACCAGACTTGGCAAGTTAAGGTTGAGAGTAATGGAAAAACTACGATACAAAATAGTGGTGATAAAAATTCCACAATTGGACAAAATCAGGAAGAACTAGATAAGCAGTATCCCCCCACAGGAATTTATGAAGATACAAAGGAATCTTATAAACTTGAGCATGTTAAAGGTTCAGTTCCAAATGGAAAGTCAGAGGCAAAAGCAGTTAACCCATATTCAAGTGAAGGTGAGCATATAAGAGAAATTCCAGAGGGAACATTATCTAAACGTATTTCAGAAGTAGGTGATTTAGCTCATAATAAATATAAAATTGAGTTAACTGTCAGTGGAAAAACCATAGTAAAACCAGTGGACAAACAAAAGCCGTTAGATGTTGTCTTCGTACTCGATAATTCTAACTCAATGAATAACGATGGCCCAAATTTTCAAAGGCATAATAAAGCCAAGAAAGCTGCCGAAGCTCTTGGGACCGCAGTAAAAGATATTTTAGGAGCAAACAGTGATAATAGGGTTGCATTAGTTACCTATGGTTCAGATATTTTTGATGGTAGGAGTGTAGATGTCGTAAAAGGATTTAAAGAAGATGATAAATATTATGGCCTTCAAACTAAGTTCACAATTCAGACAGAGAATTATAGTCATAAACAATTAACAAATAATGCTGAAGAGATTATAAAAAGGATTCCGACAGAAGCTCCTAAAGCTAAGTGGGGATCTACTACCAATGGATTAACTCCAGAGCAACAAAAGGAGTACTATCTTAGTAAAGTAGGAGAAACATTTACTATGAAAGCCTTCATGGAGGCAGATGATATTTTGAGTCAAGTAAATCGAAATAGTCAAAAAATTATTGTTCATGTAACTGATGGTGTTCCTACGAGATCATATGCTATTAATAATTTTAAACTGGGTGCATCATATGAAAGCCAATTTGAACAAATGAAAAAAAATGGATATCTAAATAAAAGTAATTTTCTACTTACTGATAAGCCCGAGGATATAAAAGGAAATGGGGAGAGTTACTTTTTGTTTCCCTTAGATAGTTATCAAACACAGATAATCTCTGGAAACTTACAAAAACTTCATTATTTAGATTTAAATCTTAATTACCCTAAAGGTACATTTTATCGAAATGGACCAGTAAGAGAACATGGAACACCAACCAAACTTTATATAAATAGTTTAAAACAGAAAAATTATGACATCTTTAATTTTGGTATAGATATATCTGGTTTTAGACAAGTTTATAATGAGGATTATAAGAAAAATCAAGATGGTACTTTTCAAAAATTGAAAGAGGAAGCTTTTGAACTTTCAGATGGGGAAATAACAGAACTAATGAAGTCATTCTCTTCTAAACCTGAGTATTATACCCCGATAGTAACTTCATCCGATGCATCTAACAATGAAATTTTATCTAAAATTCAGCAACAATTTGAAAAGATTTTAACAAAAGAAAACTCAATTGTTAATGGAACTATAGAAGATCCTATGGGTGACAAAATCAATTTACAGCTTGGCAACGGACAAACATTGCAACCAAGTGATTATACTTTACAGGGAAATGATGGAAGTATAATGAAAGATAGCATTGCAACTGGTGGGCCTAATAATGATGGTGGAATACTTAAAGGGGTTAAATTAGAATACATCAAAAATAAACTCTACGTTAGAGGTTTGAACTTAGGGGAGGGACAAAAAGTAACACTCACATATGATGTGAAACTAGATGACAGTTTTATAAGTAACAAATTCTATGACACTAATGGTAGAACAACATTGAATCCTAAATCAGAGGATCCTAATACACTTAGAGATTTTCCAATCCCTAAAATTCGTGATGTGAGAGAATATCCTACAATAACGATTAAAAACGAGAAGAAGTTAGGTGAAATTGAATTTACAAAAGTTGATAAAGATAATAATAAGTTGCTTCTCAAAGGAGCTACGTTTGAACTTCAAGAATTTAATGAAGATTATAAACTTTATTTACCAATAAAAAATAATAATTCAAAAGTAGTGACGGGAGAAAACGGCAAAATTTCTTACAAAGATTTGAAAGATGGCAAATATCAGTTAATAGAAGCAGTTTCGCCGAAGGATTATCAAAAAATTACTAATAAACCAATTTTAACTTTTGAAGTTGTTAAAGGATCGATACAAAATATAATAGCTGTTAATAAACAGATTTCTGAATATCATGAGGAAGGTGACAAGCATTTAATTACCAACACGCATATTCCACCAAAAGGAATTATTCCGATGACAGGTGGGAAAGGAATTCTATCTTTCATTTTAATAGGTGGATCTATGATGTCTATTGCAGGTGGAATTTATATTTGGAAAAGATATAAGAAATCTAGTGATATATCTAGAGAAAAAGAT

SEQ ID NO: 11464 - protein, 901 aa, Streptococcus agalactiae
MRKYQKFSKILTLSLFCLSQIPLNTNVLGESTVPENGAKGKLVVKKTDDQNKPLSKATFVLKTTAHPESKIEKVTAELTGEATFDNLIPGDYTLSEETAPEGYKKTNQTWQVKVESNGKTTIQNSGDKNSTIGQNQEELDKQYPPTGIYEDTKESYKLEHVKGSVPNGKSEAKAVNPYSSEGEHIREIPEGTLSKRISEVGDLAHNKYKIELTVSGKTIVKPVDKQKPLDVVFVLDNSNSMNNDGPNFQRHNKAKKAAEALGTAVKDILGANSDNRVALVTYGSDIFDGRSVDVVKGFKEDDKYYGLQTKFTIQTENYSHKQLTNNAEEIIKRIPTEAPKAKWGSTTNGLTPEQQKEYYLSKVGETFTMKAFMEADDILSQVNRNSQKIIVHVTDGVPTRSYAINNFKLGASYESQFEQMKKNGYLNKSNFLLTDKPEDIKGNGESYFLFPLDSYQTQIISGNLQKLHYLDLNLNYPKGTFYRNGPVREHGTPTKLYINSLKQKNYDIFNFGIDISGFRQVYNEDYKKNQDGTFQKLKEEAFELSDGEITELMKSFSSKPEYYTPIVTSSDASNNEILSKIQQQFEKILTKENSIVNGTIEDPMGDKINLQLGNGQTLQPSDYTLQGNDGSIMKDSIATGGPNNDGGILKGVKLEYIKNKLYVRGLNLGEGQKVTLTYDVKLDDSFISNKFYDTNGRTTLNPKSEDPNTLRDFPIPKIRDVREYPTITIKNEKKLGEIEFTKVDKDNNKLLLKGATFELQEFNEDYKLYLPIKNNNSKVVTGENGKISYKDLKDGKYQLIEAVSPKDYQKITNKPILTFEVVKGSIQNIIAVNKQISEYHEEGDKHLITNTHIPPKGIIPMTGGKGILSFILIGGSMMSIAGGIYIWKRYKKSSDISREKD

SEQ ID NO: 11465 - protein, 1527 aa, Streptococcus agalactiae
TTGATTGAAAATTATTTAGAAAAAGACATCCTTAATCAAATAAAACTTCTAACTTTATGCTATGATTACTACCCTTCCATTACTCTAGACAAATCATGTCATCAACTTGGTTTATCTGAACTACTTATTAGGAAATATTGTCATGATTTAACAACTTTATTTAACAGTCAACTCTCTCTGAATATCGAAAAGAGTACAATAGTCTACCAATCTAATGGTGTAACTAGAGAACAAGCTTTCAAATATATTTATCATCAATCACACGTTTTACAACTTTTAAAATTTTTGATCACGAATGATTCAGGCAGGTTACCTTTAACTTACTTTAGTGAAAAATTTGGACTATCTTGTGCAACTGCTTATCGCATACGAAAACATATTAGTCCATTACTAGAAAAACTTGGATTTCAGATTGTCAAAAATACTATTACCGGTGACGAGTATCGAATTCGCTATTTAATCGCATTTTTAAATGCTCAATTTGGTATAGAAGTTTATCCCATGTCTAAGATGGATAAATTGCTCATCAAACGATTGTTATTAGAACACTCAACTACTTTTACTGCTTCTCATTACTTCCCAAATACATTTATTTTCTTTGATACATTGTTGTCTCTATCATGGAAACGTATTAATTATAATGTAGTTGTCCCTTACTCATCCCTTTTCACTGAACTACAAAATATATTTATCTATGATACATTACAATATTGTGTCAAAAATGTTATTATAGATTCCTTTAAAATTAATTTAAAAAAAGACGATATAGACTATATTTTTCTTGCTTACCTTACTTCCCATAACTCTTTTTCTAATCCAAATTGGACTGAGAAGCGTATCGATAATGTAATAGCTATTTTCGAAAATTATCCCAAATTCCAAAAATTATTACAGCCACTCAAAGATGCTCTTCCCTTATCTGGCTCCTATCATGATGAGTTGGTAAAAGTTGCTATCTTTTTTTTCCGAACATTTATTTTAGGATTAAATCAATTAATCCCTGAAACAATTTCATTTCCTTCATGGAACTATCATAGACATGATAAATTAACTACTATTCTCCGACCGATAATTACAAATTGGTTAAGTAAAATTGGAGAATACACGTTTAAAGAACAACATTTTCTTCTCCTTTGTACTCATCTAGAAAGAATCATCAAAAATCATATTCCTCCGATACAGATAGCCGTACTAACTACAGACTTTATTAATAACCAAATTTTAACAGAATGCTTATTACAGAGATTTTCTTCTAAAAAGATTCATTTCCACCCTTACTATTTATTAACTGATGATCTTTCCAATATTACTAATCTTAATCCAGACATTATTATTACCAATAAAAAGCTTTCTCCCTTTATCAAACATGAGATTTCTTCAGAGAGTTTAATTACATATATTGATCTGATTAATACTTCAGACCAAATCAATCAAATCCAAAAAATTATTTCATCAATACAGGAAGAAAAATATTGCAAACTTTTTGCAAAAACTAATGAAATAACTAATCGTAGCTCCTATAACTCT

SEQ ID NO: 11466 - protein, 509 aa, Streptococcus agalactiae; identical to SEQ ID NO: 2632

SEQ ID NO: 11467 - protein, 1137 aa, Streptococcus agalactiae
ATGGAAAATAAGGTAAAAACAGTTGCTGTTTTCTCAGGATATTATCTACCCTTCCTCGGAGGTATTGAACGTTATACAGATAAAATGACAGCAGATTTGGTTAAGCGTGGCTACCGTGTTGTTATTGTAACAACTAATCATGGTGATTTACCGATTATAGATGAAGACAAGGGTAGAAAAATTTACCGTTTACCGACCAAAAATATTGTCAAGCAGCGCTATCCTATTATTAACAAAAATCGAGAATACAACACGCTGATGAAATATGTTTCAGATGAAAATATTGATTTTGTGATTTGTAATACACGTTTTCAGTTAACAACGCTAGAAGGGCTATCTTTTGCAAAGAATCACCATTTACCTAGTATTGTTTTAGACCATGGGTCAAGTCATTTTTCTGTCAATAATCGTTTTTTAGATTTCTTTGGAGCTATCTATGAACATCTTCTCACAGCGCGTGTTAAGCATTATCGTCCAGATTTTTATGCGGTATCCAAGAGAAGCGTTGAATGGTTAAAACATTTTAATATAGAAGCTAAAGGAGTTATTTATAATTCGGTATCTGAAAGTCTAGGCTCTGATTTTGCTGGTACGGCTTACCTTGAAAAATCTGCTGATGATATTTTCATCACTTATGCTGGTAGAATTATTAAAGAAAAAGGCATTGAATTGCTCTTAGAAGCATTTTCGATGTCACAGTACTCTGAAAATGTTTATTTACAGATTGCAGGAGACGGACCTGAATTAGCACATTTGAAAGAGAAATATCAGTCCAAACAGATTAACTTTTTGGGGAAATTAAACTTTGAACAGACTATGTCTTTAATGGCACAGACTGATATCTTTGTTTACCCTTCAATGTATCCAGAGGGATTACCAACCTCTATTTTAGAAGCTGGTCTACTTTCAAGTGCTATTATTGCAACAGATCGCGGTGGAACAGTTGAAGTTATTGATAGCCCTGAGTTAGGAATCATCATGGAAGAAAATACTCAGTCACTCCATGAATCTCTTGATTTATTAGTAAAAGATAAGGCATTAAGAGAGAAACTACAACAGAATATTGCTAAAAGAATTAAAGAACATTTCACATGGGAAAAAACAGTTGAAAAGTTGGATTATATTATTCAAAAAAAT

SEQ ID NO: 11468 - protein, 379 aa, Streptococcus agalactiae; identical to SEQ ID NO: 2634

SEQ ID NO: 11469 - protein, 846 aa, Streptococcus agalactiae
ATGAAATATTTAGCGGGTATTGTCACCTTTAACCCCAATATTGAACGCTTAGATCAGAACATTCGAGCAATTTATCCTCAAGTAAGCCATATCTACATCGTAGATAATGGCTCGAAAAATAAGGAGGAAATTTCTCAATTAGTGGCCGATTATAATGAAGAGGGGCACCTAACTGTTGATTATTTAACAGAAAATAAAGGAATTGCATATGCTTTGAACTGTATTGGTCAATTTGCAGTAGCACAAGAATTTGATTGGTTCTTGACTTTAGATCAAGATTCGGTTGTCCTAGGTGATTTGATAGATAATTATGAAAATTACCTTCATTTACCTAAGGTCGGTATGTTATCTTGTTTGTATCAAGATATGAACCGTGAAAATTTAGTGATGCAAGAATTTGACTATAAAGAAATTGAAGAGTGTATTACTTCGGCTGCTTTAATGAAAACGAGCGTTTTCGAAGAAACATCTGGCTTTGCAGAAGAGATGTTTATTGATTTTGTTGACTCTGAAATGAATTATCGTCTGTCAGAGATGGGATATAAGACTTATCAGGTTAATTTTATTGGTCTGTTACACGAAATTGGACACTCTTCACGAGTTAAAAAATTTGGCCATGTTTTTCATGTATTGAATCATTCACCATTTCGAAAATATTACATGATACGCAATGCGATCTATATTATAAAAAAATATGGTAAGAAGAAGCGATACAAATATTTAGTATTTATGCGAAATGAATTTGTTCGAGTGTTGGTAGCAGAAGAGCAAAAGAGCAAAAAAATAGTTGCTATGATTAAAGGCTTAAAAGATGGCTTATTGATGAAAGTGGATAAATATGGAAAA

SEQ ID NO: 11470 - protein, 282 aa, Streptococcus agalactiae; identical to SEQ ID NO: 2636

SEQ ID NO: 11471 - protein, 1422 aa, Streptococcus agalactiae
ATGAAACTTTTGAAAAATATGTTTTATAATACCTCATACCAGTTATTGACTTTGTTGTTACCTTTAGTAACAGTTCCTTATGTTTCCCGTGTACTATCTCCTCAAGGCATCGGTATTAATGCCTATACGAGCTCCATTGTCATGTACTTTACTTTATTTGGTGCTTTAGGGATATCTTTGTACGGTAATCGTGAGATAGCTTTTGTGCAGTCAAATAAGTATAAGAGAAGTAAGATATTTTGGGAATTAGTTGTATTAAAACTTGCCTCTGTATCTATAGCAACGTTATTATTCTTTGGATTTGTCTTACTGACAAACGAATGGCAATTATTCTATTTAATTCAAGGTATTAATTTATTAGCGACTGCAACTGATATTTCGTGGTATTTTATTGGAGTTGAAGACTTTAAGATAATTGTCATTCGTAATACCATTGTTAAGCTTATTACAGTTGTTTTGACCTTCTTAGTTGTGAAGACGCCAGATGACCTAGCACTTTATATGTTTTTAATTGCATTTGCATCATTACTCGGAAATTTAACAGTCTGGCATCATTTAAAGCATGAAATCATCAAGATACCATTTAGTAGATTAGATGTCTTAGTACATCTAAGACCAACTTTAATGTTATTTTTACCCCAAATCACCATGCAGATTTATCTCTCTCTTAACAAGAGTATGCTGGGAGCAATGGATAGTGTGGTCAGTGCTGGATATTTTGATCAATCTGATAAAATTATTCGTATTTTATTTACCATTGTTTCAGCAATCGGAGGAGTTTTCTTGCCAAGGCTCTCCAGTCTATTTTCTTCAGGAAAAGAAAAGCAAGCCAAGGCTTTACTTTTGAAACTTGTTGATTTAAGCAATGCTATCTCAATGTTAATGATTGCGGGAGTGGTAGGAGTTTCGTCGACATTTGCTGTCTTCTTTTTTGGGAAAGGGTATGAAGTTGTCGGTCCGCTAATGGCTGTTGAGTCTTTGATGATCATTTGCATTTCTTATGGTAACGCTTTAGGGACACAGTATCTACTGGCTTCAAGACGTACAAAAGCTTACACAATGTCTGCAGTTATTGGACTTGTGGCAAATGTTGTGCTTAATATACTTTTAATACCAATTTTAGGTGCTATGGGAGCTATTATCTCTACAGTTATTACTGAATTTATTGTCTCTCTATATCAAGCTATCTCTTTAAGAGATGTATTTACTTTTAAAGAATTAACAAGAGGAATGCTGCGCTATTTAATTGCTGCTACTCTTAGTGGAGCTGTACTCTATTATATCAATACTCAAATGTCAGTATCATTGGTAAATTATGTCATTCAAAGTTTAGTAGCAGTAACTATCTATGTCGGTATCGTTTTTATAACCAAAGCACCAGTCATTCAGTTATTTAGAGATTTTAGAAAAGAGCATAGAACA

SEQ ID NO: 11472 - protein, 474 aa, Streptococcus agalactiae
MKLLKNMFYNTSYQLLTLLLPLVTVPYVSRVLSPQGIGINAYTSSIVMYFTLFGALGISLYGNREIAFVQSNKYKRSKIFWELVVLKLASVSIATLLFFGFVLLTNEWQLFYLIQGINLLATATDISWYFIGVEDFKIIVIRNTIVKLITVVLTFLVVKTPDDLALYMFLIAFASLLGNLTVWHHLKHEIIKIPFSRLDVLVHLRPTLMLFLPQITMQIYLSLNKSMLGAMDSVVSAGYFDQSDKIIRILFTIVSAIGGVFLPRLSSLFSSGKEKQAKALLLKLVDLSNAISMLMIAGVVGVSSTFAVFFFGKGYEVVGPLMAVESLMIICISYGNALGTQYLLASRRTKAYTMSAVIGLVANVVLNILLIPILGAMGAIISTVITEFIVSLYQAISLRDVFTFKELTRGMLRYLIAATLSGAVLYYINTQMSVSLVNYVIQSLVAVTIYVGIVFITKAPVIQLFRDFRKEHRT

SEQ ID NO: 11473 - protein, 1362 aa, Streptococcus agalactiae
ATGAACCTCAAAAAAGTTCGTCTATTTGAAAAGTTTTTTCTAGACAAGAACTTGCATAAAACATATTTTATATTAGGCTTAACGATTACTATTGTATTGAGCCTATTAATGCCATTTTTCAATGAACCTGATGGACAATACCATTTAGCTGTGTCTGGTCGTATTTCAAATAACATTATTGATACTTCTTACTATGGAGAATATAATATTGATTCAGGTATGAGACGACAATCGACCTCCTATAGAGATGGTACTAGATTTGAAAAATACTATTTAAATAAAGCCAATTTTGTTGATGGTAATCATTTGCCTCGTGAGATAAACTATTCTAAACATAACTTTGTTTTTTGGGGTCATCTTGTGCCAGCAGTTGGCTTATTTTTAGGCAAATTTGTGTATCCTTCTATGGGGGTAATGATTACAGTAGCAAGGTTATTTAGTTCCTTTGTCTCAATCACCTTGGTTGCCCTCATTATCCGGTATGTGAAAAAAGGAAAGTTAATCTACTTTGCTATTTTCCTCAGTCCCGTAGTTCTAAATTCATTTGCTAGTCTATCTTATGACTCGACTGGATATATTGTATTTGGAGCATTTTTATCGCTTTTGATAAATCTTTTAGTTGATAAATCGTTGACTAAAAATCTTAGTATTGCTCTTATAGGATTGATTCTTTTAGTCATTGTTGCATGTAAGCAGAATTACTGGCTGTTTTTATTGCTAGTAATACCGGTATTATTGCAGGTTAACAATCCTAAATTAATGGGCTATAATCAGAAGCTATCACATTTATTTCAAGGTCTTAAATCTAAAAAGCTATTTTGGCTATGTCTAACCTTTTTGTCACTTGCTATAGTTTATGTTCTGACCGCAAGACATGGTGGTGTCCTTGCTGTTTTAAGACGTTATGTAATGACATTTGGCTATAATTATGCTGGTATCAATATTTTAAGTAATGACATTACTTCCTGGCTTGCCTCTCCATATCCAAGTCAGAATTTTATTCCCACTTGGGTATCATCAGTATGGTATCTCATGGTCTTTCTAGTATGGTTTTCTGAAGAAAAATTTGTTAAGTCAAAAAATATGGGATTTCTTTTCTTAGCTAGTTTCTTTGTGGGAATTCTTGGTGTCTTTTTTATCATGTTAGAATATCGTGGAGCGCCAACAAGCTACATTGAAGGAGTTCAAGGACGTTACTTTACTGTTACATTGCTTTTGGTACAAGTTTTTGCATCAAGTATTCCAGCGCGTCTAAATGAGGCAGGAAGGAAAGTGGTGCCGTATGCGTTAACTGGCTTGGTAATTGTATCAAATGCCTTATTGTTATTTGATACTGTTATTAGTTTAATTATGAGGAGAAAC

SEQ ID NO: 11474 - protein, 454 aa, Streptococcus agalactiae; identical to SEQ ID NO: 2640

SEQ ID NO: 11475 - protein, 924 aa, Streptococcus agalactiae
ATGGCAACATATAATGGTCAAGGTTTCATCCATGATCAGCTAGATTCAATTAGAAATCAAACGTTGAGACCAGACTATGTCTTAATGAGGGACGATGGCTCTACTGATGATACTGTAAAGGTGGTTGAAGACTATATAAAAGAGCACCGTTTAGATGGTTGGTCAATAACTAGTAATGATAAAAATTTAGGTTGGCGTTTGAATTTTCGTCAGTTGCTTTTAGACGCTAAGCGTCTTTCTGTAGATTATTTATTTTTTAGTGATCAAGATGACACATGGTATCATCATAAAAATAAGATGCAAGTTGATATTATGGAAGAACGCCAAGATATAAACCTTCTTAGTGCCGATATTGATATCAAAAAGTTATCAGAAGAGGCTACTATTCCCAATAATTTTAAGTTCAATGGTGAGGAAACAATTTCTAAGTATCCATTAGACTTTTCATATCATAACTATCGTCAAGGTTGGACTTTTTGTTTACGCAAGTCGTTTGTTGATCAAGTAATGACTTTTTACAGTGATAATTTAATTTTGTCACATGATAATCTTTTTGCAGGGATATCTGGTGTCATTGGTTCAGGTTACAATTTAAACAGAAGTGTTGGTGAACATAAGCGACATGCTGAGAATGCAAGTGGGAATATCTTGAATATGAGCTCAAGTTACGAAAGGCATTTACAAGAACTGTATTTTGTTTTGAGTTACTATATCATCCTTGTACCATTTTTAGAAAAAAGTAGCTCTAGTCAATTAAGGGAAGCTAAAGCTTATCTGGATTTTAATCAGCAACGTTATAAAAATGCTCAAAATAAAGATTTTGTAGCAATACTTAAACAAATGATGACTAAAAAACGGTTCTATGATAGCTTTTCAAATCGCATTCGTGACTTGGTGTTTTTATTAAAAGATATAAAAAGGAGT

SEQ ID NO: 11476 - protein, 308 aa, Streptococcus agalactiae
MATYNGQGFIHDQLDSIRNQTLRPDYVLMRDDGSTDDTVKVVEDYIKEHRLDGWSITSNDKNLGWRLNFRQLLLDAKRLSVDYLFFSDQDDTWYHHKNKMQVDIMEERQDINLLSADIDIKKLSEEATIPNNFKFNGEETISKYPLDFSYHNYRQGWTFCLRKSFVDQVMTFYSDNLILSHDNLFAGISGVIGSGYNLNRSVGEHKRHAENASGNILNMSSSYERHLQELYFVLSYYIILVPFLEKSSSSQLREAKAYLDFNQQRYKNAQNKDFVAILKQMMTKKRFYDSFSNRIRDLVFLLKDIKRS

SEQ ID NO: 11477 - protein, 933 aa, Streptococcus agalactiae
ATGGTAAAGACAGCAGTTTTAATGGCGACATACAATGGCGAAAAATTTATATCTGAACAACTTGATTCAATTCGCCAACAGACATTAAAACCAGATTATGTATTATTGAGGGATGATTGTTCAACGGATGAAACAGTCAATGTCGTCAATAACTATATCGCAAAATATGGGTTAGAAGGCTGGAAAATTGTTAAAAACGACAAAAACTTAGGCTGGCGTTTAAATTTTCGTCAATTACTTATTGATGTGTTAGCCTATGAGGTTGACTATGTCTTTTTTAGTGATCAAGATGATATTTGGTATCTTGATAAAAACGAACGACAGTTTGCCATTATGTCAGATAATCCTCAAATTGAGGTTTTGAGTGCAGACGTCGATATCAAAACGATGTCTACAGAAGCCAGTGTTCCACATTTTCTAACTTTTTCTTCTAGTGATAGAATCAGTCAGTATCCTAAAGTATATGATTATCAAACTTTCCGTCCTGGATGGACCATTGCTATGAAGAGAGATTTTGCGCAAGCTATCGCTGATAATTGGACTTTTGGAGCTAATATTTCGCACGATAACCTTATCGAGACAACTGCCAGTATTATTGGAAATGGTTATAACCTTAACGAAAGCGTAGGAGTTCATATTCGATATGGAGGAAACGCAAGTGGTAATAGCAAATTTGTTTTGAATTGGAAGTCGCCTAAAACACAACATATCACAGGATTAAAAACATTTGTTGATTTTTACGAAACCATGCAGAAGGTTGTCAACAAATATCAAAATGATGTCGCTTTAAATCAACGCTTAGCCTTTGAAAAAGAAAGATTGGAAGCTTCTAAATTGTCATTAATTCATAATAGTGCTTTTGTGATTAAAAATTGGCGACTCTATAACTCTAATAGTGGACGCATGAGAGATTTATTATTTGCGTTTAAAAAG

SEQ ID NO: 11478 - protein, 311 aa, Streptococcus agalactiae
MVKTAVLMATYNGEKFISEQLDSIRQQTLKPDYVLLRDDCSTDETVNVVNNYIAKYGLEGWKIVKNDKNLGWRLNFRQLLIDVLAYEVDYVFFSDQDDIWYLDKNERQFAIMSDNPQIEVLSADVDIKTMSTEASVPHFLTFSSSDRISQYPKVYDYQTFRPGWTIAMKRDFAQAIADNWTFGANISHDNLIETTASIIGNGYNLNESVGVHIRYGGNASGNSKFVLNWKSPKTQHITGLKTFVDFYETMQKVVNKYQNDVALNQRLAFEKERLEASKLSLIHNSAFVIKNWRLYNSNSGRMRDLLFAFKK

SEQ ID NO: 11479 - protein, 1053 aa, Streptococcus agalactiae
ATGATTAAATTTAGTAATAAAATTGTACAAGAAGATTTAGCACTTATTAGTGACCAAAATTATATTAATTGGGAAAGACTTGCTAATAAAGCCGTTTTAATAAGTGGTTCTAATAGTATGTTAGCGAGTTATATGGTATTTTTACTAGCCTATCTCAATGAGACAAGAAATTACCAAACGCAAATTATTGCGACAGCTAGAAACATTGAAAAAGCCCGTGATAAATTTTCAGATTTAGTTGGGAAAGATTATTTCACCTTAATTCCTTATGATGTAGAAGAACGCCTAGAGTATGATGGAAAAGTGGATTACATTATCCATGCAGCAAGCAATGCTAGTCCAACTGCTATTTTGAGTAATCCTGTTAGCATCATAAAAGCTAATACAATTGGTACATTGAATTTATTAGACTTTGCAAAGGAAAAAACAATTGAAAACTTCTTGTTCTTATCAACGCGTGAAGTATATGGAACATCTATTAAAGAAGTGATTGATGAAGAAGCTTATGGTGGATTTGATATTTTAGCTACTAGAGCTTGTTACCCAGAAAGCAAACGCATGGCTGAAACTCTACTGCAAAGTTACTATGATCAATATAAGGTACCCTTTACTATTGCTCGTATTGCACATTCATTTGGTCCTGGTATGGAGCTCGGTAACGATGGTCGTATTATGAATGATCTTTTATCGAATGTCATTGATGGCAAAGATATCGTTTTAAAAAGTAGTGGTACAGCAGAGCGTGCTTTCTGTTATTTAGCAGATGCTGTATCAGGGTTATTTACTATTTTATTAAATGGTGAAGTTGGTCAAGCTTACAATGTAGCAAATGAAGATCAACCCATTATGATTAAGGATTTGGCACAAAAGTTAGTTGATCTCTTTTCTGATAAAAATATTTCAGTAGTATTTGATATTCCTAAAACTATGAGTGCAGGTTATAGCAAAATGGGGAGAACACGTCTCACTATGGCCAAATTAGAAGCGTTGGGATGGAAGCGAGAAGTTTCTCTTGAATCTGGAATATTAAAAACAGTACAAGCATTTGAGGAG

SEQ ID NO: 11480 - protein, 351 aa, Streptococcus agalactiae
MIKFSNKIVQEDLALISDQNYINWERLANKAVLISGSNSMLASYMVFLLAYLNETRNYQTQIIATARNIEKARDKFSDLVGKDYFTLIPYDVEERLEYDGKVDYIIHAASNASPTAILSNPVSIIKANTIGTLNLLDFAKEKTIENFLFLSTREVYGTSIKEVIDEEAYGGFDILATRACYPESKRMAETLLQSYYDQYKVPFTIARIAHSFGPGMELGNDGRIMNDLLSNVIDGKDIVLKSSGTAERAFCYLADAVSGLFTILLNGEVGQAYNVANEDQPIMIKDLAQKLVDLFSDKNISVVFDIPKTMSAGYSKMGRTRLTMAKLEALGWKREVSLESGILKTVQAFEE

SEQ ID NO: 11481 - protein, 717 aa, Streptococcus agalactiae
ATGAATATTGGAGTTATTTTTGCAGGTGGTGTTGGTCGTCGCATGAATACCAAAGGTAAACCAAAGCAATTCCTAGAAGTGCATGGTAAACCCATTATTGTGCATACAATTGATATTTTCCAAAATACAGAAGCTATTGATGCTGTAGTAGTTGTCTGTGTATCAGACTGGCTAGATTATATGAATAATCTGGTAGAGCGTTTCAACCTTACGAAAGTAAAAGCAGTTGTTGCAGGTGGAGAAACTGGCCAAATGTCAATTTTTAAGGGGCTTGAAGCCGCTGAACAGCTGGCTACAGATGATGCCGTTGTTTTAATTCATGACGGAGTACGTCCATTGATTAATGAAGAAGTCATTAATGCTAATATACAGTCAGTAAAAGAAACAGGAAGTGCGGTAACTTCAGTTCGTGCTAAAGAGACAGTTGTTCTAGTCAATGATTCTTCTAAAATATCTGAAGTTGTTGATCGTACTCGTTCCTTCATTGCTAAAGCGCCACAAAGTTTTTATCTATCAGATATCCTTTCTATTGAACGTGATGCCATTAGCAAAGGGATTACTGATGCAATTGATTCTAGTACTTTGATGGGTATGTACAATCGTGAACTCACTATTGTTGAGGGACCATATGAAAATATCAAGATAACAACACCAGATGATTTTTATATGTTTAAAGCTTTGTATGATGCTAGAGAAAATGAACAAATTTATGGGATG

SEQ ID NO: 11482 - protein, 239 aa, Streptococcus agalactiae
MNIGVIFAGGVGRRMNTKGKPKQFLEVHGKPIIVHTIDIFQNTEAIDAVVVVCVSDWLDYMNNLVERFNLTKVKAVVAGGETGQMSIFKGLEAAEQLATDDAVVLIHDGVRPLINEEVINANIQSVKETGSAVTSVRAKETVVLVNDSSKISEVVDRTRSFIAKAPQSFYLSDILSIERDAISKGITDAIDSSTLMGMYNRELTIVEGPYENIKITTPDDFYMFKALYDARENEQIYGM

SEQ ID NO: 11483 - protein, 777 aa, Streptococcus agalactiae
ATGTTAGCTTATATTGATAAAGTTGCGCGTGATAATAAAATTGAATATTCTTTAGGCGGAGGCAGCCTACTGGGAGCAATGAGACATAAAGGATTCATTCCATGGGATGACGATATCGATTTGATGCTAGAAAGAAGCCAGTATGAGCGTTTGATGAAAGCATTAGCTGATGCTAATAATAGCGATTTTAAATTGCTACATCATTCTGTTGAAAAAAATCTATGGCCATTTGCCAAGCTGTATCACACAAAGTCAATGTACTTAAGTAAAACAGATAGAATTCATCCTTGGACAGGGATTTTTATTGATATCTTCCCACTTGACCGATTACCAGAGAGTGCAGAAGAACGTCAAAGATTCTTTAAAAAAGTTCACTCTGCTGCTGCAAATTTGATGTGTACGACTTACCCCAATTTTGCTAGCGGTTCCCGAAAGCTTTATGCAAATGCAAGGCTAATTTTGGGGCTACCCCGATTCATCGCTTATCACGGCCAAGCTAAAAAACGTGCTGAAATTGTTGATCAAGTGATGGAAACATATAATAATCAAGAGGTTCCTTACATGGGTTATACCGATTCAAGATATCGCTTGAAAGAATATTTTCCAAGAGAAATTTTTTCTGAGTATGAAGATGTTATGTTTGAAAACATTAAAACTCGAAAAATTAAAAATGAGCATGCTTATCTGAATCAATTATATGGGGGTAGTTATATGGAATTACCTCCAGAAAGTAAGAGAGAAAGTCATAGTTATTACACTTGGTACTGGAAAGAAGGT

SEQ ID NO: 11484 - protein, 259 aa, Streptococcus agalactiae; identical to SEQ ID NO: 2650

SEQ ID NO: 11485 - protein, 1731 aa, Streptococcus agalactiae
ATGAGTAAAAAACATATTTTTATTTGTCTGTTTTTCATGCTTTTTTTAGTAGGTTGCCAAAATAATAAAAAAGTAAAAACAGATAAAAAAGTAGATATTACAGCTTATTATTATCATAATAATACCCCGCAATACAGTGTTCAGATTAATGCTATTCATTTACAAACAGCATTGGATAAAGTGAGGACAGGGGAGTTTGAGAGCAAAGACTTTACACACTATACTTTTGATAGTATCAAGCGGAAGTACCAAGTTAGTGGTAAAAAAGTCCTTATGGATAATAACTATAGATTTGGTTCTGGTATAAAAAATACTAGACAGGATGCTATTGCTATTGTAAGGTTACTGCTTGAAAAGAATAAAGATTATTTAATTTACATGAATGGCTTAGAAGAGCCAAGTGTTTTATATAATCCAGAAAATAAACGTTATAAGTTCACAAATAACAAAGGAAAAGCAATTGGTAATATTCCAGTTGGTTTAACTGCTTTTGAAAACAGTGCAGAAACTCAAGAATATGTGTTGAAAAATATTCAGAAAAACGAAACGATTTATCTTGGTAATACCAGAGTAGATAATCCTCGAGTAACTGTTAATAACAAAAAAAGAGATACTATAGGAGTTGAATACGGTAAACGTGTTACTTATAGGATTCCAATTTATTCAAAGCAGCTGACTGTCAGAGTTAGCCCTAATTTTGTAGTAGATAGTACTAATTACAATTACCGACTTTCTCAAGCGCCTATTATTGCGGAAGAAGGTAAAGAGGGACGTTTGTATCCAATAGATAGCAGTATTAGTGTCGATGGTGATAAAATTGTTTTAAATAGTAGTGGTGATGAAACAGAGCAAAAAGAATTATTACAAAATAGCCTGTATAAGCTTCACTCTATTGATAAGTTAGATTTTGATTTGACAAATGCTAATATTAAAGAGTTAGAGATTACAGGACATGTTGCTTCAAAAAGAGATTATAATTTGTCTGTTGCTCAGGAAAAGAAAGGCGTCATAGAGACTAAACGGAGTCTAATTTCTGTTGATAATCAAAAGCAAGATCAAGGGATTTTTGTCGAGGATTCTAAAGGCTATATAAAGACACCTAGTTTGAGCAGTTATGGTATAAATTTTGCCATGTATGACGACAATCAAAATAGATTATTGCAAGGTTCAGAGTATATTTTAGGAAGATTGAGTGCAGATAAAAAAGTATTTCTATACCAACCTAATGGCTCTTGGATAAATACTCAAAAAACGATTAAGAGTTTAAATAAAGAATATCTTAACCAAAATGCTTACCATATTAGAGGAAATAACATTATAGGTATTGATGGTTATTCAAATGACATAGACTTGAATCCTAGGTTATGGGCTTATAACTATAAAAAACAAGTGAAAAGTAACCAATCATTATTTAAATTACGAGGTTTGTCTAATAAGTATAAGTATTTCTTAATACAGACAAAATCTCCAAAAGGCTACTTACAAAGCAATAAACCATTTTATTTTACAGTAAATAAAGATAGTGTTTCTAAAGCACAGTTTGGTAACTATAATATAAATGGTTATATAATGGACATGCAGTACAACAAACAAGAATACAATGCACTTGCAAACACTCCAAAAGGTCAAAAAACAAAGAAAACTTTTAAACCCATGACCCTAGTGATTCTTTTTGCGGTAGCTTTATTTATTTTCTATATTACAGCTATAAGATTTGTATTTAAAAGAATG

SEQ ID NO: 11486 - protein, 577 aa, Streptococcus agalactiae
MSKKHIFICLFFMLFLVGCQNNKKVKTDKKVDITAYYYHNNTPQYSVQINAIHLQTALDKVRTGEFESKDFTHYTFDSIKRKYQVSGKKVLMDNNYRFGSGIKNTRQDAIAIVRLLLEKNKDYLIYMNGLEEPSVLYNPENKRYKFTNNKGKAIGNIPVGLTAFENSAETQEYVLKNIQKNETIYLGNTRVDNPRVTVNNKKRDTIGVEYGKRVTYRIPIYSKQLTVRVSPNFVVDSTNYNYRLSQAPIIAEEGKEGRLYPIDSSISVDGDKIVLNSSGDETEQKELLQNSLYKLHSIDKLDFDLTNANIKELEITGHVASKRDYNLSVAQEKKGVIETKRSLISVDNQKQDQGIFVEDSKGYIKTPSLSSYGINFAMYDDNQNRLLQGSEYILGRLSADKKVFLYQPNGSWINTQKTIKSLNKEYLNQNAYHIRGNNIIGIDGYSNDIDLNPRLWAYNYKKQVKSNQSLFKLRGLSNKYKYFLIQTKSPKGYLQSNKPFYFTVNKDSVSKAQFGNYNINGYIMDMQYNKQEYNALANTPKGQKTKKTFKPMTLVILFAVALFIFYITAIRFVFKRM

SEQ ID NO: 11487 - protein, 350 aa, Streptococcus agalactiae
ATGAGTTTAGCATTACAAATCGAAATGTTTATTTTAGCCATTGTCCTACTTTATATGATTATAAGAATGGTTAATAAAAACACATTTTTGTTAAACGTTCTTTACCTTGGCTATTAGTTGGTTTAATTCTAGTCTTTATTAGTGTATTTCCTGGGGTGGTCTCATTTATCGCTCATCACCTTGGATTCGCTTTAACGATGAATTTCTTGTTATTTGGCGCTATTTTATTTCTGTTTTGTTTAGAATTATTTGATACTAGCAGCAATACCAAAAGAGATGAGCAAATTAAACGCCTGATTCAAGAGGTTTCTTTGTTGAAAAAAGAGATAGAGGATAGCACTTTAGATGAG

SEQ ID NO: 11488 - protein, 117 aa, Streptococcus agalactiae; identical to SEQ ID NO: 2656

SEQ ID NO: 11489 - protein, 726 aa, Streptococcus agalactiae
ATGAAAAAAATTTTACTAGTGATACCTGCTTATAATGAAGAAGGTAGTATTGCAAAGACAGTCCAGACGATTGTAGATTTTAAGGCGTCTCGCTCGCTACCTTTTGAGCTGGATTATATTGTTATTAACGATGGGTCAACCGATGGTACTCCAGAGTTATTAGATAGATTGGGTTTAAATCATATTGATCTTGTTCAAAATCTAGGTATTGGTGGCTGTGTGCAGACAGGATACTTATACGCTAATCGTAATCATTACGATGTTGCCGTTCAATTTGATGGTGATGGTCAACATGATATTAGAAGCATTGAAGATGTTGTTATGCCAATCTTAAATGACGAGGCAGATTTTGTTATTGGTTCTCGCTTTGTTGATAAAAAACATCAAAATTTTCAATCGACAGCAATGAGGCGTCTTGGCATAAATTTAATATCTGCTGCTATAAAATTAACGACGGGACACAAAGTCTATGATACAACAAGTGGTTATAGGGCAGCTAACGCGGCGCTAATAGCTTATTTATCGTGTCATTATCCAGTACAATACCCAGAGCCTGAATCAACTGCTCGGATTTTGAAAAAAGGCTATCGTTTGAAGGAAGTCACAGCTAATATGTTTGAACGTGAGGCAGGTACTTCAAGTATAAGTTCCCTAAAATCGATTTTTTATATGACGGATGTTTTAACGTCAATTATTATTGCAGGGTTTATTAAGGAGGATGATAAA

SEQ ID NO: 11490 - protein, 242 aa, Streptococcus agalactiae
MKKILLVIPAYNEEGSIAKTVQTIVDFKASRSLPFELDYIVINDGSTDGTPELLDRLGLNHIDLVQNLGIGGCVQTGYLYANRNHYDVAVQFDGDGQHDIRSIEDVVMPILNDEADFVIGSRFVDKKHQNFQSTAMRRLGINLISAAIKLTTGHKVYDTTSGYRAANAALIAYLSCHYPVQYPEPESTARILKKGYRLKEVTANMFEREAGTSSISSLKSIFYMTDVLTSIIIAGFIKEDDK

SEQ ID NO: 11491 - protein, 360 aa, Streptococcus agalactiae
ATGTCTAAAATTTTAGTCTTTGGTCACCAAAATCCAGATTCAGATGCTATTGGATCATCAGTTGCTTTTGCATATCTAGCTAAAGAAGCTTGGGGGCTTGACACAGAGGCCGTTGCTTTAGGAACTCCAAATGAAGAAACAGCATATGTTTTAGATTATTTTGGTGTTCAAGCACCTCGAGTAGTAGAATCTGCAAAAGCAGAGGGTGTAGAGACAGTCATTTTAACTGACCATAACGAATTCCAACAATCTATTTCTGATATTAAAGATGTGACAGTTTATGGTGTTGTTGATCATCATCGTGTTGCTAACTTTGAGACTGCCAATCCGTTATATATGCGTTGGAACCTTTCCNNNNNT

SEQ ID NO: 11492 - protein, 120 aa, Streptococcus agalactiae
  VARIANT 119, 120: Xaa = Any Amino Acid
MSKILVFGHQNPDSDAIGSSVAFAYLAKEAWGLDTEAVALGTPNEETAYVLDYFGVQAPRVVESAKAEGVETVILTDHNEFQQSISDIKDVTVYGVVDHHRVANFETANPLYMRWNLSXX

SEQ ID NO: 11493 - protein, 234 aa, Streptococcus agalactiae
TTGACTGATATCGATGACCATTTAAAACGTTTGGGTGAATTTGTCCAAACACTTGATAATGTCGATAAATTTGAAGTATTGCCTTATCATACCATGGGAGAGTTCAAATGGCGTGAATTAGGAATTCCGTATCCATTAGCTGGTGTGAAACCACCAACTCCAGAACGTGTTAAAAACGCTAAAGATATCATGAAAACAGAATCCTATACAGAATATCTAAAAAGAATTCAAAAT

SEQ ID NO: 11494 - protein, 78 aa, Streptococcus agalactiae
MTDIDDHLKRLGEFVQTLDNVDKFEVLPYHTMGEFKWRELGIPYPLAGVKPPTPERVKNAKDIMKTESYTEYLKRIQN

SEQ ID NO: 11495 - protein, 773 aa, Streptococcus agalactiae
ATGAAAGTTAATATTTTAATGGCCACCTACAATGGAGAGAAGTTTCTGGCGCAGCAAATCGAAAGTATCCAAAAGCAAACCTTTAAAGAGTGGAACCTCCTAATCAGAGATGATGGTTCAAGTGACAAGACATGTGATATTATTAGAAACTTTACTGCTAAAGATTCTCGAATTCGTTTCATTAATGAAAATGAGCACCATAATTTAGGAGTTATTAAATCATTTTTTACGCTAGTTAATTACGAAGTTGCAGATTTCTATTTTTTTAGTGATCAAGATGATGTATGGTTGCCAGAAAAGTTATCTGTAAGTTTAGAGGCAGCAAAGCATAAAGCATCTGATGTACCATTACTTGTTTATACTGATTTGAAAGTTGTTAATCAAGAATTAAATATTTTACAAGACAGCATGATTCGGGCTCAATCGCACCATGCCAATACGACATTATTACCAGAACTAACTGAGAATACTGTTACTGGTGGGACTATGATGATAAATCATGCATTAGCTGAGAAGTGGTTTACTCCTAATGATATCTTAATGCATGATTGGTTTTTAGCACTCTTAGCAGCAAGTTTAGGAGAAATCATTTATTTGGATTTACCAACTCAACTATACCGTCAACATGACAATAATGTTTTGGGAGCGAGGACAATGATAAGAGGTTTAAGATACTTCGTGAAGGTCCTAAATCTATATTTACAAGGTATTGGAAACTTATCCATGACTCACAAAAGCAAGCTTCCTTAATTGTTGATAAGTATGGTNNNNNT

SEQ ID NO: 11496 - protein, 258 aa, Streptococcus agalactiae
  VARIANT 257, 258: Xaa = Any Amino Acid
MKVNILMATYNGEKFLAQQIESIQKQTFKEWNLLIRDDGSSDKTCDIIRNFTAKDSRIRFINENEHHNLGVIKSFFTLVNYEVADFYFFSDQDDVWLPEKLSVSLEAAKHKASDVPLLVYTDLKVVNQELNILQDSMIRAQSHHANTTLLPELTENTVTGGTMMINHALAEKWFTPNDILMHDWFLALLAASLGEIIYLDLPTQLYRQHDNNVLGARTMBKRFKILREGPKSIFTRYWKLIHDSQKQASLIVDKYGXX

SEQ ID NO: 11497 - protein, 1152 aa, Streptococcus agalactiae
ATGCAAGATGTTTTCATTATAGGAAGTAGAGGGTTGCCAGCTCGTTACGGTGGTTTTGAAACTTTCGTTTCAGAATTGATTAATCATCAAAAAAGTTCCGACATAAAATACCATGTTGCATGCCTTAGTGATAAAGAACATCATACTCATTTTAACTTTGCTGACGCTGATTGTTTTACTATAAATCCTCCCCAATTAGGGCCAGCACGCGTGATTGCTTATGATATTATGGCCATTAATTATGCCCTTGACTTGGTTAAGACACATGATTTAAAAGAGCCTATTTTTTATATTTTAGGAAATACAATTGGTGCATTTATTTGGCATTTTGCCAATAAAATACATAAAGTCGGTGGCTTATTGTATGTTAATCCGGATGGTTTAGAGTGGAAGCGATCAAAGTGGTCTCGTCCCATACAGCGTTATTTAAAATACGCCGAAAAATGTATGACTAAAAATGCAGACCTAATTATTTCTGATAATATTGGTATTGAAAATTACATTCAAACTACCTACTCTAATGTGAAGACAAGGTTCATTGCTTACGGTACAGAGATTAATTCTAGGAAATTATCGTCAGATGATCCACGTGTCAAACAGTTGTTTAAAAAATGGAATATTAAGTCTAAGGGTTACTATCTAATCGTTGGTCGATTTGTCCCTGAAAACAATTATGAAACGGCTATTAGGGAGTTCATGGCTTCAGATACTAAGCGTGATTTAGTTATTATCTGTAACCATCAAAATAACCCCTACTTTGAAAAGTTGTCCTTAAAGACAAACCTTCAACAAGATAAAAGGGTTAAGTTTGTAGGTACGCTCTATGAAAAAGATTTGCTGGATTATGTTCGTCAAAAAGCCTTTGCTTATATTCATGGGCATGAAGTTGGGGGTACTAATCCAGGACTGCTTGAGGCTTTAGCTAATACTGATTTGAATCTTGTTCTAGATGTTGATTTCAACAAATCAGTAGCAGGTCTTTCAAGTTTTTACTGGACTAAAAAAGAGGGGAATTTAGCTAAGCTTATTAACGATAGTGATCAACAACAGGATTTATCTACTTACGGTGATCGAGCAAAAGCCATTATTCAAGAAAACTACACTTGGAAAAAAATTGTTGAAGAATATGAGGATTTGTTTTTAAATGAAAGT

SEQ ID NO: 11498 - protein, 384 aa, Streptococcus agalactiae
MQDVFIIGSRGLPARYGGFETFVSELINHQKSSDIKYHVACLSDKEHHTHFNFADADCFTINPPQLGPARVIAYDIMAINYALDLVKTHDLKEPIFYILGNTIGAFIWHFANKIHKVGGLLYVNPDGLEWKRSKWSRPIQRYLKYAEKCMTKNADLIISDNIGIENYIQTTYSNVKTRFIAYGTEINSRKLSSDDPRVKQLFKKWNIKSKGYYLIVGRFVPENNYETAIREFMASDTKRDLVIICNHQNNPYFEKLSLKTNLQQDKRVKFVGTLYEKDLLDYVRQKAFAYIHGHEVGGTNPGLLEALANTDLNLVLDVDFNKSVAGLSSFYWTKKEGNLAKLINDSDQQQDLSTYGDRAKAIIQENYTWKKIVEEYEDLFLNES

SEQ ID NO: 11499 - protein, 852 aa, Streptococcus agalactiae
ATGATTTTAATTACAGGGGCAAACGGGCAATTAGGTAGTGAATTACGTCACCTTTTAGACGAACGAACTCAAGAGTATGTTGCTGTTGATGTAGCTGAAATGGATATTACAAATGCCGAGATGGTGGACAAAGTCTTTGAAGAGGTGAAGCCATCTTTAGTTTACCATTGTGCAGCTTACACAGCTGTTGATGCGGCAGAAGATGAAGGAAAAGAGCTAGACTTTGCAATCAATGTCACTGGTACAGAGAATGTCGCTAAGGCTGCTGCTAAACATGATGCAACACTTGTTTACATTTCGACGGACTATGTGTTTGATGGTGAAAAACCAGTGGGGCAAGAATGGGAAGTAGATGATCTACCTGATCCCAAAACAGAGTACGGTCGTACAAAACGTATGGGTGAAGAGTTAGTTGAAAAATATGCTTCAAAATTCTATACCATTCGCACAGCGTGGGTATTTGGTAACTATGGTAAAAACTTTGTCTTTACGATGCAAAACCTTGCAAAAACACACAAAACTCTAACTGTTGTTAACGACCAACATGGACGACCAACATGGACACGTACTTTGGCTGAGTTTATGACTTATTTAGCTGAAAATCAAAAAGATTTTGGTTACTATCATTTATCAAATGATGCTAAAGAAGATACAACATGGTATGATTTTGCGGTTGAAATCTTAAAAGACACAGATGTGGAGGTAAAGCCTGTTGATTCTAGTCAATTCCCAGCAAAAGCAAAACGTCCTTTAAATTCAACTATGAGTTTGGAAAAAGCGAAAGCAACAGGATTTGTGATTCCTACTTGGCAAGATGCTTTAAAAGAGTTCTACAAGCAGGAAGTTAAAAAA

SEQ ID NO: 11500 - protein, 284 aa, Streptococcus agalactiae
MILITGANGQLGSELRHLLDERTQEYVAVDVAEMDITNAEMVDKVFEEVKPSLVYHCAAYTAVDAAEDEGKELDFAINVTGTENVAKAAAKHDATLVYISTDYVFDGEKPVGQEWEVDDLPDPKTEYGRTKRMGEELVEKYASKFYTIRTAWVFGNYGKNFVFTMQNLAKTHKTLTVVNDQHGRPTWTRTLAEFMTYLAENQKDFGYYHLSNDAKEDTTWYDFAVEILKDTDVEVKPVDSSQFPAKAKRPLNSTMSLEKAKATGFVIPTWQDALKEFYKQEVKK

SEQ ID NO: 11501 - protein, 339 aa, Streptococcus agalactiae
ATGTCAGAAGTAAAACGATATAGCGAAGAAGAAGTTGGAAAAATAAAAGATCGTATCCTAGAAGCTTTGGAGATGGTTATCGATCCTGAATTGGGAATAGATATTGTTAACCTTGGGTTAATTTATGAGATTCGCTTTGAAGATAACGGTCGAACTGAAATTGATATGACTTTAACGACCATGGGATGCCCGTTAGCAGATTTATTGACAGATCAAATCCATGATGTTATGAAAACAGTCCCAGAGGTAACTGAAACTGAGGTGAAATTGGTATGGTACCCAGCCTGGTCTGTTGATAAGATGAGTCGTTATGCTCGTATCGCTTTGGGAATTCGTTCA

SEQ ID NO: 11502 - protein, 113 aa, Streptococcus agalactiae
MSEVKRYSEEEVGKIKDRILEALEMVIDPELGIDIVNLGLIYEIRFEDNGRTEIDMTLTTMGCPLADLLTDQIHDVMKTVPEVTETEVKLVWYPAWSVDKMSRYARIALGIRS

SEQ ID NO: 11503 - protein, 1107 aa, Streptococcus agalactiae
ATGGCAGAGAAAAAAGGAAATACAACTTTTAATGTTCAAGTTGCGGATTTTATTCGTAATCATAAAAAACAAGGTACTGCAATTGATGATGAGGTAACAGAAAAACTTGTTATTCCTTTTGTTTTAGATGCAGATCAAATTGATGATTTGTTAGAACGATTGACAGACGGTGGAATTTCAATTACAGACAAAGAAGGCAATCCTTCAACAAAGTATGTGGTAGAAGGGCCAAAACCTGAAGAATTGACTGATGAAGAGCTCATAGGAAGTAATTCTGCTAAAGTTAATGACCCAGTACGTATGTACTTAAAGGAAATTGGTGTTGTTCCTCTTTTAACGAATGAAGAAGAAAAAGAATTGGCTGTTGCGGTTGCCGAGGGAGATTTAATGGCTAAACAACGTTTAGCTGAAGCAAACCTTCGTCTTGTTGTCTCAATTGCAAAACGTTATGTTGGACGTGGAATGCAATTTCTTGATTTAATTCAAGAGGGTAACATGGGGCTCATGAAAGCTGTTGATAAATTTGATTATTCAAAGGGATTCAAATTTTCAACTTATGCAACATGGTGGATTCGTCAAGCTATAACACGTGCAATTGCAGATCAAGCGCGTACGATTCGTATTCCTGTTCATATGGTTGAAACGATTAATAAATTGGTCCGTGAACAACGTAATCTTCTTCAAGAACTTGGTCAAGATCCAACTCCTGAGCAAATCGCAGAACGCATGGATATGACACCAGATAAAGTACGTGAAATCCTAAAAATTGCTCAAGAGCCGGTATCGCTAGAAACGCCAATAGGTGAGGAAGATGATAGCCATTTGGGTGATTTCATTGAAGACGAAGTTATTGAAAATCCAGTAGATTATACTACACGTGTTGTTCTTCGTGAGCAATTAGATGAGGTTTTAGATACTCTTACTGACCGTGAAGAGAATGTTCTTCGTTTACGCTTTGGTCTTGACGATGGTAAAATGCGTACGTTAGAGGACGTAGGTAAAGTATTTAATGTTACCCGTGAGCGCATTCGTCAGATTGAAGCTAAAGCCCTTAGAAAACTTCGCCATCCTAGTCGTAGCAAGCAACTTAAAGATTTCATGGAAGAT

SEQ ID NO: 11504 - protein, 369 aa, Streptococcus agalactiae; identical to SEQ ID NO: 7248

SEQ ID NO: 11505 - protein, 1779 aa, Streptococcus agalactiae
TTGGCAATTGATAAAGAAAAAATTTCTGAAATCAAGAACAGTGTTAACATTGTTGATGTCATCGGTGAAGTTGTCGGTTTGACAAAAACAGGACGCAATCATCTTGGTTTATGCCCATTTCATAAAGAAAAAACGCCATCTTTTAATGTTATCGAAGATAGGCAGTTTTTTCATTGTTTTGGTTGTGGTCGCTCTGGTGATGTCTTTAAATTTGTGGAAGATTACCAACATATTAGTTTTTTAGATAGTGTACAAGTTCTAGCTGAACGTTCAGGAATACCTCTAGATACTAATTTTAAGGGGCAGGTTCCTAAAAAACCTAAAGCTAATCAGTCGCTTTTAGATATTCATAGAGTTGCTTCGGGATTTTACCATGCCTATTTAATGACAACTAATGATGGTGAACGCGCTAGACAATACCTTGCTGAGCGCGGAGTGACAGAGGACTTAATTAAACATTTTCAAATAGGATTATCGCCGGGAGGGCAGGATTTTCTATATCGTCGTCTGGCAAAAGAGTTTGATGAAAAAACTTTGATGTCTTCTGGTTTGTTCAATTATTCAGAAAATAGCAATCAGTTTTACGATTCATTTAATAATAGAATCATGTTTCCGTTGACTAATGATATCGGTGAAGTCATTGCGTTTTCAGGACGAGTTTGGACCCAAGAGGACATTGATAGAAAACAAGCTAAATATAAAAATTCTCGTGCTACCCCTATTTTTAATAAGTCTTACGAGCTTTACCATTTAGATAAAGCGCGTGCTGTAATTAATAAAGCACATGAAGTTTACCTAATGGAAGGCTTTATGGATGTTATTGCAGCTTATCGTGCAGGAATTGAGAATGTTGTTGCTTCTATGGGGACCGCTTTAACCAATGAACACGTTAGACACCTTAAAAGATTTACTAAGAAAGTTGTTCTGACTTATGATGGTGATAGAGCTGGTCAAAACGCAATTGACAAGTCTTTAGAACTGCTATCAGATATGACTGTTGATATCGTTAGGATACCTAATAAAATGGACCCTGATGAATTTCTACAAGCAAATTCAGCAGAAGATTTTAAACAACTCTTAGAAAAAGGGCGCATCAGTAATACAGAGTTTTATATCCACTACTTAAAGCCTGAAAACACCGATAATTTACAATCTGAAATTGCTTATGTTGAAAAAATAGCGAAATTAATTGCTAAATCTCCATCAATAACAGCACAAAATTCATATATTACAAAAGTGGCTGAACTCTTGCCAGATTTTGATTATTTTCAAGTAGAACAATCGGTTAATAATGAACGATTGCATCATAGAAGTCAACAGCAAGCTTCACCTTCAGTACAAACAAGTGCTACAGTGCAATTACCACAGACAGGTAAGTTATCAGCTATCACTAAAACAGAAATGCAATTGTTTCATAGATTATTGAATCATCCCTACCTGTTAAATGAATTCCGTAATAGGGATAATTTTTATTTTGATACAACAGAAATACAAGTTTTATATGAGTTGCTAAAAGAAAGTGGTGAGATCACGTCTTATGATTTATCACAAGAAAGTGACAAAGTTAATCGTACTTATTATATGATTTTAGAGGAACAATTACCTGTAGAAGTATCTATTGGAGAGATTGAAGCCGTCGAAAAGGCACGTGACCGTTTATTGAAAGAACGTGATTTAAGAAAACAAAGCCAGTTAATTAGACAATCTAGTAATCAAGGTGATCAAGAAGGAGCCTTGGCTGCATTAGAAAATTTAATTGCTCAAAAAAGAAATATGGAA

SEQ ID NO: 11506 - protein, 593 aa, Streptococcus agalactiae
MAIDKEKISEIKNSVNIVDVIGEVVGLTKTGRNHLGLCPFHKEKTPSFNVIEDRQFFHCFGCGRSGDVFKFVEDYQHISFLDSVQVLAERSGIPLDTNFKGQVPKKPKANQSLLDIHRVASGFYHAYLMTTNDGERARQYLAERGVTEDLIKHFQIGLSPGGQDFLYRRLAKEFDEKTLMSSGLFNYSENSNQFYDSFNNRIMFPLTNDIGEVIAFSGRVWTQEDIDRKQAKYKNSRATPIFNKSYELYHLDKARAVINKAHEVYLMEGFMDVIAAYRAGIENVVASMGTALTNEHVRHLKRFTKKVVLTYDGDRAGQNAIDKSLELLSDMTVDIVRIPNKMDPDEFLQANSAEDFKQLLEKGRISNTEFYIHYLKPENTDNLQSEIAYVEKIAKLIAKSPSITAQNSYITKVAELLPDFDYFQVEQSVNNERLHHRSQQQASPSVQTSATVQLPQTGKLSAITKTEMQLFHRLLNHPYLLNEFRNRDNFYFDTTEIQVLYELLKESGEITSYDLSQESDKVNRTYYMILEEQLPVEVSIGEIEAVEKARDRLLKERDLRKQSQLIRQSSNQGDQEGALAALENLIAQKRNME

SEQ ID NO: 11507 - protein, 375 aa, Streptococcus agalactiae
ATGATTAAAGAACTAAAAGAATTTTTATTTAAGGGTAATGTTTTAGACCTTGCTGTTGCTGTTATTTTAGGTGCAGCTTTTAATGCTATTATCACTTCACTTGTTAAAGACGTTATTACACCGCTTATCCTTAATCCAGTATTAAAAGCTGCTGGCGTTTCAAATATTGCGCAGCTTTCATGGAACGGTGTTGCTTACGGTAATTTCTTAAGTGCAGTTATTAATTTCTTAATCGTTGGTACTACTTTATTCTTCATCGTTAAAGCTGCTAACAAGGTTATGGCTAAGAAACCTGCTGAAGAAGAAATTATTGAAGTTGTTGAACCAACACAAGAGCAATTACTTGCTGAAATCCGCGACTTACTCGCTAACAAA

SEQ ID NO: 11508 - protein, 125 aa, Streptococcus agalactiae; identical to SEQ ID NO: 2666

SEQ ID NO: 11509 - protein, 107 aa, Streptococcus agalactiae
GTGACTAAAGCTGGTACTCTTCAAGAATCACGTAAACGTGAATTCTACGAAAAACTTCTGTAAAACGTAAACGTAAATCAGAAGCAGCTCGCAAACGTAAAAAATTC

SEQ ID NO: 11510 - protein, 36 aa, Streptococcus agalactiae
  VARIANT 19: Xaa = Any Amino Acid
MTKAGTLQESRKREFYEKXSVKRKRKSEAARKRKKF

SEQ ID NO: 11511 - DNA, 447 bp, Streptococcus agalactiae
atgggtccagttggtgagtggaattcacaagctattatgatacttttaaatactatatttgctattataggtggtggtttggcgtggacattggctgctaagtggaatggtgaggaagagaaaacaggaagcttattgaatggcattattgttggtcttgtgacgagtacagcaggagttgggtatctcttaacttggcaattattagctgtaacattctttgcatccctcttcacctactttgtaacggattacgttgcgaaagcttttgccattgatgatgtcgtttcctcctttggaatgaatggtattgggggattgttgggaagtttaggagttggtctctttaaattatcacatatgccagttcaactgttagcattagctaccacaattcttttgtcaattataatgacctatatcatatctaaagcgatttttagaaaa

SEQ ID NO: 11512 - protein, 149 aa, Streptococcus agalactiae
MGPVGEWNSQAIMILLNTIFAIIGGGLAWTLAAKWNGEEEKTGSLLNGIIVGLVTSTAGVGYLLTWQLLAVTFFASLFTYFVTDYVAKAFAIDDVVSSFGMNGIGGLLGSLGVGLFKLSHMPVQLLALATTILLSIIMTYIISKAIFRK

SEQ ID NO: 11513 - DNA, 240 bp, Streptococcus agalactiae
  misc_feature 231, 232, 233, 234, 235: n = A,T,C or G
gtgtttgtaaagaaaggactatttgtgtttttactattatgtattttatcgatgtggctcatgatttttggggttgcattctattactttgggtcgctacatcaatcattgacttcaaggattatttatcagtttgtacttactgttttgataacgacaatagcttggttcatgggtgcctattttttaggatttgaaggtcataataaaactgtctttcgattccaagannnnnttaat

SEQ ID NO: 11514 - protein, 80 aa, Streptococcus agalactiae
  VARIANT 77, 78, 79: Xaa = Any Amino Acid
MFVKKGLFVFLLLCILSMWLMIFGVAFYYFGSLHQSLTSRIIYQFVLTVLITTIAWFMGAYFLGFEGHNKTVFRFQXXXN

SEQ ID NO: 11515 - DNA, 1125 bp, Streptococcus agalactiae
atgaaacattatcaaaccataattatcggtgcaggcgctgcaggaatcggttttggttctgccatgcaacgattaggacttacaaattttcttatcattgaaaaagggcacattggagaatcttttttaagatggcccagaacaacacaatttatcacaccttccttcactaccaacggctttggttttccagatctaaacgctgttattccagatacttctcctgctttctcatttgaaaaagaacatctttctggagtggaatatgcacgctacttacaattagttgctgctcattataatctccctatccaaaacgaaacatctgttctatctattgataaacgagatagcctttttgttattaaaacttcaaagggagatttttctgctgattatcttattatggcaacaggagaatttcaaaatccaaataccattgatattaaaggtgcagatctaggaatgcactatggtcaagttgataatttccatatcaaatctgacaatccatttatcatcattggtggaaacgaaagtgcttgtgatgcactaacacatctagtatatttgggaaatcaagtcgaattatatacagatacgtttggtcgtaaagagagcaatcccgatccaagcatctctttatcccccataactaaagaacgtttaaaacatatacaagaccacaaaaaagaatattatagtatctctgaaggcaagaaagccattgagattaaacaaattggaaaacaatatcaagttacttttgatgacggtagtactgcggagtctttccataaacctattctttccacaggttttctaaatacctgtcatctcattgacggaatcgctttatttgaatacgataaaaatcagttgccaatagttactgaagatgacgaatctactatcgttaataactgtttcttaattggtccaagcttacgacaaagagatactattttctgctatatttataaattcagacaacgctttgtccctattattaaccatatcgcacaacgagaagggattatattagacgaagatacccttgaattctttaaagaaaatcaaatgtaccttgataacctagcttgttgcgatgtcaattgtgattgc

SEQ ID NO: 11516 - protein, 375 aa, Streptococcus agalactiae
MKHYQTIIIGAGAAGIGFGSAMQRLGLTNFLIIEKGHIGESFLRWPRTTQFITPSFTTNGFGFPDLNAVIPDTSPAFSFEKEHLSGVEYARYLQLVAAHYNLPIQNETSVLSIDKRDSLFVIKTSKGDFSADYLIMATGEFQNPNTIDIKGADLGMHYGQVDNFHIKSDNPFIIIGGNESACDALTHLVYLGNQVELYTDTFGRKESNPDPSISLSPITKERLKHIQDHKKEYYSISEGKKAIEIKQIGKQYQVTFDDGSTAESFHKPILSTGFLNTCHLIDGIALFEYDKNQLPIVTEDDESTIVNNCFLIGPSLRQRDTIFCYIYKFRQRFVPIINHIAQREGIILDEDTLEFFKENQMYLDNLACCDVNCDC

SEQ ID NO: 11517 - DNA, 984 bp, Streptococcus agalactiae
atgtcagaaaaaatcagagttttactctattataaatatgtttcaattgaaaatgcggaagagtacgctgcgaaacatctagaattttgtaaatctattggacttaaaggtcgtattttgattgcggatgaggggattaatggaactgtttctggagattatgaaacaactcagaagtatatggattgggtccacagcgatgagcgttttgctgatctttggttcaagattgacgaggaaaatcaacaagctttccgtaaaatgtttgttcgttataagaaagagattgtgcaccttgggttagaagataataactttgatagcgatattaatcctttggaaacaacaggtgagtatttaaatcctaaacaatttaaagaagccttgcttgatgaagatactgttgttttagatacgcgtaatgattatgagtatgacttaggtcacttccgtggagcaattcgtcctgatattcgcaatttccgtgagttaccacaatgggtacgtgacaacaaagataagtttatggaaaaacgtgttgttgtgtactgtaccggtggtgttcgttgtgagaaattctcgggttggatggttcgagaaggttttaaagatgttggacaattacacggtggtattgcaacatatggaaaagatccggaagttcaaggtgaactttgggatggtgcgatgtatgtttttgatgatcgtatctcggtgccaattaatcatgttaatccaactgtcattagtaaagattattttgatggaacaccttgtgaacgttatgtcaattgtgcaaatccgttttgtaacaaacaaatttttgcttcagaagaaaacgaagcgaagtatgttcgagggtgctcgcctgaatgtcgtgcacatgaacgtaatcgctatgtgcaagaaaatggtttatcacgtcaagaatgggcagaacgtttagaagctattggagaatccttacctcaagtagcaaatgtt

SEQ ID NO: 11518 - protein, 328 aa, Streptococcus agalactiae; identical to SEQ ID NO: 2676

SEQ ID NO: 11519 - DNA, 303 bp, Streptococcus agalactiae
atgacttatgaattatgtctagaatacggtacttatccacttagacctgtagatgcttgggctgatgaaatcaatactgcacctgcgtttattactgaagataaaaaacttttagaacttttagaagaagtcaataccttattccatgagctctttttaacgatagaatgttccttccactatattggtcatgacttcccagaaaaaagagcaaaaatcacacaaatttatcatgtgattatcgaacatttaagcatacactaccctgaatatgacattaaaattgaatcattattaatggga

SEQ ID NO: 11520 - protein, 101 aa, Streptococcus agalactiae; identical to SEQ ID NO: 7258

SEQ ID NO: 11521 - protein, 1371 aa, Streptococcus agalactiae
ATGTTGAAAAAACTATTTGCACCCCCTCAGAAAAGAGAACGTTTATCAGCTGAGGAAATTAAGCATAAATATCCTCGTTATCGTGTACAAGTCCTTATTTCTATTTTTGTAGGTTATATGGGATACTATTTTGTTCGTAATACGACTTCAATTCTATCTGGTATCCTTAATATGTCTGCTACTGAGATTGGTATTATTACCTGTGCTAGCTACATTGCTTATGGTCTCTCTAAATTTATTTCTGGTTTGATTTCAGATGAATCGAATTCTAAAATTTTCCTTCCAGTTGGTTTGTTTCTTACAGGACTAGTTAATGTGTTAATCGGTGTTATTCCCTCTGTAATTACTAGTATTTGGCTCTTTACTATCATGTATCTTATTAATGGTTGGTTACAAGGGATGGGATACCCTCCTGGAGCGCGTACATTAGTCTATTGGTATGATAATAAAGAAAGAATTAAATATGCCACCATTTGGAATTTATCTCACAATTTTGGTGGAGCAATAGCGCCGATTTTAACTGGTGTAGGTCTAGCTCTTGCTGGTAATGATTCTCTTAATCAAGCGCGTGCTGCTTATTGGTTTCCAGGGGTGGTGGCTTGTCTTTTGGCTATTCTTGTTTACTTTTTACAAGAAGATACTCCAGAATCTATCGGACTTCCGCCTATAGAAGAGTATCATAAAGAGCAATATACTAATGTTGTGGATTCAAGTAACATTTTAGAAGAGCCTGAAGTTTTGGGTATGGGCGAAATTATAAAAAAATATATTCTACCAAATACTAAACTGATGTGGGCATCCTTGTATTCAATATTTGTATATATTTTACGTTACGGTATTGTCTCATGGACTCCTAAGTTTTTAGCGACGAGTGTGCAAGATGGTGGAAAAGGTATTACTGCAACAGCTGGTATGGGTGGTTTTTCACTTTTTGAAATAGGTGGTATTATTGGGATGCTAACAGCAGGATATCTATCTGCCAAAGTGTTTAAAAACTCTAAACCTTTAACCAATGTAGCCTTCTTAGTTGTAGCAATCTTATTACTAGCTGCCTATTGGTTTATTCCAGCAGGACCTCAATATATGGCATTAGACTTCATTATTTTACTAGGTTTGGGGGCATCAATCTACGGCCCTGTTATGATGGTTGGCCTGTATGCTATGGAGTTGGTTCCAAAAGCAGCAGCTGGAGCAGCTTCAGGATTGACTGGCACATTTAGTTATGTCGGAGGAGCAACAATCGCTACTCTAGCTATCGGTATTATTATTGACCACTTTGGTTGGGGAGTAGCATTTATAATATTTGGTATTTCTGGATTTGCGGCTATTGTCTGTACCTTGCTTTCAAGAGATAAGAGTCTAGAGTATTGG

SEQ ID NO: 11522 - protein, 457 aa, Streptococcus agalactiae
MLKKLFAPPQKRERLSAEEIKHKYPRYRVQVLISIFVGYMGYYFVRNTTSILSGILNMSATEIGIITCASYIAYGLSKFISGLISDESNSKIFLPVGLFLTGLVNVLIGVIPSVITSIWLFTIMYLINGWLQGMGYPPGARTLVYWYDNKERIKYATIWNLSHNFGGAIAPILTGVGLALAGNDSLNQARAAYWFPGVVACLLAILVYFLQEDTPESIGLPPIEEYHKEQYTNVVDSSNILEEPEVLGMGEIIKKYILPNTKLMWASLYSIFVYILRYGIVSWTPKFLATSVQDGGKGITATAGMGGFSLFEIGGIIGMLTAGYLSAKVFKNSKPLTNVAFLVVAILLLAAYWFIPAGPQYMALDFIILLGLGASIYGPVMMVGLYAMELVPKAAAGAASGLTGTFSYVGGATIATLAIGIIIDHFGWGVAFIIFGISGFAAIVCTLLSRDKSLEYW

SEQ ID NO: 11523 - protein, 2262 aa, Streptococcus agalactiae
ATGACAAGAAATTTTACAACTTACGTTGGACAACAAGGAAAAGTATTATCAGAATTAACAAATGAAGAGATTTACGTTGAATTGTTAAATTTTGTAAAAGAAGAAGCTGCCGCTAAATCAAAAAATAGCTCTCAACGTAAGGTATACTATATTTCAGCTGAGTTTCTAATTGGTAAATTACTTTCAAATAATTTGATTAACTTAGGGATTTATAAAGATGTCAAAAAAGAGTTAGAACTTGTAGGTAAATCAATTGCTGAAATAGAAGATGTAGAGCCAGAACCATCACTTGGTAATGGTGGTTTAGGGCGTTTAGCATCATGTTTTATTGACTCGATTTCTTCTTTAGGTATTAATGGAGAAGGTGTTGGTTTAAACTATCACTGTGGGCTTTTCAAACAAGTATTTCGCAACAATCAACAAGAAGCAGAAGCTAACTACTGGATTGAGAATAATTCTTGGTTAGTACCAACAGATATTTCTTATGATGTTCCTTTCCGTGACTTTACTTTAAAATCACGCCTAGATAGAATTGATGTATTAGGTTATAAGAAAGATACTAAAAATTATTTGAACCTTTTTGATATTGATGGACTTGATTATAACCTTATTGAAAAAGGTATCACTTTTGATAAGACAGAAATCAAGAAGAATTTAACCTTGTTCTTGTATCCAGATGATTCAGATAAAAATGGAGAATTATTACGTATCTATCAGCAATATTTCATGGTCTCAAATGCTGCTCAATTATTAATTGATGAAGCGATCGAGCGTGGTTCAAACCTTCATGATTTAGCTGAATATGCTTATGTTCAAATTAATGACACTCACCCATCTATGGTCATCCCTGAGTTAATTCGTTTATTGACAGAAAAGCATGGTTTTGAATTTGACGAAGCTGTGTCAGTTGTTCGCAATATGGTTGGCTATACAAACCATACCATTCTTGCAGAAGCTCTTGAAAAATGGCCTTTAGAGTATCTTAATGAAGTAGTACCGCACCTAGTAACAATCATTAAAAAATTAGATCAAATGATTCGTGAAGAGCAAACAAATCCAGAGGTTCAAATTATTGATGAAGCTGGACGTGTTCACATGGCGCATATGGATATCCACTTCTCAACAAGCGTTAATGGTGTAGCAGCATTGCATACAGAAATCCTTAAAAATAGTGAATTAAAGGTTTTCTATGATATTTACCCAGATAAGTTTAACAATAAGACAAACGGTATTACATTCCGTCGCTGGTTGGAGTTTGCTAACCAAGATTTAGCAGATTACTTGAAAGAACTAATTGGGGATAGCTATCTTACTGATGCGACTCAGCTCGAAAAATTGTTAACTTATGCTGATAGCAATGAAGTTCATGATAAATTAGCTGCTATTAAATTTAAAAACAAACTGGCTCTTAAACGTTACCTTAAGGAAAATAAAGGTATTGAATTGGATGAATACTCAATTATTGATACACAAATCAAACGATTCCATGAATATAAGCGCCAACAAATGAATGCTTTATATGTTATTCATAAATACTTAGAAATTAAACGTGGGCATTTCCCATCACGTAAATTAACAGTTATTTTTGGTGGTAAAGCTGCTCCAGCCTATACTATTGCACAGGATATCATTCACTTAATTCTCTGCTTATCAGAATTAATTAATAATGATCCAGAAGTTAATAAATACCTTAATGTCCATTTAGTAGAAAATTACAATGTGACAGTAGCGGAAAAGTTAATCCCTGCAACAGATATTTCGGAACAAATTTCATTGGCTTCCAAAGAAGCATCTGGTACAGGTAACATGAAATTTATGTTGAATGGTGCTCTTACTCTTGGTACTATGGATGGGGCAAATGTTGAGATAGCTGAATTAGCCGGCAAAGAGAACATCTACACATTTGGTAAAGACTCTGACACTATCATTAATCTTTATGAAACATCTGGTTATCGTTCAAAAGATTACTATGATAAAGACAAAGTAATTCGTGAAGCTGTTGATTTTATCATTAGTGATGATATAGTGTCACTCGGTAATGCAGAACGACTAAAGAGATTGCATGATGAATTAGTAGGTAAAGATTGGTTCATGACATTGATTGATTTGAAAGAATACATTGCTGTTAAAGAACAAGTGCTTGCTGATTATGAAGATTATGAATCATGGAATAAGAAAGTTATACACAATATTGCTAAAGCAGGGTTCTTCTCATCAGATCGTACAATCGAACAATATAATCAAGATATTTGGCATTCAAAT

SEQ ID NO: 11524 - protein, 754 aa, Streptococcus agalactiae; identical to SEQ ID NO: 7262

SEQ ID NO: 11525 - protein, 156 aa, Streptococcus agalactiae
ATGCAAGATCTACTAGATAAACCTGCAGATAGCCGTATGAACATGCCAAATACCGTTGGAGGTAACTGGCAATGGCGTATGAGAAAAGAAGACTTAACAGAAAATCGCAAAGCATTCTTAAAAGAGATTACAACTATTTATAATAGAGGGAATAAA

SEQ ID NO: 11526 - protein, 52 aa, Streptococcus agalactiae
MQDLLDKPADSRMNMPNTVGGNWQWRMRKEDLTENRKAFLKEITTIYNRGNK

SEQ ID NO: 11527 - protein, 1350 aa, Streptococcus agalactiae
ATGAAAAAACGTGCAAGTGGTGTCTTAATGCACATCACTTCTCTACCAGGTGATTTAGGTATTGGAACATTTGGACGAGAAGCCTACGCTTTTGTTGATTTTTTGGTCGAAACTGATCAAAAATTTTGGCAAATTCTTCCCTTAACAACAACAAGCTTCGGGGACTCTCCTTACCAGTCTTTTTCTGCAGTAGCTGGTAATACACATTTAATTGATTTTGATTTGCTAACGCTTGAAGGTTTTATTTCGAAAGATGACTACCAAAATATTAGTTTTGGACAGGATCCAGAAGTTGTTGATTATGCTGGTCTGTTTGAAAAACGTCGTCCAGTTTTAGAAAAAGCAGTTAAAAACTTCTTGAAAGAAGAGAGAGCTACGAGAATGCTATCTGATTTTTTGCAAGAAGAAAAATGGGTAACTGATTTTGCTGAATTTATGGCTATCAAAGAACATTTTGGTAATAAGGCGCTTCAAGAATGGGATGACAAGGCTATTATACGCCGTGAAGAAGAAGCCTTAGCAGGATATCGTCAAAAGCTTAGTGAAGTGATAAAATATCATGAAGTAACGCAATATTTCTTTTACAAACAATGGTTTGAGTTAAAAGAATATGCTAATGATAAAGGGATTCAAATTATCGGTGATATGCCAATCTACGTTTCTGCCGATAGTGTAGAAGTTTGGACAATGCCTGAACTGTTTAAATTAGATCGCGACAAACAACCACTTGCTATTGCTGGTGTACCAGCGGATGATTTTTCTGACGATGGTCAGCTTTGGGGCAATCCTATTTACAATTGGGATTACCACAAAGAGTCAGATTTTGACTGGTGGATTTATCGTATTCAATCTGGTGTTAAGATGTATGACTATTTGCGTATTGATCATTTTAAAGGTTTTTCAGATTATTGGGAAATTCGAGGAGATTATCAAACAGCTAATGATGGCTCATGGCAACCAGCTCCCGGTCCAGAATTATTTGCAACTATCAAAGAAAAATTAGGTGATTTACCTATTATTGCTGAGAATTTAGGCTATATTGATGAGAGAGCAGAGAGATTACTGGCTGGAACAGGGTTCCCAGGTATGAAAATCATGGAATTCGGTTTTTATGATACAACAGGAAATAGTATTGATATTCCTCATAACTACACAGAAAATACAATTGCATATGCTGGAACTCATGATAACGAAGTTATTAATGGCTGGTTTGAAAATCTTACAGTCGAACAGAAAGCTTATGCAGAAAATTACATGCGTCGTTTGCCAAATGAGCCCATTACTGAGACTGTACTACGTACCTTGTATGCCACCGTTAGTCAACAACGATTACATGTATGCCAGATCTAC

SEQ ID NO: 11528 - protein, 450 aa, Streptococcus agalactiae
MKKRASGVLMHITSLPGDLGIGTFGREAYAFVDFLVETDQKFWQILPLTTTSFGDSPYQSFSAVAGNTHLIDFDLLTLEGFISKDDYQNISFGQDPEVVDYAGLFEKRRPVLEKAVKNFLKEERATRMLSDFLQEEKWVTDFAEFMAIKEHFGNKALQEWDDKAIIRREEEALAGYRQKLSEVIKYHEVTQYFFYKQWFELKEYANDKGIQIIGDMPIYVSADSVEVWTMPELFKLDRDKQPLAIAGVPADDFSDDGQLWGNPIYNWDYHKESDFDWWIYRIQSGVKMYDYLRIDHFKGFSDYWEIRGDYQTANDGSWQPAPGPELFATIKEKLGDLPIIAENLGYIDERAERLLAGTGFPGMKIMEFGFYDTTGNSIDIPHNYTENTIAYAGTHDNEVINGWFENLTVEQKAYAENYMRRLPNEPITETVLRTLYATVSQQRLHVCQIY

SEQ ID NO: 11529 - protein, 207 aa, Streptococcus agalactiae
ATGACCTTTAATAATTCTCTCTTCTCACATCTGATTCATCCTTACCTAAGCACATTTGATATTAATGTTAATAATCTAGGAAGGACAAGCGTTCGTCGTCTGATTGACATCATTAAATCTCCAGACAAAGTCTTTAGTGAGACTATTATTGTGCCTTTTACTTTAGAAGAGCGTGAAAGTGTCCGAGATATTTCTAAAAATAATAAT

SEQ ID NO: 11530 - protein, 69 aa, Streptococcus agalactiae
MTFNNSLFSHLIHPYLSTFDINVNNLGRTSVRRLIDIIKSPDKVFSETIIVPFTLEERESVRDISKNNN

SEQ ID NO: 11531 - DNA, 579 bp, Streptococcus agalactiae
  misc_feature 566, 567, 568, 569, 570: n = A,T,C or G
atggtaactataaaagatgttgctgccaaagctggtgttaatccatcgacagtaagtcgtgtactaaaagataatgcatctatttcaagtaagacgaaagagcgcgtgaaaaaagctatggaagagctgggctatgttcctaatgttgcagcacaaatgttggctagtggtttaacgcaaaatattggagttatttttcctccactggttttaccagaccgcttaagtgaaccctttttcatggagattctttctacattaactaatgaagcaaaagagcatgggtttacagtttctattgcaacaagtatgtcttctgaggagttgttagaacaagtaaaattaatgcatctacaaaaacgagtggatggttttattgttctctattcggatcaaaaagatcctatcagagagtatttattaaaatataaactgccctttgtggttgttggtgctgctaatggctatgraaatgagattacttatattgataatgataatcaactgatggggaaatctgccattgattatctctataaaaaaggacatwaaagcatccagtttgnnnnnttaattaat

SEQ ID NO: 11532 - protein, 193 aa, Streptococcus agalactiae
  VARIANT 157, 184, 189, 190: Xaa = Any Amino Acid
MVTIKDVAAKAGVNPSTVSRVLKDNASISSKTKERVKKAMEELGYVPNVAAQMLASGLTQNIGVIFPPLVLPDRLSEPFFMEILSTLTNEAKEHGFTVSIATSMSSEELLEQVKLMHLQKRVDGFIVLYSDQKDPIREYLLKYKLPFVVVGAANGYXNEITYIDNDNQLMGKSAIDYLYKKGHXSIQFXXLIN

SEQ ID NO: 11533 - DNA, 1245 bp, Streptococcus agalactiae
atggaaaaaaatacttggaaaaaattacttgttagtactgctgctctttcagtagttgcaggaggagcaattgctgctactcactctaactcagttgatgctgcttcaaaaacaactatcaaactttgggtcccaacagattcaaaagcgtcttataaagcaattgttaaaaaattcgagaaggaaaacaaaggcgttactgtaaaaatgattgagtctaatgactctaaagctcaagaaaacgttaaaaaagacccaagcaaggcagccgatgtattctcacttccacatgaccaacttggtcaattagtagaatctggtgttatccaagaaattccagagcaatactcaaaagaaattgctaaaaacgacactaaacaatcacttactggtgcacaatataaagggaaaacttatgcattcccatttggtattgaatctcaagttctttattataataaaacaaagttaactgctgacgacgttaaatcatacgaaacaattacaagcaaagggaaattcggtcaacagcttaaagcagctaactcatatgtaacaggccctcttttcctttctgtaggcgacactttatttggtaaatctggtgaagatgctaaaggcactaactggggtaatgaagcaggtgtttctgtccttaaatggattgcagatcaaaagaaaaatgatggttttgtcaacttgacagctgaaaatacaatgtctaaatttggcgatggttctgttcatgcttttgaaagtggaccatgggattacgacgctgctaaaaaagctgtcggtgaagataaaatcggtgttgctgtttacccaacaatgaaaatcggtgacaaagaagttcaacaaaaagcattcttgggtgttaaactttatgccgttaaccaagcacctgctggttcaaacactaaacgaatctcagctagctacaaactcgctgcatatctaactaatgctgaaagtcaaaaaattcaattcgaaaaacgtcatatcgttcctgctaactcatcaattcaatcttctgatagcgtccaaaaagatgaacttgcaaaagcagttatcgaaatgggtagctcagataaatatacaacggttatgcctaagttgagtcaaatgtcaacattctggacagaaagtgctgctattcttagcgatacttacagtggtaaaatcaaatctagcgattaccttaaacgtctaaaacaattcgataaagacatcgctaaaacaaaa

SEQ ID NO: 11534 - protein, 415 aa, Streptococcus agalactiae; identical to SEQ ID NO: 7268

SEQ ID NO: 11535 - DNA, 1368 bp, Streptococcus agalactiae
atgaataaaaaactgatctcacttgatggtatgtccctaaaagaggtctttcaaaaaggtgatttagcaactaaactatcattcttaattatgggacttgctaacctcaaaaataaacaaattgtcaagggacttttatttttaatcagtgaaattctgtttttaattacctttgtttaccaagttatcccagctgtaaaaggtcttatttccttagggacccaagaacaaggtatgacaactaaaactgtggatggtattaaaatccaagttgcgacacaaggtgataactctatgttaatgctaatttttggattagcttcacttatcttctgttgcgtatttgcctatatttactggtcaaacattaaaagcgcagcacatttattgaccttgaaagaagaaggaagagaaattccatccttcaaaaaagatattaaaagcttgacagatggacgcttccatatgactttaatgtctattcctttaataggggtgcttctatttacaatccttccgttagtttatatgatttgtttggcatttactaactatgatcataaccacttaccaccaaaaagtttatttgactgggttggttttgctaacttcggtaatatctttagcgggcgtatggccagtactttcttccctgttctatcttggacattaatttgggctgttttcgctactgtaacgaatttcttctttggtattattcttgccttactaattaatacaaaaggtttgaaattcaaaaagatgtggcgtactatttttgttattaccatggctgtccctcaatttatctctctcttaatcatgagaaacctcttaagtgacgctggaccsgttaacgccttgttaataaaatggggacttatttcttcagcacatccccttccattcctttctgatccggtctgggcgaaattctcaatcatctttgttaatatgtgggttggtattcctgtaacaatgcttgttgctactggtatcatcatgaatttacctgcagaacaaattgaagctgctgaaattgatggggcgaataagttccaagtctttcaatcaattactttcccacaaattttgttgattatgactcctactttaattcaacaatttatcggaaatattaacaacttcaacgttatctacctactcactcaaggtggaccaacaaactcaacatactaccaagcaggtagcaccgatttacttgtcacttggctatacaatttgacagtaactgctgcagattataacttagcatctgttgttggtatcttaatctttattctttcagcagtatttagtttactagcttacacaagaacaaattcttacaaggaaggggcagctaaa

SEQ ID NO: 11536 - protein, 456 aa, Streptococcus agalactiae; identical to SEQ ID NO: 7270

SEQ ID NO: 11537 - DNA, 834 bp, Streptococcus agalactiae
atgaataagaaaaaacgtcttaaccttacttttgtttatattttattgatagtactatcaattatgtggctctttcccattgtttgggtcgttctcacaagcttccgtggtgaaggaagtgcctttgtcaactactttattcctaaaacttggacattagacaactacgctaaactcttcacccaaaacacattcccatttggtcaatggttcttaaatacattatttgttgctacatgtacttgtatactatcaactttaatcactgtagcaatggcttattctctcagcagaatcaaattcaaacaccgtaatggtttcctaaaactagctttagtcttgaatatgtttcctgggttcatgtcaatgattgcagtttactacatcctaaaagctctaaatctagaccaaacattaaccgctttaatatttgtctattctgcaggagcagcattaaccttctacatcgcaaaaggtttctttgatactattccatactctttggatgagtctgctatgattgatggggcgacccgtttggatattttccttaaaatcaccctaccattgtcaaaacccattatcgtttatactgcattaatcgcttttatggggccttggatggacttcatctttgcaaaagttattttaggtgatgctacgagcaagtacacagtcgctattggtctcttttcaatgttgcaacaagataccatcaaccagtggttcatgtcattcacagcaggatctgttattattgcaattccaatcacaatacttttcatgttcatgcaaaaatactatgttgaaggtattacaggtgggtctgtaaaa

SEQ ID NO: 11538 - protein, 278 aa, Streptococcus agalactiae
MNKKKRLNLTFVYILLIVLSIMWLFPIVWVVLTSFRGEGSAFVNYFIPKTWTLDNYAKLFTQNTFPFGQWFLNTLFVATCTCILSTLITVAMAYSLSRIKFKHRNGFLKLALVLNMFPGFMSMIAVYYILKALNLDQTLTALIFVYSAGAALTFYIAKGFFDTIPYSLDESAMIDGATRLDIFLKITLPLSKPIIVYTALIAFMGPWMDFIFAKVILGDATSKYTVAIGLFSMLQQDTINQWFMSFTAGSVIIAIPITILFMFMQKYYVEGITGGSVK

SEQ ID NO: 11539 - DNA, 927 bp, Streptococcus agalactiae
atggaaaaaacaaaatcattctttggacatcctcgtggattgtccactcttttctttactgaaatgtgggaaaggttctcatactatggtatgcgtgctattttgctgtactatatgtactatagtgtttctcaaggtggccttggtatggacaagactgtcgctgcatcaatcatggctgtctatggttcactggtttatctctcatcagtaattggtggttttgtcagcgaccgtattctaggtagtcgtaaaactgttctgtatggtggtattctaatcatgctaggtcatattgctctagctacgccatttggtcaaacagctctattcatttcgattgctctaattatccttggtactggactattaaaaccaaatgtatcagagatggttggtaatttatacggagaaaatgattctcgtcgtgatgctggttttagtatctttgtttttggtattaaccttggtgcttttatttcacccattgtagtggggtacctcggacaagaagtaaatttccatcttggtttctcacttgctgctattggtatgttctttggtctcctccaatataccttagatggaaaaaaatatttgactgaagagagtctcagaccaaacgatcctttaagtcctgaagaaaagtcctctctatataaaaaagttgggcttatccttattggtattgttattgtacttattcttcttcacttgatgcatatgctaacaattgaagtaattatcgatatttttagtattattgcaatcgccattccaattatttattttatcaagattttaagtagtaaaagawttcttctgktgagcgttctcgagtatgggcatatatccctctctttatcgcctcaattctattttggtcaattgaagaaaaggttcagttgtcttagccttattcgcaga

SEQ ID NO: 11540 - protein, 309 aa, Streptococcus agalactiae
  VARIANT 273, 276: Xaa = Any Amino Acid
MEKTKSFFGHPRGLSTLFFTEMWERFSYYGMRAILLYYMYYSVSQGGLGMDKTVAASIMAVYGSLVYLSSVIGGFVSDRILGSRKTVLYGGILIMLGHIALATPFGQTALFISIALIILGTGLLKPNVSEMVGNLYGENDSRRDAGFSIFVFGINLGAFISPIVVGYLGQEVNFHLGFSLAAIGMFFGLLQYTLDGKKYLTEESLRPNDPLSPEEKSSLYKKVGLILIGIVIVLILLHLMHMLTIEVIIDIFSIIAIAIPIIYFIKILSSKRXLLXSVLEYGHISLSLSPQFYFGQLKKRFSCLSLIRR

SEQ ID NO: 11541 - protein, 471 aa, Streptococcus agalactiae
ATGAACCCTCTCTTCATTATGCTCTATGTACCATTCTTTGCTTGGTTATGGGCTAAATGGGGAAGTAAGCAACCTTCATCACCTAAAAAATTTGCGTATGGACTTTTCTTTGCTGGAGCTTCATTCTTATGGATGATGCTACCAGGTTTACTCTTTGGAGTTAACGCTAAAGTAAGCCCTCTTTGGTTAACAATGAGTTGGGCTATTGTCATCGTTGGGGAAATGCTAATCTCACCAGTTGGATTATCAGCAACTAGTAAGCTCGCACCTAAAGCATTCCAAGCTCAAATGATGAGCATCTGGTTCTTAAGTAATGCTGCAGCACAAGCTATTAACGCTCAAATCGTTAAATTGTACACACCTGATACTCAAATTCTTTATTATGGTGTTGTTGGTGGTATAACAGTTGTATTTGGATTTATCCTCTTATTTTATGTTCCACGCATTGAAAAACTAATGTCTGGAGTTAAA

SEQ ID NO: 11542 - protein, 157 aa, Streptococcus agalactiae
MNPLFIMLYVPFFAWLWAKWGSKQPSSPKKFAYGLFFAGASFLWMMLPGLLFGVNAKVSPLWLTMSWAIVIVGEMLISPVGLSATSKLAPKAFQAQMMSIWFLSNAAAQAINAQIVKLYTPDTQILYYGVVGGITVVFGFILLFYVPRIEKLMSGVK

SEQ ID NO: 11543 - protein, 462 aa, Streptococcus agalactiae
ATGTCACGCAGTCAAAAAGTTATTTTAACTAATATGTGTCTTATTGAAGATAATAAAGGACGTATTGTGATGCAAATCCGTGATCCTAAACGTTATTCTTGGTCAGGAGCTGCTTTACCAGGCGGCCATATTGAAGAAGGAGAAAGCTTGTATGATGCTCTCGTTCGAGAAGTTCGCGAGGAGACAGGTTTAACAATAAGTAATCCCAAATTAGTTGGTATGAAGCATTGGTACACAGATGAAGGCATCCGTTATTTGGTATTCCTTTATAAAACATATGATTTTTCAGGTGAATTACAATCGTCAGATGAAGGTGATGTTATATGGATTGAACGTTCACAACTTGATAAGATTGAACTAGCATATGATATGCTTAACCTTTTGAGAGTATTTGATGAAGATGACATCTCAGAGATGTTTTATAGTAAGCGACTTGAAGATGGTTTTATAAGAAAATTTTAT

SEQ ID NO: 11544 - protein, 154 aa, Streptococcus agalactiae
MSRSQKVILTNMCLIEDNKGRIVMQIRDPKRYSWSGAALPGGHIEEGESLYDALVREVREETGLTISNPKLVGMKHWYTDEGIRYLVFLYKTYDFSGELQSSDEGDVIWIERSQLDKIELAYDMLNLLRVFDEDDISEMFYSKRLEDGFIRKFY

SEQ ID NO: 11545 - protein, 186 aa, Streptococcus agalactiae
TTGAAAAAAAAGAATTTACTTCAGGAGAGTATTAATAAACGTCTATCTGAAGAGCGATATCAAATTCCTAAAGAAAAAAGAGAGAAAAAACGATTTGACATGCAGCTTATTCTGATTATTTCTATTTTAATAGGGTTAATCATGTCTATTATCGGAATTATTCGATTTTTCTTAACTTACAGTAGT

SEQ ID NO: 11546 - protein, 62 aa, Streptococcus agalactiae; identical to SEQ ID NO: 2684

SEQ ID NO: 11547 - protein, 1323 aa, Streptococcus agalactiae
ATGATTAACTTATTTGATAGTTACACTCAATCAAGTTGGGATTTACATTTTTCCTTGATAAAATCAGGTTATATTAACCCTACTATAGCTTTGAATGATGATGGTTTTTTACCAGACGACGTAACATCACCCTATTTATATTACACTGGTTTTGCAAAGATAGGTGCTGGCCGCCCACTTTACTACAATGAACTTAGAGTTCCTGATACATGGGAAATTATTGGTTTTAGTAGTGGTGCTGATATTGTTGACTTAGGTGTCAAAAAGGGCAGAATTATTTATGCAAACCCAAATCATAGGCGTCTAATAAAAGAGGTAGACTGGTTTGATGAGCAAGGTAGAGTCATTTTAAAAGATCGCTTTAATAAGTTTGGGTTCTGTTTTGCACAAACCTTTTATAACGTGGATGGTCAAGCGATTCAGACGTCATATTATAATAAGGATGGGCAAGAGGTTATATCAGAGAACCATATGACAGGGGATTATATTTTAAATGATAATAATCAGTTTAAGGTTTTTAAATCTAAAGTTGAATTTGTCATAAATTATCTTCAAGAAGCAAAATTTAACTTAGATAGGATCTTCTATAATTCTCTGTCAACACCATTTTTAGTAAGCTTTTACCTTAATCGTCTAGAGAGTAAAGATGTTCTCTTTTGGCAGGAGCCTCTCGTAGATGATATTCCAGGAAATATGCGCTTATTATTGAACAATCCTTCCCCAAACACTAAAATTGTAATTCAAAGTTATGAAGCTTATGCTAATGCTATGAGGTTATTAACTGACGAAGAACAAAAACAAGTTAGCTTTTTAGGATTTATGTATCCTCTTAAAGAGACAGAAAAATTACATAACCAAGCTCTTATTTTGACGAATTCTGATCAAATCGAAGCATTAGAAAGTTTAGTGACTTCTCTTCCTAATTTGACTTTTAACATAGGTGCTTTGACCGAGATGTCTAGTGAACTCATGAATTTTGGCAAATATGATAATGTTGTACTCTACCCAAATATCACAACAAATCAAATACAATATTTATCAAATATTTGTGCTTTTTATCTTGATATTAATCATCATAATGAGATATTATCAGCAGTTCGCTCTGCTTTTGAACATCAACAGTTAATTTTTGCTTTCGAAGAGACTAGTCATCAAATTCGTTTTGTATCACCTAAAAATATTTTTCCAAAAAAAGATATTTTTACATTTATTTCGCACTTGCAGCCACTAATTGGCAATAAATGTAATATAGAAAAAGCATTAAAACAGCAGCTTGAAGATTGTCATGTTTCAAGCTCTACTCAGTATCAATCTGTAATTAAT

SEQ ID NO: 11548 - protein, 441 aa, Streptococcus agalactiae
MINLFDSYTQSSWDLHFSLIKSGYINPTIALNDDGFLPDDVTSPYLYYTGFAKIGAGRPLYYNELRVPDTWEIIGFSSGADIVDLGVKKGRIIYANPNHRRLIKEVDWFDEQGRVILKDRFNKFGFCFAQTFYNVDGQAIQTSYYNKDGQEVISENHMTGDYILNDNNQFKVFKSKVEFVINYLQEAKFNLDRIFYNSLSTPFLVSFYLNRLESKDVLFWQEPLVDDIPGNMRLLLNNPSPNTKIVIQSYEAYANAMRLLTDEEQKQVSFLGFMYPLKETEKLHNQALILTNSDQIEALESLVTSLPNLTFNIGALTEMSSELMNFGKYDNVVLYPNITTNQIQYLSNICAFYLDINHHNEILSAVRSAFEHQQLIFAFEETSHQIRFVSPKNIFPKKDIFTFISHLQPLIGNKCNIEKALKQQLEDCHVSSSTQYQSVIN

SEQ ID NO: 11549 - protein, 1506 aa, Streptococcus agalactiae
ATGACAGTTTATAATATAAACCATGGAATTGGTTGGGCAAGTAGCGGTGTTGAGTACGCTCAAGCATACCGAGGTTCTGTTTTGAGAAAACTTGGAATTGATGCTAAGTTTATTTTTACAGATTTTTTTTCAGCTGATAATATTATTAGCCTCACGCGAAATATAGGTTTTCAGGATAAAGAAATTATTTGGTTATATAATTTCTTTTCAGATATTGAGCTTGCACCGACAACTTTTAGTATAGAAGATTTGCAAAAACAATATCTTGGAAAACTTGTTCGAAAAGAAGATAGAGGTCGGGTAATCAAGTTTTTCTACGAAGATGAAAATATCTATTTAACAGTTTACCTTGATAACTTTAACAAGGATAAAGTGCATCGTGTAGAAATCGTTTCAAATAACAACCTTATCAGAAAAGATTATTATAGTTATACACGTACTTTCTCAGAGTATTACTATCCTAAAGATGGTGTAGCTCACCTTTATCAACGTAGATTCTACAATGAAGATGAAAGTACAGCCTTTTTGGAGATGGTAGAAAATAGCTCAAGTCGTTTTATTATCAATGGCAGACTTTTACCATCCAAAGTAGCTTTTTTTGATTATTTTTTGGAATCAATGACTTTCACTTCAAAAGATATTATTCTTTTGGATAGAGGAACTGATACCGCTCAGAGTCTTTTGCGCCATGGTAAACCCGCTAAGCTAGGGACTGTTGTTCATGCGGAACATTTTAGTGAGAATGCTGTGACTGCTGACACTATTTTATGGAATAACTATTACGATTATCAGTTTACTAACGCTAATAGATTTGATTTTTTTATTACCTCCACTGATAAACAAACAGAACTTTTGGAACAACAATTTAAACAATTTACAAATCATAATCCTAGAATTATAACTATCCCGGTAGGCTCAATTGACAATCTTAAAATGCCAATGGATAATCGCCGTCCGTACTCTATTTTGACAGCTTCACGTCTAGCTAGTGAAAAACATGTAGATTGGTTAGTACGTGCAGTTATTAGGATAAGAGAAATTCTTCCTGAAGTGACATTTGATATCTATGGATCAGGTGGAGAAGAAGAAAAAATTAGAAATATTATAAATGCAGCCAATACAACGGAATACATTCGATTGATGGGACATAGAAATCTCTCGAATGTTTATCAAAATTATGAGTTATATTTGACAGCTTCTAAAAGTGAGGGGTTTGGCTTAACTTTACTTGAAGCTATTGGCGCAGGACTTCCTTTGATTGGGTTTGATGTTCGTTATGGTAATCAAACTTTTATCAAAGACGGAGAAAATGGTTATCTAATTCCTCGATTTGATATGGATGATGAGGAAGCTATTGTAGAAGCTTTTAAAGAGAAAGTGTTACAATTATTCCAACAGGATCAAAAGGCTTTACGAGAAGCTTCTTACGCCATTGCCGAAGGATTCTTAACAAGTGAAGTAGAAGGAAAATGGTATAACTTAGTTAAGGAGTTGGTACAAGATGAT

SEQ ID NO: 11550 - protein, 502 aa, Streptococcus agalactiae
MTVYNINHGIGWASSGVEYAQAYRGSVLRKLGIDAKFIFTDFFSADNIISLTRNIGFQDKEIIWLYNFFSDIELAPTTFSIEDLQKQYLGKLVRKEDRGRVIKFFYEDENIYLTVYLDNFNKDKVHRVEIVSNNNLIRKDYYSYTRTFSEYYYPKDGVAHLYQRRFYNEDESTAFLEMVENSSSRFIINGRLLPSKVAFFDYFLESMTFTSKDIILLDRGTDTAQSLLRHGKPAKLGTVVHAEHFSENAVTADTILWNNYYDYQFTNANRFDFFITSTDKQTELLEQQFKQFTNHNPRIITIPVGSIDNLKMPMDNRRPYSILTASRLASEKHVDWLVRAVIRIREILPEVTFDIYGSGGEEEKIRNIINAANTTEYIRLMGHRNLSNVYQNYELYLTASKSEGFGLTLLEAIGAGLPLIGFDVRYGNQTFIKDGENGYLIPRFDMDDEEAIVEAFKEKVLQLFQQDQKALREASYAIAEGFLTSEVEGKWYNLVKELVQDD

SEQ ID NO: 11551 - DNA, 2385 bp, Streptococcus agalactiae
atgacagcctttaatagtttattttcgttagataagaaacgtttaaaaaaacttcagcgtactttaaatactatcaatagtttaaaggaccaaatggcaacactatcaaatgaggagttgcaagctaagacaactgaatttagaaaacgtttagttaatggggaaacactagatgatatttgcgctgaagcttttgctgttgttagggaagctgataagcgcgtattaggtctatttccgtatgatgtacaggtaatcggtggtcttgttctgcaccaaggaaatactgctgagatgaaaactggtgaaggaaaaacattaactgccactatgcctttgtatctcaatgctttagaagggaagggggcaatgttgctgactaataattcctaccttgctattcgagatgcggaagaaatgggaaaagtatatcgttttttaggattgagtgtcggtgtgggagtttctgataatgaggaagaggatagagatgctgcgactaagcgagctgtttatagttcggatattgtctatagtacaagtagtgcactaggctttgattatttaattgataacctagcttcatctaaatctcaaaaatatatgcccaagttacattatgctattgtagatgaagctgacgcagttcttttagatatggcccagactcctttggttatttcaggttcaccccgagtacaatctaatctctataaaatagcagatgaattaattcttagttttgaagaacaagttgattattattttgacaaagagcgtcaggaagtgtggataaaaaaccagggtgttcgtgaagctgagagatattttagaatccctcatttttataaacagtctaatcgagaacttgtgcgacatttgaacttatctttaaaagcacataaattatttgaacgaggaaaagattatgtggttgacgatggtgaaatcaagttgttagatgcgactaatggccgtgttttagaaggtactaaacttcaaggaggtgttcatcaagctattgagcaaaaagagcatcttaatgtcacaccagagtctcgagcaatggcttccattacctatcaaaatctttttagaatgtttactaagttagctggaatgacaggaactggaaaaactgctgaaaaagagtttattgaggtctatgatatggaagtggttagaattccaactaattctcctgttagacgaattgactatcctgataagatttatacaaccttaccagagaaaatctatgcaacgattgaatttgttaaacaggttcatgatacaggacaaccaatcctactagttgccggttctgtgagaatgtcagagctattctcagaattattattactaagtggtatccctcatagcctgttaaatgctcaaagtgcggttaaggaagcgcagatgattgcagaagcagggcaaaaaggagcggtcactgttgcaacgaatatggctggtcgtggtacagatattaagttaggtaagggagtatcagaattaggtggtcttgcggttattggaacggagagaatgaagagtcaaagaatggacttacaattaaggggacgttcgggtcgacaaggggatattggttttagtcaattttttgtatcatttgaagatgatctaatgatagaatcaggtcctaaatgggcgcaagcttactttaggaaaaatcgtgacaaagttaatccagaaaaacctaaagccttaggtcagagaagattccagaagttattccagcaaactcaggaagctagtgacggtaagggagagtctgcacgtagtcaaacgatagagtttgattcgagtgtacagcttcagcgagagtatgtttatcgtgagagaaatgctttgatcaatggagaaagtggacattttagtccaagacagattattgatacagtgatttcttccttcattgcttatttagatggtgaagtagaaaaagaagaactcatttttgaagtaaatcgttttatatttgataatatgtcttacaatcttcaagggatttctaaagagatgtcacttgaagaaattaaaaactatttattcaaaatagccgatgagattcttcgagaaaagcataatttgcttggtgatagttttggtgactttgaacgtactgctgctttaaaagcgattgatgaagcttggattgaagaagtagattatctacaacaattacgtactgtggcaacagctcgtcaaacggcacagcgtaacccggttttcgaatatcataaagaagcatataaatcctacaatatcatgaaaaaagaaattcgtgaacaaacttttagaaatctacttttgagtgaagtatccttcaatgagaatggagatcttcaaatttattttata

SEQ ID NO: 11552 - protein, 795 aa, Streptococcus agalactiae
MTAFNSLFSLDKKRLKKLQRTLNTINSLKDQMATLSNEELQAKTTEFRKRLVNGETLDDICAEAFAVVREADKRVLGLFPYDVQVIGGLVLHQGNTAEMKTGEGKTLTATMPLYLNALEGKGAMLLTNNSYLAIRDAEEMGKVYRFLGLSVGVGVSDNEEEDRDAATKRAVYSSDIVYSTSSALGFDYLIDNLASSKSQKYMPKLHYAIVDEADAVLLDMAQTPLVISGSPRVQSNLYKIADELILSFEEQVDYYFDKERQEVWIKNQGVREAERYFRIPHFYKQSNRELVRHLNLSLKAHKLFERGKDYVVDDGEIKLLDATNGRVLEGTKLQGGVHQAIEQKEHLNVTPESRAMASITYQNLFRMFTKLAGMTGTGKTAEKEFIEVYDMEVVRIPTNSPVRRIDYPDKIYTTLPEKIYATIEFVKQVHDTGQPILLVAGSVRMSELFSELLLLSGIPHSLLNAQSAVKEAQMIAEAGQKGAVTVATNMAGRGTDIKLGKGVSELGGLAVIGTERMKSQRMDLQLRGRSGRQGDIGFSQFFVSFEDDLMIESGPKWAQAYFRKNRDKVNPEKPKALGQRRFQKLFQQTQEASDGKGESARSQTIEFDSSVQLQREYVYRERNALINGESGHFSPRQIIDTVISSFIAYLDGEVEKEELIFEVNRFIFDNMSYNLQGISKEMSLEEIKNYLFKIADEILREKHNLLGDSFGDFERTAALKAIDEAWIEEVDYLQQLRTVATARQTAQRNPVFEYHKEAYKSYNIMKKEIREQTFRNLLLSEVSFNENGDLQIYFI

SEQ ID NO: 11553 - DNA, 990 bp, Streptococcus agalactiae
atgagtacgataagctatatttattgggatgatttttcaaggttttcttataattttggaacaaaattacaatttttgggaaaatcagtatgctttgaaaatccattagctccttctagcacaaacttgtatacatggagctcccagactaattatcagtcaaaaagaatttctcctaacttacctttattaagaaagggaactcgttatagcttgtcattaaatgcagaactcgatttagttggctctctttttgttcgcattgaattttacaatcgctttaatgagtctattggttttgaactgttaaaaaaagatagtattatttttatctatcctaaagaggcttatacctataccattagcttgattaatgcaggttgtagcgattttacttttcattatttgaaacttgaggaagttacagatagcgttattcaggagaaaaatctatcgacagagtttactattgaagaacatcaagacgtttttaatcttcttttggtcgagaaaaaagatagtgtgtatattaataaaatagaaagcatttctcaattgcaacagaaagtcgagctggtcagcaatccctcattaaattctgatagtttgatattacctgagttggaaaaggggttagaagatgcattaaaagtttttcctaacattaagattaatgtcattgcatatggaacacaaggtaattttgctgctttatattatgctaaaaaatttcccagaataactgcctatattaatgattgttttgctcctttcggaattttacttaaatccttaccacacttgactgccaaacaacaaatatttcttagagaagtctgggatacgagagagacgtctccaaatgtaaagcactatggattggtttcagaaaattcctctttaaatttagtatcaatgatcttatctggtaatgaacatctaccttacctcacacttttaaaaaagcaggacgacaattatgacagcctt

SEQ ID NO: 11554 - protein, 330 aa, Streptococcus agalactiae
MSTISYIYWDDFSRFSYNFGTKLQFLGKSVCFENPLAPSSTNLYTWSSQTNYQSKRISPNLPLLRKGTRYSLSLNAELDLVGSLFVRIEFYNRFNESIGFELLKKDSIIFIYPKEAYTYTISLINAGCSDFTFHYLKLEEVTDSVIQEKNLSTEFTIEEHQDVFNLLLVEKKDSVYINKIESISQLQQKVELVSNPSLNSDSLILPELEKGLEDALKVFPNIKINVIAYGTQGNFAALYYAKKFPRITAYINDCFAPFGILLKSLPHLTAKQQIFLREVWDTRETSPNVKHYGLVSENSSLNLVSMILSGNEHLPYLTLLKKQDDNYDSL

SEQ ID NO: 11555 - DNA, 1557 bp, Streptococcus agalactiae
atgtcaaaaataaaacttacaattcttcaagttggtgaagagaactgggcaactaaagagaatatccctaatgatatggaatggctctttattaaaccagatcaaatttctgactttgtaactacagaaaataattatcttacatcgtcaaagttattacaaaaactaccacgaaaaatatctgctcttttgttgacagagcaaacttatggaccagagttatctagtttatcgtcattctttgaggtttatgaagtattttatcctaaagataaacatgctacggggataacagaagagtttttacgctcgaaaatggcccaacgatatgatagtagctctccagctcagctaattcgtcaattttataaagggctttttataggacaatacggagagaaacttcaagtttcacaaatacaaattagaaatgattttgaaggtgtagtaaactatcagggaaataactatcttgaattagaagggcaatttggtgaggactatagttttttacttaattttgcttacaatattccattttcatcggatttttataatgagttatttttagaacacattatagagggtgatatagatattcgattggttatctcgttgattgttgatggttctgttgatgatattgctaaagagtggtactttgagaaggaagacctaaatcaacttatttctttagagtccgatattagtggtagccttgcagttaaactttttgctaagggaaagggtatcattaagttaggtccattgcaccgtcgtaatggtagaggaggattgggcacatttctactaggaggagaacgtcacatagatgctataggtcatgaatttatgacttattttgatccagtagatttcaaaccacctctaactgtttatttttcgggatttcgttcagctgaaggctttgagggattctggatgatgaagagtatgaagactccattcatgttaatttgtgatccacgattacaaggtggtgccttttatataggaagcaaagaatatgaacaaaaaatagttgatgctattcaagaaaaactggcctttttaaattttagttctgatcagttaattttatccggactttcaatggggacttatggtgctacttaccatggtgctaagctaaatcctcatgctattattattggtaaaccaatatttaatttaggaacagttgctcaacgtgaaagattagagagaccagatggatttgctacttcattagatattcaactactcaatcaaggtgacttgaccagttcctcttctgagaagttaaataaccttttttggaaatctatagaagaaggagatttttcaaatacgacttttgccttagcctatatgaaaaacgatgactatgatgcgactgccttttctgatttattgcaatattttagaggaaagaagcataagatattaggcagaggttgggatggccgacatggtgattgttctgcagaagttggtgcatggtttacaagtcagtataggcgaatgctatctaatgattttggaaggaaagaagaa

SEQ ID NO: 11556 - protein, 519 aa, Streptococcus agalactiae
MSKIKLTILQVGEENWATKENIPNDMEWLFIKPDQISDFVTTENNYLTSSKLLQKLPRKISALLLTEQTYGPELSSLSSFFEVYEVFYPKDKHATGITEEFLRSKMAQRYDSSSPAQLIRQFYKGLFIGQYGEKLQVSQIQIRNDFEGVVNYQGNNYLELEGQFGEDYSFLLNFAYNIPFSSDFYNELFLEHIIEGDIDIRLVISLIVDGSVDDIAKEWYFEKEDLNQLISLESDISGSLAVKLFAKGKGIIKLGPLHRRNGRGGLGTFLLGGERHIDAIGHEFMTYFDPVDFKPPLTVYFSGFRSAEGFEGFWMMKSMKTPFMLICDPRLQGGAFYIGSKEYEQKIVDAIQEKLAFLNFSSDQLILSGLSMGTYGATYHGAKLNPHAIIIGKPIFNLGTVAQRERLERPDGFATSLDIQLLNQGDLTSSSSEKLNNLFWKSIEEGDFSNTTFALAYMKNDDYDATAFSDLLQYFRGKKHKILGRGWDGRHGDCSAEVGAWFTSQYRRMLSNDFGRKEE

SEQ ID NO: 11557 - DNA, 1542 bp, Streptococcus agalactiae
atgtttcattttattccatcttggtataatgaaaatcgtacctggtatgataataattacttgtggtatttcaagccgactaatgtcggttttgatgatactatcaaccaaatgaagatgtttgattatgctggaaaagagagtagattagttgtcttaaactatatgcccaatttacgttattatttacatcgctatgacttgttagaatcaggttattattcagtttttgatgatattcaagaaatcgggaatgtaagacagcaaatgattgacttccgacaactcaattggcctgaaggggtggactttacctatactccgtttatagttttggtaaaaaagtcaggagatttaattgctaaggttcaatttggtgaagaaggaaatttaacgcatattgattattttgcaaatgaacaaatagctaagaaatacctctttgatgatagaggatttctatctagtattctctattatgataatggtggtgaagcctatcaagattatttagcatcatcaggggaaaggattatgagagaatacctaagagaaggtgaccaccatgttgaaattaatcctaagaaagctattcattttttaaagttatcttactccgacattgaagagttgattagagagaaatatctgacctatctccataaagaagttagtaaatcagatactatcattgctagctttaatcaagttcataacgcatttattgttgggaacactagtaaaggaaatttaatattatctgttttttcagagaggaataatgctcacaatgtattggaggattactcttccttatctcgagcagacgctattatttgtgatagactagatattgctgcacaattgaaagaaaaaatagataaaccagttgttcatgtttctccctttgatacgcgtttagctttgggaaaaagtaatcaagttagagatttagaaatatattttgtcatagatagactttcccataaagaattgcaaaagtctttaacgtccttatataaggttatgctcaaaaataatgatataaaagtaacatttgtcagctacgaacgagaatttgaaagtcggcaattgacgtatgactaccttaaagaagcaacaaaagtttttgatcagaaattctttagtttatcagacgatgatgccaatcaagttcttatgcaatctgatgaagtagaaaaggaaaaaacacgcctttcttttacccatcctttgtcagaaacagatatcataaaccggttagagtatgtccgtttgattattgatatctcgaaaataccagacttatacacacaaattgcagggataagttcaggtatccctcagataaatacaatattaacagaatttgttgaacacaggaaaaacggttacgttattgaagagatccaagaattggaaaaggcaattccttattattgtgaacaattaactaattggaaccgttctttaatttattctgttgataaaatcaatgactatacaggtggtcaattggtagaaagaattataaatagttat

SEQ ID NO: 11558 - protein, 514 aa, Streptococcus agalactiae
MFHFIPSWYNENRTWYDNNYLWYFKPTNVGFDDTINQMKMFDYAGKESRLVVLNYMPNLRYYLHRYDLLESGYYSVFDDIQEIGNVRQQMIDFRQLNWPEGVDFTYTPFIVLVKKSGDLIAKVQFGEEGNLTHIDYFANEQIAKKYLFDDRGFLSSILYYDNGGEAYQDYLASSGERIMREYLREGDHHVEINPKKAIHFLKLSYSDIEELIREKYLTYLHKEVSKSDTIIASFNQVHNAFIVGNTSKGNLILSVFSERNNAHNVLEDYSSLSRADAIICDRLDIAAQLKEKIDKPVVHVSPFDTRLALGKSNQVRDLEIYFVIDRLSHKELQKSLTSLYKVMLKNNDIKVTFVSYEREFESRQLTYDYLKEATKVFDQKFFSLSDDDANQVLMQSDEVEKEKTRLSFTHPLSETDIINRLEYVRLIIDISKIPDLYTQIAGISSGIPQINTILTEFVEHRKNGYVIEEIQELEKAIPYYCEQLTNWNRSLIYSVDKINDYTGGQLVERIINSY

SEQ ID NO: 11559 - DNA, 1227 bp, Streptococcus agalactiae
ttgaaattactatatatttttgaaaaaaatattattcttcgtaaaatattgataacattttcattaataatcatttttttacttggtcgctatgttccaatacctggtgtcttgatttctgcttataagggacaagacaataactttgcgacgctttattcaacagtaactggtggtaatttgtctcaggttggggtcttttcattgggtattggtcctatgatgaccacaatgattttactaagactatttacgattggtaaatactctagtggagtatctcaaaaagttcaacagtttcgccaaaatgtggtgatgcttgtcatagcaattattcaagggctagccatagccatatcttttcaatatcataatggtttttctctgaccaaattattactcgcgacaatgatacttgtgactggtgcatatattatttcctggattggtaatctaaatgcggaatacgggtttggtggaatgactattttagtggtggtaggtatgcttgttgggcaatttaataatattcctcttatttttgaattattccaagatggttatcaacttgctatcatcttatttcttttgtggacactagtagcaatgtacttaatgataacttttgaacgttcagaatatcgtataccagtaatgcgtacttcaatccataatcgtctcgttgatgatgcctacatgccaataaaagtaaatgcttcgggggggatggcatttatgtatgtttataccttactaatgttcccccagtatattattattttactaagaagtattttcccaactaatccagatatcacatcatacaatgactattttagtttatcttctattcagggagtggttatttatatgattttaatgcttgttttatcagttgcatttacttttgtgaatatcgatccgactaaaatttctgaggcaatgcgagaaagtggtgattttattcctaattatagacctggtaaagaaacacaaagttatttatcgaaaatctgttatttatttggaacttttagtggttttttcatggctttcttaggaggggtaccattattatttgctcttggaaatgataatcttaggacagtttcatctatgacagggatttttatgatgatcacagggatgtcatttatgatattggatgaattccaagttattcgtattcgtaaacaatacacttctgtatttgaaaatgaggagaat

SEQ ID NO: 11560 - protein, 409 aa, Streptococcus agalactiae
MKLLYIFEKNIILRKILITFSLIIIFLLGRYVPIPGVLISAYKGQDNNFATLYSTVTGGNLSQVGVFSLGIGPMMTTMILLRLFTIGKYSSGVSQKVQQFRQNVVMLVIAIIQGLAIAISFQYHNGFSLTKLLLATMILVTGAYIISWIGNLNAEYGFGGMTILVVVGMLVGQFNNIPLIFELFQDGYQLAIILFLLWTLVAMYLMITFERSEYRIPVMRTSIHNRLVDDAYMPIKVNASGGMAFMYVYTLLMFPQYIIILLRSIFPTNPDITSYNDYFSLSSIQGVVIYMILMLVLSVAFTFVNIDPTKISEAMRESGDFIPNYRPGKETQSYLSKICYLFGTFSGFFMAFLGGVPLLFALGNDNLRTVSSMTGIFMMITGMSFMILDEFQVIRIRKQYTSVFENEEN

SEQ ID NO: 11561 - protein, 1194 aa, Streptococcus agalactiae
ATGAGAGTTATTAAAGTAAAAACAATTTCGGAAACTTTAGATTATATTTCTAAACATACTGCTTCGGTAGCGCGTTTTGGTGATGGAGAAATTGATATTATTGCGGGGAATTCTATTCCTTACCAGGTTTATGATTCTGAACTTGCTAAGCGATTAAAACGTTTATTAAATCGACAAAGTAATGAGAAGCTAGTTATCTGTGTAAGTGATGTTTTTGATAATTTAGGTAGATACAACGATTTTTCACAACAATTTTGGAGGGGGCATCTATATCAGTATAATGATTTGTACCAAAAAAATTGTCAGGCTGAATGGTATGGTTCAACTTTTATTTCTAGACCCTATATGGATTTACTAGATAAGAGTTTGTCAGTAACGTACTTTGAACAGCTAAAAGCATTATGGAAAAATAAAGATATTTTAATTGTCGAGGGTGAGACTTCTCGTTCAGGCGTTGGCAATGACTTATTTAATGATGCCAATACTATTTCGCGTATCATTTGTCCTTCGAAAGATGCATTTTCATCTTTTTATGAAATCAAGGAAACTATACTTGAACATAGTAGAGGTAAGCTAATTTTACTTATGCTTGGTCCAACTGCAAAGCTATTAGCTGAAGATTTATCGCAGCTAGGACATCAAGCTATTGATTTAGGTCATATCGATTCAGAATATGAGTGGTTTAAGATGGGAGCAGTTTCTAAGGTGAAACTTTCTCATAAACATACGGCAGAACATAATTTTGACGAAGATATTACTTTAATAGAAGACAATAGTTACGAAAATCAAATTGTATCAAAAATTGGTACATCAGATAGACAGTACGCTTTGACAGTGACATTAACAGATGATATATGGGAGCTAGAACATTTATTACAAAGATGTCCTAATACTGATTTTCATATTGCTGCCCCAGTTTATTGTTCGGATAGACTTAAGCAGTTAGTAGGTTATCCAAATTATTACCTACATGAAGCTATTACTGAAGAGCAATTCGAAGTACTCCTATTAAATAGCGATATATATTTAGATATTAATCATGGTGAAGAAGTTTGGAATGTTGTTGATAGATGTATAACTGAGGGTAAAACTATATATGGAATCAGACGGGCAAGAAAAGATAATCAATATATTTCTTTTGAGCGAACCATGGATGATTTTGAATATTTGTGTGACACTATTAAACAAAATAGA

SEQ ID NO: 11562 - protein, 398 aa, Streptococcus agalactiae
MRVIKVKTISETLDYISKHTASVARFGDGEIDIIAGNSIPYQVYDSELAKRLKRLLNRQSNEKLVICVSDVFDNLGRYNDFSQQFWRGHLYQYNDLYQKNCQAEWYGSTFISRPYMDLLDKSLSVTYFEQLKALWKNKDILIVEGETSRSGVGNDLFNDANTISRIICPSKDAFSSFYEIKETILEHSRGKLILLMLGPTAKLLAEDLSQLGHQAIDLGHIDSEYEWFKMGAVSKVKLSHKHTAEHNFDEDITLIEDNSYENQIVSKIGTSDRQYALTVTLTDDIWELEHLLQRCPNTDFHIAAPVYCSDRLKQLVGYPNYYLHEAITEEQFEVLLLNSDIYLDINHGEEVWNVVDRCITEGKTIYGIRRARKDNQYISFERTMDDFEYLCDTIKQNR

SEQ ID NO: 11563 - protein, 885 aa, Streptococcus agalactiae
ATGGAGGCAATAGTGACTGATAAATTAGTTTCTGTTATTATTCCAGTCTATAATGCAGCACCATATTTAGAGGGGTGTGTAAATACCATTTTAGGACAAACATACCAAGTTTTTGAAATTCTACTGATAGATGACGGTTCTACAGATACATCTGCTAGTATCTGCGATCAATTATCTCTAAGAGATAACCGTATTAGAGTTTTCCATATCGAAAATGGCGGTGCTTCTAAAGCTAGAAACTTTGGATTAGCACGAATTAGTTCAGAGAGCCAATTTGTTACGTTTGTTGATTCGGACGATTGGGTAAAGGAAAATTATTTGGAAGTACTGTTAGCTCAGCAAGAAAAATATAATGCTGATATTGTTATCAGTAATTACTATATCTACAGAGAAACAGAAGATATTTTTGGTTACTACATCACTGACAAAGATTTTGTTATCGAAGAAATCTCTGCTCAAACAGCTATTGATAGACAAGTGCATTGGCATTTAAATAGTTCAGTATTCATCGTTATTTGGGGGAAATTATATCGAAGAGAACTATTTGATACCATCACCTTCCCAATAGATAAAGTATTTGAAGATGAGTTGGTAAGTGTTTTACTTTTTATAAAAAGTAAAAAAACAATTTTAGTTAATGGAAGCTATTATGGCTATAGAATTCGTCCAAATAGCATTATGACATCGGCGTTTTCATCCAAAAGAGCAGAAGATCTTATTTATATTTTTGATAGTAAATTGTCGGAGATTATACTGTCAGGATTGGATTCAACTGCAACTGTAGAGAGATATTTTTGGTTAATGCGTGACTATAAACAGCGCTTAGAACAAGAAAATTTACAGAAAACAATAATATATAAAGTGATATCAAATCGGTTATCAAGG

SEQ ID NO: 11564 - protein, 295 aa, Streptococcus agalactiae
MEAIVTDKLVSVIIPVYNAAPYLEGCVNTILGQTYQVFEILLIDDGSTDTSASICDQLSLRDNRIRVFHIENGGASKARNFGLARISSESQFVTFVDSDDWVKENYLEVLLAQQEKYNADIVISNYYIYRETEDIFGYYITDKDFVIEEISAQTAIDRQVHWHLNSSVFIVIWGKLYRRELFDTITFPIDKVFEDELVSVLLFIKSKKTILVNGSYYGYRIRPNSIMTSAFSSKRAEDLIYIFDSKLSEIILSGLDSTATVERYFWLMRDYKQRLEQENLQKTIIYKVISNRLSR

SEQ ID NO: 11565 - protein, 1182 aa, Streptococcus agalactiae
GTGAAAAATAACGTTATTTGTTTGGCAGGTGATAATAAATCTTTAAATCAGATCCAAACAGTTATAAAATCGATTTTATGTCACAATGATAGAGTAAGTATTTATATTTTAAATCAAGATATAGCTTCAGAATGGTTTAGAAATATTCAAAGACGTTTATTAAATAGTCATAGTTGTATTTTTGATATAAAACTCTTTGATGATACTTTTAAGGAATTTAAAACGCCCCGTGCCCATATTACCTATATGGCTTATGCAAGGTACTACATTCCGCAACTGATTGATGCAGAGAAAGTTCTTTATTTAGATATTGATACTTTGGTTGTTGATAACTTAGATAAGTTGTTTGAGATAGAATTAGGGGACTACCCGATAGCAGCTATCTTAGATGGAGACGGTATTCATTTTAACTCAGGTGTTATGCTAATAAACTCGCTTTACTGGATGAGATATCGAGTAACAGAAAAACTTATGGAAATAACAGAACGAGAATTGGATAATGGAATTTTTGGAGACCAAGGGGTTCTCAATCTTCTTTTTGATAATAATTGGCTTAAGTTAGAAGATAAGTATAATGCTCAAGTTGGAAATGATTTAGGTGCCTTTTATGAAAATTGGCAAGGGTATTTTGATCGTAACTTTGAATCGCCTACTATTATCCATTACTGTACTCATGATAAACCATGGAATACTTTTTCTTCTTCAAGGTTTAGGGAGACATGGTGGCAATATGAGCAACTAGATTGGAATGAGGTGTTTAATTTTGAAACGTATCTGTTACCTGAGCCAACATTTGAAAAACACTTCTTTACTTTCACAACGTCCGTGGATTTGCTTTATATTGAAGAATTGGTTGAACTATTCCCCAATAGTTGCTTCCATATAGCTGCTTGGACCTCTTTTGGCCCAAGCTTACTTAAGTTAGCCACAAACTCTAACGTTCGTCTGTATCCTTCAATAACCAGCCCACTTTTTGAACAACTAATGACTAAAGCAAATTATTACCTTGATATCTCAACTTCTTGGAAGGAAATACAATTTTGTCAAAAAGCTATTGAGAAATCAATTCCGATATTGAGTTTTAATGAAGCAGTGACATTTGAATATAGGGAGTTAAGTCATTGCTTTATTAATTTGGAGGATATGCGACAGTTTTTATGTAAAAATGGAGGCAATAGTGAC

SEQ ID NO: 11566 - protein, 394 aa, Streptococcus agalactiae
MKNNVICLAGDNKSLNQIQTVIKSILCHNDRVSIYILNQDIASEWFRNIQRRLLNSHSCIFDIKLFDDTFKEFKTPRAHITYMAYARYYIPQLIDAEKVLYLDIDTLVVDNLDKLFEIELGDYPIAAILDGDGIHFNSGVMLINSLYWMRYRVTEKLMEITERELDNGIFGDQGVLNLLFDNNWLKLEDKYNAQVGNDLGAFYENWQGYFDRNFESPTIIHYCTHDKPWNTFSSSRFRETWWQYEQLDWNEVFNFETYLLPEPTFEKHFFTFTTSVDLLYIEELVELFPNSCFHIAAWTSFGPSLLKLATNSNVRLYPSITSPLFEQLMTKANYYLDISTSWKEIQFCQKAIEKSIPILSFNEAVTFEYRELSHCFINLEDMRQFLCKNGGNSD

SEQ ID NO: 11567 - protein, 1239 aa, Streptococcus agalactiae
ATGAAAAATAGAAAAGCTATCGCGTTAGCGGCAGATTTTGGCTATCAAGAGCAAGTTAAGACTATAATTAAATCAATATGCTTTCATAATCAATTTATTGATTTTTATATCTTAAATGACGATTTTCCAGTTGAATGGTTTCAAATGATGGAATATCATTTATCTAAAATGGATTGCACAATATCTAACACTAAAATTTTTAATGAAGAAATTAAACATTTTAAATTTCAAAAACCGATGCCCTATCCTACTTACTTTCGATACTTTATACCTGAAGTTATTCATGAAGATAAGGTACTATATTTAGACTGTGATATGATTATCACCAGTGATTTAACATCGATATTTACTCTTGATATTTCAAAATATGGTGTAGCGGCTGTTCGAGATGATTTGCTCGAAGAATATGATGGTAAAGAAGATTATTTTAATTCAGGTTTGCTATTAATTAATAATATTTTTTGGCGAGAACAAGGGTTTAGTCAGCGACTGTTAGATTATACTAGAGAAAACCAAGGGGCTCTTCAATATCATGACCAGGATGTTTTGAATGATGTACTGTGCGATAATTGGCTAGAACTTGATGAAACTTATAACTATCATACAGGAGCAGATATGTTATATAACCTATTCCAACAGTCTGAACGTCAATTAAATCGCAGGAAAGATTTACCTAAAGTTATTCATTATACAGCGACAAAACCATGGAAATACCTTGAAACATCTGTTCGTTGGCGCGATATATGGTGGGAATATAATAGACTTGAATGGCGCGATATTTTTACAAGATGGCAAGTCAATGATGGTGTAGATGTTTCATTGAAGAAAGTGTTACAACCTATCCATCGAGCTTTCATTTTTACTTACTCAGATTCAATTGAAGGAATTGAGAGGTTGGCTAAGGATTTACCAAACTGGCAATTTCATATTGCTGCCTATACTCAAATTTCAGAAAAATTGAAACAATTGGAAATGCATTCAAATATAAAACTTTATCCACTTGTTTATCGTTTCAAATTAAATGAGCTAGTTGAAAATTCAGATATTTACCTTGATATTAATCATGGTGATGCAGATACTCAGGTTCTGGAGCAAGTGAAGAAATTAGGTAAAGATATTTTATCCCTTTCTACAACTTATCATGGTCAAGGCAAACAATTTGAGAGAGTTACGGATATTATTGATTATTTAAAGAATGAACGATTTAAAGAACATATTAGAAAGGAATATTGTGAAAAA

SEQ ID NO: 11568 - protein, 413 aa, Streptococcus agalactiae
MKNRKAIALAADFGYQEQVKTIIKSICFHNQFIDFYILNDDFPVEWFQMMEYHLSKMDCTISNTKIFNEEIKHFKFQKPMPYPTYFRYFIPEVIHEDKVLYLDCDMIITSDLTSIFTLDISKYGVAAVRDDLLEEYDGKEDYFNSGLLLINNIFWREQGFSQRLLDYTRENQGALQYHDQDVLNDVLCDNWLELDETYNYHTGADMLYNLFQQSERQLNRRKDLPKVIHYTATKPWKYLETSVRWRDIWWEYNRLEWRDIFTRWQVNDGVDVSLKKVLQPIHRAFIFTYSDSIEGIERLAKDLPNWQFHIAAYTQISEKLKQLEMHSNIKLYPLVYRFKLNELVENSDIYLDINHGDADTQVLEQVKKLGKDILSLSTTYHGQGKQFERVTDIIDYLKNERFKEHIRKEYCEK

SEQ ID NO: 11569 - protein, 1203 aa, Streptococcus agalactiae
ATGAAGAAAACAATTGTTTTAGGTGCAGATTTCCAATATCGTGATCAAGTTATGACAACTATAAAATCTATTGTTAGTCATAATCAACATTTAACTATTTATATCATTAACACAGATTTTCCCGTAGAATGGTTTAATATCCTTAACCATTCTTTAGAACAGTTTGACTGTAGAGTAAAAAATATTCCCATAAGTTCAGATGTCTTTGAGGGGATACCTACCCTGAGCCATATCAGTGTGGCGGGATTTTTCAGATGGTTTATTCCAATTCACCTTGAAGAAGAGATAGTTTTATATTTAGATAGTGATGTAATAGTTAGGGGTTCTTTGGATCCTCTATTTGACATAAACCTTGAAGAGAATTTATTAGGAGCTGTAGCAGATCATTTTTCAACGCTTTACTATGGAGATACAGCACCAGTTAGTTTTAATTCAGGTGTTATGCTAATCAATAATTCATTATGGAAAAAAGAAGAAATTTATAATAGCCTTATGAGGATTGCTGATAAGGGTTCTGCTGTTGGGGTAGGAGATCAAGAATACCTTAATATTTTGACTCAGAATCGTTGGATAGATATCGGTAAACAATATAATGTTCAGATTGGTCAAGATGTCAATATTAATGCATATGGGCGACCAGATTTGTATCATTTTTATGATGATTGCGAACCTGTTATTGTTCATTATAATAGTCAAGATAAACCGTGGAATAAATATAGTCAATCGCGATACCGTTCAGAATGGTGGTATTATTTTGGTTTAGAATGGTCAGTTATTTATGCTCAACAACAAAAAAATTTGAACAGGTTAACAGGTAAAACACTGAATTTATTTACATTAACAGCCTCAGATACATTAGAACATATTGAAGTACTTGCAAAAGCTCTACCAGATTATCAGTTTCATATTGCAGCACGTAGTGATATTTCAGAGAAATTAGCTAATCTAGAAACTTATAGCAATATTAAAGTTTATAAATTAGTTATCAACCCTATCTTGGAAGAGCTTATACGTAACTGTGATGTGTACTTGGATATTAATCATTCTTACGAAGTAGAAGGTATTCTAGATAAAATAAAAGAAGAGAATAAACCGATTTTAGCCTTTGATTCTACAGCACATACGACAAAAAATATAGAAGTTATCTCAGAAACAATGCCTGAATTGATGGTTAAAAGAATAAGGGAAGTAGGTCCTCTTAGA

SEQ ID NO: 11570 - protein, 401 aa, Streptococcus agalactiae; identical to SEQ ID NO: 7302

SEQ ID NO: 11571 - DNA, 1005 bp, Streptococcus agalactiae
atgcgagtacatattacaagtatatatgggcagtcaccgcgtagcattgcccttatatcacaaaaactagttaaggatgtcggacgtcaacttggttatgatgaaatgggaatctacttttataatgatcatgctgaaacgcatggtgaaagaagtactaggatggatggtatcattgcgggattaggcagaggggatattgttgtttttcaagtacctacatggaattcaacagaatttgatgaactttttctagataaattacaggcatacggtgctagaattataacttttgtacatgatattgttcccttaatgtttgagtctaatttttatttattagatagagtaattgacatgtataatcgttcggatgttgttattctacctacaaaagcgatgcatgattatctaattgaaaaagggatgactacctctaaagttctttatcaagaagtatgggatcatccagttaatatagacctccctcgtccagaatgtcaaaaagtccttagttttgcaggcgatattcaacgctttccctttgtcaatgactggaaggaaaatatcccgctcatctattatggagacggaagcagactcaattctgaggcaaatgttcatgctcagggatggaaagatgatgtagaattgatgctaagtctttctaagcggggaggatttggcctgtgttggagtgaagatagagaggagttagtcgagcgtcgttattcgaggatgaatgcctcgtataaattatctactttcttggctgctggacttccaattattgctaaccatgatatttcaagtagagactttatcaaacaacacggattaggatttacagttgaaacgctagaagaagctgttgaaaaaattaataatatggaaaaagagacttatgacagctatgtggaaaatgttgagaagatagcaactctcttgcgaaatggttatatcactaaaaaattgttgatagatgctgtgcatatgctttataga

SEQ ID NO: 11572 - protein, 335 aa, Streptococcus agalactiae; identical to SEQ ID NO: 2710

SEQ ID NO: 11573 - DNA, 3390 bp, Streptococcus agalactiae
atgtccaaaaagacttttggcaagcagttaacagttgtaggttctaagagtagagtcaagatgcataaatcaggaaaaaactgggtaagaacaataatgtcgcattttaatctatttaaagcgattaaagggagagcaactgttgaagcagatgtgtgtgttcaaaatattgaaaaagaagaccgactatcttcaggaaatttgacctatctcaaaggattactagctgctggagctctgctaggtggagcgagtttaaccagtcgtgtttatgcagatgagactccagttgttcaagaacaatcgagttctgtaccaacacttgcagaacaaacggaagtgactgttaaaacaactgctgttcaaaattatcaagatgggacagtatcgaaaaacatcatcgactccaatagtgtatctatgtcagagtcagcctcaataagtgttagtgaatctatcagtatgtctatgtcagggtcaatatcaacaagtgtaagtgaatctgtaagtacatctacctcagaaagtactctatcaagtctttcagaatcagcttcaacaagtgctttaaaatctacaagtgtaagtgaggcttcaaatattcttgaaactcaggcttctttaactgataaaggaagagagtcgttttcggcaaaccagatagtaacagaaagtagcttagttactgatgctggtaaaaatgcttcagtatctagcctaattgaaattacaaaaccaaaatcggagttacagacttccaaaatgtcaaatgagtcgcttataactccagagaaaccccaagtaatgattgcaagcgataaaactgggaatgagactctaactccgacaattagattaaaatcagttattcagccaaggagtatgaacttgatagctttgagctcggagatggacttgataccactagaagaagtgtctgatactgaaatgttaggtaaagacgtatcaagtgagtttcagaaagttaatattgcgttaaaagataacactcttagtgagcctggaacagttaaattagataaatcagaaaaccttgttttgaactttgacttttcaatcgcttctgttaacgagggagatttctttactgtaaagctttctgataatcttgatacacaaggggttggtactactctaaaagttcaagatataatagatacaagtggtcagttattagcaacgggatcatatagtcctttaacacataatattacatacatctggacaaaatatgcttctacattgaataatattaatgctcaagtcaagctgccagtttggcctgatcagagaaaagtttccaaaacgacttcagataagcagcgctttactgcaacattgaacaatcaagttgcttcaattgaggaacgtgttcagtataatagtccttcagtgacagaacatactaatgttaagacaaatgtaagatctcggatcatgaagattgatgatgaaaaacagacagaaacttatattactcaaattaatcctgaaggtaaggaaatgtatttcgcatcaggacttgggaatctatatactattatcggttcagatggaacatcaggttcaccagttaatttattaaatgcggaagtaaagattctaaaaactaattcaaaaaatcttacagatagtatggatcaaaattatgattcgactgagtttgaagatgtgacttcccagtatagttatactaacgatggttctaaaattaccatagattggaaaacaaattctatttcttcctctacatcttatgttgttttagtcaaaatacctaaacaaagtggtgtattgtattcgactgtttctgatataaatcaaacaaatggttctaaatatttttacggatatactcaagtagatggagaatcagatgcgaatgctgaaaaaaaatttttatccgaaagtgcttctacgtcagctagtaccagtgcttcaacttcggcaagcgctagcgcttccacgtcagcaagtattagcgcttccacaagtgcaagtattagcgcctcaacgagtgcctccacgtcagccagcacaagcgcttccacaagtgcaagtatgagcacctcaacgagtgtatccacgtcagcaagtactagcgcttcaatgagtgcatcgacatcagcaagtaccagtgcttccacaagtgcaagtacgagtgcctccacgtcagccagcacaagcgcctcaatgagtgcatccacgtcagcaagtactagcgcctcaaccagtgccagtaccagtgcttccacctcagcaagtatgagcgcctccacaagtgcaagtactagcgcctcaatgagtgcatccacgtcagcaagtactagcgcctcaaccagtgccagtaccagtgcctcgacgtcaacaagtactagcgcatccacgtcagcaagtatgagcgcatccacgtcagcaagtaccagtgcatccacgtcagcaagtatgagcgcctccacaagtgcaagtatcagtgcctccacgtcagcaagtatgagcgcatccacgtcagcaagtaccagtgcctccacgtcagcaagtactagcgcctcaatgagtgcatcgacgtcagccagcaccagtgcttccacaagtgcaagtactagcgcctcaatgagtgcatcgacatcagcaagtaccagcgcttcaacaagtgcaagtacgagtgcctccacgtcagcaagtactagcgcctcaacatcggcaagtacaagttcttccacaagtgcaagtaccagtgcatcgacatcagccagcactagcgcctcaacgagtgcgtcaatgtcagccagcacaagttcttcaacaagtgcctcgatgtcagccagcactagcgcttcaatgagtgcatcgacgtcagctagcactagcgcctcaacgagtgcgtcaatgtcagccagcacaagtgcttcaacaagtgcctcgatgtcagccagcactagcgcttcaatgagtgcgtcgacgtcagccagcaccagcgcttcaacgagtgcgtcaatgtcagccagcacaagtgcttcaacaagtgcctcgatgtcagccagcactagcgcttcaacgagtgcgtcaatgtcagccagcacaagtgcttcaacaagtgcctcgatgtcagccagcactagcgcttcaatgagtgccacgacgtcagccagcaccagcgtctcaacgagtgcatcgacatcagcaagtaccagcgcttccacaagttcttcaagctcagtgacttctaattcatcaaaagagaaggtgtattctgccttaccttctacgggtgaccaagattattctgtaactgctactgccttaggtttaggtttaatgactggtgcaacccttttgggacgaaaaaaatctaaaaaagataaagac

SEQ ID NO: 11574 - protein, 1130 aa, Streptococcus agalactiae
MSKKTFGKQLTVVGSKSRVKMHKSGKNWVRTIMSHFNLFKAIKGRATVEADVCVQNIEKEDRLSSGNLTYLKGLLAAGALLGGASLTSRVYADETPVVQEQSSSVPTLAEQTEVTVKTTAVQNYQDGTVSKNIIDSNSVSMSESASISVSESISMSMSGSISTSVSESVSTSTSESTLSSLSESASTSALKSTSVSEASNILETQASLTDKGRESFSANQIVTESSLVTDAGKNASVSSLIEITKPKSELQTSKMSNESLITPEKPQVMIASDKTGNETLTPTIRLKSVIQPRSMNLIALSSEMDLIPLEEVSDTEMLGKDVSSEFQKVNIALKDNTLSEPGTVKLDKSENLVLNFDFSIASVNEGDFFTVKLSDNLDTQGVGTTLKVQDIIDTSGQLLATGSYSPLTHNITYIWTKYASTLNNINAQVKLPVWPDQRKVSKTTSDKQRFTATLNNQVASIEERVQYNSPSVTEHTNVKTNVRSRIMKIDDEKQTETYITQINPEGKEMYFASGLGNLYTIIGSDGTSGSPVNLLNAEVKILKTNSKNLTDSMDQNYDSTEFEDVTSQYSYTNDGSKITIDWKTNSISSSTSYVVLVKIPKQSGVLYSTVSDINQTNGSKYFYGYTQVDGESDANAEKKFLSESASTSASTSASTSASASASTSASISASTSASISASTSASTSASTSASTSASMSTSTSVSTSASTSASMSASTSASTSASTSASTSASTSASTSASMSASTSASTSASTSASTSASTSASMSASTSASTSASMSASTSASTSASTSASTSASTSTSTSASTSASMSASTSASTSASTSASMSASTSASISASTSASMSASTSASTSASTSASTSASMSASTSASTSASTSASTSASMSASTSASTSASTSASTSASTSASTSASTSASTSSSTSASTSASTSASTSASTSASMSASTSSSTSASMSASTSASMSASTSASTSASTSASMSASTSASTSASMSASTSASMSASTSASTSASTSASMSASTSASTSASMSASTSASTSASMSASTSASTSASMSASTSASMSATTSASTSVSTSASTSASTSASTSSSSSVTSNSSKEKVYSALPSTGDQDYSVTATALGLGLMTGATLLGRKKSKKDKD

SEQ ID NO: 11575 - DNA, 819 bp, Streptococcus agalactiae
atgatagaaaattttttagaaaaaaatattcttaataaagttaaattacttactttatgttatgataccccctcactatccttagataccgcctgtaaccgactccacttatcaccagttgagcttaaaaactattgtcataaattaaatgttttatttggtcataaactttctatccatatccaaaaagaacggattttatgtaagctaaataaacttactcaggaagatgccttaaaaatagtttataatgagtcaaacgctttacaacttcttaaatttttaattgatgactcgtctgataaaaaatctctagtagcttttggaaatgatctcttcttatctcgttcttctgtctatcgtctgcgagaaaatttaattcctttaattaaagatttaggattatctttatctaaaaataccattgtaggtgacgaatatcgcattagatatctcatcgcatacctcactactaaatttggtattaaaatttacgatctgtctgctctagatattaagattattcgacaatttttatttgagagtggtactaatataagacctactacgcacctttctgatatctttattttttttgatacgcttttcattttaacctggaaacgtcaccatcataaagttaaaattccaaactccaaacttttctcttctcttaaaaaaatctttatttatgaggagctgaatacatgtgtaaaaagtatcgttcaaccttacttcaatgttatttttaattcagaagacatggattatatttttcttatctatctttacagcgctaactcttttgctgctcaaaag

SEQ ID NO: 11576 - protein, 273 aa, Streptococcus agalactiae
MIENFLEKNILNKVKLLTLCYDTPSLSLDTACNRLHLSPVELKNYCHKLNVLFGHKLSIHIQKERILCKLNKLTQEDALKIVYNESNALQLLKFLIDDSSDKKSLVAFGNDLFLSRSSVYRLRENLIPLIKDLGLSLSKNTIVGDEYRIRYLIAYLTTKFGIKIYDLSALDIKIIRQFLFESGTNIRPTTHLSDIFIFFDTLFILTWKRHHHKVKIPNSKLFSSLKKIFIYEELNTCVKSIVQPYFNVIFNSEDMDYIFLIYLYSANSFAAQK

SEQ ID NO: 11577 - DNA, 150 bp, Streptococcus agalactiae
ttgaaagaagctcttycatactctgacacctactacgatgagctagtgaaagtcactatttacttttctcgaaacttcatagttggtctgaatcaattaattcctgaaaaattagttttccttcaacattctatcctggaaatcctaaac

SEQ ID NO: 11578 - protein, 50 aa, Streptococcus agalactiae
  VARIANT 6: Xaa = Any Amino Acid
MKEALXYSDTYYDELVKVTIYFSRNFIVGLNQLIPEKLVFLQHSILEILN

SEQ ID NO: 11579 - DNA, 306 bp, Streptococcus agalactiae
ttgttaacaactgatttcattaataatcaaatcttcaaagactatctattacaatctctttccttagagaaaataaactttcattcctattacttattaagagataatgttagtcaagtatcaactctaaaacctgatttaatcattaccgatcaaaaactagttccatatgtcacaaaggaattagctacaaatagtttagtcgctcatattgattacaacgatacaccctctcaaatcagtaatatccaaactattatttctaatattaaagaagaaaaatatcgaaaaatctttgataaaata

SEQ ID NO: 11580 - protein, 102 aa, Streptococcus agalactiae
MLTTDFINNQIFKDYLLQSLSLEKINFHSYYLLRDNVSQVSTLKPDLIITDQKLVPYVTKELATNSLVAHIDYNDTPSQISNIQTIISNIKEEKYRKIFDKI

SEQ ID NO: 11581 - protein, 1989 aa, Streptococcus agalactiae
ATGATAGATAGAAAAGATACTAACCGATTTAAATTAGTTTCCAAATATAGCCCTTCGGGAGATCAACCTCAAGCTATTGAAACGTTGGTTGACAATATTGAAGGAGGAGAAAAAGCTCAGATTTTAAAAGGTGCTACTGGTACTGGTAAAACCTACACAATGAGCCAAGTTATCGCCCAAGTTAACAAGCCAACCTTGGTGATTGCACATAATAAAACCTTAGCAGGTCAACTTTATGGAGAGTTTAAAGAATTTTTTCCTGACAATGCCGTAGAGTACTTTGTTTCATATTATGATTATTATCAACCAGAAGCTTATGTGCCTTCTTCGGATACTTATATTGAAAAAGATAGTTCAGTCAATGACGAAATTGACAAATTACGTCACTCAGCGACTTCTTCGTTATTAGAAAGAAATGACGTTATTGTTGTAGCATCTGTTTCTTGTATTTACGGTTTAGGTTCTCCTAAAGAGTATGCAGACAGTGTTGTTAGCCTTAGGCCAGGTCAAGAAATTTCACGTGATCAGTTATTGAACAATCTCGTTGATATTCAATTTGAGCGTAACGATATTGATTTTCAACGTGGAAAATTTCGCGTTCGTGGCGATGTTGTAGAAGTTTTTCCTGCGAGTCGTGATGAGCATGCCTTTCGAATTGAATTTTTTGGTGATGAAATTGATCGTATAAGAGAAATAGAATCGTTAACAGGGCGTGTGCTAGGAGAAGTGGAACATTTAGCTATTTTCCCAGCAACACACTTTATGACAAATGATGAACATATGGAAGAAGCTATTTCAAAAATACAAGCTGAAATGGAAAATCAAGTAGAACTTTTTGAAAAAGAAGGGAAATTGATTGAAGCGCAACGTATTCGACAAAGGACAGAATATGATATTGAAATGCTTCGTGAAATGGGATATACAAATGGTGTTGAGAACTACTCACGTCACATGGATGGTAGAAGTGAAGGTGAGCCACCTTTTACTTTGTTAGATTTCTTCCCAGAAGATTTTTTGATTATGATTGATGAGAGTCACATGACAATGGGGCAAATCAAAGGGATGTATAATGGAGACCGTTCGCGTAAAGAAATGTTGGTTAATTACGGTTTTCGTTTACCATCTGCCTTAGATAACCGTCCACTTCGTCGTGAAGAATTCGAAAGCCATGTCCATCAAATTGTCTATGTATCTGCAACGCCAGGAGACTATGAAATGGGGCAAACAGATACGGTTGTTGAGCAAATTATCCGGCCAACAGGACTTCTTGATCCAGAAGTTGAAGTTAGACCAAGTATGGGGCAGATGGATGACTTGCTTGGTGAAATCAATTTGAGGACTGAAAAAGGTGAGCGTACCTTTATTACAACATTGACAAAGCGCATGGCAGAAGACTTAACAGATTATCTCAAAGAAATGGGAGTTAAAGTTAAGTATATGCACAGCGATATTAAAACCTTAGAACGTACAGAGATTATTCGTGATTTACGACTTGGTGTGTTTGATGTTTTAATTGGTATTAATCTCTTACGTGAAGGAATAGATGTTCCTGAGGTTTCCCTTGTTGCAATCTTAGATGCTGATAAGGAAGGTTTCCTTCGTAATGAGCGTGGTCTTATCCAAACAATCGGACGTGCAGCACGTAACAGTAATGGTCATGTTATTATGTATGCTGATAAAATAACAGATTCTATGCAAAGAGCTATGGATGAAACCGCTCGCCGTCGTCGTTTACAAATGGATTATAATGAAAAGCATGGAATTGTGCCACAAACAATTAAAAAAGAAATCCGTGATTTAATTGCTATTACTAAAAGTAATGACAGCGATAAACCTGAAAAAGTTGTCGATTACAGTAGTTTATCTAAGAAAGAAAGGCAAGCTGAAATTAAAGCTCTTCAAAAGCAAATGCAAGAAGCAGCTGAATTATTGGACTTTGAGCTAGCTGCACAAATCCGAGATGTTATCTTAAAACTAAAAGCAATCGAT

SEQ ID NO: 11582 - protein, 663 aa, Streptococcus agalactiae
MIDRKDTNRFKLVSKYSPSGDQPQAIETLVDNIEGGEKAQILKGATGTGKTYTMSQVIAQVNKPTLVIAHNKTLAGQLYGEFKEFFPDNAVEYFVSYYDYYQPEAYVPSSDTYIEKDSSVNDEIDKLRHSATSSLLERNDVIVVASVSCIYGLGSPKEYADSVVSLRPGQEISRDQLLNNLVDIQFERNDIDFQRGKFRVRGDVVEVFPASRDEHAFRIEFFGDEIDRIREIESLTGRVLGEVEHLAIFPATHFMTNDEHMEEAISKIQAEMENQVELFEKEGKLIEAQRIRQRTEYDIEMLREMGYTNGVENYSRHMDGRSEGEPPFTLLDFFPEDFLIMIDESHMTMGQIKGMYNGDRSRKEMLVNYGFRLPSALDNRPLRREEFESHVHQIVYVSATPGDYEMGQTDTVVEQIIRPTGLLDPEVEVRPSMGQMDDLLGEINLRTEKGERTFITTLTKRMAEDLTDYLKEMGVKVKYMHSDIKTLERTEIIRDLRLGVFDVLIGINLLREGIDVPEVSLVAILDADKEGFLRNERGLIQTIGRAARNSNGHVIMYADKITDSMQRAMDETARRRRLQMDYNEKHGIVPQTIKKEIRDLIAITKSNDSDKPEKVVDYSSLSKKERQAEIKALQKQMQEAAELLDFELAAQIRDVILKLKAID

SEQ ID NO: 11583 - protein, 672 aa, Streptococcus agalactiae
TTGCTTATCTGGGTAAAATTCGTAGAAAAAAGACCTTTTTCAGAATTGGGGTTTTCTACAAAGTTTAAAAGAACTCTGTGGTCACTTATAAAAGGTTGGAGTATAGGTTTTATTCTATTTTCAATTTCTGTCATCACTGCTTATATATTGGGAGGACTTGACTTTCATAGCTATGATGTTTCTAAGGCAACGATTTTCTATGTTGTAACTCTCCTTCCTTTTTGGCTTATTCAAAGCGGTACGGAAGAATTGCTAACACGAGGGTGGCTTCTTCCTCTAATTAATCATCGTTTTCATTTAGCTGTTGCCATAGGGGTCTCATCCACTTTATTTGGCATTTTGCACTTGGTAAATGCCCATGTCACTTTTCTTTCTATTGTAAGTATTATATGTTCGGGAGTTTTAATGTCCTTGTATATGATTAAAAGTGGTAATATTTGGAGTGTTGCAGCCTTACATGGAGCTTGGAATTTTAGCCAAGGTAATCTCTATGGTATTGCCGTAAGTGGTCAGAAAGCAGGAGCATCTCTTTTGCATTTTACCGTTAAAGAAAACGCACCGGACTGGATATCAGGTGGTGCATTCGGAATAGAAGGAAGTTTGATTTCTATTTTTGTTCTCTTAGCAGCAATTATATACCTTCTATGGCTAATTAAGACTGAAGAAACAGAT

SEQ ID NO: 11584 - protein, 224 aa, Streptococcus agalactiae
MLIWVKFVEKRPFSELGFSTKFKRTLWSLIKGWSIGFILFSISVITAYILGGLDFHSYDVSKATIFYVVTLLPFWLIQSGTEELLTRGWLLPLINHRFHLAVAIGVSSTLFGILHLVNAHVTFLSIVSIICSGVLMSLYMIKSGNIWSVAALHGAWNFSQGNLYGIAVSGQKAGASLLHFTVKENAPDWISGGAFGIEGSLISIFVLLAAIIYLLWLIKTEETD

SEQ ID NO: 11585 - protein, 2181 aa, Streptococcus agalactiae
ATGAAGCACAAGTTAAAAGCTTTTACGCTTGCTTTACTCTCAATATTCTTTGTGTTTGGTGGAAAGGTCAGTGCAGAGACTGTGAATATTGTTTCTGATACAGCATACGCTCCATTCGAATTTAAAGATTCTGATCAAACTTATAAAGGAATCGATGTTGACATCGTTAACGAAGTCGCTAAGCGTGCTGGCTGGAATGTTAACATGACGTACCCAGGTTTTGATGCCGCAGTTAACGCTGTTCAATCTGGACAGGCAGACGCGCTAATGGCCGGAACTACTGTTACTGAAGCACGTAAAAAAGTCTTTAATTTCTCAGATACTTATTACGATACTTCCGTTATTCTTTATACTAAAAATAATAATAAAGTCACAAACTACAAACAACTAAAAGGAAAAGTAGTCGGTGTAAAAAATGGAACAGCTGCTCAAAGCTTCTTAGAGGAAAATAAATCTAAATACGGCTATAAAGTTAAAACATTTGATACAAGTGACCTAATGAATAACAGCCTTGATTCTGGTTCTATTTACGCCGCTATGGACGATCAACCAGTTGTGCAATTTGCGATAAATCAAGGAAAAGCTTACGCCATTAACATGGAAGGCGAGGCAGTTGGTAGCTTTGCATTTGCTGTCAAAAAAGGTAGTGGACACGATAACCTAATTAAAGAATTTAACACAGCTTTTGCACAAATGAAATCAGATGGCACTTATAATGACATCATGGATAAATGGCTTGGGAAAGACGCTACAAAAACAAGCGGCAAAGCAACAGGTAATGCCAATGAAAAAGCAACTCCTGTAAAGCCAAGTTATAAAATTGTTTCTGATTCTTCATTCGCACCATTCGAATATCAAAACGGTAAAGGGAAATATACTGGTTTTGATATGGAATTAATCAAGAAAATTGCTAAACAGCAAGGTTTTAAACTTGATATCTCAAATCCAGGTTTTGATGCCGCTTTAAATGCTGTCCAATCTGGACAAGCTGACGGTGTTATTGCAGGAGCCACAATCACAGAAGCACGCCAAAAAATCTTTGATTTTTCTGACCCTTATTACACATCTAGCGTTATCTTAGCGGTAAAAAAAGGAAGCAATGTCAAATCATACCAAGATTTAAAAGGAAAAACAGTTGGTGCTAAAAATGGTACTGCCTCATATACTTGGTTATCAGACCACGCAGATAAGTACAACTATCATGTTAAAGCATTTGATGAAGCATCTACAATGTATGATAGTATGAACTCAGGTTCAATTGATGCTCTAATGGATGACGAAGCAGTTCTTGCTTACGCTATTAATCAAGGTCGTAAATTTGAAACACCTATCAAAGGTGAAAAATCAGGCGATATCGGATTTGCAGTGAAAAAAGGGGCAAATCCAGAATTAATTAAAATGTTTAACAACGGTCTTGCTTCACTCAAAAAATCAGGTGAGTACGATAAACTTGTTAAAAAATACCTTTCCACAGCCAGCACTTCTTCAAACGATAAAGCTGCTAAACCTGTAGATGAATCAACTATTTTAGGGTTAATTTCTAATAACTACAAACAATTGCTATCTGGTATTGGAACTACTTTAAGTTTAACTCTTATCTCATTTGCGATTGCTATGGTTATTGGTATTATCTTTGGTATGATGAGCGTATCACCAAGTAATACTCTCCGCACAATTTCAATGATTTTTGTTGATGTTGTCCGTGGTATTCCACTCATGATTGTGGCCGCTTTTATTTTCTGGGGTATTCCTAATTTAATCGAAAGCATCACAGGTCACCAAAGTCCAATTAATGACTTCGTTGCTGCTACTATCGCTCTTTCTTTAAATGGTGGTGCGTACATTGCTGAAATTGTACGTGGTGGTATTGAAGCTGTTCCTTCTGGTCAAATGGAAGCAAGTCGTAGTTTAGGTATTTCTTACGGCAAAACTATGCAAAAGGTTATCTTGCCTCAAGCAGTACGCCTTATGTTACCAAACTTTATCAACCAATTTGTCATCTCATTAAAGGATACAACAATTGTATCAGCAATCGGACTTGTGGAACTCTTCCAAACTGGTAAAATCATAATTGCACGTAACTATCAATCATTCCGTATGTATGCTATTCTTGCAATTATGTATCTTGTAATCATTACCCTTCTCACCCGTCTAGCAAAACGTTTAGAAAAGAGGCTTAAA

SEQ ID NO: 11586 - protein, 727 aa, Streptococcus agalactiae
MKHKLKAFTLALLSIFFVFGGKVSAETVNIVSDTAYAPFEFKDSDQTYKGIDVDIVNEVAKRAGWNVNMTYPGFDAAVNAVQSGQADALMAGTTVTEARKKVFNFSDTYYDTSVILYTKNNNKVTNYKQLKGKVVGVKNGTAAQSFLEENKSKYGYKVKTFDTSDLMNNSLDSGSIYAAMDDQPVVQFAINQGKAYAINMEGEAVGSFAFAVKKGSGHDNLIKEFNTAFAQMKSDGTYNDIMDKWLGKDATKTSGKATGNANEKATPVKPSYKIVSDSSFAPFEYQNGKGKYTGFDMELIKKIAKQQGFKLDISNPGFDAALNAVQSGQADGVIAGATITEARQKIFDFSDPYYTSSVILAVKKGSNVKSYQDLKGKTVGAKNGTASYTWLSDHADKYNYHVKAFDEASTMYDSMNSGSIDALMDDEAVLAYAINQGRKFETPIKGEKSGDIGFAVKKGANPELIKMFNNGLASLKKSGEYDKLVKKYLSTASTSSNDKAAKPVDESTILGLISNNYKQLLSGIGTTLSLTLISFAIAMVIGIIFGMMSVSPSNTLRTISMIFVDVVRGIPLMIVAAFIFWGIPNLIESITGHQSPINDFVAATIALSLNGGAYIAEIVRGGIEAVPSGQMEASRSLGISYGKTMQKVILPQAVRLMLPNFINQFVISLKDTTIVSAIGLVELFQTGKIIIARNYQSFRMYAILAIMYLVIITLLTRLAKRLEKRLK

SEQ ID NO: 11587 - protein, 738 aa, Streptococcus agalactiae
ATGGCAGAATTAAAAATTGATGTCCAAGATTTACACAAGTCGTATGGGCAAAATGAAGTTTTAAAAGGTATTGATGCTAAATTTTATGAAGGTGATGTTGTCTGTATTATTGGACCTTCTGGTTCAGGAAAATCAACTTTCCTTCGCACATTGAACTTACTTGAATCAATCACAAGTGGAAAAGTTGTTGTGGACGGCTTTGAGTTATCAAATCCAAAAACAGACATAGACAAAGCACGTGAAAATATCGGAATGGTATTTCAACACTTCAATCTTTTCCCACATATGTCAGTTCTTGAAAACATCACTTTTGCTCCTATTGAACTTGGTAAAGAATCTAAAGAAGCAGCTGAAAAGCATGGGATGGAATTACTTGAAAAAGTTGGTTTAGCCGATAAAGCTAATGCCAAACCAGATAGTTTATCTGGAGGACAAAAACAACGTGTAGCTATCGCAAGAAGCTTAGCGATGAATCCAGATATCTTACTTTTTGACGAACCAACTTCTGCACTTGATCCAGAAATGGTTGGAGATGTTCTCAATGTTATGAAAGATTTAGCTGAACAAGGTATGACTATGTTAATTGTGACACACGAAATGGGATTTGCTCGTCAAGTTGCCAATCGTGTTATCTTTACAGATGGTGGTCGTTTCCTCGAAGATGGGACACCTGAGCAAATCTTTGATACACCTCAACACCCACGTCTCCAAGACTTCCTTAATAAAGTTTTAAACGTT

SEQ ID NO: 11588 - protein, 246 aa, Streptococcus agalactiae; identical to SEQ ID NO: 2722

SEQ ID NO: 11589 - protein, 348 aa, Streptococcus agalactiae
ATGAAAGACTATATTAACAGAATATTGCACTTTATTAAAGAACATATGACTTATCATGTCAACTTTATAGATGACTTTTTAGATATTAAATGGGAAAAGGTGAGTAACATCCATTTAAGGTTTTGGACAACTATTATTGCTTATCTAGTTATTTTTATCTTAAGTATCTCTACCGTAATTCTTAACCTTGTACTTCTTTTTCAAGGATTCTTAACGCAAAACCCTATTATTTACTTACTATTTTTTATAACTTTAGTTTGTGCTTTTTATTTTGCTTATAAATTTATTACTTATACTCCAACCATTGTAAAAAATGCTCTTCAGTATATCAAAAAGCTCAAAAACGTT

SEQ ID NO: 11590 - protein, 116 aa, Streptococcus agalactiae; identical to SEQ ID NO: 2724

SEQ ID NO: 11591 - DNA, 165 bp, Streptococcus agalactiae
atgggagataaaccgatatcatttcgtgataaagatgggaactttgtttcagcggccgatgtctggaatgctgaaaaattagaagaactctttaacacattaaatcctaatcgtaaacttcgtttagaacgcgaaaaattagcaaaagaaaaaaggatagttaag

SEQ ID NO: 11592 - protein, 55 aa, Streptococcus agalactiae
MGDKPISFRDKDGNFVSAADVWNAEKLEELFNTLNPNRKLRLEREKLAKEKRIVK

SEQ ID NO: 11593 - DNA, 1311 bp, Streptococcus agalactiae
atgagtatgtttttagatactgccaaaattagtgttaaggcaggtcgcggtggtgatggcatggttgcttttcgccgtgagaaatatgtccccaatggaggcccgtggggcggtgatggcggtaaaggcggatcggtcatttttaaagtaaacgaaggtttacgaactttgatggattttcgatataaccgtaattttaaagcaaaagctggtgaaaaagggatgactaaaggtatgcacggtcgaggtgcagaagaccttattgtgtcattaccacctggaacaactgttcgtgatgctactacaggtaaggttattaccgaccttgtggagcatgatcaggaattcgttgtagccagaggtggccggggtggtcgtggaaatattcgctttgcaaccccacgtaatccagctcctgaaattgctgaaaatggggagcctggcgaagagcgtgaattacaattagaattaaaaattttggctgatgttggtctcgttggtttcccatcggttgggaagtcgacgctacttagtgttgtttcagcagcaaagcctaaaattggtgcctatcattttacgacaattgtccctaatttagggatggttcgtacaaaatcaggtgatagctttgcaatggctgatctccctggtttgattgaaggggctagtcaaggtgtcggattaggaactcagtttcttagacatattgagcgtacacgtgttattctacatgttattgatatgtcggcaagtgaaggacgagacccttacgatgactatgtttcaattaataatgagttggaaacttacaatcttcgattgatggaacgtccgcaaattattgttgccaataaaatggacatgcctgattcagaagagaatttggcagcattcaaagaaaaattagctgcaaactatgatgagtttgatgacatgcctatgatttttccaatttcaagtttagcacatcaaggactagagaaccttatggatgcgacggctgaattattagccaatacagaagagtttcttctttatgacgaaactgacatgcaagaagatgaagcatactatggatttaacgaagatgaacgtccatttgagattacacgtgatgatgatgcaacgtgggtattgtatggtgataagctagaaaaactctttgttatgacaaatatggaacgcgatgaatcaataatgaaatttgctcgtcagttacgtggtatgggcgttgatgaagcccttcgagagcgcggagctaaggatggagatattgttcgtataggtaacttcgaatttgaatttgtagat

SEQ ID NO: 11594 - protein, 437 aa, Streptococcus agalactiae; identical to SEQ ID NO: 2728

SEQ ID NO: 11595 - DNA, 126 bp, Streptococcus agalactiae; identical to SEQ ID NO: 7331

SEQ ID NO: 11596 - protein, 42 aa, Streptococcus agalactiae; identical to SEQ ID NO: 2730

SEQ ID NO: 11597 - DNA, 1239 bp, Streptococcus agalactiae
atggttttacaagatttcgacaaccttttaaaaaaatatgcccaattaattatttctcaaggtttaaatgtccaaaaagggcatactctcgctttaacaatcgatgtggaacaagtccacttagcaaggcttttaactgaagccgcttatgaaaagggagcaagtgaagttattgttgattatacagatgattttatcacgcgccagcgactacttcatgcttcagacgaagttctcacgaatgttccacagtataccgttgataaatctttagcgctattaaataagaaagctagtcgattagttgtgaaatcttctaaccctaacgctttcgctactgttgatcctaaacgtttatctgaaacaactagagcaaccgctattgccttagaggaacaaagtagagcaatacaagctaataaagtatcttggaacgtggctgcagctgctggtagagaatgggctgcacttgtcttcccagaattaaaaacaagcgaccaacaagttgatgctctttgggataccattttcaaattaaatcgtatttatgaagatgatcctattgctgcttgggacgcacatgaagctaaattattagaaaaagctactagactaaatcaagaacaatttgatgctcttcattataccgcaccaggtacagatttaacgcttggtatgcctaaaaatcatatttgggaggcagccggtagtctcaacgctcagggagagacttttatcgctaatatgcctactgaagaaatcttttcagcacctgattaccgtcgtgcagatgggtatgtgacaagtacaaaacctctcagttatgctggcgttattatcgaaaatatgatgtttacttttaaagacggtaaaattatcaatgtcactgcagaaaaagggcaagaaacaatccaacgcttaatcgaggaaaatgatggggcaagatcgcttggggaagttgcacttgtcccacataaaacaccaatttcactgtctggactaattttctttaatactttattcgatgaaaatgcctctaatcacctcgctattggatctgcatatgccttcaatgtagaaggaggaacagaaatgacaagtcaagaattggatgaagctggtttaaatcgttcttcaacacatgttgattttatgattggttcagaacaaatggatattgatggtattcgtgcagatggaactgctgtcccaatctttagaaatggcgaatgggctatt

SEQ ID NO: 11598 - protein, 413 aa, Streptococcus agalactiae
MVLQDFDNLLKKYAQLIISQGLNVQKGHTLALTIDVEQVHLARLLTEAAYEKGASEVIVDYTDDFITRQRLLHASDEVLTNVPQYTVDKSLALLNKKASRLVVKSSNPNAFATVDPKRLSETTRATAIALEEQSRAIQANKVSWNVAAAAGREWAALVFPELKTSDQQVDALWDTIFKLNRIYEDDPIAAWDAHEAKLLEKATRLNQEQFDALHYTAPGTDLTLGMPKNHIWEAAGSLNAQGETFIANMPTEEIFSAPDYRRADGYVTSTKPLSYAGVIIENMMFTFKDGKIINVTAEKGQETIQRLIEENDGARSLGEVALVPHKTPISLSGLIFFNTLFDENASNHLAIGSAYAFNVEGGTEMTSQELDEAGLNRSSTHVDFMIGSEQMDIDGIRADGTAVPIFRNGEWAI

SEQ ID NO: 11599 - DNA, 576 bp, Streptococcus agalactiae
atgaaagtgaaaaataagattttaacgatggtagcacttactgtcttaacatgtgctacttattcatcaatcggttatgctgatacaagtgataagaatactgacacgagtgtcgtgactacgaccttatctgaggagaaaagattagatgaactagaccagtctagtactggttcttcttctgaaaatgaatcgagttcatcaagtgaaccagaaacaaatccctcaactaatccacctacaacagaaccatcgcaaccctcacctagtgaagagaacaagcctgatggtagcacgaagacagaaattggcaataataaggatatttctagtggaacaaaagtattaatttcagaagatagtattaagaattttagtaaagcaagtagtgatcaagaagaagtggatcgcgatgaatcatcatcttcaaaagcaaatgatgagaaaaaaggccacagtaagcctaaaaaggaacttcctaaaacaggagatagccactcagatactgtaatagcatctacgggagggattattctgttatcattaagtctttacaataagaaaatgaaactttat

SEQ ID NO: 11600 - protein, 192 aa, Streptococcus agalactiae
MKVKNKILTMVALTVLTCATYSSIGYADTSDKNTDTSVVTTTLSEEKRLDELDQSSTGSSSENESSSSSEPETNPSTNPPTTEPSQPSPSEENKPDGSTKTEIGNNKDISSGTKVLISEDSIKNFSKASSDQEEVDRDESSSSKANDEKKGHSKPKKELPKTGDSHSDTVIASTGGIILLSLSLYNKKMKLY

SEQ ID NO: 11601 - protein, 2037 aa, Streptococcus agalactiae
ATGAAACGTAAATACTTTATTCTTAATACGGTGACGGTTTTAACGTTAGCTGCTGCAATGAATACTAGCAGTATCTATGCTAATAGTACTGAGACAAGTGCTTCAGTAGCTCCTACTACAAATACTATCGTTCAAACTAATGACAGTAATCCTACCGCAAAATTTTCATCAGAATCAGGACAATCTGTAATAGGTCAAGTAAAACCAGCTAATTCTGTGGCGCTTACAACAGTTGACACGCCTCATATTTCAGCTCCAGATGCTTTAAAAACAACTCAATCAAGTCCTGTCGTTGAGAGTCCTTCTACTAAGTTAACTGAAGAGACATACAAACAAAAAGATGGTCAAGATTTAGCCAACATGGTGAGAAGTGGTCAAGTTACTAGTGAGGAACTCGTCAATATGGCATACGATATTATTGCTAAAGAAAACCCATCTTTAAATGCAGTCATTACTACTAGACGCCAAGAAGCTATTGAAGCGGCTAGAAAACTTAAAGATACCAATCAGCCGTTTTTAGGTGTTCCCTTGTTAGTCAAGGGGTTAGGGCACAGTATTAAAGGTGGTGAAACCAATAATGGCTTGATCTATGCAGGTGGAAAAATTAGCACATTTGACAGTAGCTATGTCAAAAAATATAAAGATTTAGGATTTATTATTTTAGGACAAACGAACTTTCCAGAGTATGGATGGCGCAATATAACAGATTCTAAATTATACGGTCCAACGCATAACCCTTGGAATCTTGCTCATAATGCTGGTGGCTCTTCTGGTGGAAGTGCAGCAGTTATTGCTAGCGGGATGACGCCAATTGCTAGCGGTAGTGATGCTGGTGGTTCTATCCGTATTCCATCTTCTTGGACGGGCTTGGTAGGTTTAAAACCAACAAGAGGATTGGTGAGTAATGAAAAGCCAGATTCGTATAGTACAGCAGTTCATTTTCCATTAACTAAGTCATCTAGAGACGCAGAAACATTATTAACTTATCTAAAGAAAAGCGATCAAACGCTAGTATCAGTTAATGATTTAAAATCTTTACCAATTGCTTATACTTTGAAATCACCAATGGGAACAGAAGTTAGTCAAGATGCTAAAAATGCTATTATGGACAACGTCATATTCTTAAGAAAACAAGGATTCAAAGTGACAGAGATAGACTTACCAATTGATGGTAGAGCATTAATGCGTGATTATTCAACCTTGGCTATTGGTATGGGAGGAGCTTTTTCAACAATTGAAAAAGACTTAAAAAAACATGGTTTTACTAAAGAAGACGTTGATCCCATTACTTGGGCAGTTCATGTTATTTATCAAAATTCAGATAAGGCTGAACTTAAGAAATCTATTATGGAAGCCCAAAAACATATGGATGATTATCGTAAGGCAATGGAGAAGCTTCACAAGCAATTTCCTATTTTCTTATCGCCAACGACCGCAAGTTTAGCCCCTCTAAATACAGATCCATATGTAACAGAGGAAGATAAAAGAGCGATTTATAATATGGAAAACTTGAGCCAAGAAGAAAGAATTGCTCTCTTTAATCGCCAGTGGGAGCCTATGTTGCGTAGAACACCTTTTACACAAATTGCTAATATGACAGGACTCCCAGCTATCAGTATCCCGACTTACTTATCTGAGTCTGGTTTACCCATAGGGACGATGTTAATGGCAGGTGCAAACTATGATATGGTATTAATTAAATTTGCAACTTTCTTTGAAAAATATCATGGTTTTAATGTTAAATGGCAAAGAATAATAGATAAAGAAGTGAAACCATCTACTGGCCTAATACAGCCTACTAACTCCCTCTTTAAAGCTCATTCATCATTAGTAAATTTAGAAGAAAATTCACAAGTTACTCAAGTATCTATCTCTAAAAAATGGATGAAATCGTCTGTTAAAAATAAACCATCCGTAATGGCATATCAAAAAGCACTTCCTAAAACAGGTGATACAGAATCAAGTCTATCTCCAGTTTTAGTAGTACCCCTTTTATTAGCTTGTTTTAGCTTTGTAACAAAAAAGAATCAGAAAAGT

SEQ ID NO: 11602 - protein, 679 aa, Streptococcus agalactiae
MKRKYFILNTVTVLTLAAAMNTSSIYANSTETSASVAPTTNTIVQTNDSNPTAKFSSESGQSVIGQVKPANSVALTTVDTPHISAPDALKTTQSSPVVESPSTKLTEETYKQKDGQDLANMVRSGQVTSEELVNMAYDIIAKENPSLNAVITTRRQEAIEAARKLKDTNQPFLGVPLLVKGLGHSIKGGETNNGLIYAGGKISTFDSSYVKKYKDLGFIILGQTNFPEYGWRNITDSKLYGPTHNPWNLAHNAGGSSGGSAAVIASGMTPIASGSDAGGSIRIPSSWTGLVGLKPTRGLVSNEKPDSYSTAVHFPLTKSSRDAETLLTYLKKSDQTLVSVNDLKSLPIAYTLKSPMGTEVSQDAKNAIMDNVIFLRKQGFKVTEIDLPIDGRALMRDYSTLAIGMGGAFSTIEKDLKKHGFTKEDVDPITWAVHVIYQNSDKAELKKSIMEAQKHMDDYRKAMEKLHKQFPIFLSPTTASLAPLNTDPYVTEEDKRAIYNMENLSQEERIALFNRQWEPMLRRTPFTQIANMTGLPAISIPTYLSESGLPIGTMLMAGANYDMVLIKFATFFEKYHGFNVKWQRIIDKEVKPSTGLIQPTNSLFKAHSSLVNLEENSQVTQVSISKKWMKSSVKNKPSVMAYQKALPKTGDTESSLSPVLVVPLLLACFSFVTKKNQKS

SEQ ID NO: 11603 - protein, 720 aa, Streptococcus agalactiae
ATGAGACTTGATAAATTTTTAGTAGAATGCGGGCTTGGTTCACGTACTCAAGTCAAATTAATATTGAAAAAAAAGCAGATTAGTGTTAATGGTAATAGCGAGACATCTCCAAAAGTACAGGTAGATGAATATAGAGATGAGATTAAATATAATGGAACTCTAGTGTCATATGAAAAGTTTGTTTATTATATGCTTCATAAACCCAAAGGTGTTATATCAGCAACGGATGATCCTTCGCATAAAACCGTGTTAGATTTGCTAGACAAAACTGCTCGAGATAAAGCTGTTTTTCCAGTGGGGCGTTTAGATATTGATACAACAGGCCTTTTGTTAATAACTAATAATGGGGAATTAGCGCATAAAATGTTATCACCTAAAAAACACGTTGATAAATGCTATGAGGCAAAAATCTCAGGGATAATGACAGAAGACGATATTTTGGCATTTGATAAAGGGATTATTCTGAAAGATTTTACTTGTTTACCAGCATTATTAGAAATTGTGGAAGTAAATCAGGTGAAGAAGCAGAGTCTTGTTAAAATCACTATTAAGGAAGGAAAATTCCATCAAGTTAAACGTATGGTTGCTGCGTGTGGTAAGGAAGTCTTAGAGCTAAAGCGTCTAAGTATGGGGAATCTACAATTAGATAAACAGCTAGAAAGTGGACAATGGAGACGGCTAACAATAAAAGAAATAGAAAAATTAGAAAAATATATGCAA

SEQ ID NO: 11604 - protein, 240 aa, Streptococcus agalactiae
MRLDKFLVECGLGSRTQVKLILKKKQISVNGNSETSPKVQVDEYRDEIKYNGTLVSYEKFVYYMLHKPKGVISATDDPSHKTVLDLLDKTARDKAVFPVGRLDIDTTGLLLITNNGELAHKMLSPKKHVDKCYEAKISGIMTEDDILAFDKGIILKDFTCLPALLEIVEVNQVKKQSLVKITIKEGKFHQVKRMVAACGKEVLELKRLSMGNLQLDKQLESGQWRRLTIKEIEKLEKYMQ

SEQ ID NO: 11605 - protein, 840 aa, Streptococcus agalactiae
ATGGAAACATATACTCTATCGAATACTCTTAACATTCCTAAAATTGGTTTTGGGACATGGCAACTAACTGAAGGTGAAGAAGCTTATAAAGCAGTGACTCATGCTTTAAAAGTTGGTTATACTCATATTGATACTGCTCAGATTTATGGTAATGAACATAGTGTTGGACGTGCTATAAGAGACAGTGGTTTGGCGCGAGAAAGTATCTTTTTGACAACTAAGATTTGGAATGACAAACATGACTATCATTTAGCCAAAGCTTCTATTGATGAATCTCTACAGAAATTAGGTGTTGATTATATTGATCTTCTTTTGATTCATTGGCCAAATCCAAAAGCTCTTCGTGAAAATGATGCGTGGAAGGCTGGGAATGCAGGCACTTGGAAAGCGATGGAAGAAGCTTATAAAGAAGGAAAGGTAAAAGCTATTGGTGTTTCGAATTTCATGAAACATCACTTAGAGGCTTTATTTGAAACCGCCGAAATAAAACCTATGGTTAATCAAATTATCCTAGCACCAGGTTGTGCTCAAGAAGATTTGGTTCGCTTCTGTAAAGGAAATGATATCTTATTAGAAGCTTACAGTCCATTTGGAACAGGTGCTATTTTTGAAAATGAATCTATAAAAGCTATTGCTGAAAAATATGGTAAATCAGTTGCACAAGTAGCTCTTCGCTGGTCACTTGATAATGGCTTTTTACCATTACCTAAGTCAGCGACTCCCAAAAATATTGAAGCAAACCTTGATATTTTTGATTTTCAATTAAACGAAGATGATATTACTACCTTAATACAACTAGATTCAGGTATTAAACCCAAAGATCCAGATAATGTCTCATTT

SEQ ID NO: 11606 - protein, 280 aa, Streptococcus agalactiae
METYTLSNTLNIPKIGFGTWQLTEGEEAYKAVTHALKVGYTHIDTAQIYGNEHSVGRAIRDSGLARESIFLTTKIWNDKHDYHLAKASIDESLQKLGVDYIDLLLIHWPNPKALRENDAWKAGNAGTWKAMEEAYKEGKVKAIGVSNFMKHHLEALFETAEIKPMVNQIILAPGCAQEDLVRFCKGNDILLEAYSPFGTGAIFENESIKAIAEKYGKSVAQVALRWSLDNGFLPLPKSATPKNIEANLDIFDFQLNEDDITTLIQLDSGIKPKDPDNVSF

SEQ ID NO: 11607 - protein, 672 aa, Streptococcus agalactiae
ATGACAAAAGAAGATATCAAAAAACAAGTTCGAAGAGCTTTTGATTTTCGTATGGCGATTCGTGTTTATAATAATAATGATATTCCTAAAGAAGATATGGAGTATATTTTAGACACTGCTTGGTTGAGTCCTTCTTCAGTCGGTTTAGAAGGCTGGCGATTTTTAGTACTAGATAGACAAACAATTGCAAAATTTCGAGATAAACTTAAGGAAGTTGCTTGGGGAGCACAATATCAACTAGATACTGCTAGTCACTTTGTTTTACTACTAGCTGAAAAAGGTGCTTATTATAACGCTGATAGCATGATTAACAGTCTCATTCGACGTGGTCTAGGTGATCCAGCCGCCCTTGAGAGTAGGATACCTCTCTACAAATCCTTCCAAGAAAACGATATGAAAATTGATTCTGAACGTTCTCTTTGGGATTGGACAGCAAAACAAACTTATATCGCACTTGGTAATATGATGACGGCTGCTGCTATGATCGGCGTAGATTCATGCCCAATTGAAGGATTTGACTATGAAAAGGTCAATAATATTCTTAGTAAAGAAGGGTTAATAGACGATAAGAAAGAAGCTATTTCTTGTATGGTTTCATTTGGTTATCGTTTGCGTGAACCTAAACATTCCCGTGCTAGGAAAGAACGTCAAGAGGTCGTTACTTGGGTTGAG

SEQ ID NO: 11608 - protein, 224 aa, Streptococcus agalactiae
MTKEDIKKQVRRAFDFRMAIRVYNNNDIPKEDMEYILDTAWLSPSSVGLEGWRFLVLDRQTIAKFRDKLKEVAWGAQYQLDTASHFVLLLAEKGAYYNADSMINSLIRRGLGDPAALESRIPLYKSFQENDMKIDSERSLWDWTAKQTYIALGNMMTAAAMIGVDSCPIEGFDYEKVNNILSKEGLIDDKKEAISCMVSFGYRLREPKHSRARKERQEVVTWVE

SEQ ID NO: 11609 - protein, 390 aa, Streptococcus agalactiae
ATGCCATTTTTACATACTTGTATTCGCGTTAAAGATTTGGACGCCTCAATTGCTTTTTATCAAGAAGCACTTGGTTTTAAGGAAGTTCGTCGTAATGACTTTCCTGAAAATCAATTTACTTTAGTCTATATGGCCCTAGAGGACGACCCTAGTTACGAATTAGAGTTAACCTATAACTATGATCACGAAGCTTATGATTTAGGAAATGGGTATGGTCACATTGCTGTTGGTGTAGACGATTTGGAAACTACTTATGATGCCCATCAGAAAGCAGGTTACTCTGTAACAAAAATTTCTGGATTACCAGGTAAACCTAATATGTTCTACTTTATTCAAGATCCAGATGGCTATAAAATTGAAGTTATTCGACTCAGTCAATTTAAAGCTGAC

SEQ ID NO: 11610 - protein, 130 aa, Streptococcus agalactiae; identical to SEQ ID NO: 2744

SEQ ID NO: 11611 - protein, 924 aa, Streptococcus agalactiae
ATGGCTTTATTATCAGTTATTGTCCCTTGTTATAATGAACAAGAGACTGTCTCAACTTTTTTAACAGAAATCAAAAAAGTTGAATCCGAAATGGCTCGTTACACCCATTTTGAATACATTTTCGTAAACGATGGTTCTACCGATCGTACACTCGAACTTCTTAAGAAAGCAGCTAAACAATTTGACAATGTTCATTACCTTTCATTTTCACGCCATTTTGGTAAAGATGCTGCTTTATTGGCTGGTTTAGAACATACTACTGGTGATTTTATCACTGTTATGGATGTTGACTTGCAAGATCCACCCACTTTATTACCAGAAATGTACCTAAAACTTCAAGAAGGTTATGATATTGTCGCTACAAGGCGAAAAGATCGTAAAGGGGAGCCGTTGATACGCTCTCTTTTTGCCAAGCTTTTTTATAAATTAATCAATCAAGTGTCAGATACTAAAATGGTTGATGGTGCGCGTGATTTTCGTCTCATGACAAAACAAGTTGTTGACAGTATTCTCGAGCTAAATGAAGTGAATCGCTTCTCAAAAGGGATTTTTTCCTGGATTGGATATGATGTCGCTTATATTAGTTATGAGAATCGAGAACGAATTGCGGGTAAGACCTCATGGAGTTTCTTTAATCTCTTAAAATACTCTCTAGACGGTTTCATCAACTTCTCAGAAATTCCATTAGCTATAGCTACCTGGATTGGAACCCTTAGTTCAGTACTATCACTTTTAGCTATCATTTTTATTATTATTCGAAAATTACTATTTGGGGATCCCGTTTCAGGTTGGGCAAGCACAGTTACCATTGTGCTTTTTATGGGTGGTATTCAGTTATTGTCGCTAGGAATTATAGGCAAATACATCTCTAAGATTTTCCTAGAAACTAAAAAACGCCCAGTCTATATTGTCAAGGAAGAGGGA

SEQ ID NO: 11612 - protein, 308 aa, Streptococcus agalactiae; identical to SEQ ID NO: 2746

SEQ ID NO: 11613 - protein, 1386 aa, Streptococcus agalactiae
ATGTCAAAAAATAATAATGACCACACTCAAAAATCTGAGAATGGTATGGTACGCGGCCTAGAAAATCGTCACGTACAGTTAATTGCGATTGCAGGGACAATCGGAACTGGGCTTTTTCTTGGTGCAGGTCGTTCAATTAGCCTGACGGGTCCTTCAATAGTTCTTGTCTATGCTATCACTGGCGCTTTCATGTTCTTCATGATGCGTGCTATTGGAGAGATGCTTTATCAAGATCCAAATCAGCATACTTTTATTAATTTCATTACCAAATATTTAGGACCCGGTTGGGGATTTTTCTCAACACTTTCTTATTGGATTTCCCTAATATTTATCGGTATGGCAGAGATTACAGCCGTAGGAGAGTATGTTCAATTTTGGTTCCCTGAATGGCCATCCTGGATTATCCAAATTGTTTTTTTAGCTATCCTAAGTTCTATCAACTTAATTGCTGTAAAAGCATTCGGAGAAACCGAGTTTTGGTTTGCTATGATAAAAGTTATTGCAATTCTTGGTTTAATAGCAACCGGTATCTTTATGGTATTAACAAACTTTGACACCGGTCACGGATACCATGCTTCAATCTCAAATATCACCAATCATTTTGAATGGTTCCCTAAAGGTAAATTGAATTTCTTCATGGCTTTCCAAATGGTATTCTTTGCTTATTTAGCTATTGAATTTGTCGGAGTAACAACTTCTGAAACAGCTAATCCACGTAAAGTTTTACCAAAAGCAATCCAAGAAATTCCGATGCGTATTATTTTATTCTACGCAGGTTCATTATTAGCAATTATGGCCATCTTCCCATGGCAACAGTTACCAGTTAATGAGTCACCTTTCGTTACAGTATTCAAACTAGCTGGGATTAAGTGGGCTGCCGCTTTGATTAACTTTGTTGTCCTAACGTCTGCAGCATCTGCTCTTAATTCTACTTTATACTCAACAGGGCGTCATTTATTCCAATTGGCTAATGAATCACCAAATGCTCTTACAAAAGCGTTAAAATTAGACCAATTATCTCGTCAAAGCGTTCCAAGTCGAGCTATTATTGCATCAGCTGTAATCGTTGGAGCTTCAGCACTTATCAGTGTTTTACCTGGTATTTCAGATGCCTTCTCCTTAATTACTGCATCATCTTCTGGTGTTTACATTTCTATCTATGTTCTTATTATGATTGCACATTGGAAATATCGTAAATCACCTGATTTTATGGAAGATGGTTATAAAATGCCTGCCTACAAAATCCTTTCACCAATCACACTTCTCTTCTTCCTCTTTGTATTCGTTTCTCTCTTCTTGCAAGATTCAACATACATCGGGGCTATTGGAGCAACCATCTGGATTATTGGATTTGGTTTATATAGTCACTTCAAACATAAATCACAT

SEQ ID NO: 11614 - protein, 462 aa, Streptococcus agalactiae
MSKNNNDHTQKSENGMVRGLENRHVQLIAIAGTIGTGLFLGAGRSISLTGPSIVLVYAITGAFMFFMMRAIGEMLYQDPNQHTFINFITKYLGPGWGFFSTLSYWISLIFIGMAEITAVGEYVQFWFPEWPSWIIQIVFLAILSSINLIAVKAFGETEFWFAMIKVIAILGLIATGIFMVLTNFDTGHGYHASISNITNHFEWFPKGKLNFFMAFQMVFFAYLAIEFVGVTTSETANPRKVLPKAIQEIPMRIILFYAGSLLAIMAIFPWQQLPVNESPFVTVFKLAGIKWAAALINFVVLTSAASALNSTLYSTGRHLFQLANESPNALTKALKLDQLSRQSVPSRAIIASAVIVGASALISVLPGISDAFSLITASSSGVYISIYVLIMIAHWKYRKSPDFMEDGYKMPAYKILSPITLLFFLFVFVSLFLQDSTYIGAIGATIWIIGFGLYSHFKHKSH

SEQ ID NO: 11615 - protein, 465 aa, Streptococcus agalactiae
ATGGTTAAAGGTCAAGGAAACGTTGTAGCACAAAATAAAAAAGCGCATCACGACTATACTATCGTTGAAACAATAGAAGCAGGAATTGTTTTGACAGGAACAGAAATCAAAAGTGTCCGCGCAGCGCGTATTACATTGAAAGATGGATATGCACAAATAAAAAATGGTGAAGCGTGGTTGATTAATGTTCATATTACACCATATGATCAAGGTAACATATGGAATCAAGATCCTGATCGTACACGAAAGTTATTACTAAAAAAACGTGAGATTGAAAAAATATCAAATGAACTGAAAGGGACTGGTATGACTCTGGTACCTCTAAAAGTTTACTTAAAAGATGGTTTTGCTAAAGTTCTATTGGGTTTGGCAAAAGGAAAACATGATTATGATAAGCGAGAGTCTATCAAACGTCGTGAGCAAAACCGTGATATTGCCCGTCAGTTAAAAAACTATAATTCACGA

SEQ ID NO: 11616 - protein, 155 aa, Streptococcus agalactiae; identical to SEQ ID NO: 2750

SEQ ID NO: 11617 - protein, 2403 aa, Streptococcus agalactiae
ATGAAAGAAAAAATTATAAAATATTTGGAAGAACACGGTAAAACTAGCGTTAATGACTTAGCTGCTGCCCTAGATATGGCAGGCGCAAAAGCATTTCCAAAATTAATCAAAACAATCTCAAATTTGGAGAGCCACAGGCAATTAAGATTTGACGATAATGGAAGTCTTTCTCTTCGAAAGAAAGAAGCTAAGAAAAAGGAAATCACAGTAAGAGGTCTTTTTAGAGCAAATAAAGCAGGATTTGGTTTTCTTAGTATTGACCAAGACGAAGATGATATGTTTATCGGAAAAAACGATATTGCTTATGCTATTGATGGTGACACGGTAGAAGCTGTTGTAAAGAAACCAGCGGACCGTCTTAACGGGACTGCAGCAGAAGCGCGTGTTGTTAATATTGTTGAACGTAGTTTAAAGACGCTTGTTGGTAAGTTTGTCTTAGACGATGAGCGCCCTAAATACGCAGGATATATCAAATCGAAAAATCAAAAAATCAATCAAAAGATTTATATACGCAAAGAACCGGTCGTTTTAGACGGAACAGAAATTATCAAAGTAGATATTGATAAATATCCGACACGAGGACATGATTACTTCGTAGCAAGTGTTCGTGATATCGTTGGACATCAAGGAGATGTTGGTATTGATGTTTTAGAAGTCTTGGAAAGTATGGATATCGTCTCAGAATTTCCTGAGGACGTTATTGCAGAAGCCAATGCTATCCCAGATGCTCCAACGGAGAAAGATTTAATTGGGCGTGTTGATTTACGTCAAGAGGTCACTTTCACTATTGATGGAGCGGACGCCAAAGATTTAGACGATGCTGTGCATATTAAATTACTGGATAATGGTCATTTTGAACTTGGAGTTCATATCGCAGATGTATCATACTACGTTACTGAAGGCTCTGCCTTAAATCGTGAAGCACTTAGTCGTGGTACGTCCGTATATGTCACAGATCGCGTTGTACCAATGTTACCAGAGCGTCTATCTAACGGTATATGTTCATTAAATCCAAATCTTGATCGTTTAACGCAGTCTTGTATTATGGAAATTGACCAAAATGGGAGAGTTGTTAATCATCAAATTACACAGTCAGTGATTAATACCACTTATCGTATGACTTATACCGCTGTAAATGATATTATTGCTGGCGATGAGGAAATCTGCTCAGAATATGAGTCTATTGTGCCCTCAGTACAGCATATGGTTACTTTACACCATATTTTGGAAACTATGCGTACGCGTCGTGGAGCGCTGAATTTTGATACATCTGAAGCAAAAATTATGGTTAATGATAAGGGAATGCCAGTTGATATTGTTATTCGCAACAGAGGCATTGCTGAACGCATGATTGAGTCATTTATGTTGGCGGCAAATGAAACGGTTGCTGAACATTATGCTCGTCTAAAATTGCCATTTATTTATCGTATACACGAAGAGCCTAAAGCTGAAAAATTACAAAAATTCATCGATTATGCTTCTATTTTCGGTGTTCACATTCAAGGAACAGCAACTAAAATCACCCAACCTGCTTTACAGGACTTTATGAAAAAAGTACAAGGGCAGCCAGGAAGTGAAGTGTTATCTATGATGTTATTGCGCTCGATGCAACAAGCTAGATATTCTGAACACAACCATGGACATTATGGACTTGCTGCGGAATATTACACTCACTTTACTAGCCCCATTCGACGTTATCCAGACTTGTTAGTTCATCGTATGATTCGTGATTATGGTGATAAAGCGATGGATAAAGCTGATCATTTTGCTAACCTTATCCCAGAAATTGCAACTCAAACGTCTAGTCTTGAGAGACGTGCCATTGATGCTGAACGTATTGTAGAGGCAATGAAGAAAGCCGAATACATGGAAGAATATATTGGTGAGGAATTTGAAGGTGTGGTTGCAAGCGTTGTTAAATTTGGTATGTTTGTAGAATTACCAAATACTATTGAAGGATTGGTTCACGTAACGACCTTGCCTGAATATTATCACTTTAATGAACGTACGCTGACGCTTCAAGGTGAGAAATCTGGGAAAGTTTTCCGTGTTGGTCAACAAATTAAGGTTAAGTTGATTCGTTCTGATAAGGAAACTGGTGATATCGATTTTGATTATTTACCATCAGATTTTGATATTGTTGAAAAGGTAAGTAAAAGTTCGCGTGAGGGTCGTCCTAATCGAAGTTCTAAACGAGAACATCAGCATAGAATTTCTGATCGTGATAATAAGAACAAAAATACATCTAAGAAAAAAGCATCTCGAAAACCCCAAAGGAACTCGGATAGCAAATCACATCATCACAAAGACGATAGAACAACAGGTTCAACCAAGAAAAAAACGAAAAAACCTTTCTATAAAGGCGTTGCTAAGAAAGGTCAGAAACGGAAATCTAAGAAAGGT

SEQ ID NO: 11618 - protein, 801 aa, Streptococcus agalactiae
MKEKIIKYLEEHGKTSVNDLAAALDMAGAKAFPKLIKTISNLESHRQLRFDDNGSLSLRKKEAKKKEITVRGLFRANKAGFGFLSIDQDEDDMFIGKNDIAYAIDGDTVEAVVKKPADRLNGTAAEARVVNIVERSLKTLVGKFVLDDERPKYAGYIKSKNQKINQKIYIRKEPVVLDGTEIIKVDIDKYPTRGHDYFVASVRDIVGHQGDVGIDVLEVLESMDIVSEFPEDVIAEANAIPDAPTEKDLIGRVDLRQEVTFTIDGADAKDLDDAVHIKLLDNGHFELGVHIADVSYYVTEGSALNREALSRGTSVYVTDRVVPMLPERLSNGICSLNPNLDRLTQSCIMEIDQNGRVVNHQITQSVINTTYRMTYTAVNDIIAGDEEICSEYESIVPSVQHMVTLHHILETMRTRRGALNFDTSEAKIMVNDKGMPVDIVIRNRGIAERMIESFMLAANETVAEHYARLKLPFIYRIHEEPKAEKLQKFIDYASIFGVHIQGTATKITQPALQDFMKKVQGQPGSEVLSMMLLRSMQQARYSEHNHGHYGLAAEYYTHFTSPIRRYPDLLVHRMIRDYGDKAMDKADHFANLIPEIATQTSSLERRAIDAERIVEAMKKAEYMEEYIGEEFEGVVASVVKFGMFVELPNTIEGLVHVTTLPEYYHFNERTLTLQGEKSGKVFRVGQQIKVKLIRSDKETGDIDFDYLPSDFDIVEKVSKSSREGRPNRSSKREHQHRISDRDNKNKNTSKKKASRKPQRNSDSKSHHHKDDRTTGSTKKKTKKPFYKGVAKKGQKRKSKKG

SEQ ID NO: 11619 - protein, 291 aa, Streptococcus agalactiae
TTGAATCTTAATAAGTTTTATGTTAGAATGTACTTTGACCATAGTGGAGGAATTAACATGTATAACCTATTACTCACCATTCTACTTGTTTTATCAGTATTATTGATTATCTCAATTTTCATGCAACCACAAAAGAATCCAAGTAGTAATGTTTTTGATAGTAGCGGTTCTGAAGCCCTTTTTGAACGTAGTAAAGCTCGAGGATTTGAAGCTTTTATGCAACGTTTTACAGGTGTTTTAGTCTTTTTCTGGCTACTAATCGGCTTAGTATTATCTATTTTATCAAGTCAT

SEQ ID NO: 11620 - protein, 97 aa, Streptococcus agalactiae; identical to SEQ ID NO: 2754

SEQ ID NO: 11621 - protein, 1167 aa, Streptococcus agalactiae
GTGGCTTGGCTCGGTAATTTTTTTACTGGGGCAAGCTTTTCACTTGTTATGCCTTTTATGGTATTATATGTAGAACAATTAGGAGCACCTAGCAACAAAGTAGAGTGGTATGCAGGCTTATCAGTATCCTTATCAGCCTTGTCTTCAGCTTTAGTTGCCCCATTATGGGGGCGCTTAGCTGATAAATATGGTAGAAAACCGATGATGGTAAGAGCAGGGTTGATGATGACTTTTACTATGGGAGGCCTTGCTTTCATTCATAGTGTTACAGGACTTCTGATTTTACGTATATTAAACGGCATTTTTGCAGGCTATGTACCTAACTCTACAGCTTTGATAGCAAGTCAAGCTCCTCAAGAGGAATCAGGATATGCCTTAGGAACCTTAGCGACAGGAGTGACTGGAGGTATGTTAATTGGTCCACTTTTAGGGGGACTTTTAGCAGAGTGGTTTGGTATTAGGGAAGTTTTTTTATTAGTGGGAACCATATTGTTAATATCTACTTTAATGACCATTTTTATGGTAAAGGAAGATTTCAAACCCATTTCTAACGAAGAAACCATGCCAACTACAGAAGTGTTCAAAAGCGTTAAAAGCTTACAAATTTTAATAGGGCTGTTTGTAACAAGCATGATTATTCAAATTTCTGCACAATCCATTGCACCTATTTTAACACTTTACATTCGTCATTTAGGACAGACTGAAAACTTGATGTTTGTTTCCGGATTAATTGTTTCTGGTATGGGATTCTCTAGTATTCTGAGTAGTCCAAAGCTAGGAAGAATCGGGGATCGCATAGGCAATCATCGTTTGCTATTATTAGCTCTACTGTATAGTTTCCTCATGTATGTCTTATGTTCATTGGCACAGACTTCATTACAGTTAGGGGTTATTAGATTCCTGTATGGTTTTGGAACAGGTGCCTTGATGCCGAGTATTAATTCAATCTTGACTAAAATTGCTCCAAGACAAGGTTTATCAAGGATTTTCAGTTATAACCAAATGTTTAGCAATTTAGGACAAGTATTAGGTCCTTTTGTCGGTTCAGCAGTTTCTATTCATTTAGGATTCCGATGGGTTTTCTTTGTGACTAGCTTCATCGTTTTAGCTAATTTTGTTTGGTGTTTTATTAATTTTAGAAAATATATTAGAGTTAAGGAAATTGTG

SEQ ID NO: 11622 - protein, 389 aa, Streptococcus agalactiae; identical to SEQ ID NO: 2756

SEQ ID NO: 11623 - protein, 1079 aa, Streptococcus agalactiae
GTGCTCTGTTTGCCTTTATATGGTAGAGGTAAAGACCAAGAGAATCCAGAGTCTTTACTAAATATTTTATTTTACTTAGGGATGGTATAGGAGTCTTCCTTTCTCTCTTTTTCCTTCTTCTTGGCAAACAGTTCTCTCCATATCCATTTTTTTCATGGTACACCGGTATTGCAGGACTTATCATATGGTTAGTTAGTTACTATCGATTAAAGACTTATTCTAAACTTAATCACTTGACCTACCTTACCCTAACGCATGAGACGATGAAGGAGAAAATTGCAAAGATTGATAATATAGAGCTGCTTGGGATTGAAATGAAAGATAGGGATATAAATGTCAGTGAACTTTCTCCCCTGCTATTTGAAAATTTATCAGGTATTTCATATTTAAACGCTATCTTTTTAAAACGGATGAGTAGATACTTGCAAAGAAAAATTTTGGTACGTTTAGCTATTTTAAGTGTTCTGTTTGGAATAGAACTCCTTTTCCTGCTATTTTTTAAAGAAAAGATAAATATTCCGATGAATGAGCATAGTTTTTCAAAATTCCTATTTTTGAGTGCAGTTCCAGGATATCTAATATATATCGGTGAATCCTATTCAAAATTTTGTTTCTATCATTTGGATCGTCCATTATTAAGATATAATTTCTATCATGAAAGAGAAAATATCTTAGCAACCTTAAAAATACGTTTCCTTTATAGTATAAAACTTAATTTCCCCATTTTTGTAGCTCTAAACATATGTTTTGGAACCTATTATTTTAATTTTTTCACCCCTAAGATTGATCAGATTATCATATTAGTAATTACACAAGCTATATCAATGATTTTATTTAGTTTTTACTTTTTGTATCTTTATTTCTTATTACAGCCTTTTACAGAAGGATTAAAATCAAAGAGTGCTATGTATAATATTTTAACCTTTATTATATACTATATGGGATATCAACTATTTACCTTTACTAAATCTATAACGATGCCAATATTATTAGTAAGCCTAGGAATTATAGTTGTTATTTTAATTATTGGCTATTTAGCAGTTGTAGTATTTGCTCCAAAAACTTTCCGTTTAAAAAGT

SEQ ID NO: 11624 - protein, 360 aa, Streptococcus agalactiae
  VARIANT 28: Xaa = Any Amino Acid
MLCLPLYGRGKDQENPESLLNILFYLGXGIGVFLSLFFLLLGKQFSPYPFFSWYTGIAGLIIWLVSYYRLKTYSKLNHLTYLTLTHETMKEKIAKIDNIELLGIEMKDRDINVSELSPLLFENLSGISYLNAIFLKRMSRYLQRKILVRLAILSVLFGIELLFLLFFKEKINIPMNEHSFSKFLFLSAVPGYLIYIGESYSKFCFYHLDRPLLRYNFYHERENILATLKIRFLYSIKLNFPIFVALNICFGTYYFNFFTPKIDQIIILVITQAISMILFSFYFLYLYFLLQPFTEGLKSKSAMYNILTFIIYYMGYQLFTFTKSITMPILLVSLGIIVVILIIGYLAVVVFAPKTFRLKS

SEQ ID NO: 11625 - protein, 594 aa, Streptococcus agalactiae
ATGACAAGTAAAGCATTAATATGGTCTATATTACAGATTGATAGTGCTAGAGCTTATAATAGTTTTTTATATTACCTTCAGAAAATCCCCTGGTTGGGAAGAAAAATCCCTAACCGATGGTTTAAAACCGATGATATAAAAGGTGTAGTACTATTTATTCGTATCATTTTCTTTTTCTTAAGAGGTTTTGGTCGTTCCATAGGTTACGTACTATATTGTTATGTTTTATCATTTTTTGTTAGAAGTGGCATGAAGCAGTTAAATATTTTGCCGCAAGAAGGTTTTACCCTAACTTTAACATTGATGGTGATTACCTCTCTTTTAATTGTCATAAATTTCTATATAAAACTTATAGAACCTAATGATATGCAACAAACTCATATGATTCGCCTTTTCAGAATTGAGCCATCGAGGTATTTCCAATCCGCTGAACTTTTAGAAGCCAGTAGTGAACTATTTTTTAGAAGTTTGAGCTTTGGCATATTTTTCCATTTAAATCACTTTGCTTTTTGGCATGGTTTGACTTTTGCTTTATTTTTAGCAGGTAGTCGCCTTGGAAATCAGGTGCTCTGTTTGCCTTTATATGGTAGAGGG

SEQ ID NO: 11626 - protein, 198 aa, Streptococcus agalactiae
MTSKALIWSILQIDSARAYNSFLYYLQKIPWLGRKIPNRWFKTDDIKGVVLFIRIIFFFLRGFGRSIGYVLYCYVLSFFVRSGMKQLNILPQEGFTLTLTLMVITSLLIVINFYIKLIEPNDMQQTHMIRLFRIEPSRYFQSAELLEASSELFFRSLSFGIFFHLNHFAFWHGLTFALFLAGSRLGNQVLCLPLYGRG

SEQ ID NO: 11627 - protein, 699 aa, Streptococcus agalactiae
ATGGAGTTAGTAATTAGAGATATTCATAAGCGGTTTCAGGAAACAGAGGTCTTGAGAGGAGCAAGTTACCGATTTTATTCAGGTAAAATAACAGGGGTCTTAGGTAGGAATGGTGCTGGGAAAACAACTTTATTTAATATACTTTATGGGGATCTTGCAGCTGACAACGGGACCATTTGTTTATTGAAGGATAATCACGAGTATCCTCTTACCGATAAGGATATTGGTATTGTTTATTCCGAAAACTACCTTCCAGAATTTTTAACAGGGTATGAATTTGTAAAATTTTACATGGATTTACATCCTTCAGATGATTTAATGACAATAGATGATTATTTAGATTTTATGGAAATAGGACAAACAGAGCGTCATAGAATTATCAAAGGATATTCTGATGGAATGAAGAGTAAGCTCTCATTAATTTGCCTGATGATTTCTAAGCCAAAAGTAATTTTACTAGATGAGCCACTGACTGCAGTTGATGTTGTATCAAGTATTGCAATAAAACGCCTTTTGTTGGAATTAAGTGAGGATCATATTATTATATTATCAACTCATATAATGGCCTTAGCAGAAGATCTATGTGATATTGTGGCTGTATTAGACAAAGGAAAACTCCAGACATTAGACATTGATCGTAAACATGAACAATTCGAAGAGCGTCTTCTTCAAGTGTTGAAGGGAGATGAATATGACAAG

SEQ ID NO: 11628 - protein, 233 aa, Streptococcus agalactiae
MELVIRDIHKRFQETEVLRGASYRFYSGKITGVLGRNGAGKTTLFNILYGDLAADNGTICLLKDNHEYPLTDKDIGIVYSENYLPEFLTGYEFVKFYMDLHPSDDLMTIDDYLDFMEIGQTERHRIIKGYSDGMKSKLSLICLMISKPKVILLDEPLTAVDVVSSIAIKRLLLELSEDHIIILSTHIMALAEDLCDIVAVLDKGKLQTLDIDRKHEQFEERLLQVLKGDEYDK

SEQ ID NO: 11629 - protein, 589 aa, Streptococcus agalactiae
ATGCTTATGACAAAAATAATAGGACTGACAGGAGGGATAGCTTCTGGAAAGTCAACGGTAACAAAAATAATACGAGAATCAGGTTTTAAAGTCATAGATGCGGATCAAGTGGTTCATAAATTGCAAGCTAAGGGTGGGAAACTTTACCAAGCTTTATTAGAATGGTTGGGTCCCGAGATACTTGATGCTGATGGTGAGTTGGATAGACCAAAGCTTTCTCAAATGATTTTTGCTAATCCAGACAATATGAAGACATCAGCTAGGCTACAAAATAGTATCATTCGTCAAGAGTTAGCATGTCAGCGCGACCAATTAAAACAAACAGAAGAGATATTTTTCATGGATATTCCTTTATTGATTGAAGAAAAGTATATAAAATGGTTTGATGAGTTTGGTTGGTATTGTTGATAAAGAAAAACAATTACAACGATTAATGGCCCGTAACAACTACAGTCGAGAAGAAGCGGAATTACGACTTTCACACCAAATACCTTTAACAGATAAAAAAAGTTTCGCTAGTCTTATTATTGATAATAATGGTGATTTAATAACTTTAAAAGAGCAAATGTTGGATGCTCTTCAACGTTTA

SEQ ID NO: 11630 - protein, 197 aa, Streptococcus agalactiae
MLMTKIIGLTGGIASGKSTVTKIIRESGFKVIDADQVVHKLQAKGGKLYQALLEWLGPEILDADGELDRPKLSQMIFANPDNMKTSARLQNSIIRQELACQRDQLKQTEEIFFMDIPLLIEEKYIKWFDEIWLVFVDKEKQLQRLMARNNYSREEAELRLSHQIPLTDKKSFASLIIDNNGDLITLKEQMLDALQRL

SEQ ID NO: 11631 - protein, 819 aa, Streptococcus agalactiae
ATGCCAGAATTACCAGAAGTAGAAACCGTTAGAAAAGGACTAGAAAGACTTGTAGTTAATCAAGAAATAGCTTCTATAACGATTAAAGTCCCTAAAATGGTGAAAACTGATTTGAATGACTTTATGATAAGTCTACCAGGAAAAACAATTCAACAGGTATTGAGACGAGGGAAGTATCTTCTTTTTGATTTTGGTGAAATGGTTATGGTATCACATTTACGCATGGAAGGAAAATATCTACTCTTCCCAAATAAAGTACCAGATAACAAACATTTTCACCTTTATTTCAAATTGACTAATGGCAGCACATTGGTTTACCAAGATGTCCGTAAATTTGGGACATTTGAGTTGGTTCGTAAATCATCTCTCAAAGATTATTTTACTCAAAAAAAATTAGGTCCTGAGCCAACTGCTGACACATTTCAATTTGAGCCTTTTTCAAAAGGCTTAGCAAACTCCAAAAAGCCAATAAAACCTTTACTATTAGATCAGAGATTAGTAGCAGGACTTGGAAATATTTACGTAGATGAAGTCTTGTGGGCAGCAAAAATTCACCCACAGCGTTTGGCTAATCAATTGACCGAATCTGAAACAAGCTTATTACACAAGGAAATTATTCGCATTTTAACTTTAGGCATCGAAAAAGGTGGCTCCACGATTAGAACATATAAGAATGCTCTTGGAGAGGACGGTACGATGCAAAAGTATTTACAGGTCTATGGTAAAACTGGGCAACCGTGTCCAAGGTGTGGTTGTTTAATTAAGAAGATAAAAGTAGGAGGGAGAGGGACGCATTATTGCCCTCGGTGTCAATGCTTA

SEQ ID NO: 11632 - protein, 273 aa, Streptococcus agalactiae; identical to SEQ ID NO: 7376

SEQ ID NO: 11633 - protein, 846 aa, Streptococcus agalactiae
ATGGAAAAAGAATTAGGAAAAACACTAAGAAGATTACGTAAAGGAAAAAAAGTTAGTATTTCTTCTTTAGCAGATGAGCACCTATCCAAGTCACAAATCTCAAGGTTTGAGAGAGGAGAGTCAGAAATTACTTGTAGTCGTTTGCTTAATATTTTAGATAAACTCAACATCACTATTGATGAATTTGTGTCGATTCATTCTAAGGCGCACACTCATTTTTTTATCCTTTTAAATCGAGTAAGAAAATATTGTGCTGAAAAAAATGTAACTAAATTAGTGGCTCTCTTAGAGGATCATAACCATAAAGACTATGAAAAGATTATGATTAAGGCTCTTATTTTTTCAATTGATCAATCAATAGAGCCTAATCAAGAAGAATTAGCACGCTTAACAGACTATCTTTTTACGGTGGAGCAGTGGGGATATTATGAAATTATTCTCTTAGGAAATTGCTCACGTCTCATTAATTACAATACTTTATTTTTATTGACCAAAGAAATGGTTAATTCGTTTGCTTACTCAGAACAAAATAAAACCAATAAAATTCTAGTTACACAATTAGCAATTAATTGTCTAATCATCAGCATTGATCACTCTTGCTTTGAGCATAGCCACTACTTAATTGATAAGGTTAGGTCATTGTTACAGGATGAAGTTAATTTCTATGAAAAAACTGTTTTTTTATATGTAACTGGATACTATCATTTAAAACTTGGTGATACTTCTTCAGGAAAAGAAGATATGAGGAAAGCTTTACAGATTTTTAAATATTTAGGTGAAGATTCATTTTACAATACTTATAATGAACATTATTGTCAAAAAGTACTTGGCAATAATAAAGAATGC

SEQ ID NO: 11634 - protein, 282 aa, Streptococcus agalactiae
MEKELGKTLRRLRKGKKVSISSLADEHLSKSQISRFERGESEITCSRLLNILDKLNITIDEFVSIHSKAHTHFFILLNRVRKYCAEKNVTKLVALLEDHNHKDYEKIMIKALIFSIDQSIEPNQEELARLTDYLFTVEQWGYYEIILLGNCSRLINYNTLFLLTKEMVNSFAYSEQNKTNKILVTQLAINCLIISIDHSCFEHSHYLIDKVRSLLQDEVNFYEKTVFLYVTGYYHLKLGDTSSGKEDMRKALQIFKYLGEDSFYNTYNEHYCQKVLGNNKEC

SEQ ID NO: 11635 - protein, 1590 aa, Streptococcus agalactiae
ATGAAGATTAAAAAAATTATTAGTGGCCTTGCCGCAGCTTTAATTATCAGTTCACTATCAACTATTAACTATGAGGTTAAAGCTGATGACACCACCAGTGAGTATCACTATATCAGTAAGCAAAATAATGAAGAGCAGCTTATTAGTTACATCAAGGAACAACATCGTTTGCTCAATCAATTTGTTGTTGATAATGTCAACTCATTCACTCAACTAAATGCTAATCCAACCATTGAACAGTTAAATAGAGCTATAACATTATTTAAACAAAAAGATGAGCAATTATTTAACCAGGTGAAAGCTAGTCATCTCTCTCCCAGTAACTATAATGCTATCGTTAATCAACGTAATGTCATTAACCAAACTGTTCAAAATCTGATTGACCAAAATCATAATAAGCTTCAGACAAGTCAAAATAAAGCAGCTCAGCTCGTGGGGCAACGTAATCAGGTTGTTAACAAAATTCAAGCTATTTTAGCAACTGTAAACTACAACTCTGTGAATTCTATACAAGAAGCTGAAAATTTATTTCATTCACTCAGAAATCAAATTGAACCTCTTGTAGCTGAAGTTAATAATTACAAAGCTGCTATGGCAACCCTTCAACAAGAAGTAGATGCCCTATCAACAGCGGCTATTGAAACTGAGACTTCTAAACTTGCTACTCTCAAAGTTAGCGAAAATACTTCTGTTCCTGCAAACAAAGTAGAAGAAAAAACTACTCAATCAGAAGCGTCAGGTAATAAACAAGAAGTAACTAAGAGTGAGGAAAAACAGGCTACCTCTGATGCAAAGGCATCACAGCCTGAGTCAGCTAATATTGCCGATTACGATAGTTTAAAAGAAGTTTTACGAAATAATATTAGTAACCAAGTACCACACATCAGTGTTCAAATGGAGTTTAAAACTCAAGAACAAGTTGACGAATACCAAAAAAATCTTGGAAGCATCATCCGGGAAATTGGAGATACACTTGGAACAGCAACTGAATTCAATGCCAAAAGTAACATTAGCACTTATACTCTTGGTGGACAAATCCAACGCATTATTGTAAAAAGCGATATCACAATCACCTATACTCTTAAAGGTGACATGGTAGGATTACATAAAGAATATAAACAGTTTGTAGATTCTTTTGTCAAAGAAAATATTACTAACAAAAATATCACAAGTGATTATGAAAAAGCTAAAGTAATTCATGACCACTTGGTTAATAATTACACTTACGCGACTGAAGAACTGGCAACCACTCGTGAAACTGCTAGTGGTATCAGTATCCATGCTCCTGAAGCACTCTACAAAGATAAACGTGGTGTTTGTCAAGCCTTTGCAGTAATGTTTAAAGATATGGCTGCTGCTGCTGGCTTATCAGTATGGTATGTAACTGGTCAAGCTGGAGGTGGAAATCACGCTTGGAACATTGTTACTATTAATGGCGTTAAATATTATGTTGATACAACATGGGATAATAATATAAAAAGCAATAAATATTTCCTTGTTGGTAAAACAATAATGGATGCTGATCATCTTTTGGATAGTCAATACAATGCATTAGCTAAAGATATTCCAGCTGATCGCCATCAAGGTGCA

SEQ ID NO: 11636 - protein, 530 aa, Streptococcus agalactiae
MKIKKIISGLAAALIISSLSTINYEVKADDTTSEYHYISKQNNEEQLISYIKEQHRLLNQFVVDNVNSFTQLNANPTIEQLNRAITLFKQKDEQLFNQVKASHLSPSNYNAIVNQRNVINQTVQNLIDQNHNKLQTSQNKAAQLVGQRNQVVNKIQAILATVNYNSVNSIQEAENLFHSLRNQIEPLVAEVNNYKAAMATLQQEVDALSTAAIETETSKLATLKVSENTSVPANKVEEKTTQSEASGNKQEVTKSEEKQATSDAKASQPESANIADYDSLKEVLRNNISNQVPHISVQMEFKTQEQVDEYQKNLGSIIREIGDTLGTATEFNAKSNISTYTLGGQIQRIIVKSDITITYTLKGDMVGLHKEYKQFVDSFVKENITNKNITSDYEKAKVIHDHLVNNYTYATEELATTRETASGISIHAPEALYKDKRGVCQAFAVMFKDMAAAAGLSVWYVTGQAGGGNHAWNIVTINGVKYYVDTTWDNNIKSNKYFLVGKTIMDADHLLDSQYNALAKDIPADRHQGA

SEQ ID NO: 11637 - protein, 174 aa, Streptococcus agalactiae
ATGTCTAAAAAGACTGATTCAAATTATCTACATTCCAATTGTTCTGACAAGAAAATTTGGAGCGATGAGGAGCCTCTGCAACAGGAGACTATCCCTAAAGATAGAGATTGTGTTATCAAACCTGTCATTACTATGACAGTTGAACATGTGGAAATCCCATTAGATGACCAATCT

SEQ ID NO: 11638 - protein, 58 aa, Streptococcus agalactiae
MSKKTDSNYLHSNCSDKKIWSDEEPLQQETIPKDRDCVIKPVITMTVEHVEIPLDDQS

SEQ ID NO: 11639 - protein, 96 aa, Streptococcus agalactiae
ATGTTAAAAGATGTTAACGTTGGAATGAGTCATTTATTAGTTAGAGGTGCTATTATTCTAGTAGTAGGGATTGTTTTTCTGTTGCAACTGATTCAA

SEQ ID NO: 11640 - protein, 32 aa, Streptococcus agalactiae
MLKDVNVGMSHLLVRGAIILVVGIVFLLQLIQ

SEQ ID NO: 11641 - protein, 897 aa, Streptococcus agalactiae
ATGACATTTAAGTCAGGATTTGTAGCAATTTTAGGTCGTCCAAATGTTGGAAAATCAACCTTCCTAAACCATGTTATGGGACAAAAAATTGCTATCATGAGTGATAAAGCTCAAACAACACGTAATAAAATTATGGGGATTTATACAACAGAAACTGAGCAAATTGTTTTCATTGATACCCCAGGAATTCATAAACCAAAGACCGCCCTTGGTGATTTTATGGTTGAATCTGCTTATAGTACTTTACGTGAAGTTGAAACGGTTCTTTTCATGGTTCCTGCCGATGAAAAGCGAGGTAAAGGCGATGATATGATTATTGAACGTCTTAAGGCTGCCAAGATTCCTGTTATTTTAGTAATCAATAAAATTGATAAGGTTCATCCAGACCAACTTTTGGAACAGATTGATGACTTCCGTAGCCAAATGGATTTTAAAGAAGTGGTGCCAATTTCTGCCCTTCAAGGAAATAATGTGTCAACCCTAATCAAGTTATTAACTGATAATCTTGAAGAAGGTTTCCAATATTTCCCAGAAGATCAGATTACTGATCATCCGGAACGATTTTTAGTATCAGAAATGGTTCGTGAGAAGGTACTTCATTTAACGCAACAAGAGGTTCCTCACTCAGTAGCTGTTGTTGTCGAATCCATGAAACGTGATGAAGAAACTGATAAAGTGCACATTCGTGCAACTATCATGGTTGAACGTGATAGTCAAAAAGGCATTATCATTGGAAAACAAGGTGCTATGCTCAAGAAAATAGGAAAAATGGCGCGCCGTGATATCGAACTTATGTTAGGTGATAAAGTTTACCTAGAGACTTGGGTAAAAGTCAAGAAAAACTGGCGTGATAAAAAGCTTGATTTAGCTGATTTTGGCTACAATGAAAAAGAGTAT

SEQ ID NO: 11642 - protein, 299 aa, Streptococcus agalactiae
MTFKSGFVAILGRPNVGKSTFLNHVMGQKIAIMSDKAQTTRNKIMGIYTTETEQIVFIDTPGIHKPKTALGDFMVESAYSTLREVETVLFMVPADEKRGKGDDMIIERLKAAKIPVILVINKIDKVHPDQLLEQIDDFRSQMDFKEVVPISALQGNNVSTLIKLLTDNLEEGFQYFPEDQITDHPERFLVSEMVREKVLHLTQQEVPHSVAVVVESMKRDEETDKVHIRATIMVERDSQKGIIIGKQGAMLKKIGKMARRDIELMLGDKVYLETWVKVKKNWRDKKLDLADFGYNEKEY

SEQ ID NO: 11643 - protein, 396 aa, Streptococcus agalactiae
ATGGACTTAAACGACAATAATCAAAAAAAATGGAAAAATCGCACCTTAACATCAAGCATGGAATTTGCTGTTACAGGGATTTTTACAGCTTTTAAAGAAGAAAGAAATATGCGTAAGCATTTGGTTTCTGCCATTTTAGTAATACTTGCTGGTCTTACTTTTCAAGTATCTATGGTGGAGTGGTTATTTCTTTTATTGAGTATTTTTTTGGTAATTACTTTTGAAATTATCAATTCAGCTATTGAAAATGTAGTTGATTTGGCAAGTAATTACCATTTCTCGATGCTGGCTAAAAATGCTAAAGATATGGCAGCAGGAGCGGTTTTAGTTGTTTCCTTATTTGCCGTATTGGTGGGATTGATTATTTTTATACCCAAGATACTTGCTTTACTTTTA

SEQ ID NO: 11644 - protein, 132 aa, Streptococcus agalactiae; identical to SEQ ID NO: 2764

SEQ ID NO: 11645 - protein, 495 aa, Streptococcus agalactiae
ATGTACGTTGAAATGATTGATGAAACTGGACAAGTTTCAGAAGATATCAAAAAGCAAACTCTTGATTTGTTAGAGTTTGCAGCACAAAAAACAGGTAAAGAGAATAAAGAAATGGCTGTAACGTTTGTCACTAATGAACGTAGCCATGAATTGAATTTAGAGTATCGAGATACCGATCGTCCGACTGATGTTATCAGTTTAGAATATAAGCCTGAGGTTGATATTTCTTTTGATGAAGAAGATCTGACTGAAAATCCTGAACTTGCTGAGATGCTAGAAGATTTTGATTCTTATATTGGTGAACTTTTTATTTCTATTGATAAAGCTAAAGAACAAGCAGAAGAGTACGGTCACTCTTATGAACGTGAAATGGGTTTTTTAGCTGTGCATGGTTTTTTGCATATTAATGGTTATGATCATTATACACCCGAAGAAGAAAAAGAGATGTTCAGCTTACAGGAAGAAATTTTAACTGCTTATGGACTTAAACGACAA

SEQ ID NO: 11646 - protein, 165 aa, Streptococcus agalactiae
MYVEMIDETGQVSEDIKKQTLDLLEFAAQKTGKENKEMAVTFVTNERSHELNLEYRDTDRPTDVISLEYKPEVDISFDEEDLTENPELAEMLEDFDSYIGELFISIDKAKEQAEEYGHSYEREMGFLAVHGFLHINGYDHYTPEEEKEMFSLQEEILTAYGLKRQ

SEQ ID NO: 11647 - protein, 804 aa, Streptococcus agalactiae
ATGAAGATAACATTACACAGCGTTGCTGAAACGTTATTAATCACCTTATATATTAGAGCTAAAGATGCGATGGCTAAACATCCGATACTTAATGATCAAAAATCCTTAGCAATTGTTGAACAGATAGAATATGATTTTGATAAATTCGATAATTCAGAAGCTTCTTTTTATGCAACATTAGCTAGAATTCGCGTTATGGATAGAGAAATCAAAAAATTTATTAGAGAAAATCCAAATAGTCATATCCTTTCAATTGGCTGTGGACTTGATACAAGGTTTGAAAGAGTCGATAATGGACAAATTAGGTGGTATAACCTTGATTTGCCAGAGGTTATGGAGATAAGAAAATTATTTTTTGAAGAGCATGAAAGAGTTACTAATATAGCAAAATCAGCCCTAGATGAAACTTGGACACGGGAGGTAAATCCCCAAAATGCCCCTTTTCTAATCGTGTCAGAAGGTGTTTTAATGTTTCTAAAAGAAGATGACGTAGAGACTTTTCTTCATATCCTGACAAATTCATTTAGCCAATTTATGGCACAATTTGATTTGTGTCAGAAGGAAATGATTAATAAAGGAAAGCAACATGATACAGTAAAGTATATGGATACAGAATTTCAGTTTGGTATCACAGATGGTCATGAAATTGTGGATTTAGACCCTAAATTAAAGCAAATAAATCTGATTAACTTTACAGATGAGATGAGCAAATTTGAGTTAGGCACACTTCGCTCTTTACTTCCAACAATTCGTAAATTTAATAATTGTTTAGGTGTGTACGAATATAAAGCATCTGAGAAAAAG

SEQ ID NO: 11648 - protein, 268 aa, Streptococcus agalactiae
MKITLHSVAETLLITLYIRAKDAMAKHPILNDQKSLAIVEQIEYDFDKFDNSEASFYATLARIRVMDREIKKFIRENPNSHILSIGCGLDTRFERVDNGQIRWYNLDLPEVMEIRKLFFEEHERVTNIAKSALDETWTREVNPQNAPFLIVSEGVLMFLKEDDVETFLHILTNSFSQFMAQFDLCQKEMINKGKQHDTVKYMDTEFQFGITDGHEIVDLDPKLKQINLINFTDEMSKFELGTLRSLLPTIRKFNNCLGVYEYKASEKK

SEQ ID NO: 11649 - protein, 474 aa, Streptococcus agalactiae
ATGAAACAAGATTATATTTCCTACATTAGGTCAAAAGTTGGACATGAGACTATCTTTTTAACATATTCTGGTGGTATTTTGACAGATGGTAAGGGACGTGTCCTACTCCAATTAAGAGCTGATAAGAATTCTTGGGGAATTATTGGTGGATGTATGGAGTTAGGTGAGTCATCAGTAGATACATTGAAAAGAGAATTTTTCGAAGAAACTGGATTGAGAGTGGAACCAATCAGACTGTTAAATGTTTATACTAACTTTCAAGACTCTTATCCCAATGGCGATAAAGCACAAACCGTCGGTTTTATTTATGAAGTAAGCTGTCCAAAACCAGTTAATATAGAAGGTTTTCATAATGAGGAAACATTGCAATTGGACTATTTTTCTAAAGAAGACGTCAAAAATATTACGATCGTAAATGAACAACACCAATTAATTTTAGATGAATATTTTTCACAAACATTCCAAATGGGGCAT

SEQ ID NO: 11650 - protein, 158 aa, Streptococcus agalactiae
MKQDYISYIRSKVGHETIFLTYSGGILTDGKGRVLLQLRADKNSWGIIGGCMELGESSVDTLKREFFEETGLRVEPIRLLNVYTNFQDSYPNGDKAQTVGFIYEVSCPKPVNIEGFHNEETLQLDYFSKEDVKNITIVNEQHQLILDEYFSQTFQMGH

SEQ ID NO: 11651 - protein, 801 aa, Streptococcus agalactiae
ATGGACCATTTCACAAAACTCTGGCAAGATTTCTCTAAACTTCCAAATGTTGTTGCTATAGCACTCGGAGGCTCACGCTCTGGTGACAGTTTTGACCAATCTTCCGATTATGATTTGTATGTTTATTGTGCAGCAACTCCTGATATCACTAGTCGTAAACGTATCCTTAACAAGCACTGTCATTACATTGAACTTAACAATCATTACTGGGAGCTTGAAGATAATGGTACTTTAAACGACGGAACTGATATTGATATTCTCTATCGTAACATAGATAACTTTTTATCAGACTTAGAAGATGTTGTTGAACACCACAATTCTCGAATTGGATACACCACTTGTTTTTGGCATAACCTCATCAATTGCCAAATACTCTATGATCCTGAAGATCAATTACAATCACTCAAAGAGAGATTCGAAGTTTCTTATCCCAGTCAGTTACAAAAACAAATTATCATTCAAAATCGTAACTTATTAACTGGCAAGCTTCCCTCTTACGATAAACAAATTATAAAAGCCCTTAAACGCCAAGACTTTGTTAGTACTCACCATAGAACTACTGCTTTCTTAGATTCCTACTTTGATATTATCTTTGCACTTAATAAGTTGACACATCCTGGCGAAAAAAGAATGATTTCCTATGCTAAGAAGAATGCTACATTGCTTCCTAAACATTTCGAAGAAAATATCATTAAACTATGCCATCTCAACTCCAACGAACACACTGTTAAAGAAACATTAAACGATATAATAATGCATCTCGACGTCATGCTTAAAGAAAATTTTCAACACTTTATAGAT

SEQ ID NO: 11652 - protein, 267 aa, Streptococcus agalactiae
MDHFTKLWQDFSKLPNVVAIALGGSRSGDSFDQSSDYDLYVYCAATPDITSRKRILNKHCHYIELNNHYWELEDNGTLNDGTDIDILYRNIDNFLSDLEDVVEHHNSRIGYTTCFWHNLINCQILYDPEDQLQSLKERFEVSYPSQLQKQIIIQNRNLLTGKLPSYDKQIIKALKRQDFVSTHHRTTAFLDSYFDIIFALNKLTHPGEKRMISYAKKNATLLPKHFEENIIKLCHLNSNEHTVKETLNDIIMHLDVMLKENFQHFID

SEQ ID NO: 11653 - protein, 984 aa, Streptococcus agalactiae
TTGCAAGAATACTCTATCGAAATTACTTTACAACATCCAGATGATATGATGTCACTCTTTGGCAGCAATGAGCGCCATTTAAAATTAATCGAAGAAAATTTAGATGTTATCATTCATGCTAGAACTGAACGTGTTCAGGTATTAGGTGACTCTGAAGAAACATTAGAAACCGCTCGGCTAACTATTGAAGCATTATTAGTGCTTGTTAACCGTGGGATGACTGTGAATACTTCAGATGTTGTAACAGCCTTATCCATGGCACAAAATGGTTCAATTGATAAATTCGTTGCCCTTTATGAGGAAGAAATTATTAAGGATAGCTATGGTAAGCCTATCCGTGTTAAGACTTTAGGGCAAAAAATATACGTTGATAGCGTTAAAAATCATGATGTTGTTTTTGGTATTGGGCCTGCTGGAACGGGAAAAACTTTTTTAGCAGTCACTCTAGCAGTAACGGCACTAAAGCGTGGTCAAGTTAAACGAATAATCTTAACGAGACCAGCGGTTGAAGCTGGTGAAAGCCTTGGTTTCTTGCCTGGAGATCTCAAAGAGAAAGTTGATCCTTATTTGAGACCAGTTTATGATGCCCTATATCAAATTTTAGGTAAAGAGCAAACAAGTCGCTTAATGGAGCGTGAAATCATCGAAATTGCTCCATTGGCTTACATGCGTGGTCGTACTTTAGATGATGCATTTGTCATATTAGATGAAGCGCAAAACACCACTATAATGCAAATGAAAATGTTCCTAACACGACTTGGCTTCAATTCTAAAATGATTGTAAATGGCGATGTTAGCCAAATTGACTTACCAAAGAATGTTAAATCTGGTTTGATTGATGCTGTTGAGAAATTACGAAATATCAAAAAGATTGACTTTATTCATTTATCAGCAAAGGATGTTGTAAGACACCCTGTCGTTGCTGAAATAATAAATGCTTATTCAGATTCAGAAAGTAGTCACAAGCTACAACCTGATAATGAC

SEQ ID NO: 11654 - protein, 328 aa, Streptococcus agalactiae
MQEYSIEITLQHPDDMMSLFGSNERHLKLIEENLDVIIHARTERVQVLGDSEETLETARLTIEALLVLVNRGMTVNTSDVVTALSMAQNGSIDKFVALYEEEIIKDSYGKPIRVKTLGQKIYVDSVKNHDVVFGIGPAGTGKTFLAVTLAVTALKRGQVKRIILTRPAVEAGESLGFLPGDLKEKVDPYLRPVYDALYQILGKEQTSRLMEREIIEIAPLAYMRGRTLDDAFVILDEAQNTTIMQMKMFLTRLGFNSKMIVNGDVSQIDLPKNVKSGLIDAVEKLRNIKKIDFIHLSAKDVVRHPVVAEIINAYSDSESSHKLQPDND

SEQ ID NO: 11655 - protein, 1769 aa, Streptococcus agalactiae
ATGAGATATACAAATGGAAATTTTGAAGCCTTTGCAAGACCTCGAAAACCTGAAGGTGTGGATAAAAAATCCGCTTATATTGTTGGTTCTGGTTTAGCAGGATTAGCTGCCGCTGTCTTTTTAATACGTGATGGTCAAATGGATGGTCAACGTATTCATATTTTTGAAGAACTACCTCTTTCTGGAGGATCACTTGACGGTGTCAAACGACCTGATATCGGTTTTGTAACGCGTGGTGGTCGTGAAATGGAAAATCACTTCGAATGTATGTGGGATATGTACCGTTCCATCCCCTCTCTCGAAGTTCCAGATGCTTCTTATCTAGATGAATTTTATTGGCTTGACAAGGATGATCCCAATTCATCTAACTGTCGCCTCATTCATAAACAGGGGAATCGCTTAGAATCTGATGGTGATTTTACACTCGGAACACATTCCAAAGAGTTAGTTAAGCTAGTCATGGAGACTGAAGAGTCTTTAGGTGCTAAAACGATTGAAGAAGTCTTTTCAAAAGAATTTTTTGAAAGTAATTTTTGGACTTATTGGGCTACTATGTTTGCCTTTGAGAAATGGCATTCAGCGATTGAAATGCGTCGATATGCTATGCGCTTCATCCATCATATCGGTGGTCTGCCTGATTTCACTTCATTAAAATTTAATAAATATAATCAATATGATTCTATGGTGAAACCAATCATCAGTTATTTAGAGTCTCACAATGTGGATGTTCAATTTGATAGCAAGGTGACTAATATCTCCGTAGACTTTAGAACGGTCAGAAGCTTGCAAAAGCTATTCATCTCACAGTTGGTGGTGAAGCAAAAATAATTGATCTTACTCCAGATGATTTTGTTTTTGTAACGAATGGTTCTATCACTGAAAGTACGAACTATGGTAGTCATGATACTGTAGCTAAACCTAATACCGATTTGGGAGGTTCTTGGAATCTTTGGGAAAACTTAGCTGCTCAATCTGATGAATTTGGACATCCTAAAGTCTTCTACAAAGATATTCCAAAAGAGTCATGGTTTGTTTCTGCTACTGCAACAATAAAAGATCCAGCTATTGAACCTTATATAGAGCGTTTAACACATCGTGACCTCCATGATGGTAAAGTAAATACAGGAGGCATTGTTACAGTTACAGATTCTAATTGGATGATGAGTTTTGCTATCCATCGCCAACCGCATTTCAAAGAGCAAAAGGAAAATGAAACAATTGTTTGGATTTATGGACTCTATTCAAATGTGGAAGGTAATTATATTAAAAAACCAATTGAAGAATGTACTGGTCGAGAAATCACAGAAGAGTGGTTGTATCACTTAGGTGTTCCTGAAATGAAGATTCATGATTTATCTGATAAACAATATGTAAGTACAGTTCCTGTTTATATGCCTTACATTACTAGTTATTTCATGCCTCGAGTTAAAGGTGACCGACCAGATGTTATCCCACAAGGTTCTGTTAACCTAGCCTTCATTGGTAATTTTGCAGAATCTCCATCCAGAGATACAGTATTTACAACGGAATATTCTATTAGAACTGCTATGGAAGCTGTTTATACTTTCTTAAATGTTGAACGTGGTGTTCCAGAAGTCTTTAATTCAGCATTTGATATTCGTGTCTTGTTGCAATCTTTATACTATCTCAATGATAAGAAATCTGTTGAAGATATGGATTTACCAATACCTGCCTTAATGCGTAAAGTAGGCATGAAAAAAATTAGAGGAACTTATTTAGAAGAATTACTTCGAGAAGCTCATCTTTTA

SEQ ID NO: 11656 - protein, 590 aa, Streptococcus agalactiae
MRYTNGNFEAFARPRKPEGVDKKSAYIVGSGLAGLAAAVFLIRDGQMDGQRIHIFEELPLSGGSLDGVKRPDIGFVTRGGREMENHFECMWDMYRSIPSLEVPDASYLDEFYWLDKDDPNSSNCRLIHKQGNRLESDGDFTLGTHSKELVKLVMETEESLGAKTIEEVFSKEFFESNFWTYWATMFAFEKWHSAIEMRRYAMRFIHHIGGLPDFTSLKFNKYNQYDSMVKPIISYLESHNVDVQFDSKVTNISVDFKNGQKLAKAIHLTVGGEAKIIDLTPDDFVFVTNGSITESTNYGSHDTVAKPNTDLGGSWNLWENLAAQSDEFGHPKVFYKDIPKESWFVSATATIKDPAIEPYIERLTHRDLHDGKVNTGGIVTVTDSNWMMSFAIHRQPHFKEQKENETIVWIYGLYSNVEGNYIKKPIEECTGREITEEWLYHLGVPEMKIHDLSDKQYVSTVPVYMPYITSYFMPRVKGDRPDVIPQGSVNLAFIGNFAESPSRDTVFTTEYSIRTAMEAVYTFLNVERGVPEVFNSAFDIRVLLQSLYYLNDKKSVEDMDLPIPALMRKVGMKKIRGTYLEELLREAHLL

SEQ ID NO: 11657 - protein, 213 aa, Streptococcus agalactiae
TTGAGAAAATCATTTTACAGTTGGTTGATGACACAAAGAAATCCAAAATCAAATGAACCAGTAGCAATCCTAGCAGATTACGCTTTTGATGAAACCACTTTTCCAAAACATAGTTCGGATTTTGAAACAGTTAGTCGTTATTTAGAAGATGAGGCTAGTTTTTCCTTTAATTTAACAGATTTTGATGATATTTGGGAAGATTATCTCAATCAT

SEQ ID NO: 11658 - protein, 71 aa, Streptococcus agalactiae; identical to SEQ ID NO: 7414

SEQ ID NO: 11659 - protein, 507 aa, Streptococcus agalactiae
ATGGAACGTGCGATTTTTGCTGGAGGTTGTTTTTGGTGTATGGTACAACCATTTGAAGAATTAGATGGTATTGAATCTGTTTTATCAGGATACACTGGAGGACATGTTGAGAATCCAACTTATAAAGAAGTTTGTAGTAAAACTACTGGACATACAGAAGCTGTTGAAATTATTTTTAATCCTGAAAAAATCTCTTATGCAGATTTAGTTGAGTTATATTGGGCACAAACAGATCCAACAGACGCTTTTGGTCAATTTGAAGATCGTGGGGATAATTATCGTCCTGTCATCTTTTATGAGAATGAAGAGCAACGTCAGATTGCTCAAAAATCAAAAGATAAGCTACAAGCTTCGGGTAGATTTGATAGACCAATTGTAACCAGTATTGAGCCTGCTGATACTTTTTACCCAGCAGAAGACTATCATCAAGCATTCTATCGGACTAACCCTGCTCGTTACGCCTTGAGTAGTGCCAGAAGACATGCATTTCTAGAGGAGAACTGGCAT

SEQ ID NO: 11660 - protein, 169 aa, Streptococcus agalactiae
MERAIFAGGCFWCMVQPFEELDGIESVLSGYTGGHVENPTYKEVCSKTTGHTEAVEIIFNPEKISYADLVELYWAQTDPTDAFGQFEDRGDNYRPVIFYENEEQRQIAQKSKDKLQASGRFDRPIVTSIEPADTFYPAEDYHQAFYRTNPARYALSSARRHAFLEENWH

SEQ ID NO: 11661 - protein, 852 aa, Streptococcus agalactiae
ATGAATACATTATTGGCGACAGTCATAACAGGCTTAGTAACTGATGAAAACAAAGATTTTTACTTTATCCAAAAAGATGGCTTTACCTTTGCATTATCAAAGTCAGAAGGAGAGCATCACATTGGTGAAATGGTTAAAGGATTCGCCTATACAGATATACAACAAAAAGCACGTCTTACAACTAAAGAAACATTTGCGACTCGAGATCATTATGGTTGGGGGACAGTTACTGAGGTACGTAAAGACTTGGGAGTATTTCTTGATACTGGTCTTCCAGATAAGCAAGTGGTTGTTTCTTTGGATGTTCTTCCTGAATTGAAAGAACTTTGGCCTAAAAAAGGTGATCGCCTCTACGTTTGCTTAGATGTTGATAAAAAAGATCGTCTCTGGGCTCTCCCTGCAGATCCTGAAGTATTTCAACAAATGGCAACCCCAGCATATAACAATATGCAAAATCAAAATTGGCCAGCAATCGTTTATCGCTTAAAATTGTCAGGAACTTTTGTTTATCTACCAGAAAATAATATGCTCGGCTTTATTCACCCTAGTGAACGTTACAGTGAACCTCGTTTAGGGCAAGTGCTGGATGCACGAGTTATTGGCTTTAGAGAAGTTGATAGAACCTTAAATTTATCATTAAAGCCTCGTTCTTTTGAAATGTTAGAAAATGACGCACAAATGATTTTAACGTATTTAGAAAGTAACGGAGGATTCATGACTTTAAATGATAAATCTTCTCCAGAGGAAATTAAAGCTACTTTTGGAATTTCCAAAGGTCAGTTTAAAAAAGCACTTGGAGGACTCATGAAAGCTAAAAAGATCAAACAAGATCAGCTAGGTACAGAATTATTA

SEQ ID NO: 11662 - protein, 284 aa, Streptococcus agalactiae
MNTLLATVITGLVTDENKDFYFIQKDGFTFALSKSEGEHHIGEMVKGFAYTDIQQKARLTTKETFATRDHYGWGTVTEVRKDLGVFLDTGLPDKQVVVSLDVLPELKELWPKKGDRLYVCLDVDKKDRLWALPADPEVFQQMATPAYNNMQNQNWPAIVYRLKLSGTFVYLPENNMLGFIHPSERYSEPRLGQVLDARVIGFREVDRTLNLSLKPRSFEMLENDAQMILTYLESNGGFMTLNDKSSPEEIKATFGISKGQFKKALGGLMKAKKIKQDQLGTELL

SEQ ID NO: 11663 - protein, 555 aa, Streptococcus agalactiae
ATGACTAAGGAAATCGTTACAAAAGCTCAAGAGCGTTTTGAGCAATCACACCAAAGTTTATCAAGAGAATTTGCAGGGATTCGTGCAGGACGTGCTAATGCTAGCTTGCTTGATCGTATTCAAGTTGAGTATTATGGAGCGCCAACTCCACTTAACCAATTAGCCTCTATTACTGTACCAGAAGCTCGTGTTCTTTTAATATCACCATTTGATAAATCATCAATCAAAGATATTGAGCGTGCTATTAACGAATCAGATTTAGGTATTAATCCTGCAAATGATGGTTCAGTTATTCGTCTTGTTATTCCAGCTTTGACAGAAGAAACACGTCGTGATTTAGCTAAAGAAGTGAAAAAAGTCGGAGAAAATGCTAAGATTGCTATCCGTAATATTCGCCGTGATGCTATGGATGAAGCTAAGAAGCAAGAAAAGAATAAAGAAATTACAGAAGATGACTTGAAATCTCTTGAAAAAGATATTCAAAAGGCTACTGATGATGCTGTAAAACATATTGATGAGATGACTGCTAATAAAGAAAAAGAATTGTTGGAAGTT

SEQ ID NO: 11664 - protein, 185 aa, Streptococcus agalactiae; identical to SEQ ID NO: 2780

SEQ ID NO: 11665 - protein, 726 aa, Streptococcus agalactiae
GTGGAACCTAAATATCAACGTATATTAATTAAGTTATCTGGTGAAGCATTGGCGGGAGATAAGGGTGTCGGTATTGACATTCCTACCGTTCAATCTATTGCAAAAGAAATTGCCGAAGTACACAATTCAGGTGTTCAAATAGCACTTGTCATTGGTGGAGGTAATCTTTGGCGTGGAGAACCTGCAGCAGAAGCAGGGATGGATCGTGTTCAAGCTGATTATACAGGGATGTTAGGGACAGTAATGAATGCTCTTGTAATGGCTGATAGCCTTCAACAATATGGGGTAGATACTAGAGTTCAAACAGCTATTCCAATGCAAACTGTTGCTGAGCCTTACGTACGTGGTCGTGCTTTACGTCATCTAGAGAAGAATCGTATTGTTGTTTTTGGAGCGGGTATTGGTTCGCCTTATTTCTCAACTGATACAACAGCAGCGCTTCGTGCTGCTGAGATTGAGGCAGAAGCAATTTTAATGGCTAAAAATGGAGTAGATGGTGTTTATAATGCTGATCCAAAGAAAGATGCCAATGCTGTCAAATTTGATGAATTAACTCACGTTGAAGTAATAAAACGAGGGTTAAAAATCATGGATGCAACCGCATCAACTATTTCAATGGATAATGATATTGACCTTGTTGTTTTCAATATGAATGAGACTGGTAATATTAAGCGTGTTGTTCTTGGAGAACAAATCGGAACAACTGTTTCAAACAAAGCATCTGAA

SEQ ID NO: 11666 - protein, 242 aa, Streptococcus agalactiae; identical to SEQ ID NO: 2782

SEQ ID NO: 11667 - protein, 678 aa, Streptococcus agalactiae
ATGTTGGTTTGTAATCATGTCGGAAAAACATTTGGACGACAAGAGGTTTTAAAGGACTGTCATTTTCATCTTAAAAGAGGAGAAATAATTGGTATAATGGGTAAAAGTGGCAGTGGAAAAAGTAGCCTTGCCCGACTCATTATAGGACTAGATAGTCCTACTTGTGGTTCGATACATTTTCAAGGAAAAAATTACACACCTAAAGATGGTAAGGCGCAGATTATCCTTGTTTTTCAAGATGCGCTTAGTTCGGTCAATCCATATTTTAGTATTGAGGAAATTTTGAATGAAGCTTTTTATGGAAAAAAAACAACTTTTGAATTATGCCAAATATTAGAAGCGGTGGGTTTAGATGGAACTTATCTAAAATATAAAGCTAGACAACTTAGTGGTGGTCAGCTACAGAGAGTTTGTATCGCTAGAGCTTTACTCTTAAAGCCTAAAATTATTATTTTTGATGAATCCTTAAGTGGATTAGACCCAGTAACTCAAATTAAAATGCTACGTTTATTACAAAAAATAAAACGCTGTTATGAATTAAGTTTTATAATGATTTCTCATGACCCTAAAATTTGTCAAGCTATCTGTAACCGGGTCTTTCTGATAAAAAATGGTTATTTAGTAGAAGATAATGAATTCTTGAAGAGAGCATGTTCTACTAACTGTTTGACCAATCTC

SEQ ID NO: 11668 - protein, 226 aa, Streptococcus agalactiae
MLVCNHVGKTFGRQEVLKDCHFHLKRGEIIGIMGKSGSGKSSLARLIIGLDSPTCGSIHFQGKNYTPKDGKAQIILVFQDALSSVNPYFSIEEILNEAFYGKKTTFELCQILEAVGLDGTYLKYKARQLSGGQLQRVCIARALLLKPKIIIFDESLSGLDPVTQIKMLRLLQKIKRCYELSFIMISHDPKICQAICNRVFLIKNGYLVEDNEFLKRACSTNCLTNL

SEQ ID NO: 11669 - protein, 705 aa, Streptococcus agalactiae
ATGGGGGAATCGCTAACTATTATTGGTGAGAGTGGTTCAGGGAAAACCCTCTTGGCAAAATTATTGGTTGGTCATATTCCACAAGGTATGACAGTTAGAGGAAACATATTTTTTAAGGGAGTTGATTTAGGTAAACTAACTGTAAAGCAGTGGCAGAAATTAAGGGGACGAGATATTGCCTATTTAGTGCAAAATCCCATGTCTATGTTTAATCCTTTTCAAAAAATTGAAGCGCATATTTTGGAAACAATCCTTAGTCATGAGAAATGTTCAAAGAGAGTAGCCTTATCTAAAGCGTTAGAATGGATGAAACGTTTAAATTTAGATGATGCGATATCCCTGTTAAAAAAATACCCCTTTGAGCTTAGTGGAGGAATGCTACAAAGAATTATGTTAGCCACTATATTATCTCTTGATCCTCAGGTAATCATATTAGATGAGCCGACCTCAGCGGTTGATTGCCATAATTGTTCTACTATATCAGCTATTTTGCAGGAATTGCAAAATAATGGAAAAACCTTGATTACTGTAACGCATGATTATCAGTTAGCTAGAGACCTGGGGGGGCAATTACTAGTTATAAGTGAGGGAGAAGTTGTTGAACAGGGACAAACCCAAGCTATTTTAAGCAATCCTCAACATAACTATACGAAAGCACTGACAGTGCAAATGGAGTATGAAGGAGATATTCTTAATGTTGGTTTG

SEQ ID NO: 11670 - protein, 235 aa, Streptococcus agalactiae; identical to SEQ ID NO: 2786

SEQ ID NO: 11671 - protein, 804 aa, Streptococcus agalactiae
ATGTCAAAAAGAATTTATTTTTCAAGTAGCTTACTGGTATTGTTAGTGATTAGTGCCATTTTTGCCCCTATTCTATCTAGCTTTGATCCACAATACGTAGATTTATCACAAAAATTATTGGCTCCCAATAATGTTCATTTGTTAGGGACTGACCAATTGGGTAGAGATGTATTATCTCGCTTGCTTTATGGTGCTAGATATTCACTGTTTTTAGCTATTATTATTAGCTTATTGGAATTAACGATTGGTATGTTTGTGGGTCTTATTGTTGGTTGGTATCAAGGAAAGTTAGAAAACCTCTTTTTATGGATAGCTAATATTATTTTAGCTTTTCCGAGCTTTTTGCTCTCTCTTGCAACCGTGGGGATCTTAGGTCATGGTCTAGGGAATTTAATTTTTGCAATTGTCTTTGTGGAATGGGTTTACTATGCTAAATTAATGACCAATTTAGTTAAGAGTGCAAAAAAAGAGCCTTATGTGATAAATGCGCAAATTATGGGACTTTCGGTCTGGCATATTTTAAGAAAACATATTTTTCCTTTTGTGTATCAGCCAATCCTCGTTATGGTCCTTATGAATATAGGAAATATTATTTTAATGATTTCTGGCTTTTCTTTCTTAGGGATTGGTGTGCAACCTAATGTCACAGAATGGGGAATGATGTTGCACGATGCTAGAGGATATTTTAGGACAGCTACTTGGATGATGTTATCTCCTGGAATTGCGATTTTTTTAACAGTATTTTCCTTTAATACTTTAGGCGATGCTATAGATAAAAAAGATTGGAAACGACAATGGAACAGT

SEQ ID NO: 11672 - protein, 268 aa, Streptococcus agalactiae
MSKRIYFSSSLLVLLVISAIFAPILSSFDPQYVDLSQKLLAPNNVHLLGTDQLGRDVLSRLLYGARYSLFLAIIISLLELTIGMFVGLIVGWYQGKLENLFLWIANIILAFPSFLLSLATVGILGHGLGNLIFAIVFVEWVYYAKLMTNLVKSAKKEPYVINAQIMGLSVWHILRKHIFPFVYQPILVMVLMNIGNIILMISGFSFLGIGVQPNVTEWGMMLHDARGYFRTATWMMLSPGIAIFLTVFSFNTLGDAIDKKDWKRQWNS

SEQ ID NO: 11673 - protein, 942 aa, Streptococcus agalactiae
ATGTATCTAAGTAGTTCGATTATCAAAAAAATATTGTCAGCTTTTTTGGCATTGTTTTTCATATCACTTCTAACATTTATTCTTATCAAACTATCAACAGTTAATCCAGCAGAAAATTACCTTCGTTTATCAAAAATAAGTGTTAGTCCAGAAGCACTAAAAGAAGCAGAGCACTATCTAGGTTTAGATAAGCCATTATGGAAGCAGTACTGGCTGTGGTTCCAAAAAGCATTAACAGGAGATTTTGGATATTCTTATGTGCTCAGGTTGCCAGTATTAGATTTGGTTTTACAACGGTTTTTGGCTACTTTATTTCTAGGCACGAGTGCCTTCTTGCTAATTGTTACCATTTCTACCCCGTTAGGTGTGTGGGCTGGCTTACATGAATCTGCTCGGAGTGATCACTTGATTCGATTTTTGAGTTTTTCTAGTGTGTCTATGCCAAGTTTTTGGGTTGCTTACTTGTTGATGCTGCTATTTTCGGCAAAGTTAAATCTTCTGCCTGTTTCAGGAGGTAACGATTTACAAAGTTTAATTTTGCCAAGTATTACCTTAAGTTTTTCTACCGTAGGTCAATATATAGCCCTTATTCGAAAAGCTATTAGTCAAGAAAATAGAAGTTTAAATGTGGAAAATGCTCGATTAAGAGGAGTAAAAGAACGTTATATTGTCACACATCACCTCCTTAGAAATGCCTTACCTGCGATAATGACGGCACTTAGCTTGACTTGGGTTTACTTATTAACAGGATCAATTATTGTTGAAGAAATTTTTTCATGGAATGGAATAGGACGTTTATTTGTGACCAGTCTAAGGACTTCAGATCTTCCAGTAATACAAGCTTGTATGCTAATTTTTGGAACCTTATTTTTAGCTAATAATTTTATGACACAGTGTCTTATGAATTGGGTTGATCCTCGGTTACGAAAGTCGAGGGAGAAA

SEQ ID NO: 11674 - protein, 314 aa, Streptococcus agalactiae
MYLSSSIIKKILSAFLALFFISLLTFILIKLSTVNPAENYLRLSKISVSPEALKEAEHYLGLDKPLWKQYWLWFQKALTGDFGYSYVLRLPVLDLVLQRFLATLFLGTSAFLLIVTISTPLGVWAGLHESARSDHLIRFLSFSSVSMPSFWVAYLLMLLFSAKLNLLPVSGGNDLQSLILPSITLSFSTVGQYIALIRKAISQENRSLNVENARLRGVKERYIVTHHLLRNALPAIMTALSLTWVYLLTGSIIVEEIFSWNGIGRLFVTSLRTSDLPVIQACMLIFGTLFLANNFMTQCLMNWVDPRLRKSREK

SEQ ID NO: 11675 - protein, 1614 aa, Streptococcus agalactiae
ATGAGACGTAACATATTATTGAGTATTACTTGTTTATTGATGGTGACTCTGACTGCATGCCATTCACAGGATAGCAAAAGTCATAAACTAAACAGTGATAAACTCACGCTTGCTTGGGGAGAAGACTTTGGTGATGTTAATCCGCATCGCTATAACCCTGATCAGTTTGTTATCCAGGATATGGTTTATGAGGGGTTGGTACGATATGGTGACAATGGGAAAATTGAACCAGCTTTAGCGGAAAGCTGGAGCATTAGTCAAGATGGAAAAACCTACACTTTTAAATTGAGAAATGCTAAATATTCTGATGGCAGTAACTTTAATGCTGCGAATGTCAAACGTAATTTTGATAGTATTTTTTCGAAGTCTAATAGAGGTAATCATAATTGGTTTAATTTAACGAATCAATTGGAAAATTATCGTGCCTTGAATCAAAGTACTTTTGAAATTAAACTGAAACAAGCTTATAGTGCTACTTTATATGATCTCTCTATGATTCGTCCAATTCGTTTTTTATCTGATAACGCTTTCCCTAAAGGTGATGATACAACTAAGAAGAATGTAAAAAAACCAATTGGAACGGGTCAATGGGTTGTGAAAAGTAAAAAGCAAAATGAATATATTACCTTCAAACGTAATGAGAATTACTGGGGAAAGAAACCAAAATTAAAAGAAGTAACCGTAAAAGTTATACCTGATGCTCAGACGCGTGCTTTAGCATTTGAATCAGGTGACGTTGATTTGATCTATGGGAATGGCATTATTGGTTTAGACACTTTTGCCCAATATACGAAGGACAAGAAATATGTCACAGCTGTTTCTCAACCTATGTCAACAAGACTTTTGTTGCTAAATGCTAAGGAAAGTATTTTCCAAGATAAAAAAGTTCGTCAGGCAATGAATCATGCTATTGACAAAGTTTCTATTGCTAAGAACACTTTTAGAGGAACAGAAAAGCCAGCAGACACTATTTTTTCAAAATCAACACCTCACTCAGATGCTAAGTTAAATACTTATAGCTATAATGTTGATAAAGCAAATCAGCTATTGGATCAAGCTGGTTGGAAGTTGGGAAAAGATAAGGTTCGTGAAAAAGATGGTAAAGCTCTAACCTTACGTCTTCCTTATATCGCCACTAAGGCAACTGATAAAGACCTGGTAACTTATTTCCAAGGAGAATGGCGTAAAATCGGTATTAATGTTTCTCTTATTGCTATGGAAGAAGATGATTATTGGGCTAATGCTAAAAAGGGTAATTTTGATATGATGTTAACCTATTCTTGGGGAGCACCATGGGACCCTCATGCTTGGATGTCGGCATTAACTGCCAAGGCAGATCATGGACATCCAGAAAATATAGCTTTAGAAAATCTAGCAACTAAAACTGAAATGGATAGACTTATTAAGTCAGCTCTAGTAGATCCTAAGGAAGAAAATGTTGATAGAGACTATAAGAAGGTTCTTGAATTATTGCATGATGAGGCTGTATATATCCCATTAACTTATCAATCGGTGATTTCTGTTTATAGGAAAGGTGATTTTAAAACCATGCGCTTTGCGCCAGAAGAAAATTCATTCCCATTACGCTATATAGAAAAAAATAATGTATCTAAG

SEQ ID NO: 11676 - protein, 538 aa, Streptococcus agalactiae
MRRNILLSITCLLMVTLTACHSQDSKSHKLNSDKLTLAWGEDFGDVNPHRYNPDQFVIQDMVYEGLVRYGDNGKIEPALAESWSISQDGKTYTFKLRNAKYSDGSNFNAANVKRNFDSIFSKSNRGNHNWFNLTNQLENYRALNQSTFEIKLKQAYSATLYDLSMIRPIRFLSDNAFPKGDDTTKKNVKKPIGTGQWVVKSKKQNEYITFKRNENYWGKKPKLKEVTVKVIPDAQTRALAFESGDVDLIYGNGIIGLDTFAQYTKDKKYVTAVSQPMSTRLLLLNAKESIFQDKKVRQAMNHAIDKVSIAKNTFRGTEKPADTIFSKSTPHSDAKLNTYSYNVDKANQLLDQAGWKLGKDKVREKDGKALTLRLPYIATKATDKDLVTYFQGEWRKIGINVSLIAMEEDDYWANAKKGNFDMMLTYSWGAPWDPHAWMSALTAKADHGHPENIALENLATKTEMDRLIKSALVDPKEENVDRDYKKVLELLHDEAVYIPLTYQSVISVYRKGDFKTMRFAPEENSFPLRYIEKNNVSK

SEQ ID NO: 11677 - protein, 687 aa, Streptococcus agalactiae
ATGGCTAAAAAAAGTAAAAACTTACGTGCTGCTCTTGAGAAAATTGACAGCACTAAAGCATACAGCGTAGAAGAAGCTGTAGCTCTTGCAAAAGAAACTAACTTTGCTAAATTTGATGCAACTGTTGAAGTTTCTTATAATCTTAACATTGACGTTAAAAAAGCTGACCAACAAATCCGTGGTGCTATGGTTTTACCAGCAGGTACTGGTAAAACTTCACGTGTTCTTGTTTTTGCTCGTGGCGCTAAAGCTGAAGAAGCTAAAGCAGCAGGTGCAGACTTTGTCGGTGAAGATGACTTAGTTGCTAAAATCCAAGGTGGATGGCTTGACTTTGATGTTGTTATCGCAACACCAGATATGATGGCACTTGTTGGACGTCTTGGACGTGTCCTTGGACCTCGTAACTTGATGCCAAATCCTAAAACTGGTACAGTAACTATGGACGTTGCTAAAGCAGTTGAAGAGTCTAAAGGTGGTAAAATTACTTACCGTGCTGATAAAGCAGGTAACGTCCAAGCCCTTATTGGTAAAGTTTCATTTGATGATGCTAAATTAGTTGATAACTTCAAAGCATTTAATGATGTTATTGTTAAAGCTAAACCAGCTACTGCAAAAGGAACTTACATCACAAACCTTTCAATTACAACAACACAAGGTGTTGGTATCAAAGTTGATCCTAACTCACTT

SEQ ID NO: 11678 - protein, 229 aa, Streptococcus agalactiae; identical to SEQ ID NO: 2794

SEQ ID NO: 11679 - protein, 423 aa, Streptococcus agalactiae
ATGGCTAAAAAAGTTGAAAAACTTGTAAAACTTCAAATTCCTGCTGGTAAAGCAACTCCAGCTCCACCAGTTGGACCAGCACTTGGTCAAGCAGGAATCAACATCATGGGATTCACTAAAGAGTTTAACGCTCGTACAGCTGATCAAGCTGGTATGATTATTCCAGTTGTTATCTCAGTATATGAAGACAAATCATTTGATTTCATCACTAAAACACCACCAGCTGCTGTTCTTTTGAAAAAAGCTGCAGGTGTTGAAAAAGGATCAGGTGAACCTAACAAAACTAAAGTTGCAACAGTTACTCGTGCGCAAGTACAAGAAATTGCTGAAACTAAAATGCCAGATTTAAACGCTGCAAACCTTGAGTCTGCAATGCGTATGATCGAAGGTACTGCTCGTTCTATGGGATTCACTGTTACTGAC

SEQ ID NO: 11680 - protein, 141 aa, Streptococcus agalactiae
MAKKVEKLVKLQIPAGKATPAPPVGPALGQAGINIMGFTKEFNARTADQAGMIIPVVISVYEDKSFDFITKTPPAAVLLKKAAGVEKGSGEPNKTKVATVTRAQVQEIAETKMPDLNAANLESAMRMIEGTARSMGFTVTD

SEQ ID NO: 11681 - protein, 1380 aa, Streptococcus agalactiae
ATGTTAACGACAAAGGAAAATTTCAAAGGAAATAACAAATTATTGGTGGGAATTGTACTCGCTGTACTATCATTTTGGTTATTTGCACAGTCTATTTTAAACATGGGACCAGATGTTCAGTCATCATTAGGTATTTCATCTGGTGCAATGGATATTGGTGTCTCAAGTACGGCATTGTTTTCAGGTTTATTTATTGTTGTAACTGGTGGTTTAGCAGATAAACTTGGTCGAGTTAAATTTACTTTTATTGGTCTTTGCTTAAATATTATTGGTTCTCTACTAATTGTTTTAGCTAATGGAGCAGTGCTATTTATTATGGGACGTATTTTTCAAGGATTGGCAGCAGCTTTTATTATGCCATCAACAATGGCCTTGGTTAAAACGTACTACGATGGTAAAGATAGACAACGTGCAGTTAGTTTCTGGTCAATCGGATCATGGGGTGGCTCAGGTCTATGTTCTTATTTTGGTGGAGCGGTGGCAAGTACTCTAGGTTGGCGTTATGTCTTTATCTTTTCAATCATCGCATCAGTAGTTAGTTTTCTATTAATTTTAGGAACCCCAGAAAGTAAAAATGTTGGACAAAAAACTCACTTTGATTACCTTGGTTTAATTATTTTTATTATTTCAATGTTATCGTTAAATATTGGGATATCTATGGCTCAAGAACATGGATTGATGAACGTTATTCCATTGAGTCTTTTTACAGTAATGCTTATTGGATTTGTTCTGTTTTATTATGTTGAAACACGTAAATCTAATAGTTTTATTGACTTTCATCTGTTTGAAAATCGATTTTACTTAGGCGCAACAATATCAAATTTCTTATTGAATGCAGTTGCAGGAACTCTGATTGTTATTAATACTTACATGCAACAAGGTCGCCAGCTAACACCAAAGGTTACAGGTGAAATGTCTTTAGGCTATTTGGTTTGTGTACTAATTGCTATCCGAGTTGGTGAGAAAATTTTACAACGCTTTGGTGCCCGTAAGCCAATGCTTTTGGGAGCTATGAGTACATTTGTTGGGATATTTTTAATGACTTTGGTCAATATTCAAGGCCCTTTGTATCTTGTGTTAGTCTTTGTTGGTTATGCTTTATTTGGGACAGGCTTGGGGATCTATGCGACACCATCAACGGATACAGCTATTTCTAGTATTCCTAATGAAAAAGTAGGTTCTGCATCTGGAATTTACAAAATGGCAAGTTCACTAGGTGGTGCAATTGGTGTAGCAACTTCAATTGCGATTTATCATGCTTTTTCTGGTAATGCAGATTTTCACAAAGCAGCTTTGTGTGGATTAATTTTAAACCTAGTTTTTTGTAGTCTATCGATCTTATCAATTCTTTTTGTTATCCCTAAGAAAATTGAGGATAAA

SEQ ID NO: 11682 - protein, 460 aa, Streptococcus agalactiae
MLTTKENFKGNNKLLVGIVLAVLSFWLFAQSILNMGPDVQSSLGISSGAMDIGVSSTALFSGLFIVVTGGLADKLGRVKFTFIGLCLNIIGSLLIVLANGAVLFIMGRIFQGLAAAFIMPSTMALVKTYYDGKDRQRAVSFWSIGSWGGSGLCSYFGGAVASTLGWRYVFIFSIIASVVSFLLILGTPESKNVGQKTHFDYLGLIIFIISMLSLNIGISMAQEHGLMNVIPLSLFTVMLIGFVLFYYVETRKSNSFIDFHLFENRFYLGATISNFLLNAVAGTLIVINTYMQQGRQLTPKVTGEMSLGYLVCVLIAIRVGEKILQRFGARKPMLLGAMSTFVGIFLMTLVNIQGPLYLVLVFVGYALFGTGLGIYATPSTDTAISSIPNEKVGSASGIYKMASSLGGAIGVATSIAIYHAFSGNADFHKAALCGLILNLVFCSLSILSILFVIPKKIEDK

SEQ ID NO: 11683 - protein, 1211 aa, Streptococcus agalactiae
ATGGCCAATGCATCTTTGCGACATCAATTATTTGAAAAACTTGACCAAAAATGTGATCAAATGGTTGCTATTCGTCGCTATTTACATGAAAATCCCGAATTATCATTTAAAGAGACAAAAACAGCAGCTTATATTTCAGATTTTTATAAAGGTAAGGACTGTCATGTTCAGACACAATTTGGTGGTATGAATGGCGTCGTAGTCGATATCTATGGTGATAAAGCGACAGATAAGCCCATCAAACACATTGCTTTGAGAGCCGACTTTGATGCTCTTCCAATTCAGGAAGAGACAGGGCTTTCTTTTGCTTCAAAAACAGCGGGCGTCATGCATGCTTGTGGACATGATGCCCATACAGCTTATTTATTGATTTTGGCTGAGAGCTTGATTGAATTAAAATCAGAATTTTCAGGTCATATCCGTATCTTACATCAACCGGCTGAAGAGGTACCACCGGGCGGAGCAAAAGCAATGATTGAAGCAGGATGTTTAGATGGCATTGATGCTGTCCTTGGTATCCATGTTATGTCAACGATGGAAGAGGGGACGGTACAATATCACGCAGGTCCCATTCAAACAGGGCGTGCCACTTTTAAAGTTATTTTGCAAGGTAAGGGTGGACATGGTTCCATGCCACATCGTGCAAATGATACAATTGTTGCAGCGTCTAGTTTTGTTATGGCAGCGCAAACGATTGTCAGTCGTCGAGTTAATCCATTTGACACAGCGGTAGTTACTATCGGATCTTTTGATGGTAAAGGTTCCGCTAATGTGATCAAAGATAGTGTAACCTTAGAAGGTGATGTGCGCGTGATGTCTGAAGAGACACGAGGTGTTGTTGAGGAGGAATTTAAGCGTATTCTAGAGGGAATAGCACAAACTTATGGTGTTAGTTATCAGTTAGACTATCAGAATGATTATCCTGTTTTAGTTAATAACAGTGAAGTGACACAGAAAGTTGCAAATAGTTTAAAATCTGTTGCTATAAAAGAAATTTTAGACGTCATTGATTGCGATCCTCAAACGCCGTCTGAAGATTTTGCCTATTATGCTCAAACAATCCCAGTTGCTTCTTCTATGTTGGAGCACACGAAGAGGGGCAACCATATTACCCACATCATCATCCAAAATTCCAAATTGCAGAATCATCATTGATGGTATCTGCTAAATCAATGGCAACTGCAGCGCTTGCTATGCTTGAAGAAGGAGAA

SEQ ID NO: 11684 - protein, 404 aa, Streptococcus agalactiae
MANASLRHQLFEKLDQKCDQMVAIRRYLHENPELSFKETKTAAYISDFYKGKDCHVQTQFGGMNGVVVDIYGDKATDKPIKHIALRADFDALPIQEETGLSFASKTAGVMHACGHDAHTAYLLILAESLIELKSEFSGHIRILHQPAEEVPPGGAKAMIEAGCLDGIDAVLGIHVMSTMEEGTVQYHAGPIQTGRATFKVILQGKGGHGSMPHRANDTIVAASSFVMAAQTIVSRRVNPFDTAVVTIGSFDGKGSANVIKDSVTLEGDVRVMSEETRGVVEEEFKRILEGIAQTYGVSYQLDYQNDYPVLVNNSEVTQKVANSLKSVAIKEILDVIDCDPQTPSEDFAYYAQTIPACFFYVGAHEEGQPYYPHHHPKFQIAESSLMVSAKSMATAALAMLEEGE

SEQ ID NO: 11685 - protein, 903 aa, Streptococcus agalactiae
TTGAAAAATCAACAAAAATTAATGTATCTAGAGAGTATCGAGCTATACTCAAACATCACTAAAGCCGCTGCACACCTTTTTATTTCTCAACCTTACCTAAGCAAAGTGATCAAGCAATTAGAAAATGAGTTAGAAATAAAACTCATCCAGAGCCAAGGACACCAAACCTTTTTAACTTATGCTGGACAAAGATATCTATTCTACCTAAAAGAAATTGATATGATTGAGCGTCAAATGGCCAAAGAACTATATCTCATCCGTTCTGATAAAAAAGGAGAAATCACACTTGGGATTAACTCTGGCTTAGCAAGTTCTATTCTGGCAAATGTACTTCCAAAATTTAACTTGGAGCACCCAGAAATTTCTGTCAAATTACTCGAAAACAATCAAAATATTTCTGAACAATTGGTAGCGAGTGGTGATATTGACCTAGCTGTTGGGATGGCTCCTATCCTTTATAAAGATGGAATTGCATCAACCACTATTTACCGCGACGAATTGTTTTTAATGATACCTACCACCAGTCAACTCTACAACGCTGAAAAACGTGGACAGATTATTCCTTTTGAATATCCTATTTCAGTTCTAGACAATGAACCTCTTATCCTAACACCATTAGAGTACGGAATTGGCAAAACAATTGCACAATTCTATGAGCTTCATCACATGTCATTAAATCAGATGATTACAACTAGTACCGTTCCTACAGCAGCTAGCCTATCTTTGTCAGGGATGGGAGCAACATTTGTTCCACAAACTCTCATTCATCGCTATTTGGATAAAGAGTGCAATGTCTACCATTTTCATAAGAATAAGTTATTTTCAGAGTACATTATGATTTATAAAAAAGATGTTGAATTATCTGGAATTGCTCTCCTACTTTATAAAGCTTTTTTAACCAAG

SEQ ID NO: 11686 - protein, 301 aa, Streptococcus agalactiae; identical to SEQ ID NO: 2806

SEQ ID NO: 11687 - protein, 1713 aa, Streptococcus agalactiae
ATGCATATTGAGACTGTTATTGATTTCAAAGAATTAGGAAAAAGATATCGTTTTAAAAATCCTACAAAAGAATTAATAGCTGATACTTTAGAACAAGTCTTAGAAGTGATAAAAGAAGTTGATTATTATCAATCTCAAAATTATTATGTTGTTGGTTATTTATCTTATGAAGCATCTGCTGCTTTTGATTCACATTTTAAAGTTTCTCAACAGAAGTTGGCTGGAGAACATCTAGCTTATTTTACAGTACATAAAGATTGTGAGAACGAAGCTTTTCCTTTAAGTTATGAAAATGTTAGATTAGCAGATAATTGGACTGCTAATGTTTCTGAGCAAGAATATCAAGAGGCAATTGCTAATATTAAAGGACAAATTAGACAAGGAAATACTTATCAAGTAAATTATACACTAGAGCTTAGCCAACAATTATGCTCGGATCCCTTTAGTGTTTATGAACGCCTAATGGTAGAACAAGGAGCGGGATACAATGCTTATATTGCCTACGACGATAAAAGGATTTTATCTGTAAGCCCGGAATTGTTCTTTAAGAAGAAGGATGAAGTCTTAACAACTAGACCAATGAAGGGAACAAGCGCTAGAAAGCCTACTTATCAAGAAGATGTGGCGGAGCGAGATTGGTTGGCAAATGATCCTAAAAATCGTTCTGAAAATATGATGATTGTTGATTTATTAAGAAACGATATGGGCCGTATCTGTGATGTTGGAACAGTTAAGGTAAAAAAACTATGTCAAGTGGAGCAGTATGCAACTGTGTGGCAAATGACATCAACTATTGAAGGAGTTTTATCGCCAGAAGTGACACTTATGTCTATTTTTCAAGCTCTATATCCTTGTGGATCTATCACTGGAGCTCCTAAGATATCAACAATGGCTATTATTAATGAGTTGGAAAAACGGCCAAGAGGTATTTATTGTGGGACGATAGGACTTTGCATGCCAGACGGACAAGCTATTTTTAACGTTCCTATTCGCACAGTACAAATGAAAGGTCAACAAGCCTATTACGGCGTTGGTGGAGGTATTACGTGGGAGAGCCAGACAGATTCTGAATATGAAGAAACCCGTCAAAAATCAGCTGTTTTAACACGTGTCAATCCAAAATTTCAATTAATAACTACAGGAAGAGTGACTGAAAATAAACTTCTTTTCTCTCAACAACATGTCGAGAGATTAGTTGAATCAGCGTCTTATTTTGCTTATTCTTTTGATAAAAGTAAATTCGAAAGGGAACTGAAAAAATACCTTCATCAGCTAGATGAGAAGGATTACCGCTTGAAAATAATGCTTGATAAAACTGGTAAGGTAACGTTTGAGGTAAAACAACTAGTGAATTTATCAAAAAAGTTTTTAACGGCAGAGGTGGTCGTACAAGACTACCCTATTAAATTATCCCCGTTTACTTATTTTAAAACTTCTTATCGCCCACATATTATTGAAGGTCAGAATGAAAAGATATTTGTATCTCCTGAGGGGTTGCTATTGGAAACAAGTATTGGGAATATTGTTTTAGAAAAAAATGGAAGGTTTTTAACCCCAGATTTATCAGAAGGAGGGTTGAATGGGATTTATCGTCGTCATCTCCTTGAAAACCAAAAAGTAATTGAAGCACCACTAACTTTAAAAGATTTAGAATCAGCCGATGCTGTATACGCCTGTAATGCTGTTAGAGGGCTTTATCCTCTAAACCTAAAG

SEQ ID NO: 11688 - protein, 571 aa, Streptococcus agalactiae
MHIETVIDFKELGKRYRFKNPTKELIADTLEQVLEVIKEVDYYQSQNYYVVGYLSYEASAAFDSHFKVSQQKLAGEHLAYFTVHKDCENEAFPLSYENVRLADNWTANVSEQEYQEAIANIKGQIRQGNTYQVNYTLELSQQLCSDPFSVYERLMVEQGAGYNAYIAYDDKRILSVSPELFFKKKDEVLTTRPMKGTSARKPTYQEDVAERDWLANDPKNRSENMMIVDLLRNDMGRICDVGTVKVKKLCQVEQYATVWQMTSTIEGVLSPEVTLMSIFQALYPCGSITGAPKISTMAIINELEKRPRGIYCGTIGLCMPDGQAIFNVPIRTVQMKGQQAYYGVGGGITWESQTDSEYEETRQKSAVLTRVNPKFQLITTGRVTENKLLFSQQHVERLVESASYFAYSFDKSKFERELKKYLHQLDEKDYRLKIMLDKTGKVTFEVKQLVNLSKKFLTAEVVVQDYPIKLSPFTYFKTSYRPHIIEGQNEKIFVSPEGLLLETSIGNIVLEKNGRFLTPDLSEGGLNGIYRRHLLENQKVIEAPLTLKDLESADAVYACNAVRGLYPLNLK

SEQ ID NO: 11689 - protein, 503 aa, Streptococcus agalactiae
ATTTTCTGTTGATTAAAGCAAATGTTCCGTCGCGTATGCATTTGCTGTTAAGTGGTACTGATAGCCGTACGATCCTTGATGAAAATGGTGCTGAAAAGCTCTTGGGACGGGGTGACATGCTCTTTAAGCCTATTGATGAGAATCATCCAGTACGACTACAAGGTTCCTTTATTTCAGATGATGATGTTGAAAGGATCGTTGGTTTTATCAAAGACCAAGCCGAGGCTGACTATGATGATGCCTTTGATCCTGGAGAAGTATCTGAAACAGATAACGGCTCTGGTGGTGGCGGCGGAGTACCTGAAAGTGATCCTCTTTTTGAAGAAGCCAAGGGACTCGTTTTAGAGACGCAAAAAGCAAGTGCCTCAATGATTCAACGCCGATTGTCTGTTGGTTTCAATAGAGCAACAAGACTAATGGAAGAATTAGAAGCAGCGGGGGTTATTGGTCCAGCAGAAGGAACCAAGCCACGAAAAGTTTTAATGACTCCAACTCCGAGTGAA

SEQ ID NO: 11690 - protein, 170 aa, Streptococcus agalactiae
  VARIANT 4: Xaa = Any Amino Acid
MYSXLIKANVPSRIAFAVSSGTDSRTILDENGAEKLLGRGDMLFKPIDENHPVRLQGSFISDDDVERIVGFIKDQAEADYDDAFDPGEVSETDNGSGGGGGVPESDPLFEEAKGLVLETQKASASMIQRRLSVGFNRATRLMEELEAAGVIGPAEGTKPRKVLMTPTPSE

SEQ ID NO: 11691 - protein, 2448 aa, Streptococcus agalactiae
ATGGTATTTATGGCAAATAAGAAAAAAACAAAAGGAAAGAAAACCAGAAGACCTACTAAGGCAGAAATAGAGCGTCAAAGAGCTATTCAAAGGATGATTACTGCTCTTGTTTTAACAATTATTCTCTTCTTTGGTATTATCAGATTAGGTATTTTTGGTATTACAGTCTATAACGTCATCCGTTTTATGGTAGGTAGCTTGGCTTACTTATTTATTGCGGCAACTTTAATCTACCTTTATTTCTTTAAATGGTTGCGAAAGAAAGATAGCTTAGTAGCAGGTTTTTTGATAGCTTCTTTAGGATTATTGATTGAGTGGCATGCTTACCTTTTCTCAATGCCTATTTTGAAAGATAAAGAAATTTTGCGTTCAACTGCTCGATTAATTGTGTCTGATTTAATGCAATTTAAAATCACTGTTTTTGCCGGTGGAGGTATGTTGGGTGCTTTGATTTACAAGCCAATTGCTTTTCTCTTTTCTAATATTGGTGCCTATATGATTGGTGTTCTCTTCATCATTTTGGGTCTCTTTTTAATGAGTTCTCTGGAAGTTTATGACATCGTCGAATTTATTAGAGCTTTTAAAAATAAAGTGGCAGAGAAGCACGAGCAAAATAAAAAGGAGCGTTTTGCTAAGCGAGAGATGAAAAAAGCAATCGCTGAACAAGAGCGCATAGAGCGTCAAAAAGCTGAAGAAGAAGCTTATTTAGCTTCGGTTAATGTAGACCCTGAAACGGGTGAGATTCTAGAGGATCAAGCTGAGGACAATTTGGATGATGCGCTACCACCTGAGGTAAGTGAAACATCAACTCCGGTATTTGAGCCAGAGATCCTTGCTTATGAGACATCGCCTCAAAATGATCCTTTACCAGTAGAGCCGACAATTTATTTAGAAGACTATGATTCGCCGATTCCTAATATGAGAGAAAATGATGAGGAAATGGTTTATGATTTAGATGATGATGTAGATGATAGTGATATAGAAAATGTCGACTTTACACCTAAAACGACACTGGTTTATAAATTACCAACGATAGATTTATTTGCACCAGATAAGCCTAAAAATCAATCCAAAGAAAAGGATTTAGTCCGAAAGAATATCAGAGTTTTAGAAGAAACATTTAGAAGTTTTGGTATCGATGTAAAAGTAGAACGTGCTGAAATTGGACCATCAGTTACTAAATATGAAATTAAACCAGCAGTTGGAGTTCGTGTGAATCGTATTTCAAATCTATCTGACGACCTAGCTCTTGCTCTTGCAGCAAAAGATGTGCGTATAGAAGCACCAATTCCTGGAAAATCATTAATAGGTATTGAAGTTCCTAACTCAGAAATTGCAACGGTTTCTTTCCGCGAACTTTGGGAACAATCTGATGCCAATCCTGAAAACCTTTTAGAAGTACCACTAGGAAAAGCTGTTAACGGCAATGCTCGCAGTTTTAACTTAGCTAGAATGCCGCATCTTTTGGTAGCTGGTTCAACTGGTTCAGGTAAATCTGTGGCAGTTAATGGAATTATTTCAAGTATTTTGATGAAGGCACGTCCAGATCAAGTTAAGTTTATGATGATTGATCCCAAAATGGTTGAATTATCTGTTTATAATGATATTCCACATTTATTAATCCCTGTTGTAACCAATCCGCGTAAAGCAAGTAAGGCACTCCAAAAAGTTGTTGATGAAATGGAAAATCGATACGAGTTATTTAGCAAAATTGGTGTGCGTAATATAGCAGGTTATAATACAAAGGTTGAAGAGTTTAATGCTTCCTCTGAGCAAAAACAAATACCTTTGCCTTTAATCGTTGTCATTGTAGATGAATTGGCTGACTTGATGATGGTTGCTAGTAAAGAAGTTGAAGATGCTATTATTCGTTTGGGGCAAAAAGCACGTGCTGCAGGTATCCATATGATTCTTGCAACTCAACGTCCATCCGTAGATGTTATTTCTGGTTTGATTAAAGCAAATGTTCCGTCGCGTATTGCATTTGCTGTTTCAAGTGGTACTGATAGCCGTACGATCCTTGATGAAAATGGTGCTGAAAAGCTCTTGGGACGGGGTGACATGCTCTTTAAGCCTATTGATGAGAATCATCCAGTACGACTACAAGGTTCCTTTATTTCAGATGATGATGTTGAAAGGATCGTTGGTTTTATCAAAGACCAAGCCGAGGCTGACTATGATGATGCCTTTGATCCTGGAGAAGTATCTGAAACAGATAACGGCTCTGGTGGTGGCGGCGGAGTACCTGAAAGTGATCCTCTTTTTGAAGAAGCCAAGGGACTCGTTTTAGAGACGCAAAAAGCAAGTGCCTCAATGATTCAACGCCGATTGTCTGTTGGTTTCAATAGAGCAACAAGACTAATGGAAGAATTAGAAGCAGCGGGGGTTATTGGTCCAGCAGAAGGAACCAAGCCACGAAAAGTTTTAATGACTCCAACTCCGAGTGAA

SEQ ID NO: 11692 - protein, 816 aa, Streptococcus agalactiae
MVFMANKKKTKGKKTRRPTKAEIERQRAIQRMITALVLTIILFFGIIRLGIFGITVYNVIRFMVGSLAYLFIAATLIYLYFFKWLRKKDSLVAGFLIASLGLLIEWHAYLFSMPILKDKEILRSTARLIVSDLMQFKITVFAGGGMLGALIYKPIAFLFSNIGAYMIGVLFIILGLFLMSSLEVYDIVEFIRAFKNKVAEKHEQNKKERFAKREMKKAIAEQERIERQKAEEEAYLASVNVDPETGEILEDQAEDNLDDALPPEVSETSTPVFEPEILAYETSPQNDPLPVEPTIYLEDYDSPIPNMRENDEEMVYDLDDDVDDSDIENVDFTPKTTLVYKLPTIDLFAPDKPKNQSKEKDLVRKNIRVLEETFRSFGIDVKVERAEIGPSVTKYEIKPAVGVRVNRISNLSDDLALALAAKDVRIEAPIPGKSLIGIEVPNSEIATVSFRELWEQSDANPENLLEVPLGKAVNGNARSFNLARMPHLLVAGSTGSGKSVAVNGIISSILMKARPDQVKFMMIDPKMVELSVYNDIPHLLIPVVTNPRKASKALQKVVDEMENRYELFSKIGVRNIAGYNTKVEEFNASSEQKQIPLPLIVVIVDELADLMMVASKEVEDAIIRLGQKARAAGIHMILATQRPSVDVISGLIKANVPSRIAFAVSSGTDSRTILDENGAEKLLGRGDMLFKPIDENHPVRLQGSFISDDDVERIVGFIKDQAEADYDDAFDPGEVSETDNGSGGGGGVPESDPLFEEAKGLVLETQKASASMIQRRLSVGFNRATRLMEELEAAGVIGPAEGTKPRKVLMTPTPSE

SEQ ID NO: 11693 - protein, 801 aa, Streptococcus agalactiae
ATGAAAAAAATTATTTATCTTGGTTTAGCCTGTGTCAGTATATTAACTTTAAGTGGTTGCGAGTCAATTGAGCGTTCTCTAAAAGGAGACCGTTATGTTGACCAAAAACTAGCTGAAAACTCTTCAAAGGAAGCTACTGAACAACTAAACAAAAAAACTAAGCAAGCCTTAAAAGCTGATAAAAAAGCTTTTCCTCAATTGGACAAGGCTGTTGCCAAAAACGAGGCACAAGTGCTTATAAAAACCTCTAAAGGTGATATAAATATCAAGTTATTTCCAAAATATGCTCCTTTAGCTGTTGAAAATTTTCTAACACATGCAAAAGAAGGATACTATAATGGGTTAAGTTTCCACAGAGTTATCAAAGATTTTATGATACAATCTGGTGACCCTAATGGAGACGGGACCGGTGGAAAATCTATATGGAATAGCAAAGATAAAAAGAAAGATTCTGGAAATGGTTTTGTTAATGAAATATCCCCTTACCTCTACAATATCAGGGGAAGTTTAGCAATGGCAAATGCTGGAGCTGATACTAATGGCAGCCAATTCTTTATCAATCAAAGCCAGCAAGATCATTCCAAACAACTGTCAGATAAAAAAGTTCCTAAGGTGATTATTAAAGCCTATTCAGAGGGAGGAAATCCAAGTTTAGATGGTGGTTATACCGTCTTTGGACAAGTAATCTCTGGCATGGAAACTGTGGATAAAATTGCTTCGGTAGAAGTTACAAAATCAGATCAACCAAAAGAAAAAATTACTATTACAAGTATCAAAGTTATTAAAGACTACAAATTTAAA

SEQ ID NO: 11694 - protein, 267 aa, Streptococcus agalactiae
MKKIIYLGLACVSILTLSGCESIERSLKGDRYVDQKLAENSSKEATEQLNKKTKQALKADKKAFPQLDKAVAKNEAQVLIKTSKGDINIKLFPKYAPLAVENFLTHAKEGYYNGLSFHRVIKDFMIQSGDPNGDGTGGKSIWNSKDKKKDSGNGFVNEISPYLYNIRGSLAMANAGADTNGSQFFINQSQQDHSKQLSDKKVPKVIIKAYSEGGNPSLDGGYTVFGQVISGMETVDKIASVEVTKSDQPKEKITITSIKVIKDYKFK

SEQ ID NO: 11695 - protein, 831 aa, Streptococcus agalactiae
ATGTTTACGAAATTTTTTGAAGGCTTATTGACTTATCATTTTTTGCAAAATGCTTTTATAACTGCAATTGTGATTGGTATTGTAGCGGGTGCAGTAGGCTGTTTTATTATCTTGCGCTCAATGTCTTTGATGGGTGATGCTATTTCTCACGCTGTTCTACCAGGTGTTGCTATATCTTTTATTTTAGGGATTAACTTTTTTATAGGTGCTATTGTCTTTGGTTTGTTGTCTTCGATTATCATTACTTATATTAAAGAAAATAGTGTCATAAAAGGAGATACTGCTATTGGAATTACTTTTTCGTCCTTTTTAGCCTTAGGTATCATTTTAATTGGACTTGCTAATAGTACAACTGACCTCTTTCATATTCTTTTTGGGAATATTTTGGCAGTACAAGATAGTGATAAATATATGACTATTATTGTGGGATTAATTGTACTGACTCTGATTACTATCTTCTTTAAAGAATTATTATTGACTTCTTTTGATCCTGTTTTAGCAAAATCAATGGGAATGAGAGTTTCTTTTTATCATTATTTATTGATGATTTTGTTAACATTAGTTGCAGTAACAGCTATGCAGAGTGTGGGAACAATATTGATCGTAGCACTTTTAATTACACCAGCTGCAACAGCATATCTTTATGTTAAAAGTCTCAGAACAATGTTGTTTTTATCATCTGCATTAGGAGCAGTAGCATCTGTTCTGGGGTTATATATCGGTTATACATTTAATATTGCCGCAGGATCAAGTATTGTTTTAACATCTACTTTTATGTTTTTACTTGCTTTCCTATTTTCTCCTAAACAAAGTTTGTTTAAAAAGAAACAA

SEQ ID NO: 11696 - protein, 277 aa, Streptococcus agalactiae
MFTKFFEGLLTYHFLQNAFITAIVIGIVAGAVGCFIILRSMSLMGDAISHAVLPGVAISFILGINFFIGAIVFGLLSSIIITYIKENSVIKGDTAIGITFSSFLALGIILIGLANSTTDLFHILFGNILAVQDSDKYMTIIVGLIVLTLITIFFKELLLTSFDPVLAKSMGMRVSFYHYLLMILLTLVAVTAMQSVGTILIVALLITPAATAYLYVKSLRTMLFLSSALGAVASVLGLYIGYTFNIAAGSSIVLTSTFMFLLAFLFSPKQSLFKKKQ

SEQ ID NO: 11697 - protein, 714 aa, Streptococcus agalactiae; identical to SEQ ID NO: 7453

SEQ ID NO: 11698 - protein, 238 aa, Streptococcus agalactiae; identical to SEQ ID NO: 7454

SEQ ID NO: 11699 - protein, 504 aa, Streptococcus agalactiae
TTGAACCTTGAAAATGGTATTATTTACTCAAAAAATATTGCTAAGCAATTAATTGCTAAAGATCCAAAAAACAAAGCTACTTATGAGAAAAACAGAGATGCTTATGTAGCTAAATTAGAAAAATTGGATAAAGAAGCAAAATCTAAATTTAATGCCATTCCAGCTAATAAAAAATTAATTGTTACTAGTGAAGGTTGCTTTAAATATTTCTCAAAAGCTTATGGAGTTCCATCAGCATACATCTGGGAAATTAACACTGAAGAAGAAGGTACACCAGATCAAATTACTAGCTTAGTTAAGAAATTAAAACAAGTAAGACCTTCAGCTTTATTCGTTGAATCAAGTGTTGACAAGCGTCCTATGAAATCTGTTTCAAGAGAATCAGGTATCCCAATTTACGCAGAAATCTTCACAGACTCAATTGCTAAAAAAGGTCAAAAGGGTGACAGCTACTACGCTATGATGAAATGGAATCTTGATAAGATTGCAGAAGGTTTAGCAAAA

SEQ ID NO: 11700 - protein, 168 aa, Streptococcus agalactiae
MNLENGIIYSKNIAKQLIAKDPKNKATYEKNRDAYVAKLEKLDKEAKSKFNAIPANKKLIVTSEGCFKYFSKAYGVPSAYIWEINTEEEGTPDQITSLVKKLKQVRPSALFVESSVDKRPMKSVSRESGIPIYAEIFTDSIAKKGQKGDSYYAMMKWNLDKIAEGLAK

SEQ ID NO: 11701 - protein, 645 aa, Streptococcus agalactiae
ATGACTCCAAATAAAGAAGATTACCTAAAATGCATTCATGAATTAGGTGAAAAAAACAACAAAATTTCCAATAAGAAAATCGCTGAAATGATGCAAGTCTCGGCTCCTGCCGTGTCAGAAATGATTAAAAAAATGATAAGTGAACAGCTGATTGTTAAAGATAAAGATTTAGGATATTATCTTACTAAACAAGGTTTATTAGTTGTTTCTGACCTTTACCGTAAACATCGTCTAGTAGAGGTATTTTTAGTTAACCATTTGCACTATACTGCTGATGATATTCATAAAGAAGCGGAAGTTTTAGAACATACTGTATCAACAACTTTTGTTGATCAATTAGAGAAGTTGTTAGACTTTCCACAATTTTGTCCACACGGTGGGACTATTCCTAAAAAGGGAGAGTTTTTAGTAGAAATTAACCAAATGACATTGGACCAAATTAGTCAGCTTGGCACGTATGTTATCAGTCGTGTTCATGATGATTTTCAGCTACTGAAATACCTCGAACAACACCGTTTGCATATCAACGATACCATTGAATTGACACAAATTGACCCTTATGCAAAAACCTATCACATCATCTATAACGATGAAAATCTAACAATCCCTGAGCGTATCGCAAGTCAAATATATGTATCTGCTACA

SEQ ID NO: 11702 - protein, 215 aa, Streptococcus agalactiae
MTPNKEDYLKCIHELGEKNNKISNKKIAEMMQVSAPAVSEMIKKMISEQLIVKDKDLGYYLTKQGLLVVSDLYRKHRLVEVFLVNHLHYTADDIHKEAEVLEHTVSTTFVDQLEKLLDFPQFCPHGGTIPKKGEFLVEINQMTLDQISQLGTYVISRVHDDFQLLKYLEQHRLHINDTIELTQIDPYAKTYHIIYNDENLTIPERIASQIYVSAT

SEQ ID NO: 11703 - protein, 687 aa, Streptococcus agalactiae
ATGAAAATTGGAATTATTGCAGCCATGGAGGAAGAGTTAAAACTCCTTGTGGAAAATCTTGAGGATAAATCTCAAGAAACAGTATTATCAAATGTATATTACAGTGGACGTTATGGTGAACATGAGCTTGTTTTAGTACAGTCTGGTGTTGGGAAAGTCATGTCAGCGATGAGTGTTGCTATTTTAGTAGAAAGCTTTAAAGTTGATGCTATTATTAATACAGGATCAGCTGGTGCAGTAGCAACAGGATTGAATGTAGGAGACGTCGTTGTCGCAGATACATTAGTTTATCACGATGTAGATTTAACCGCCTTTGGTTATGACTATGGACAAATGTCAATGCAGCCACTTTATTTTCATTCGGATAAGACTTTTGTTTCTACTTTTGAAGCAGTTTTATCTAAAGAAGAAATGACTAGTAAAATTGGTTTAATTGCAACTGGGGATAGTTTTATTGCTGGCCAGGAAAAGATTGATGTTATTAAGGGGCATTTTCCACAGGTTTTAGCTGTCGAGATGGAAGGTGCAGCAATTGCCCAAGCTGCTCAAGCTACAGGAAAGCCCTTTGTGGTGGTACGTGCTATGAGTGATACTGCAGCTCATGATGCCAATATCACATTTGATGAATTTATCATTGAAGCTGGTAAACGCTCAGCCCAAGTATTAATGGCATTTTTGAAAGCATTA

SEQ ID NO: 11704 - protein, 229 aa, Streptococcus agalactiae
MKIGIIAAMEEELKLLVENLEDKSQETVLSNVYYSGRYGEHELVLVQSGVGKVMSAMSVAILVESFKVDAIINTGSAGAVATGLNVGDVVVADTLVYHDVDLTAFGYDYGQMSMQPLYFHSDKTFVSTFEAVLSKEEMTSKIGLIATGDSFIAGQEKIDVIKGHFPQVLAVEMEGAAIAQAAQATGKPFVVVRAMSDTAAHDANITFDEFIIEAGKRSAQVLMAFLKAL

SEQ ID NO: 11705 - protein, 267 aa, Streptococcus agalactiae; identical to SEQ ID NO: 7461

SEQ ID NO: 11706 - protein, 89 aa, Streptococcus agalactiae; identical to SEQ ID NO: 2830

SEQ ID NO: 11707 - protein, 552 aa, Streptococcus agalactiae
ATGGATTTTGAAGAAAAAACAATCAATCGTCAAACTGTTTTTGATGGACAAATTATCAAAGTAGCTGTTGATGATGTAGAGTTGCCAAATGGATTGGGACAATCCAAACGTGAACTTGTTTTTCATGGAGGAGCTGTTGCTACTTTGGCGGTAACTCCTGAGCATAAAATTGTTTTAGTGAAACAGTATCGTAAGGCTATTGAAGGTATTTCTTACGAAATTCCAGCAGGGAAACTTGAGACGGGTGAGTCAGGTTCTAAGGAAGAAGCTGCCCTTCGGGAATTAGAAGAAGAGACTGGCTACACAGGGAATCTTGAAATTCTTTATAGTTTCTACACTGCTATTGGTTTTTGTAATGAGAAAATCGTCCTCTATCTAGCTACTGATTTACAAAAAGTTGAAAATCCTAGGCCACAAGATGATGATGAGGTCCTTGAGCTTCTAGAGTTAAGTTATGAGGATTGTATGCAAATGGTAGAAAAAGGCATGATTCAAGATGCGAAAACGATCATTGCTTTACAATATTACGGTTTAAAAATGGGAGGTCATTCT

SEQ ID NO: 11708 - protein, 184 aa, Streptococcus agalactiae; identical to SEQ ID NO: 2832

SEQ ID NO: 11709 - protein, 1377 aa, Streptococcus agalactiae
ATGTCAAATTATGCCATTATTTTAGCTGCGGGTAAGGGAACTCGCATGAAATCTGATTTACCAAAAGTTATGCATAAAGTATCTGGTATTACCATGCTTGAGCATGTTTTCCGTAGTGTGCAAGCTATTGAGCCAAGTAAAATTGTTACTGTTATTGGACATAAGGCGGAGCTTGTACGTGATGTTTTAGGTGACAAATCAGAGTTTGTAATGCAAACAGAACAGCTAGGGACTGGTCATGCTGTAATGATGGCGGAAGAAGAATTAGCGACATCAAAAGGACATACACTAGTTATTGCAGGTGATACACCCCTGATTACTGGAGAAAGTTTAAAAAACTTAATTGATTTTCATGTCAATCATAAAAACGTTGCAACAATCTTAACAGCCGATGCTGCAAATCCATTTGGATATGGTCGTATTATACGTAATTCAGATGATGAAGTTACTAAAATTGTAGAACAAAAGGATGCTAATGACTTTGAGCAGCAGGTTAAAGAAATTAATACTGGAACTTATGTTTTTGATAATCAAAGTCTATTTGAAGCACTTAAAGACATTAATACAAATAACGCTCAAGGAGAGTATTATCTAACTGATGTTATTGGAATTTTCAAAGAAGCGGGTAAAAAGGTAGGTGCCTATAAACTTCGTGACTTTGACGAAAGTCTAGGAGTTAATGATCGTGTAGCACTTGCAACTGCTGAAAAAGTGATGCGTCAGCGCATTGCACGTCAACATATGGTTAATGGGGTCACAGTGGTTAATCCTGATTCCGCTTATATTGATATTGATGTTGAGATTGGAGAAGAATCTGTAATTGAGCCCAATGTGACTTTAAAAGGACAGACGAAGATTGGTAAAGGTACTTTATTAACCAATGGTAGTTATTTAGTAGATGCTCAAGTCGGAAATGATGTTACCATCACTAATTCGATGGTTGAAGAATCCATTATTTCTGATGGAGTAACCGTAGGCCCTTATGCGCATATTAGACCAGGAACAAGTCTTGCAAAAGGTGTTCATATTGGTAATTTCGTTGAAGTAAAGGGTTCTCAAATAGGAGAGAATACGAAGGCAGGTCATTTAACTTATATCGGCAATGCAGAGGTAGGTTGTGATGTTAACTTTGGCGCAGGGACGATTACTGTCAATTATGATGGACAAAATAAATTTAAAACAGAAATCGGAAGTAATGTCTTTATCGGAAGTAATTCTACTCTGATTGCACCACTTGAAATTGGTGATAATGCTTTAACAGCAGCTGGATCTACCATCACAGATAATGTTCCAATTGATAGCATAGCTATTGGAAGAGGACGTCAAGTCAATAAAGAAGGATATGCCAATAAAAAACCACATCATCCTTCACAAAAG

SEQ ID NO: 11710 - protein, 459 aa, Streptococcus agalactiae
MSNYAIILAAGKGTRMKSDLPKVMHKVSGITMLEHVFRSVQAIEPSKIVTVIGHKAELVRDVLGDKSEFVMQTEQLGTGHAVMMAEEELATSKGHTLVIAGDTPLITGESLKNLIDFHVNHKNVATILTADAANPFGYGRIIRNSDDEVTKIVEQKDANDFEQQVKEINTGTYVFDNQSLFEALKDINTNNAQGEYYLTDVIGIFKEAGKKVGAYKLRDFDESLGVNDRVALATAEKVMRQRIARQHMVNGVTVVNPDSAYIDIDVEIGEESVIEPNVTLKGQTKIGKGTLLTNGSYLVDAQVGNDVTITNSMVEESIISDGVTVGPYAHIRPGTSLAKGVHIGNFVEVKGSQIGENTKAGHLTYIGNAEVGCDVNFGAGTITVNYDGQNKFKTEIGSNVFIGSNSTLIAPLEIGDNALTAAGSTITDNVPIDSIAIGRGRQVNKEGYANKKPHHPSQK

SEQ ID NO: 11711 - DNA, 411 bp, Streptococcus agalactiae
atggttaaagcactagaaacatacatcgtaacaaatggaaatgggcgacaagcgattgatttttataaaaatgtctttcaagctgatttagtaaatatgatgacatgggaagaaatggaccccaactgtcttgaagaccgcaaggatttaatcattaatgctcagcttatttttgatggcattcgtcttcaaatttcggatgaaaatccagatttcgtgtatcaagctggtaaaaatgttacggccgctattattgtgggtagcgtagaggaggcgcgtgaaatttatgaaaaattaaagaagaatgcacaagaagttcagttagagttacaagaaactttctggagtcctgcttacgcaaacttagtagaccaatttggtgtgatgtggcaaatttcaacagagttaaac

SEQ ID NO: 11712 - protein, 137 aa, Streptococcus agalactiae
MVKALETYIVTNGNGRQAIDFYKNVFQADLVNMMTWEEMDPNCLEDRKDLIINAQLIFDGIRLQISDENPDFVYQAGKNVTAAIIVGSVEEAREIYEKLKKNAQEVQLELQETFWSPAYANLVDQFGVMWQISTELN

SEQ ID NO: 11713 - DNA, 375 bp, Streptococcus agalactiae
atgatttcatcaattggacaggtaatgctctacgttagcaatgttgaagcatcagcagatttttggaaaaacaaggtgggttttgagcgtgttgaaaaacaaacacaaggagattatgtaacctatatagttgcaccgaagttggatagtgaagttagcttcgtcttacatgacaaagcaattatagctcaaatgagtcctgagctagatttagcaactccctctattttatttgaaactactgatattgacagtacatatcaagaattaacagcaaatgaggttatgacaaatcctattgttgatatggggagtatgagagtttttaatttttccgataatgacaataattactttgcaatccgtgaagtaaaa

SEQ ID NO: 11714 - protein, 125 aa, Streptococcus agalactiae; identical to SEQ ID NO: 2838

SEQ ID NO: 11715 - DNA, 954 bp, Streptococcus agalactiae
atgaaattagcggttttggggacaggtatgattgttaaggaagttttgcctgtcttgcagaaaattgatggtattgatttagttgctatcttatcaacagttagaagtttggagacagctaaagatctagctaaggaatataacatgtctctagctacgagtgaatataaggccgtcttggacaatgaggagattgatacagtttatattggactgccgaatcacttgcattttgactatgctaaggaggcactcttggcaggaaaacatgtcatttgtgagaagccatttacattagaagcaagtcaattagaagaacttgtatctattgccaatactaggcaattaatattactcgaagcaattacaaatcaatacttacctaattttgatcttgtaaaagaacatttaagcaaccttggtgatattaaaattgtagaatgtaactattcccaatattcatcgcgttatgatgcctttaaacgtggggaagtagcaccagctttcaatcctgaaatgggtggaggtgcgttgagagaccttaatatttataatttacatttagtaattggactttttggagaacctataacagcacagtatttaccaaatatagagcgtggtattgatacttcaggagttctagtcctagactatgggcactttaaaacagtctgtattggagcaaaagattgtagtgcagaagtaaaatctactattcaaggtgataaggggtctatagcgattttagggccaactaatactatgcctaaaatttcattaactatgaatggacaagaaagtcatgtttatcaattaaatggtgataggcaccgcatgcacgatgaatttgttatttttgaaggtattattagcaatttagattttaagcgtgctgctcaagctttagaacatagtagaacggtgatgaaagttctagatatggtaacgaaa

SEQ ID NO: 11716 - protein, 318 aa, Streptococcus agalactiae
MKLAVLGTGMIVKEVLPVLQKIDGIDLVAILSTVRSLETAKDLAKEYNMSLATSEYKAVLDNEEIDTVYIGLPNHLHFDYAKEALLAGKHVICEKPFTLEASQLEELVSIANTRQLILLEAITNQYLPNFDLVKEHLSNLGDIKIVECNYSQYSSRYDAFKRGEVAPAFNPEMGGGALRDLNIYNLHLVIGLFGEPITAQYLPNIERGIDTSGVLVLDYGHFKTVCIGAKDCSAEVKSTIQGDKGSIAILGPTNTMPKISLTMNGQESHVYQLNGDRHRMHDEFVIFEGIISNLDFKRAAQALEHSRTVMKVLDMVTK

SEQ ID NO: 11717 - DNA, 450 bp, Streptococcus agalactiae
atgaaggcacaagaattatggaataagtttaaatctttgaatccttcaatcggtgatgagatagatgcatggcaatttggagcagaaccagatcttctggcaaagttagttgtagatgggacaaaaactgcaacggcctctgcctatgatttatatgaattagatgaggaagagttaccacaagttggttcatatgatattattttggatagcaatgatgaagctatctgtattattgaaataactaaagttgatattgtcccttttaaagatgtctctgcagaccatgcttttaaagaaggagaaggagataaaacattagaatggtggagaagagctcacattgatttctttaaaccttattttgaggagtttggtttaatgtttagtgaggactctaggatagttttagaggaattccaagtggtttacccaaaggagattaacgaa

SEQ ID NO: 11718 - protein, 150 aa, Streptococcus agalactiae
MKAQELWNKFKSLNPSIGDEIDAWQFGAEPDLLAKLVVDGTKTATASAYDLYELDEEELPQVGSYDIILDSNDEAICIIEITKVDIVPFKDVSADHAFKEGEGDKTLEWWRRAHIDFFKPYFEEFGLMFSEDSRIVLEEFQVVYPKEINE

SEQ ID NO: 11719 - DNA, 696 bp, Streptococcus agalactiae
atgactaaagttgttttagtgacgggctgtgctagtggaattggttatgcacaggctcaatattttttgaaacaagggtatcaagtatatggtgtggataagttggataaaccgaacttaaacggtaattttaactttataaagttggatttatcctctgatttatccccactattcacaatggtaccgagtgttgatattttgtgtaatactgcaggtattctagatgcctacaagccacttctagaagtaagtgatgaagaagtggaacacctatttgatattaatttttttgtgactgttaggctaacacgtcattatcttagacgtatggtggaaaagaagtcaggtattattatcaatatgtgctcaatagcaagttttatagcgggtggcggtggagctgcatatactagttctaaacatgcccttgcgggattcacacgtcaattggctttggattacgcaaaagattgtattcaaatttttggtatagcgccaggtgctgtacaaactgctatgactgctagcgattttgaacctggtggattagcagaatgggtagctagtgagacgccaattggtcgttggactaaaccaagtgaagttgctgaattaactggatttcttgcttcaggaaaagcgagatcaatgcaaggtgaaattgtcaaaattgatggtggctggagtttgaaa

SEQ ID NO: 11720 - protein, 232 aa, Streptococcus agalactiae
MTKVVLVTGCASGIGYAQAQYFLKQGYQVYGVDKLDKPNLNGNFNFIKLDLSSDLSPLFTMVPSVDILCNTAGILDAYKPLLEVSDEEVEHLFDINFFVTVRLTRHYLRRMVEKKSGIIINMCSIASFIAGGGGAAYTSSKHALAGFTRQLALDYAKDCIQIFGIAPGAVQTAMTASDFEPGGLAEWVASETPIGRWTKPSEVAELTGFLASGKARSMQGEIVKIDGGWSLK

SEQ ID NO: 11721 - protein, 234 aa, Streptococcus agalactiae
ATGACATTTGAAGAAATTTTACCAGGTTTAAAAGCAAAGAAAAAATATGTACGTACAGGTTGGGGGGGTGCTGAAAATTATGTTCAGTTATTTGATACCCTTGAAGTTAATGGGAAAGTACTACAGGCTACACCTTATTTTCTTATTAATGTTACTGGTGAAGGTGAAGGTTTTTCCATGTGGGCACCAACACCATGTGATGTTTTAGCAGAGGATTGGATCGAGGTCAATGAC

SEQ ID NO: 11722 - protein, 78 aa, Streptococcus agalactiae; identical to SEQ ID NO: 2848

SEQ ID NO: 11723 - protein, 234 aa, Streptococcus agalactiae
ATGAATGATTTTGAAAAAGTTATAGCTGTGCTAAATCAACTAAGTATTTCTTATGAATTAGTGGAAAATGGACCTGTTTTGTTGACGGAGCAAGCAGATAACTTTATTGTGGGAATTGAAGGAGTAAGAACAAAAATAATGTTCTTGACCAACAAGAAAAAGATGAAATGTTATTTACTAATAATGGATGACCAGAAACTATTTTATCCTATGAAAACAATAGTAGCTTTTAGA

SEQ ID NO: 11724 - protein, 78 aa, Streptococcus agalactiae
MNDFEKVIAVLNQLSISYELVENGPVLLTEQADNFIVGIEGVRTKIMFLTNKKKMKCYLLIMDDQKLFYPMKTIVAFR

SEQ ID NO: 11725 - protein, 531 aa, Streptococcus agalactiae
ATGGCTTGCATAATCAGGAGAGCAAGATTAGGAGATGAAGTCAATTTAGCTTATATTCAAACGGAGAGCTGGAAAGCTGCTTTTGGTAAGATACTACCTGAGGATATCATTCAAAAAACTACGGAAATAGAACCTGCCATAACAATGTATCAACAGCTACTACACAAGGAGATTGGTAAGGGTTATATATTGGAAGTAGATAGTAATCCTCATTGTATGGCTTGGTGGGATAAAAGTAGAGAAGATGATATGCTTGATTATGCAGAACTCATTTGTATACATAGTCTTAAAGAAGGTTGGGGAAAAGGTTATGGGTCTCAAATGATGAATCATGTACTATCAGAGATACAACAAGCAGGTTATAATAAAGTGACGCTTTGGGTATTTACAGAAAATACACGCGCAAGAAAATTTTACGATAGGTTTGGTTTTTCTTTTAAGGGTAAATCAAAAACTTATTTTGAAAAGGAAGAAATGTGTTATGAGAAGATTTTGCACCAGCGAGATAAAGCATCCGATAACACAATAGTA

SEQ ID NO: 11726 - protein, 177 aa, Streptococcus agalactiae
MACIIRRARLGDEVNLAYIQTESWKAAFGKILPEDIIQKTTEIEPAITMYQQLLHKEIGKGYILEVDSNPHCMAWWDKSREDDMLDYAELICIHSLKEGWGKGYGSQMMNHVLSEIQQAGYNKVTLWVFTENTRARKFYDRFGFSFKGKSKTYFEKEEMCYEKILHQRDKASDNTIV

SEQ ID NO: 11727 - protein, 1410 aa, Streptococcus agalactiae
ATGGCATTATTTTTTACCTTCCTAAAGGTATCTCAAGTCATTTTCTTAGTATTATTGATTGCCTATGCCAGCTTTTTAGTGATTTCATTAGTCATTGGAGGTGTTCATCTCTATGAAAAAAATGAGCGCAAAAAAAGTTTAACTAGAAATAAAGAAAAAATTCCAATTTCAATTATTGTACCAGCCTATAATGAATCAACAACCATTGTGAGTTCGATTGATTCGTTATTGCACCTTGATTATGAAGCATATGAAATTATCGTTGTGGATGACGGTTCCAGTGACAATACTTCAGATGTTCTCAAGGAAGAGTTTGCATTAATGAAAATCTCGAATACGATTGATTCAATTATTGCTACTCAAACTTGTAAAGATGTCTTTCAGAGACAGGTTGGTAAGGTTAAACTGACACTCATTGTTAAAGAAAATGGTGGCAAAGGGGATGCCTTAAATATGGGGATCAATGCTGCTAATTACGATTATTTTCTATGTCTAGATGCAGATTCTATGTTGCAGGTAGATTCTTTGAGTCAAATTAGCAAATCCATACAGGTAGATCCGACAGTTATAGCAGTGGGAGGGCTCGTCCAAGTTGCCCAAGGTGTTAAGATTGAGCAGGGGAAAGTAGCATCTTATCGTTTGCCTTGGAGAATTATTCCTTGTGCACAAGCACTTGAGTATGATTCATCATTTTTAGGAGCTCGAATCTTTTTAGACTATTTAAGAGCTAATTTAATTATTTCGGGGGCTTTCGGTCTTTTTAAGAAAGACCTTGTTAAAGCGGTGGGAGGATATGACACCCAGACTCTAGGAGAAGATATGGAGTTGGTGATGAAATTACATTTCTTCTGTCGTAATAATAATATTCCCTATCGTATTTGTTATGAAACAGATGCTGTTTGTTGGAGCCAGGCACCAACGAATTTAGGGGATTTACGTAAACAGAGACGCCGATGGTATCTTGGCTTGTACCAATGTTTAAAAAAATATAAAAGTATTTTTGCCAATTATCGCTTTGGAGCTGTAGGATCAATTTCTTATATTTACTATATTTTATTTGAATTACTGACCCCGTTTATAGAATGTTTTGGTATCGTCATTATATTTTTGTCCTTATTATTTAATCAATTAAACATCCCATTCTTTATATCATTGGTGAGCCTTTATATCTTTTACTGTGTTTTAATTACATTAAGCTCTTTCTTACACCGTATTTATTCTCAGCAACTAGTAATAGGAATTTTAGATATTGTTAAAGTATTTTATATTGCTGTTTTTAGGTATCTTATCCTACATCCTGTATTAACTTTTGTTAAGGTTGCAAGTGTTATTGGCTATAAAAATAAAAAAATGGTTTGGGGGCATATTACGAGAGAGAAACAAATGAAGGATTTTGAAACAAGCGTTACT

SEQ ID NO: 11728 - protein, 470 aa, Streptococcus agalactiae; identical to SEQ ID NO: 2854

SEQ ID NO: 11729 - protein, 2157 aa, Streptococcus agalactiae
ATGAAAAAATATCTAAGTATTGTAGCCCTTTTAACTATTTTGTTTAGCTCTATTTATTATTTGTATTACTTTGATGGTAGTTTGTATTTACCAAAGGGCTTATTAAAAGAAAATACAAGAACTAACTTTGTTGTTAAAGGTGATACTGTACTTCACAAGCCCACCAATAAACCTTTTGTTGTTAAAGGAGTAGACGTTGAGTCTTCCTTAGCGGGTTATCATCACAACGATTTTCCTATTACTCAAAAAACGTATCGTGAATGGTTCCATTTAATTTCCAACATGGGGGCAAATACTGTAAGAGTCAAGGTACCGATGAATGTTGCATTTTACGATGCCTTATATCACCACAACAAAGCATCAAAGAGGCCACTGTATTTGTTGCAAGGAATACGTATAGATTCTTATCGCAATAATGCTTCTATAACAGCTTTTAATGATAATTATAGGGGGTATTTAAAACGAGAAGCAAAAGGCGTTGTGGATATTCTCCATGGGCGTAAGCAAGTATGGAATACTGATTTTGGTAGCAGTCATTATCATTATGATCTTAGTCCTTGGGTACTTGGTTATGTCGTAGGGGATGATTGGAATAGTGGTACTGTCGCTTATACTAATCATCAAGAGAAAAAAACGCAATATAAAGGACGTTATTTTAAAACTTCTGTGGCAGCTAATCCATTTGAGGTCATGCTAGCTCAAGTAATGGATGAATTGACACATTATGAGACAGCTAAATATGGTTGGCAACATTTGATTAGTTTTTCAAACTCACCAACAACAGACCCTTTTCATTATCGAAAACCATTTGAGGCACAGGCTCCTAAATACGTACAACTAAATGTAGAAAATATTCAAGCTAATTCGAATGTTAAAGCAGGTATGTTTGCAGCATATAAAGCTATTGATTTCCATCCTCGATACAAGGATTATCTATTATTTGATAAAGAGAATATCAGTAAAGAAGATAGACAAAAGATTAAAGAACTTTCTTTGTCACAGGGATACGTTAAACTGCTAAATGCTTATCACAAAATCCCTGTTCTAGTCACGGGTTATGGCTACTCGACAGCGAGAGGTATTGCCCAAAAAGAAATTGATAAACGTCCTCTGCCGATTAATGAAAAAGAACAAGGTCAGCGTTTACTAGAAGATTATGAATCTTTTATATCATCCGGTAGTTTTGGAGCGACTATCAATGCATGGCAAGACGATTGGAATGCAAGTGTGTGGAATACATCCTTCGCCACAAATAAACATAGTCAATTCCTATGGGGGGATGCACAAGTATTTAATCAAGGTTATGGTTTATTAGGCTTTAAAAACGCAAAACATCATTATCAGGTTGATGGTAAAAGAGGCAAAGAAGAGTGGAAACATCCTCTGATGACTAGTGCAACAGGAGATGACTTATATGCTAGCAGTGATGAAAGCTATCTCTACCTTGCGATTAAAACAAAACCTGAAAAACTAAAAGAAAAACGATTATTACCAATAGATATTACACCAAAATCTGGTAGTAGAAAAATGAATGGTAGTAAGGTCACATTTTCTAAATCTAGTGACTTTGTATTGTCTATTGATCCAAATGGCAAGTCTGAATTATTTGTCCAAGAGCGCTATAACGCCTTAAAAGCGAACTATCTTCGACAGCTTAATGGTAAAGATTTTTATGCTTTCCCACCAAAGAAGAACAGTAGTAATTTTGAGCAGATAAATATGGTATTGAGAAATACAAAGATTGTTGAAGACATGGAAAAAGTAAAAGCAACAGAGAGGTTCTTACCAACTCATCCTACTGGTCTTCTCAAAACAGGAACAACTGATAGGCACCAAAAAACATTTGATTCACAAACAGATATTTCGTTTGGAAAGGACTTTATAGAGGTCAGAATTCCGTGGCAGTTGTTGAATTTTTCTGATCCATCATCTCAAAAAATTCACGATGATTACTTTAAACATTATGGTGTGAAGGAGTTAGAAATTGAGAGCATTGCTTTAGGATTAGGTGCTAATAGCAAAGAAAACACACTGATAAAGATGGCAGATTATCGTTTGAAAAATTGGGAGAGACCCGATACCAAAACCTTTTTAAAAGACTCCTATTATAGTATTAAGAAAGAATGGTCTAAAGAAAGAGAGAGAACATATGGTACA

SEQ ID NO: 11730 - protein, 719 aa, Streptococcus agalactiae
MKKYLSIVALLTILFSSIYYLYYFDGSLYLPKGLLKENTRTNFVVKGDTVLHKPTNKPFVVKGVDVESSLAGYHHNDFPITQKTYREWFHLISNMGANTVRVKVPMNVAFYDALYHHNKASKRPLYLLQGIRIDSYRNNASITAFNDNYRGYLKREAKGVVDILHGRKQVWNTDFGSSHYHYDLSPWVLGYVVGDDWNSGTVAYTNHQEKKTQYKGRYFKTSVAANPFEVMLAQVMDELTHYETAKYGWQHLISFSNSPTTDPFHYRKPFEAQAPKYVQLNVENIQANSNVKAGMFAAYKAIDFHPRYKDYLLFDKENISKEDRQKIKELSLSQGYVKLLNAYHKIPVLVTGYGYSTARGIAQKEIDKRPLPINEKEQGQRLLEDYESFISSGSFGATINAWQDDWNASVWNTSFATNKHSQFLWGDAQVFNQGYGLLGFKNAKHHYQVDGKRGKEEWKHPLMTSATGDDLYASSDESYLYLAIKTKPEKLKEKRLLPIDITPKSGSRKMNGSKVTFSKSSDFVLSIDPNGKSELFVQERYNALKANYLRQLNGKDFYAFPPKKNSSNFEQINMVLRNTKIVEDMEKVKATERFLPTHPTGLLKTGTTDRHQKTFDSQTDISFGKDFIEVRIPWQLLNFSDPSSQKIHDDYFKHYGVKELEIESIALGLGANSKENTLIKMADYRLKNWERPDTKTFLKDSYYSIKKEWSKERERTYGT

SEQ ID NO: 11731 - DNA, 1482 bp, Streptococcus agalactiae
ttgattatttcaacattgttagccaaagcgacgaaatcaatgggtagacttatgagagggaaggttatttacggcacaacccttataggtctttttctattcttatttttctatttttggattcctaagcatcacatcgaaagaatacatcatcatcgtataaagcaggtagatgcgaagagtgatttaacaggatttaaaacccatttgcccattatcagcatcgatacaaagcaacaagctattcctcttgttacaaaagaaggtggaaaatatgtcaaagctagggataatattaatgctgatatcgaattacgggattctccaagtagatcacatcatttatcagaaaagccgagaattaggacaaaagggttaatatcatatagaggaaattcctctcgttactttgataagaagtcactgaaagttaagtttgtcactaataagttaaaggaaaagaagcatcgattagcaggaatgcctaaagaatcggagtgggtattgcatggtccctttctagacagaacattattaagaaattatctgagttataatattgctggtgagattatgtcctatgccccaaacgttcgctactgtgagttatttgtcaatggtgagtatcagggagtatatctagcagttgagaatatcgaacaaggtgagcaacgagttcccattgaaaaaagtgataaaaagttgcataaaacaccttatatcgttgcttgggatcgtgaacataaggcaaagcaaaagttagataactatgtacattatacacaccagtctggtatctcagctcttgatgtgaaatatccaggtaaacaaagattgacatcaaaacaattagagtttattaataaggacatcaatcatattgaaaaagtcctttattcttatgatttttcacaatatcctaaatatattgatagagaatcatttgcaaattattttgtcatcaatgaattttttagaaatgtggatgcgggtaaattttcaacctatctatataaagatcttcgtgatagagcaaaactagtagtttgggattttaataatgcttttgataatcaaattgaaggacgtgttgatgaggcagattttaccttgacggatgcaccgtggttcaatatgctcattaaggacaaagcatttatagacctggttgttcatcgctataaagaattacgaaagggagttctagcgacagaatatttatctaattacatcgacgagacaaggcattttttaggtccagctattgatcgaaattataaaaaatggggctatgtctttgatttaaagaatactgatccaaggaattatttgattcctactgaacgcaatgtgacaagttatcacaaatcagtagaacaattaaaagattttatcaaaaagcgtggcagatggatggatagaaatattgagaccttgtatcaatatagtgcaccatcgaaaaatactaatactttactggag

SEQ ID NO: 11732 - protein, 494 aa, Streptococcus agalactiae
MIISTLLAKATKSMGRLMRGKVIYGTTLIGLFLFLFFYFWIPKHHIERIHHHRIKQVDAKSDLTGFKTHLPIISIDTKQQAIPLVTKEGGKYVKARDNINADIELRDSPSRSHHLSEKPRIRTKGLISYRGNSSRYFDKKSLKVKFVTNKLKEKKHRLAGMPKESEWVLHGPFLDRTLLRNYLSYNIAGEIMSYAPNVRYCELFVNGEYQGVYLAVENIEQGEQRVPIEKSDKKLHKTPYIVAWDREHKAKQKLDNYVHYTHQSGISALDVKYPGKQRLTSKQLEFINKDINHIEKVLYSYDFSQYPKYIDRESFANYFVINEFFRNVDAGKFSTYLYKDLRDRAKLVVWDFNNAFDNQIEGRVDEADFTLTDAPWFNMLIKDKAFIDLVVHRYKELRKGVLATEYLSNYIDETRHFLGPAIDRNYKKWGYVFDLKNTDPRNYLIPTERNVTSYHKSVEQLKDFIKKRGRWMDRNIETLYQYSAPSKNTNTLLE

SEQ ID NO: 11733 - DNA, 675 bp, Streptococcus agalactiae
atgaaagacctattacgaaatagtctagagcaaagtggaaatttaagttttcaagatatgattttacatattcttgtagcagctttattgagtgtagttatttatgtttcctatgcttatacgcatagtggaactgcctatagtaaaaagtttaatgtttcattaatgacattgacggtcttgactgcaacagtaatgaccgttattggtaataatgtagccttgtcattgggtatggtcggtgccttgtcagttgttcgttttaggacagccataaaagattcaagagatacagtttatattttttggaccatagttgttggtatctgttgtggtgtcggtgactatgtggtagcggcattaggaagtagcgttatctttatcttactatgggttatgggacgtgttaaaaacgagaatcgtatgttattgattgtgaagtgcgatagaacactagaagttgatttagaaggaattttcttccaatattttgacggaaaagctgttcagcgtgttaaaaattcaacaactaatactattgaaatgattttcgaaatctctagaaaagattacgataagcaacaccatgtagataatcagttaactgaaaaagtgtaccaattgggaaatattgattatttcaacattgttagccaaagcgacgaaatcaatggg

SEQ ID NO: 11734 - protein, 225 aa, Streptococcus agalactiae
MKDLLRNSLEQSGNLSFQDMILHILVAALLSVVIYVSYAYTHSGTAYSKKFNVSLMTLTVLTATVMTVIGNNVALSLGMVGALSVVRFRTAIKDSRDTVYIFWTIVVGICCGVGDYVVAALGSSVIFILLWVMGRVKNENRMLLIVKCDRTLEVDLEGIFFQYFDGKAVQRVKNSTTNTIEMIFEISRKDYDKQHHVDNQLTEKVYQLGNIDYFNIVSQSDEING

SEQ ID NO: 11735 - DNA, 693 bp, Streptococcus agalactiae
atgaacgaagttcttagacaggaaaaaaaatatttaatatcacttgaagattactatcttttatctaagaaattttcccaagtaatgacgctcgattcgcatagttcagacgatggctatactatccgttcgctatactttgattctttagaagatgttgattggcaagaaaaggaagatggtgttgagatacgaagaaagattcgtttgcgcaattatggtagtcaaagcaattttgcgaaattagaaatgaaacaaaaacaaggtgctaatcaaaaaaagcgctctctaaaattaagcaagacagatgctcaagcgctgattaatggtaacaatagtgttttattaaattatccggatacatttgctgcggagtgttattcaaggataacaacgcaactttatcaacctaaaacggttattgagtaccaaagaaaagcttttgttgctaaggaaaacaatatccgaatcacctttgaccaccatataataggtacagaggctagttatgatattttctcagaggatttaaatcaaaattatttattagatccttaccttgttattttagaagttaaatataatggatttttattgtcttatattaaagaactcttagattcggtagatagaagtgaactttcagcgagtaagtattgtttaggaagagctgttagtaaacattatcgtttt

SEQ ID NO: 11736 - protein, 231 aa, Streptococcus agalactiae; identical to SEQ ID NO: 2864

SEQ ID NO: 11737 - DNA, 1341 bp, Streptococcus agalactiae
ttgcttatggtaaaaaaaggctttttaacgggattacttttatttggtatcttctttggtgcagggaacctcatttttccaccagcattaggtgtagcatctggacaagatttctggccagcgattttaggattttgtttgccaggagttggattagctattattaccctcctattaggcacactaactaatggtggttataagacagagatgtcggaaaaatttagtccgtggttttctttaacatttttagttatactctacctaactattggtccactttttgctattcctagaacagcaacggtttcttttgaaattggggttgctccaattgtagggcatggtccgattgctcttttgtgttttacagcctgtttttttgctgcagcttattatctcgctattagaccaaatggtatattagatagtgttgggaaaatcttaacacctgtttttgcctttttaattctctctttggttgtcgttggagctattgcttatggaaacttggagagtgctaaggcgagcgctgactatgcaggaaaagcgtttggaagtggtgtcttagcaggctataatacacttgatgcacttgcagcagttgctttttgtctagtagcaacagaaacgcttaaaaagtttggttttaaaactaaaaaagaatatttatcaaccatttggattgttggaattgttactagtttagcatttagtattttatatattggcttaggttttttagggaataagtttcctgtcccagctgatattttagctgacccaaatgttaataaaggagcttatgtattatcacaagcatcttataaattatttggaaattttggtcgttatttcttgagtattatggtaacattgacatgctttacaacaacagttgggcttattgtgtcagtatctgaattttttgataagaactttcgttttgggaattataaattatttgctactgtttttactttgattggctttttaattgctaatcttggtttaaatgctgtaattactttttcagttcctgtgctaactttattgtatccgattgttattgttattgtcttaattattttgattaataagtggttgccgctttcaaaaaagggaatgtctttgacaattggtcttgtcactttagtgtcgtttgttgaggttctagcgggacaatggcaagaaaaaacattaactcagttagtaggattcctcccctttcatactatttcaatggggtggctagttccaatgttgattggtctagtattttctttggtgctgtcagataaacaaaaaggccaagcatttgatttagagaaatttgaagga

SEQ ID NO: 11738 - protein, 447 aa, Streptococcus agalactiae
MLMVKKGFLTGLLLFGIFFGAGNLIFPPALGVASGQDFWPAILGFCLPGVGLAIITLLLGTLTNGGYKTEMSEKFSPWFSLTFLVILYLTIGPLFAIPRTATVSFEIGVAPIVGHGPIALLCFTACFFAAAYYLAIRPNGILDSVGKILTPVFAFLILSLVVVGAIAYGNLESAKASADYAGKAFGSGVLAGYNTLDALAAVAFCLVATETLKKFGFKTKKEYLSTIWIVGIVTSLAFSILYIGLGFLGNKFPVPADILADPNVNKGAYVLSQASYKLFGNFGRYFLSIMVTLTCFTTTVGLIVSVSEFFDKNFRFGNYKLFATVFTLIGFLIANLGLNAVITFSVPVLTLLYPIVIVIVLIILINKWLPLSKKGMSLTIGLVTLVSFVEVLAGQWQEKTLTQLVGFLPFHTISMGWLVPMLIGLVFSLVLSDKQKGQAFDLEKFEG

SEQ ID NO: 11739 - DNA, 1995 bp, Streptococcus agalactiae
atgacagaaaaaaaatcattttacattactaccccaatttattacccatcaggtaaattgcacatcggttctgcctatacaacgatagcatgtgatgttttggcacgttacaaacgcatgatgggctttgatgttcagtatttaactggtcttgatgagcatggtcagaaaattcagcaaaaagctgaagaagcaggcattacaccacaggaatatgttgatggcatggctgaaagtgtcaaaacattatgggaacttctagatatttcctatgacaaattcatccgtacaacagatacttaccatgaagaagcggttgctaaaatttttgaacaattgttggcacaaggggacatctatcttggtgagtatactggatggtattctgtttcagatgaagaattttttactgaaagccaattagcagaagtttatcgtgacgaaaacggtaatatgattggtggtgttgcgccatctggtcatgaagttgaaaaagtttctgaagaatcttatttcttccgcatgagcaaatatgcagatcgtttaaaagcatactacgctgagcatccagaatttattcagccagatggtcgtatgaatgaaatgcttaaaaactttatagaaccaggtttagaagatttagcagtgtctcgtacaacttacacatggggagttcaggtaccatcaaatccaaaacatgttatttatgtctggattgatgctttgatgaactatatttctgctcttggttatggttggtctgacgacctcagtcaatatcataaattttggccagcagacattcatatgattggtaaagatattcttcgtttccactctatttattggcctatcatgttaatggcgctggatttgccattaccaaaacgtctagttgctcatggttggtttgtgatgcaagatggtaaaatgtctaaatcaaaagggaatgtcgtttatccagaaatgttagtagagcgttttggtcttgatccactccgttattatctcatgcgttcattgcctgttggttcagacggaacttttacgccagaagattatgttggacgtattaactatgaacttgctaatgatttaggaaaccttctcaaccgcactattgctatggttaacaagtatttcgatggagaagtaccaagatttgctgttgcaactgactttgatgctgatttagcttctgttgcgacagatagtattgaaaactatcataaacaaatggaagcggtggatttcccacgtgcccttgaagctgtatggaatcttatttcacgaactaacaaatatattgatgaaacagcaccgtgggtacttgcaaaagacgaaaccgatcgtgataagctagaagctgtaatgagtcatttagctgctagtctacgtgttgttgctcacctcattcaaccgttcatgatggaaacttccgatgccattatggaacaacttggtttagggacaacattcgatcttgaaaaattgacttttgctggtctaccagaaggtgttcgagttgttgcaaaaggttcaccaattttcccaaggttggatatggaagacgaaattacttatatcaaagaacaaatgaatgctggaaaagcaccagtggaaaaggagtgggttcctgaagaagttgaattgacatcaagcaaaggtcaaatcaagtttgaggattttgacgctgttgaaatccgcgttgcagaagtaattgaagttgagaaagtggaaggttctgataaacttcttcgtttccgtctagatgctggtgacgagggccatcgtcaaatcttatcagggattgcaaaattttacccaaatgaacaagagttagtagggaaaaaactccaaattgttgctaacctcaaaccacgtaaaatgatgaaaaaatatgtcagtcaaggcatgattctctcagcagaacatgatggtaaattgacagtgttgacggtcgattcagcagtggcaaatggatcaattattggt

SEQ ID NO: 11740 - protein, 665 aa, Streptococcus agalactiae
MTEKKSFYITTPIYYPSGKLHIGSAYTTIACDVLARYKRMMGFDVQYLTGLDEHGQKIQQKAEEAGITPQEYVDGMAESVKTLWELLDISYDKFIRTTDTYHEEAVAKIFEQLLAQGDIYLGEYTGWYSVSDEEFFTESQLAEVYRDENGNMIGGVAPSGHEVEKVSEESYFFRMSKYADRLKAYYAEHPEFIQPDGRMNEMLKNFIEPGLEDLAVSRTTYTWGVQVPSNPKHVIYVWIDALMNYISALGYGWSDDLSQYHKFWPADIHMIGKDILRFHSIYWPIMLMALDLPLPKRLVAHGWFVMQDGKMSKSKGNVVYPEMLVERFGLDPLRYYLMRSLPVGSDGTFTPEDYVGRINYELANDLGNLLNRTIAMVNKYFDGEVPRFAVATDFDADLASVATDSIENYHKQMEAVDFPRALEAVWNLISRTNKYIDETAPWVLAKDETDRDKLEAVMSHLAASLRVVAHLIQPFMMETSDAIMEQLGLGTTFDLEKLTFAGLPEGVRVVAKGSPIFPRLDMEDEITYIKEQMNAGKAPVEKEWVPEEVELTSSKGQIKFEDFDAVEIRVAEVIEVEKVEGSDKLLRFRLDAGDEGHRQILSGIAKFYPNEQELVGKKLQIVANLKPRKMMKKYVSQGMILSAEHDGKLTVLTVDSAVANGSIIG

SEQ ID NO: 11741 - protein, 873 aa, Streptococcus agalactiae
ATGATTAATACAAAAACACTTCTCCCCTACAAAACTATGCCGGTTTGGACTGCACAGTCTATTCCAAAGGCATTTTTAGAAAAGCATAATACTAAGGAAGGCACCTGGGCAAAACTAACCATTCTAAGTGGTTCTTTAGTATTTTACCAGTTATCTCCTGATGGAGAGGAAATCTCGCGGCATATTTTTGATGCTAGTAGTGATATTCCTTTTGTTGATCCACAAGTCTGGCATAAAGTTTCGCCAAATAGTCCAGACTTAAGTTGCTATCTAACTTTTTACTGCCAAAAAGAAGATTACTTCCATAAAAAATATGGTCTCACGCGCACACATTCTGAGGTTATCGCCAGTGCACCTCTCTTATCTGAGAAGAGTAATATATTAGACCTTGGGTGTGGTCAAGGGCGAAACTCACTTTATTTATCGCTGCTGGGACATCAAGTGACTTCTGTCGATTCAAACGGACAGAGCCTTGTAGCTTTAGAAAATATGGCATTAGAAGAAGAGCTTCCTTACAATATAAAATGGTATGATATTAATACTGCTACTATTGAAGGGCACTATGATTTTATTTTATCAACTGTGGTATTTATGTTTTTAAATCCCGACTGCATTTCTGATATTATTTTACAAATGCAATCACATACTCAGATTGGAGGATACAATCTTATCGTTTCTGCTATGGATACCACTGAAAATCCTTGCCCGCTTCCATTCCCTTTTACCTTCAAAGAAGGACAATTGAAATCTTATTACAATGACTGGGAAATCATCAAATATAATGAAAATTTAGGTGAATTGCACAGGGTGGATGAAAACGGTAATCGCTTAAAATTACAGTTTGCGACTTTATTAGCTCGAAAATTAAGATCA

SEQ ID NO: 11742 - protein, 291 aa, Streptococcus agalactiae
MINTKTLLPYKTMPVWTAQSIPKAFLEKHNTKEGTWAKLTILSGSLVFYQLSPDGEEISRHIFDASSDIPFVDPQVWHKVSPNSPDLSCYLTFYCQKEDYFHKKYGLTRTHSEVIASAPLLSEKSNILDLGCGQGRNSLYLSLLGHQVTSVDSNGQSLVALENMALEEELPYNIKWYDINTATIEGHYDFILSTVVFMFLNPDCISDIILQMQSHTQIGGYNLIVSAMDTTENPCPLPFPFTFKEGQLKSYYNDWEIIKYNENLGELHRVDENGNRLKLQFATLLARKLRS

SEQ ID NO: 11743 - protein, 693 aa, Streptococcus agalactiae
ATGTCTAAAAAGTCTCACCGTCAATATCAAATATATGAAGGGCTCAGGTGTGCGGTTGCACTCTGTTTTATTTCAGGTTATATCAATGCTTTCACTTATGTAACACAAGGAAAACGTTTTGCAGGTGTACAAACAGGGAATTTGTTATCTTTTGCTATTCACCTTAGTAATAAGCATTATAGTCAAGCGCTTGCTTTTTTGCTACCTATAATGGTTTTCATGTTAGGTCAATCGTTTACTTATTTCATGAATCGTTGGGCGAATAAACATCAACTGCATTGGTACCTATTATCTAGTTTTGCGTTGACACAGGTTGCTATAGTAACAATTATATTGACTCCTTTCTTACCATCGTCGTTTACTGTGGCAGGACTAGCCTTCTTTGCTTCAATACAAGTAGACACCTTTAAATCGCTCAGAGGAGCACCTTATGCTAATATGATGATGACTGGTAATATCAAGAATGCTGCTTATTTATTAACAAAGGGACTTTACGAAAAAAATTCTGATATTTTCTTAATTGCTAGAAATACGATTATTATTATTGGAGGATTTATCTTTGGTGTTGTTTGCTCGACTTATTTTTCAAGTAAACTGGGCGAATGGAGCTTATCATTAATATTAATTCCTCTTTTATATGTCAACTTGCTGTTAGGCCATGAATTTTATAACCTACAAGTAGAAAGGCACTCC

SEQ ID NO: 11744 - protein, 231 aa, Streptococcus agalactiae; identical to SEQ ID NO: 2874

SEQ ID NO: 11745 - protein, 1214 aa, Streptococcus agalactiae
ATGCACAGCACTATTTATAAATGTCATCATTGCCTTATCTAATTTATAAAAGTTTTAAAGATATCTTTCCTTTTGCTCTCATTTTTTCTTGGATTGAAATCCTTCAAAAACTCGTTATATCAGATGATTCTTTTTTAGCTCAAACAACAAAGTCCAGTATTTATAAAAACGAGTGGTTATATACGGTTTCCAATACTCTTTATGATTTATCTCATTTACTAATCTACTTTATGGCTAGTTATTTTGTGGCTAGTTTAGTATGGAGAGGCTTATCTAACCAAACTAAAGAAAGTTTTTCTGCCAGTTTACTTGGCTTTGCCACTGTTTGGTTGCTTCTAACTTCAGTTGTTCCAGGTACAGATTATCACTATCCTAGCCAACCCATTTGGCTTATGCTGGCTTTGATTTCGTATCTTTTTATCTTTTTAACTCGACTACTTCAAAATCGCCATCATATTTTCCAGTATAGTATGTTAGCTATACTACTATTAATCTCTTCTATTTTGTCACATATCTTATATCGTTATCCTAATATTGATTTAGAATACCTTATACAAAATCACTTTTCTCAATGGCTGGGTGATGGGCCACATCAATTAATTCCTATTATGCTTTGGTCTATCTTAGCTATTTTTCTAACCTTATCAGGTCTTTTTGTACCAGATATTTTATTTCGTCCGTACTCCTATTTTTCAGTAGTTAGCGAAAATTTAAATGCTGCCTTGAGCCAACATACAGATAAAATCCCTTATCTGTATACCTTTTATACTGTTAAAAATAGCTTTGCTATGTTTGGCGGTATTGGAATCCTATTATCCTTATTTTTAGCAGTTTTATATGAAAGTAGAAAACTACAATCGAAGAATTACTATAAATTGACATTACTGACCTTAACTCCTCTTATTTTTGATCAAAATTTACCATTTTTAGTAGGTCTACCTGTCATTTTACAACCAATATTATTCATTCCGATGGTATTAACAACTATCTTTGCAGAGGCTTTTGGAGCTCTTATGCTCTACCTAAAATTTGTCGACCCTGCAGTTTATACTGTCCCAAGTGGTACACCTAGTCTACTATTTGGCTTTCTTGCTTCAAATGGGGATTGGCGTTACCTTCCAGTCACTGCAATTATTCTAGTTGTTGGCTTCTTTATTTATCGTCCGTTTGTCAAAATCGCTTTCGCTAAGGAGGAGCAATATGAAAAAATTACT

SEQ ID NO: 11746 - protein, 405 aa, Streptococcus agalactiae; identical to SEQ ID NO: 7506

SEQ ID NO: 11747 - protein, 840 aa, Streptococcus agalactiae
ATGAAAAAATTACTTAGATGGCTTCCTCCTGTACTTGTCATTATTATCCTTATAGGAATGACTATCTTAGGTAAGTCCTATATCAATAAAGTAACAGCTCACAAAATAAAACTCTATAACTCTCGAATGACTCCTACTATTTTAATTCCAGGATCCAGTGCTACTCAAGAACGATTTAACAGCATGTTAGCACAGCTCAACCAAATGGGAGAAAAACATAGCGTTTTAAAGTTAACTGTCAAAAAAGACAATAGCATTATCTACAATGGACAAATTAGCGGCAATGACCACAAACCCTACATTGTCATTGGATTTGAAAATAATGAAGATGGTTATAGTAACATCAAAAAACAAACAAAATGGCTACAGATTGCTATGAATGATCTTCAGAAGAAATATAAATTTAAACGTTTTAACGCTATCGGTCATTCAAATGGTGGCTTATCATGGACTATTTTCCTAGAAGATTATTACGACTCTGATGAATTTGATATGAAATCATTGTTAACAATGGGAACACCTTTTAACTTTGAAGAAAGTAACACCTCAAATCATACTCAAATGCTTAAAGATTTAATCAGTAATAAAGGAAATATTCCATCAAGTCTCATGGTATACAATTTGGCAGGAACTAATTCATATGATGGTGATAAAATTGTTCCATTTGCTAGTGTGGAGACTGGTAAATATATTTTCCAAGAAACCGCTAAACACTATACCCAACTAACAGTAACTGGTAATAATGCTACACATTCTGACTTGCCTGATAATCCTGAAGTTATCCAATATGTCGCAGAAAAAATTCTTAAAAATGAGAAAGGTAAATTACCAAAACCTCAC

SEQ ID NO: 11748 - protein, 280 aa, Streptococcus agalactiae
MKKLLRWLPPVLVIIILIGMTILGKSYINKVTAHKIKLYNSRMTPTILIPGSSATQERFNSMLAQLNQMGEKHSVLKLTVKKDNSIIYNGQISGNDHKPYIVIGFENNEDGYSNIKKQTKWLQIAMNDLQKKYKFKRFNAIGHSNGGLSWTIFLEDYYDSDEFDMKSLLTMGTPFNFEESNTSNHTQMLKDLISNKGNIPSSLMVYNLAGTNSYDGDKIVPFASVETGKYIFQETAKHYTQLTVTGNNATHSDLPDNPEVIQYVAEKILKNEKGKLPKPH

SEQ ID NO: 11749 - protein, 825 aa, Streptococcus agalactiae
ATGAAACTCATTTCATGGAATATTGATTCCCTCAATGCGGCATTAACAAGTGAATCAACACGTGCTTTAATGTCACGCCAAGTTATTGACACTTTAGTTGCTGAAGATGCCGACATCATTGCGATTCAAGAAACTAAACTGTCTGCCAAAGGACCTACTAAAAAACATTTGGAAGTACTTGAAACTTACTTCCCAGAATATGATTTGGTTTGGCGATCATCAGTCGAACCTGCTCGTAAGGGCTATGCTGGTACAATGTTCTTATATCGTAAAGGGTTAAATCCTATTGTTAGCTTCCCTGAAATCGATGCTCCTACTACAATGGATAATGAAGGTCGCATTATTACTCTCGAATTGGAAAACTGCTATATCACACAGGTCTATACTCCAAATGCAGGTGATGGCCTAAAGCGCTTAGCTGACCGTCAAATATGGGATATTAAATATGCTGAGTATTTAGCAACATTGGATAGTCAAAAACCTGTTCTAGCAACAGGTGACTATAACGTAGCCCACAAGGAAATAGACCTAGCTAATCCTAGCAGTAATCGTCGTTCTGCTGGATTCACAGATGAAGAGCGCCAAGGCTTTACAAATCTACTAGCCAAAGGTTTTACAGATACTTTTCGTTACCTTCATGGCGATGTTCCAAATGTTTATAGCTGGTGGGCACAACGAAGTCGTACATCCAAAATCAACAATACAGGGTGGAGAATTGATTATTGGCTAACAAGTAACCGTGTCGCAGATAAAATTACCAAGTCAGAAATGATTCATTCTGGTGATCGTCAAGATCATACACCAATTATTTTGGAGATTGAACTA

SEQ ID NO: 11750 - protein, 275 aa, Streptococcus agalactiae
MKLISWNIDSLNAALTSESTRALMSRQVIDTLVAEDADIIAIQETKLSAKGPTKKHLEVLETYFPEYDLVWRSSVEPARKGYAGTMFLYRKGLNPIVSFPEIDAPTTMDNEGRIITLELENCYITQVYTPNAGDGLKRLADRQIWDIKYAEYLATLDSQKPVLATGDYNVAHKEIDLANPSSNRRSAGFTDEERQGFTNLLAKGFTDTFRYLHGDVPNVYSWWAQRSRTSKINNTGWRIDYWLTSNRVADKITKSEMIHSGDRQDHTPIILEIEL

SEQ ID NO: 11751 - DNA, 354 bp, Streptococcus agalactiae
atgtatacgttttatgaataccccaaatgtaccacttgtcgttcagcaaaaaaagagttaactgaactcggcttgacttttgaagcgattgatataaaaagcaatcctcccaaagcttcgttattaaaagaattgttagagaattcgccttatgaccttaaaaagtttttcaatacttcaggaaattcttacagagaattaggcttaaaagataaatttgatgatttaactcttgaccaagctttggacttattggcatcggatgggatgcttattaagcgtccattgctagttaaagataataaaattcttcagattggctaccgtactaagtataaagacctcaacttagta

SEQ ID NO: 11752 - protein, 118 aa, Streptococcus agalactiae; identical to SEQ ID NO: 7512

SEQ ID NO: 11753 - DNA, 474 bp, Streptococcus agalactiae
atgttatatcaagaattctatcagtcccctcttggagaaattcgccttctagcagacaatctaggtttatcagggctttattttgttgggcaaaaatatgatatgctagcagtcaaccaagaggaaattgttaatatgtcaaattcctatactttacttggtaagaagtggttagatgcttatttttcacagcaaaatttacctagtattccattatcattgagagggacagcatttcagacgagagtatggcaggaattacagaaaatcccttttggagatacaaaaacttatggagaattagcgaaagagctaaattgtcaatctgcacaggctgttggaggagcaataggtaaaaatcctatttctctaatcataccttgtcaccgtgttttaggaagatatggtcaattaactggttatgctggtggcttagaaagaaaatcttggttattagaatacgaaaaggagaaa

SEQ ID NO: 11754 - protein, 158 aa, Streptococcus agalactiae
MLYQEFYQSPLGEIRLLADNLGLSGLYFVGQKYDMLAVNQEEIVNMSNSYTLLGKKWLDAYFSQQNLPSIPLSLRGTAFQTRVWQELQKIPFGDTKTYGELAKELNCQSAQAVGGAIGKNPISLIIPCHRVLGRYGQLTGYAGGLERKSWLLEYEKEK

SEQ ID NO: 11755 - DNA, 1179 bp, Streptococcus agalactiae
atggtttttagtgtcaaaacatttaataatattaatcaaattggtttacaagagttagggaatcgtttccagattgatggggatatgtcagaaaatcctgatgcctatattattcgtagtcaaaatttgcataatcaggatttcccaagtaacctcaaagctattgctagggcgggtgcaggaacaaataatattcctattgaagaggcaagtgcacagggaatagtcgtctttaataccccaggtgcaaatgctaatgctgtaaaagaagcagtcattgctgccttattgctttcagctcgtgattatttaggagctaaccgatgggttaatactctaactggaacagatattcccaaacaaattgaagcaggaaagaaagcttttgctggtaatgaaattgcaggaaaaaaattgggagttatcggccttggtgccattggagctagaattgcgaatgatgctagacgcttaggaatgacagttcttggttatgatccctatgtttcaattgaaacagcttggaatatttcaagccatgttcaaagggttaaagagattaaggatatttttgaaacttgtgactatatcacaattcatgttcccttaacaaatgaaactaagcatacttttgatgcggaagctttttcaatcatgaaaaaaggaactacgattatcaactttgctcgtgcagaattagtcaataaccaagagctatttgaagcgatagaaactggtgttgtcaagcgctatattactgattttggagacaaagaattattaaaccaaaaaggaattacagtctttcctcatgtaggcggatcaacagatgaggcagagctaaattgtgctattatggcaagtcaaaccattcgttgttttatggagacaggagaaatcactaattcagttaatttccccaatgtacatcaaattcaaaccgcaccatttcgtattactttaattaacaagaatgttcctaacattgtggctaaaatttcaactgctgtatcagagttaggtataaatattgataacattattaaccgttcaaagggtgactatgcctacacactaatagatttagatgaaacggataataacaagatttctactttaattgaagaatttgaaggtgatgagaatatcgtccgtgtacgtttaattgcaaaaaaacaa

SEQ ID NO: 11756 - protein, 393 aa, Streptococcus agalactiae
MVFSVKTFNNINQIGLQELGNRFQIDGDMSENPDAYIIRSQNLHNQDFPSNLKAIARAGAGTNNIPIEEASAQGIVVFNTPGANANAVKEAVIAALLLSARDYLGANRWVNTLTGTDIPKQIEAGKKAFAGNEIAGKKLGVIGLGAIGARIANDARRLGMTVLGYDPYVSIETAWNISSHVQRVKEIKDIFETCDYITIHVPLTNETKHTFDAEAFSIMKKGTTIINFARAELVNNQELFEAIETGVVKRYITDFGDKELLNQKGITVFPHVGGSTDEAELNCAIMASQTIRCFMETGEITNSVNFPNVHQIQTAPFRITLINKNVPNIVAKISTAVSELGINIDNIINRSKGDYAYTLIDLDETDNNKISTLIEEFEGDENIVRVRLIAKKQ

SEQ ID NO: 11757 - DNA, 546 bp, Streptococcus agalactiae
atgcaaatcagattagcttttccaaatgaaattgaccaaattatgcttcttattgaggaagcgcgtgccgaaattgctaaaacaggaagtgatcaatggcaaaaagaagatggataccctaatcgtaacgatattattgatgatatcttgaacggttatgcttgggttggtattgaagatgggatgctagcgacttatgcggctgtcattgatggtcatgaagaggtttatgatgctatttatgagggaaaatggctccatgataaccatcgctatctaacatttcatcgtattgctatttcaaatcaatttcgtggtagaggactagcacagacattccttcaagggttaattgaaggtcataaaggacctgattttcgttgcgatactcatgaaaaaaatgtcactatgcagcatattctaaataaattaggctatcaatattgtggtaaagtacctctagatggggtacgattggcttatcagaagataaaagaaaagggagaaacgagcatctatcgtgagattgatgaaagaaatcccatg

SEQ ID NO: 11758 - protein, 182 aa, Streptococcus agalactiae; identical to SEQ ID NO: 2886

SEQ ID NO: 11759 - DNA, 1089 bp, Streptococcus agalactiae
atgacaatttataatttttctgcaggtcctgcagtcttaccaaaaccagtgcttgtaaaagcccaatctgaactccttaattatcaagggtccagtatgagtgttttggaggtatcgcaccgctccaaagagtttgatgatattatcaaaggtgctgagcgttacttaagagatttgatgggaattccggataattataaagtaatctttttacaaggtggtgcatccttacagtttagtatgattcccttgaatattgccagagggcgtaaagcttactatcatgttgctggttcgtgggggaaaaaagcttatacagaggctgtaaaactatcaaaaacaattccttttgaaccaattctattagcctcatcagaagaatcagtttatgattatattccagagtttgatgaaaaagagattgatcctaaagctgcctatgttcatgtgacaacaaataataccattgaaggaacatcgctttatgatattcctaaaactaatggagtgcctgttattgcggatatgtcttctaatatcttagctgtaaaatataaagtagaagattttgcaatgatttatgcaggagctcaaaaaaatattggacctgctggtgtaacggtagttattatccgtgaagatatgattaatgaggaaccaactttatcatcaatgttggattataagattcagtcagatgctggttctctttataatacgccgcctgcttacagtatttacattgctaaattagtctttgaatgggtgaaaagtctaggtggtgttgatgctatggagaaagctaaccgtgaaaaatcaggacttctctatgattatattgattcctcagaattttatagtaatcctgtcagagataaaaagagtcgttctctatgtaacattcctttcataactattaataaagatttagatgaaaaatttgtaaaggaagcgacagaacgtggatttaaaaatattaaaggacatcgttcggtaggtggtatgagggctagcctttataatgcctttcctaaacaaggtgtcatcgaattaattgattttatgaaaacatttgaagcagaaaatgca

SEQ ID NO: 11760 - protein, 363 aa, Streptococcus agalactiae
MTIYNFSAGPAVLPKPVLVKAQSELLNYQGSSMSVLEVSHRSKEFDDIIKGAERYLRDLMGIPDNYKVIFLQGGASLQFSMIPLNIARGRKAYYHVAGSWGKKAYTEAVKLSKTIPFEPILLASSEESVYDYIPEFDEKEIDPKAAYVHVTTNNTIEGTSLYDIPKTNGVPVIADMSSNILAVKYKVEDFAMIYAGAQKNIGPAGVTVVIIREDMINEEPTLSSMLDYKIQSDAGSLYNTPPAYSIYIAKLVFEWVKSLGGVDAMEKANREKSGLLYDYIDSSEFYSNPVRDKKSRSLCNIPFITINKDLDEKFVKEATERGFKNIKGHRSVGGMRASLYNAFPKQGVIELIDFMKTFEAENA

SEQ ID NO: 11761 - protein, 633 aa, Streptococcus agalactiae
ATGATTTTGAGGGAATTTTGTGCAGAGAATTTAACAGACTTAACCAGATTAGATAAAGCTATTATTTCACGTGTCGAGCTTTGTGATAACCTTGCTGTCGGAGGCACTACTCCTAGCTATGGTGTTATCAAAGAAGCTAATCAATATTTACATGAAAAAGGTATTAGTGTCGCTGTTATGATTCGTCCCCGTGGAGGAAATTTTGTATACAATGATTTAGAATTACGTATTATGGAAGAGGACATCCTACGTGCTGTTGAGTTAGAATCAGATGCTCTTGTTTTGGGAATATTAACTTCAAATAATCATATTGATACTGAAGCCATTGAACAACTTCTACCCGCTACCCAAGGTTTACCACTTGTTTTTCATATGGCATTTGATGTTATCCCGAAATCTGACCAAAAAAAAGCAATAGATCAGTTAGTTGCTTTAGGCTTTACAAGGATTCTCCTACATGGTTCATCTAATGGCGAACCAATTATAGAAAATATCAAACATATCAAAGCACTAGTTGAATATGCTAATAATCGTATTGAAATTATGGTTGGCGGTGGTGTGACTGCTGAAAACTATCAATATATTTGCCAAGAAACTGGGGTTAGACAAGCCCATGGTACTAGAATAACTCAA

SEQ ID NO: 11762 - protein, 211 aa, Streptococcus agalactiae
MILREFCAENLTDLTRLDKAIISRVELCDNLAVGGTTPSYGVIKEANQYLHEKGISVAVMIRPRGGNFVYNDLELRIMEEDILRAVELESDALVLGILTSNNHIDTEAIEQLLPATQGLPLVFHMAFDVIPKSDQKKAIDQLVALGFTRILLHGSSNGEPIIENIKHIKALVEYANNRIEIMVGGGVTAENYQYICQETGVRQAHGTRITQ

SEQ ID NO: 11763 - protein, 102 aa, Streptococcus agalactiae
TTGAATACCATTGCAAATTGGATTTTATTTCTGAGAGCAGGTTATAAAAGATGGTATGCTCTTATTCCGGTTCTTTCAGGTTTTACAAAACATGAAAGAACT

SEQ ID NO: 11764 - protein, 34 aa, Streptococcus agalactiae
MNTIANWILFLRAGYKRWYALIPVLSGFTKHERT

SEQ ID NO: 11765 - protein, 861 aa, Streptococcus agalactiae
ATGCAAGTTCAAAAAAGTTTTAAATCAAATACACATTACGGGACACTCTATCTAGTCCCAACTCCAATTGGTAATCTAGATGATATGACTTTTCGTGCCATTAGGATTTTAAGAGAAGTTGATTTTATTTGTGCAGAGGATACACGAAATACGGGACTTTTACTCAAGCACTTTGATATTACTACTAAACAAATTAGTTTTCACGAACACAATGCTTATGATAAAATCTCTGGGTTAATTGATTTGTTAAAAGAAGGGAGATCTTTAGCCCAAGTATCTGATGCAGGAATGCCCTCTATTTCTGACCCAGGACATGACCTTGTCAAGGCTGCTATTGAAGGGGATATCCCGGTCGTATCTATACCAGGAGCTAGCGCTGGTATTACTGCTCTCATCGCTTCAGGTTTAGCTCCACAACCTCATATTTTTTATGGCTTCTTACCGCGTAAGCAAGGTCAACAAATAACTTTTTTTGAAACAAAGAAAGATTACCCTGAAACACAAATCTTTTATGAGTCACCGTTTCGAGTCTCTGATACGCTAAAACACATGAAAGAGATTTATGGAGATCGCCAAGTTGTTTTAGTACGCGAATTGACGAAACTCTATGAAGAGTATCAAAGAGGAACCATTAGTCAACTTTTAGGGCATATTGAAAAGGTCCCTCTCAAAGGTGAATGCTTAATTATTGTTGATGGTAAGAGAGATACTGAGCGAGTGAAAGACAGTAGCCAACAAGATCCACTAGTATTAGTAAAAGAATATATCGCTAATGGCGATAAAACTAATCAAGCGATAAAAAAAGTAGCAAAAGAACTTAATCTCAATAGACAAGAACTCTACGCTAGTTTCCATGATTTA

SEQ ID NO: 11766 - protein, 287 aa, Streptococcus agalactiae
MQVQKSFKSNTHYGTLYLVPTPIGNLDDMTFRAIRILREVDFICAEDTRNTGLLLKHFDITTKQISFHEHNAYDKISGLIDLLKEGRSLAQVSDAGMPSISDPGHDLVKAAIEGDIPVVSIPGASAGITALIASGLAPQPHIFYGFLPRKQGQQITFFETKKDYPETQIFYESPFRVSDTLKHMKEIYGDRQVVLVRELTKLYEEYQRGTISQLLGHIEKVPLKGECLIIVDGKRDTERVKDSSQQDPLVLVKEYIANGDKTNQAIKKVAKELNLNRQELYASFHDL

SEQ ID NO: 11767 - protein, 324 aa, Streptococcus agalactiae
ATGGATAAAAAAGACTTGTTTGATGCCTTTGATGATTTTTCACAAAATTTATTAGTTGGGTTGTCTGAAATTGAGACTATGAAAAAACAAATCCAAAAATTATTGGAGGAGAATACTGTTCTACGTATTGAAAATGGTAAACTTCGTGAGCGTCTGAGCGTTATTGAAGCAGAAACAGAAACTGCAGTTAAAAATTCTAAACAAGGAAGAGAACTACTCGAAGGAATTTACAATGATGGCTTTCACATTTGTAATACTTTCTATGGTCAACGTCGTGAAAATGACGAAGAATGTGCTTTTTGTATTGAATTATTATATAGAGAT

SEQ ID NO: 11768 - protein, 108 aa, Streptococcus agalactiae; identical to SEQ ID NO: 2894

SEQ ID NO: 11769 - protein, 861 aa, Streptococcus agalactiae
ATGGATTTAAAGCGAACACAACCCAAATTGCTGGAAAAGTTTAATACTATTTTACAGTCAGATAGGATGAGTCATGCCTATCTTTTTTCGGGAAATTTTGCAAGTCTAGATATGGCACTTTATTTAGCACAAAGTCAGTTCTGTGAAAAGCGCCAGAGTGGTTTACCATGCCAAAAGTGTAGAGCTTGTCGTTTAATCGCTAATGGAGAATTTTCAGATGTTAAAATCATAGAACCACAGGGGCAACTTATTAAGACAGAGACTATAAAAGAGCTGACTAAAGATTTTTCAAGATCAGGTTTTGAAGGGAAATCACAGGTCTTTATCATCAAAGATTGCGAAAAAATGCATGTCAATGCAGCCAACAGCCTTTTGAAATTTATTGAAGAACCTCAAAGTTCATCTTATGTCATCTTATTGACTAATGATGAAAACAATGTTTTGCCAACAATTAAGAGTAGAACGCAAATTTTTCGTTTTCCAAAACAATTGGACATGTTGGTTCATCAAGCTGAACAAGCAGGATTGCTAAAATCACAAGCTAGCTTATTAGCTCAAGTAGCAGACGATCCTAAACATTTAGAAATATTGTTGGCTAACAAAAAGTTATTAGATTACTTGAATTTAAGTCAACAGTTTGTGACGACCTTGGCAAAAGATAGGCAAACTGCTTATTTAGAAGTATCTCGCTTGACATCGCAAGTTGTAGATAAAAATGATCAGGCATTTGTTTTTCAATGGCTGACAATAATGCTGGCTAAAGAAGGCCAACTTTATGATTTAGAAAATACTTATAGAGCTCAGCAAATGTGGAAGAGCAATGTTAGTTTTCAAAATAGTTTAGAGTATATGGTGCTTTCT

SEQ ID NO: 11770 - protein, 287 aa, Streptococcus agalactiae
MDLKRTQPKLLEKFNTILQSDRMSHAYLFSGNFASLDMALYLAQSQFCEKRQSGLPCQKCRACRLIANGEFSDVKIIEPQGQLIKTETIKELTKDFSRSGFEGKSQVFIIKDCEKMHVNAANSLLKFIEEPQSSSYVILLTNDENNVLPTIKSRTQIFRFPKQLDMLVHQAEQAGLLKSQASLLAQVADDPKHLEILLANKKLLDYLNLSQQFVTTLAKDRQTAYLEVSRLTSQVVDKNDQAFVFQWLTIMLAKEGQLYDLENTYRAQQMWKSNVSFQNSLEYMVLS

SEQ ID NO: 11771 - DNA, 633 bp, Streptococcus agalactiae
atgaaaaaaggactaatgatttcttttgagggcccagatggtgcgggtaaaacaaccgttttagaagctgttgtacccttgctcagagaaaaattatcacaagatattctcaccaccagagagcctggtggcgtaactatttcagaagaaattcgtcatattattttagatgttaaacacacgcaaatggataaaaaaacagagctattgctttacatggctgctcgacgccaacatctagtggaaaaggtactcccagctctagaagaagggaaaatagtcctaatggatcgttttattgatagttctgttgcctatcagggatcaggaagaggattagataagtcacatataaaatggcttaatgactatgcgactgatagtcataaacctgatttaactttatattttgatgttccttctgaagtaggtttagagcgtattcaaaaaagtgttcaaagggagataaatcgtctagatctcgagcaattagatatgcatcaacgcgtccgtcaaggttaccttgaattggcagatttagagccaaaccgcattgtgacgattgatgcctcccaacagctagatgaagtaatagctgagacattctctattattttagatcgtatcaaccaa

SEQ ID NO: 11772 - protein, 211 aa, Streptococcus agalactiae
MKKGLMISFEGPDGAGKTTVLEAVVPLLREKLSQDILTTREPGGVTISEEIRHIILDVKHTQMDKKTELLLYMAARRQHLVEKVLPALEEGKIVLMDRFIDSSVAYQGSGRGLDKSHIKWLNDYATDSHKPDLTLYFDVPSEVGLERIQKSVQREINRLDLEQLDMHQRVRQGYLELADLEPNRIVTIDASQQLDEVIAETFSIILDRINQ

SEQ ID NO: 11773 - DNA, 657 bp, Streptococcus agalactiae
atgccagtgaaagattttatgacaaaaaaattagtttatgtctctccagacactacagttgcagaagctgctgatttattgagagaacaccacttaaggcgtttgccagttgttgaaaatgatcagctagtggggttagtgacagaagggacaatggcagaagcacaaccttctaaagcaaccagtctttctatatatgagatgaactatcttcttaataagacaaaaattcgagatattatgattaaagatattgtgactgtttcacagtatgctagccttgaggacgctatttatttgatgatgtctcgaaagatcggtgttttaccagtagttgataatggacaactttatgggattgtcacggatagggatgtttttaaagcctttcttgaaattgcggggtatggtcaagaaggttatcgcttggttatattagctgatgaggggataggggtactatcaaaagtcctaaatcgtctttctagtgcaaatttaagtgttaaacgtttagtcattattgaacgaaaagcaggtaagaaagcggtcgagatacaactagaaggatacgctgacaaggatgttttaaaacaagaactagtatttgatgatgttattgtggaaactttagaaaagaccgtgaaaaaaccactttct

SEQ ID NO: 11774 - protein, 219 aa, Streptococcus agalactiae
MPVKDFMTKKLVYVSPDTTVAEAADLLREHHLRRLPVVENDQLVGLVTEGTMAEAQPSKATSLSIYEMNYLLNKTKIRDIMIKDIVTVSQYASLEDAIYLMMSRKIGVLPVVDNGQLYGIVTDRDVFKAFLEIAGYGQEGYRLVILADEGIGVLSKVLNRLSSANLSVKRLVIIERKAGKKAVEIQLEGYADKDVLKQELVFDDVIVETLEKTVKKPLS

SEQ ID NO: 11775 - DNA, 708 bp, Streptococcus agalactiae
atgaccatgttgaaagtagaaaatctatctattcattatggtgttattcaagcggtgaatgatgtctcgtttgaagttaaccaaggtgaggttataaccttaattggagccaatggtgcaggaaagacatcaattttgaggacaatttctggtttagtaagaccaagtcaggcttctatttcttttatggggaaacctatacataagttagcagctagaaaaattgttggcaatggtttagctcaggttccagaagggcgccacgttttctcaagtttgtctgttatggaaaatttagaaatgggagcctttcttcaaaaggatcgtgaacaaaatcaaaaaatgttaaaaaaagtgtttgatcgttttcctcgcttagaagaacgtaaaaaccaagatgcagcaaccttatcaggtggtgagcagcaaatgctcgctatggggcgtgcattgatgagtcgtcctaaattattacttttagatgaaccgtcaatgggcctagctccaatttttattcaagaaatttttaatatcattgaagacatcaaaaaacaagggactacagttcttttagttgaacaaaatgcaaataaagctctgacaattgctgataaagcatatgttctagagactgggaaggttgttttatcagggacaggtaaggaattactagtttcagatcaagttcgtaaagcttacttaggtgga

SEQ ID NO: 11776 - protein, 236 aa, Streptococcus agalactiae
MTMLKVENLSIHYGVIQAVNDVSFEVNQGEVITLIGANGAGKTSILRTISGLVRPSQASISFMGKPIHKLAARKIVGNGLAQVPEGRHVFSSLSVMENLEMGAFLQKDREQNQKMLKKVFDRFPRLEERKNQDAATLSGGEQQMLAMGRALMSRPKLLLLDEPSMGLAPIFIQEIFNIIEDIKKQGTTVLLVEQNANKALTIADKAYVLETGKVVLSGTGKELLVSDQVRKAYLGG

SEQ ID NO: 11777 - DNA, 762 bp, Streptococcus agalactiae
atggcacttcttgaagtaaaaaatttaagtaaacatttcggtggcctaactgctgtaggtgatgtttcgatgaaattacataaaggtgaattaattggcttaatcggccccaacggtgcgggtaagacaacgctttttaatctcttaacaggagtataccttcctagtaaagggacaatatcacttgatggtaagatattaaatgggaggaaaccagctaaaatagcttctttaggtttaggtagaacttttcaaaatatccgactttttaaaaatatgactgttttagacaatgtactagtaggactcagtaatcatcacttatcacatcctattgctagttttttacgattacccaaatactatcatagtgaaaaagccttaaggaaaaaggcactagagctattagagatttttggtttgaaagcatatcaagatgctcttgccaagaacctcccttatggaaaacaacggcgtttagaaattgttcgtgctttagtaacagaaccaaaaatattgtttttggatgagcccgcggcaggaatgaatcctcaagaaactgcagaattgacgcagttaattagtcaaataaagagtgattttgatattactattatgctgattgaacatgatatgaacttggttatgcaagtaacagagagaatttatgtattggaatatggtcgtctgattgctcacgggacacctgaagaaattaaaaataataaacgtgttatagaagcatacttggggggtgagtta

SEQ ID NO: 11778 - protein, 254 aa, Streptococcus agalactiae
MALLEVKNLSKHFGGLTAVGDVSMKLHKGELIGLIGPNGAGKTTLFNLLTGVYLPSKGTISLDGKILNGRKPAKIASLGLGRTFQNIRLFKNMTVLDNVLVGLSNHHLSHPIASFLRLPKYYHSEKALRKKALELLEIFGLKAYQDALAKNLPYGKQRRLEIVRALVTEPKILFLDEPAAGMNPQETAELTQLISQIKSDFDITIMLIEHDMNLVMQVTERIYVLEYGRLIAHGTPEEIKNNKRVIEAYLGGEL

SEQ ID NO: 11779 - DNA, 951 bp, Streptococcus agalactiae
atgaaagaaaatatgaaatcaattttatcttggttagctatagtagtgttaggttatctcttgattagcgtgctaatatctatgggtatatttaacctctatcatattcaaattattgaaacaattgggattaatgttattttagcagttggtttgaacctaattgtaggttgttcgggacagttttcactaggacatgcaggtttcatggctattggcgcttatgcagttgctattatcggcgttaaaatgccaacttatgtaggttttttgatagctatacttgttggaactcttgttgcaggaggtattgccttaggtgtaggaattcctactttgagactaaaaggtgattatttagctatagctactttaggtgttgctgagattatccgtattttgttggttaatggaggtgatattacgaatggtgctgcgggtatcatggggattccgccttttacaacctggtctttagtttatggggtggcagttgtgagtcttatccttgcaatgaattttttgcgtagtcccttagggcgtaatacaattgctatacgagaagatgaaattgcagcagagtctatgggtgtggatacaacaaaagtgaaagtaattgtttttatttttggagctattttagcttctatcgctggtagtttacaggctggctacgttggaactgttatgccaaaagacttttcatttatgatgtctgtcaatgttttaattattgttgttttaggtggtttaggttcaatgacagggacagttttagcagcaattttattaggattattgaatatgttactacaagactacgcttctgttcgaatgattatctatgctttagccctgattttaattatgatttttagacctagcggtttattaggaacgaaagagttaactctatctcatctatttcgtaagacgagtaagggaggcatt

SEQ ID NO: 11780 - protein, 317 aa, Streptococcus agalactiae
MKENMKSILSWLAIVVLGYLLISVLISMGIFNLYHIQIIETIGINVILAVGLNLIVGCSGQFSLGHAGFMAIGAYAVAIIGVKMPTYVGFLIAILVGTLVAGGIALGVGIPTLRLKGDYLAIATLGVAEIIRILLVNGGDITNGAAGIMGIPPFTTWSLVYGVAVVSLILAMNFLRSPLGRNTIAIREDEIAAESMGVDTTKVKVIVFIFGAILASIAGSLQAGYVGTVMPKDFSFMMSVNVLIIVVLGGLGSMTGTVLAAILLGLLNMLLQDYASVRMIIYALALILIMIFRPSGLLGTKELTLSHLFRKTSKGGI

SEQ ID NO: 11781 - protein, 798 aa, Streptococcus agalactiae; identical to SEQ ID NO: 7547

SEQ ID NO: 11782 - protein, 266 aa, Streptococcus agalactiae; identical to SEQ ID NO: 7548

SEQ ID NO: 11783 - protein, 1164 aa, Streptococcus agalactiae
ATGGAAAAGAGACTTAGTTTAGGAGCTCTTGTTTTAGCTAGTACAGTTCTTTTAGCAGCATGTGGAAATGTCGGAGGAGGAGCATCTTCGACAGGAACAAAAATAGGGAAAGATATTAAGGTAGGGTATAACTGGGAATTATCAGGAAACGTTTCTTCGTATGGAAATTCAATGAAGAATGGAGCTGACTTAGCAGTAAAAGAAATTAATGCTGCTGGAGGGGTTGGCGGCAAGAAGTTAAAAGTCCTATCACAGGATAATAAATCAGAAAATGCAGAGGCAGCAACGGTTGCCACAAACTTGGTTACCAAAGGAGCTAATGTCATTATCGGACCAGCAACATCGGGTGCAGCTGCATCTTCAACTCCAAAAGTAAATGCAGCAGCAGTTCCAATGATTGCACCTGCTGCGACACAAGACAATTTAGTCTATGGTTCTGATGGAAAAACCTTAAATCAGTATTTCTTCCGAGCTACTTTTGTCGATAATTATCAAGGAAAGCTATTGTCTCAGTATGCTACAGACAACCTTAAAGCTAAAAAAGTTGTTCTATTTTATGATAATTCATCAGATTACTCAAAGGGGGTAGCAAAATCATTTAAGGAAAGTTATAGTGGAAAAATTGTTGATAGCATGACATTCTCCGCTGGTGATACTGATTTCCAAGCGTCATTGACTAAGTTGAAAGGGAAAGAATATGATGCTATTGTGATGCCAGGTTACTATACCGAGACAGGATTAATAGTTAAGCAAGCGCGTGATTTAGGTATCTCTAAACCGGTTCTTGGGCCTGATGGTTTTGATAGTCCGAAATTTGTGCAATCGGCAACACCTGTGGGAGCTTCAAACGTTTATTATTTGACAGGTTTCACTACACAAGGATCAACCAAAGCTAAAGCTTTCCATGATCATTACGTTAAGGCATATGGTGAAGAACCATCCATGTTCTCGGCTTTATCATACGATGCCGTGTATATGGCAGCTAAATCTGCTAAAGGAGCTAAAACTTCAATTGATCTTAAAAAAGCTTTAGCTAAGCTGAAAGATTTTAAAGGTGTGACAGGGAAAATGTCTATTGATAAAAATCATAATGTTGTTAAATCAGCTTACGTTGTCAAATTAGACGATGGAAAAACAAGTAGCGTTAACATTATTTCAGCAAAA

SEQ ID NO: 11784 - protein, 388 aa, Streptococcus agalactiae
MEKRLSLGALVLASTVLLAACGNVGGGASSTGTKIGKDIKVGYNWELSGNVSSYGNSMKNGADLAVKEINAAGGVGGKKLKVLSQDNKSENAEAATVATNLVTKGANVIIGPATSGAAASSTPKVNAAAVPMIAPAATQDNLVYGSDGKTLNQYFFRATFVDNYQGKLLSQYATDNLKAKKVVLFYDNSSDYSKGVAKSFKESYSGKIVDSMTFSAGDTDFQASLTKLKGKEYDAIVMPGYYTETGLIVKQARDLGISKPVLGPDGFDSPKFVQSATPVGASNVYYLTGFTTQGSTKAKAFHDHYVKAYGEEPSMFSALSYDAVYMAAKSAKGAKTSIDLKKALAKLKDFKGVTGKMSIDKNHNVVKSAYVVKLDDGKTSSVNIISAK

SEQ ID NO: 11785 - protein, 302 aa, Streptococcus agalactiae
TTGTTGGAATTATGTTATAATCTTAGTAATTACAGATATGACGCAGAAAGGAAAAAATTATTGAATAAACAAGAGCGTTTAGGAATGAGCGTTTATCTTTACTATAATCGTGACGCTCGTAAATTATATAAATACGGAGATGTTCATTATCATTCTCGTAGATTAAGATATCTAGTCATTTATGTTAATAAAGGGATATTGTTAGCGTTAGTAAAGAGATAAAACATTTAAAATTTGTTAAGGATGTTCGGTTATCAGCAATTGATGATATTGATCAGGATTTTGTTGGAAACTTATATCGC

SEQ ID NO: 11786 - protein, 101 aa, Streptococcus agalactiae; identical to SEQ ID NO: 2918
